United States Patent Application Publication US 2007/0072175 A1 - sequence listing, part 12

SEQ ID NO: 31064 - DNA, 2526 bp, Macaca Mulatta
  misc_feature (1)...(2526): n = A,T,C or G
ccctaccgctcctgtcccgccgggcagcggtggcggccttggacttcgctgtctttcctcgcggagacannnnnnnnnnnnnnnnnnnnnnnnnnnnnnnnnnnnnnnnnnnnnnnnnnnnnnnnnnnnnnnnnnnnnnnnnnnnnnnnnnnnnnnnnnnnnnnnnnnnnnnnnnnnnnnnnnnnnnnnnnnnnnnnnnnnnnnnnnnnnnnnnnnnnnnnnnnnnnnnnnnnnnnnnnnnnnnnnnnnnnnnnnnnnnnnnnnnnnnnnnnnnnnnnnnnnnnnnnnnnnnnnnnnnnnnnnnnnnnnnnnnnnnnnnnnnnnnnnnnnnnnnnnnnnnnnnnnnnnnnnnnnnnnnnnnnnnnnnnnnnnnnnnnnnnnnnnnnnnnnnnnnnnnnnnnnnnnnnnnnnnnnnnnnnnnnnnnnnnnnnnnnnnnnnnnnnnnnnnnnnnnnnnnnnnnnnnnnnnnnnnnnnnnnnnnnnnnnnnnnnnnnnnnnnnnnnnnnnnnnnnnnnnnnnnnnnnnnnnnnnnnnnnnnnnnnnnnnnnnnnnnnnnnnnnnnnnnnnnnnnnnnnnnnnnnnnnnnnnnnnnnnnnngatcgtggtggagaagacccaaaccagaaagtaatccatggggttattaactcctttgttcatgttgaacagtataagaaaaaattccccttaaagnagttttatcaggaaatctttgagtctccctttctgactgaaacaggagagtattataaacaagaagcttcaaatttattacaagaatcaaactgctcacagtatatggaaaaggtnnnaggttctaggtagactaaaagatgaagaaattcgatgtcgaaaatacctacatccaagttcatatactaaagtgattcatgaatgtcagcaacgaatggtagcagaccacttacagtttttacatgcagaatgtcataatatcattcgacaagannnnnnnnnnnnnnnnnnnnnnnnnnnnnnnnnnnnnnnnnnnnnnnnnnnnnnnnnnnnnnnnnnnnnnnnnnnnnnnnnnnnnnnnnnnnnnnnnnnnnnnnnnnnnnnnnnnnnnnnnnnnnnnnnnnnnnnnnnnnnnnnnnnnnnnnnnnnnnnnnnnnnnnnnnnnnnnnnnnnnnnnnnnnnnnnnnnnnnnnnnnnnnnnnnnnnnnnnnnnnnnnnnnnnnnnnnnnnnnnnnnnnnnnnnnnnnnnnnnnnnnnnnnnnnnnnnnnnnnnnnnnnnnnnnnnnnnnnnnnnnnnnnnnnnnnnnnnnnnnnnnnnnnnnnnnnnnnnnnnnnnnnnnnnnnnnnnnnnnnnnnnnnnnnnnnnnnnnnnnnnnnnnnnnnnnnnnnnnnnnnnnnnnnnnnnnnnnnnnnnnnnnnnnnnnnnnnnnnnnnnnnnnnnnnnnnnnnnnnnnnnnnnnnnnnnnnnnnnnnnnnnnnnnnnnnnnnnnnnnnnnnnnnnnnnnnnnnnnnnnnnnnnnnnnnnnnnnnnnnnnnnnnnnnnnnnnnnnnnnnnnnnnnnnnnnnnnnnnnnnnnnnnnnnnnnnnnnnnnnnnnnnnnnnnnnnnnnnnnnnnnnnnnnnnnnnnnnnnnnnnnnnnnnnnnnnnnnnnnnnnnnnnnnnnnnnnnnnnnnnnnnnnnnnnnnnnnnnnnnnnnnnnnnnnnnnnnnnnnnnnnnnnnnnnnnnnnnnnnnnnnnnnnnntttgaattattttatagccaacatttcagtggaaggaaacttacatggttacattatctgtgtacaggtnnnnnnnnnnnnnnnnnnnnnnnnnnnnnnnnnnnnnnnnnnnnnnnnnnnnnnnnnnnnnnnnnnnnnnnnnnnnnnnnnnnnnnnnnnnnnnnnnnnnnnnnnnnnnnnnnnnnnnnnnnnnnnnnnnnnnnnnnnnnnnnnnnnnnnnnnnnnnnnnnnnnnnnnnnnnnnnnnnnnnnnnnnnnnnnnnnnnnnnnnnnnnnnnnnnnnnnnnnnnnnnnnnnnnnnnnnnnnnnnnnnnnnnnnnnnnnnnnnnnnnnnnnnnnnnnnnnnnnnnnnnnnnnnnnnnnnnnnnnnnnnnnnnnnnnnnnnnnnnnnnnnnnnnnnnnnnnnnnnnnnnnnnnnnnnnnnnnnnnnnnnnnnnnnnnnnnnnnnnnnnnnnnnnnnnnnnnnnnnnnnnnnnnnnnnnnnnnnnaggtgattagtcagtcaagagctaggtttaatcccagtatcagcatgattaagaagtgtattgaagttctgatagacaaacagtacatcgaacgcagccaggcatcggcagatgaatacagctacgtcgcgtgatgtcgctctcctccagcgtggtgtgagaagatcattgccatcaccatttggagtattcctgtgggaaaaagcagngcctgtgcctccataatttggtcatttggcagcccctgttttcttcttatgcaacatcaccagtgccacgtcatgagcgtcaaagaaaaggcctagagatatttcaagctcatgt

SEQ ID NO: 31065 - DNA, 1028 bp, Macaca Mulatta
  misc_feature (1)...(1028): n = A,T,C or G
gggaaatgcacggcttgataccccagatataaacattgttctaaagcaggatatggcaacagaacatcctgaagcagaggtggtaaaacaggaaagcagcatgtctgaaagtaaagtgttgagtgaagtggggaaacaggacagcagctctgctagcttggctagtgctggagaaagtaccgggaagaaggaggtggctgagaagagccagatcaacctcattgataagaaatggaagcccctgcaaggtgtggggaacctggcagcacctactgctgccacatccagtgctgtggaaattaaggcattgaccactgtgcctgaaatgaaaccagcgggccttgagaatagaaatttaaagcaaaaataaagttacggcctgagtcctctcatttgatgaagtaaagaaagacagtcgcgctttaaacccgttagacccgagaaaattcaggcagaggtacaaagttgaatggaacccataaccccctaaattcgggggaatgaaaaggaataggccccaggtatcccaatggaaaggtaccctgaaggtataagtaaatcctctcggtaaaaggatttaagagattccttggaagagatagcacccagaaagaattccacataggaagnactccactgaagaaaacctaaagcgggggttgacttggtgtccgcctccccttcatctcaagtttcctaccctctcattagataacaagatcactccaattcctgcaatagaagcatcgtccatcctccaaaaatatctcgttccctctttttatcgcgggaagtctaacgagaaggagtgcctgaggactataattataaaaatagttgtctccggatagctctagcaaaggggtattggtgctgtccgctatacaattaaagaggccgctgcgactgccacggttctgaacctatttagatatcaaacgagtgccataatagaaggggaaagattactcaaaaagtaatttctctttatgtgaacgatactacacatcctcagagaggagggaagt

SEQ ID NO: 31066 - DNA, 342 bp, Macaca Mulatta
agactggaacgtgagaaacgagcccgcatcaaagcacggaaggaaaatttagagagaaagaaagcaaaaattcttctaaaaaagtttacacatcttgctgaagcgcagaagtcaagtcttgtctaagatgtctgaactcttaaatttaccattttgtttttcttgaatagtctgtgtacaagagtaaatatgttaagtggtttataaagaaattctgtttttagtcaagtgactttaatcagttgttctaagtgtgaatatggcatgctaattagctaatttggtagaagctaatttacctctaaaaatcaggtataaagttcggattaaattcccacttta

SEQ ID NO: 31067 - DNA, 468 bp, Macaca Mulatta
ccccgctctggggaaggaactgttctcagaggctccaatttatattcgtctgggggttcatggaaaagccagaacctgctgttttcagggtaggtggtttttatatatagtgtgtacataataaaacaaaggtattttacttctctgatgattttgtattttctgctgtcagccaaaccctgggactgccccagcgaaaagcacctctaccggggctgagaggccatcccgccttcagcaagtgctacattcacatgctcttctaggcacggccccggcctcctcctgaccgctgtctgcccgtttcccacacggcagttcctctcacctctacagaagctcgccaggaaccctgggctgcttggaaggggcctgccttgcccacgctagtcccacccctaggctgggggctggtggggcctagcctgaggccagctgtggctttactggtggagggtaaggagctcg

SEQ ID NO: 31068 - DNA, 1213 bp, Macaca Mulatta
  misc_feature (1)...(1213): n = A,T,C or G
aagataatggtggaaccatggatctatttggaggtgcagatgatatctcttcagggagtgatggagaagacaaaccacctactccaggacagcctgttatgaaaatggattgcctcaggatcaacaggaagaggagccaattcctgagaccagaatagaagtagaaatacccaaagtaaacactgatttaggaaacgacttatattttgttaaattgcccaactttctcagtgtagagcccagnnnnnnnnnnnnnnnnnnnnnnnnnnnnnnnnnnnnnnnnnnnnnnnnnnnnnnnnnnnnnnnnnnnnnnnnnnnnnnnnnnnnnnnnnnnnnnnnnnnnnnnnnnnnnnnnnnnnnnnnnnnnnnnnnnnnnnnnnnnnnnnnnnnnnnnnnnnnnnnnnnnnnnnnnnnnnnnnnnnnnnnnnnnnnnnnnnnnnnnnnnnnnnnnnnnnnnnnnnnnnnnnnnnnnnnnnnnnnnnnnnnnnnnnnnnnnnnnnnnnnnnnnnnnnnnnnnnnnnnnnnnnnnnnnnnnnnnnnnnnnnnnnnnnnnnnagacctcactctacggacagtgccacacatagaaagatgactctgtcacttgcagataggtgttcaaagacacagaagattagaatcttgccaatggctggtcgtgatcctgaatgccaacgcacagaaatgattaagattgaagaagaacgtttgagggcttccatacgtagggaatctcagcagcgccgaatgagagagaaacagcaccagcgggggctgagtgccagttacctggaacctgatcgatatgatgaggaggaggaaggcgaggagtccatcagcttggctgccattaaaaaccgatataaagggggcattcgagaggaacgagccagaatctattcatcagacagtgatgaggggtcagaagaagataaggctcaaagattactcaaagcaaagaaacttaccagtgatgaggagggtgaaccttctggaaagagaaaagcagaagatgatgataaagcaaataaaaagcataagaagtacgtgatcagtgatgaagaagaagacgaagatgattgaagtatgaaatatgaaaatattttatatattttattgtacagttataaatatgtaaacatgagttattttgattgaaatgaatcgatttgcttttgtgtaattttaattgtaataaaacaatttaaaagca

SEQ ID NO: 31069 - DNA, 514 bp, Macaca Mulatta
agtgaaataatagaatgagctcccattccaaagctttattaccagtggcgttgttgcatgtttgaaatgaggtctgttttaaagtggcaatctcagatgcagtttggagagtcggatatttctccttgaatatctttcgataaacaacaaggtggtgtgatcttaatatatttgaaaaaaaacttcattctcgtgagtcatttaaatgtgtacaatgtacacactggtacttagagtttctgttttgattcttttttaataaactactctttgatttaattgtttggtgtaagcatttttactaattctttatttcttacacatttttcttactgttgaagacaaaaatgacccacaaacgccattggataaatagaattgctcaaaatagtttttaacccaatgtaaagtttttatggtcatgtgttactccagtattaacagagtctggatagaagccagttgaccagttgactatcaaggttttatacctagcaacatgtaaaacatgact

SEQ ID NO: 31070 - DNA, 829 bp, Macaca Mulatta
taatcacttctcccttgcccttctgttttaccagctgtgcctccctacatatgactcctatcattaggtgcacaggatgctgcagctggccatcagcgagggttgcgagggctttggcatgctctgaccgctctcctgtcatccacttggctcccatgctctctggagcttctgggcacaagttacagacatcataaccactgatcctaacacacataaccatcagccagaagatgccgcatgctcccttgtgtctggaggattgtgtcacctacaagccttgtctttacctcacctgctctctgcccatatctaccacaggccactttggcatggtatgtaagctgagctcttcattctgtcatgagaagaggaccatgctgctgtcatttatttggtcctttgaagatctcagtagctgagggagatggcacacggggctcagccctgttgggaaactagtgtggagacccttaaatctacactgctccaaaactccctctgctgatactccttggagacaccctctttggccctcactacttgaccagactggtacttgagtccttctcatgggtggggtgattgcctcttctcatcaggagccaggagagagggacagataggaggtggcccataggagcagtccctctgcacaatggtaggcataggccatggcactggactgcctctaatgaggactgataaaaagaatctctttttgtggtgtcagaactggaaaaagcactttcccttcgggcatttctggaaacgattattaatccacaaagaagaactctctaagctttttcttgaattgtagccagtg

SEQ ID NO: 31071 - DNA, 1203 bp, Macaca Mulatta
  misc_feature (1)...(1203): n = A,T,C or G
ccatgaatgacacagtcacagtagagaggaagcattttgaggaaggtagtacacctacacntattgatgatattcagataacatctagttttacagatgacagcagtgtgatgaagttcttactccagctgtgttcccatagactgtcttgcaaacaccgaactgaaaaatccgaatctgaccagcctgtttccctggataactttactcaatccttgctaaacactngggatccaaaagtcccagacgtagatatcaaagaagatcaagatacctcaaagaattctaagctaaactcacaccagaaagtaacacttcttcaattgctacttggccataagaatgaagaaaatgtagaaaaaaacaccagccctcagggagtacacaatgatgtgaccaagttcagtacacaaaattatgcaaggacttctgtgatagaaagccccagtacaaatcggaccacgccagtgagcactccaccattacttacgtcagccaaagcagagtctcccatcaatctctctcaacactctctggtcatcaaatggaattccccaccgtatgcctgcagtactcagtctgaaaagactgcatctaaccactcaatggaccttacaaaaagcaaagacacgccaggagagaaaccagcccaaaacgaaggtgcacaaaactctgcaactttcagtgccagtaagctgttacaaaatttagcacaatgtggcctgcagtcttccatgtcagtggaagagcagagacccagcaaacagctgttaactgtaaacacagataaactgataggtgtgattgatagattaaatagccctttgctcgcaaataaaacgaatgcagctgaagaaagtcaagcgtttagtagtcaaccaacaggtcctgaaccggggctttccggttctgaaatagaaaagctacttgaaagacgtaccgtcctccagttgctcctgggaaaccccaacaaaggcaaaaatgaaaagaaagagaaaactcccttaagagatgaaagtactcaggaacactcagagagagctttaagtgaacaaatattgatggtgaaaataaaatctgagccttgtgatgacttacaaattcctaatacaaatgtgcacttgagccatgatgccaagagtgctccattcttgggtatggctcctgctgtgcagagaagcgcacctgccttaccagtgtccg

SEQ ID NO: 31072 - DNA, 3142 bp, Macaca Mulatta
  misc_feature (1)...(3142): n = A,T,C or G
gggagtggagcaactgctgtggtccaagcagcttattgtgcccctaaaaaggagaaagtggcaatcaaacggataaaccttgagaaatgtcaaactagcatggatgaactcctgngaaagaaattcaagccatgagtcagtgccatcatccctatattgtatcttactacacgtctttttgtggtaaaagatgagctgtggcttgtcatgaagctgctaagtggnnnnnnnnnnnnnnnnnnnnnnnnnnnnnnnnnnnnnnnnnnnnnnnnnnnnnnnnnnnnnnnnnnnnnnnnnnnnnnnnnnnnnnnnnnnnnnnnnnnnnnnnnnnnnnnnnnnnnnnnnnnnnnnnnnnnnnnnnnnnnnnnnnnnnnnnnnnnnnnnnnnnnnnnnnnnnnnnnnnnnnnnnnnnnnnnnnnnnnnnnnnnnnnnnnnnnnnnnnnnnnnnnnnnnnnnnnnnnnnnnnnnnnnnnnnnnnnnnnnnnnnnctttgttggcactccttgttggatggcacctgaagttatggaacaggtncaggtccgaggttatgatttcaaagctgatatttggagttttggaattacagcaattgaattggccacgggggcagctccttaccataaatatccaccaatgaaggtnnnnatgctgacactgcagaatgatcctccttctttggaaactggtgttcaagataaagaaatgctgaaaaaatatggaaaatcatttagaaaaatgatttcattgtgccttcaaaaagatccagaaaaaagnnnnnnnnnnnnnnnnnnnnnnnnnnnnnnnnnnnnnnnnnnnnnnnnnnnnnnnnnnnnnnnnnnnnnnnnnnnnnnnnnnnnnnnnnnnnnnnnnnnnnnnnnnnnnnnnnnnnnnnnnnnnnnnnnnnnnnnnnnnnnnnnnnnnnnnnnnnnnnnnnnnnnnnnnnnnnnnnnnnnnnnnnnnnnnnnnnnnnnnnnnnnnnnnnnnnnnnnnnnnnnnnnnnnnnnnnnnnnnnnnnnnnnnnnnnnnnnnnnnnnnnnnnnnnnnnagctttttccaacaactgatcctgtgggtactttgctccaagttccagaacagatctccgctcatctacctcagccagctgggcagatgcctacacagccaactcaagtctctctcccacccaccgcagagccagcaaaaacagcacaggnnnnnnnnnnnnnnnnnnnnnnnnnnnnnnnnnnnnnnnnnnnnnnnnnnnnnnnnnnnnnnnnnnnnnnnnnnnnnnnnnnnnnnnnnnnnnnnnnnnnnnnnnnnnnnnnnnnnnnnnnnnnnnnnnnnnnnnnnnnnnnnnnnnnnnnnnnnnnnnnnnnnnnnnnnnnnnnnnnnnnnnnnnnnnnnnnnnnnnnnnnnnnnnnnnnnnnnnnnnnnnnnnnnnnnnnnnnnnnnnnnnnnnnnnnnnnnnnnnnnnnnnnnnnnnnnnnnnnnnnnnnnnnnnnnnnnnnnnnnnnnnnnnnnnnnnnnnnnnnnnnnnnnnnnnnnnnnnnnnnnnnnnnnnnnnnnnnnnnnnnnnnnnnnnnnnnnnnnnnnnnnnnnnnnnnnnnnnnnnnnnnnnnnnnnnnnnnnnnnnnnnnnnnnnnnnnnnnnnnnnnnnnnnnnnnnnnnnnnnnnnnnnnnnnnnnnnnnnnnnnnnnnnnnnnnnnnnnnnnnnnnnnnnnnnnnnnnnnnnnnnnnnnnnnnnnnnnnnnnnnnnnnnnnnnnnnnnnnnnnnnnnnnnnnnnnnnnnnnnnnnnnnnnnnnnnnnnnnnnnnnnnnnnnnnnnnnnnnnnnnnnnnnnnnnnnnnnnnnnnnnnnnnnnnnnnnnnnnnnnnnnnnnnnnnnnnnnnnnnnnnnnnnnnnnnnnnnnnnnnnnnnnnnnnnnnnnnnnnnnnnnnnnnnnnnnnnnnnnnnnnnnnnnnnnnnnnnnnnnnnnnnnnnnnnnnnnnnnnnnnnnnnnnnnnnnnnnnnnnnnnnnnnnnnnnnnnnnnnnnnnnnnnnnnnnnnnnnnnnnnnnnnnnnnnnnnnnnnnnnnnnnnnnnnnnnnnnnnnnnnnnnnnnnnnnnnnnnnnnnnnnnnnnnnnnnnnnnnnnnnnnnnnnnnnnnnnnnnnnnnnnnnnnnnnnnnnnnnnnnnnnnnnnnnnnnnnnnnnnnnnnnnnnnnnncaaaacatctgactgtagccgaacttcagccatcggatccttcaaagtggaacttggattgttttacagacaacatcgagtaatggcttgtaaatgtgaatttttgcaagaggtggtttttgaacaggaaaatcataattcatatcattggagaagtatttattttcaaatattaaattgaagaaaaactcaatcctcccatgaaaatcagtttgcctggcctccaagtcatgaggaaatgggtatgcaaggctgagatttctacagcaataaaggagacacacactgggccggagaggcctgccttctgcctgctctcctgcactgaccctttggagggggtctctgtgtgctgaagctaactcaagatggaaagtgaaaccacatgtgccgtgacctttaggttttatgagtagacagtgttcatttgattttctacagaaataatataaattattctttaggtttaaaaagagcactcataatgcaatatgtgaataatcagtgaggttgatttttcttttttcctaccatttcatagtctttgtctaactgctagtaaccctgccgagttttatatatgagtgggatactcaatctggccttaaaaagatacacaaagatgggctgtgggtccctggaaagggggagagttgccctttacagaatcactcgagccctttccagaagtgttggtctgatgaacaaggttgttttaccttattttctcttggaacatatctgaaagccttccccacaaataacttgtcacaccttttgtttcattctgagcctttagttttagtcatgggctttcttcacctgccctaggtgcaaaggcatgttgggaaagagatggatgttggggaggaagaggggatgaatttcagatgggagttgggaggagagtaggtgagaaaatcagacaccaaagttcaatgtcccagcagtct

SEQ ID NO: 31073 - DNA, 252 bp, Macaca Mulatta
agaaaggccttatgagtgcagagagtgtgggaaagcctttagccacaagcatatccttgtcgagcaccagaaaatccacagtggagaaagaccttatgagtgcagcgaatgccagaaggcctttattagaaagtctcacctggttcatcaccagaaaatccacagtgaagagaggcttgtgtgctccatgagtgtggggaattctttagctaaaactccagcctcattaaacgtcagagatttcacaatgga

SEQ ID NO: 31074 - DNA, 141 bp, Macaca Mulatta
tattgaccgagaatttgtggtgatgttttctgtggtggatgaaaatttcagctggtacctagaagacaacattcaagcctactgcttggaaccagagaaagttgacaaagacaacgaagacttccaggagagtaacagaat

SEQ ID NO: 31075 - DNA, 225 bp, Macaca Mulatta
ctgcaggctcaggctttgggagaagcaggagtgccttcaggaggtgaggctcagagcagccgccaaccccaggaccacacagaaggggaggacaaggacgcttccatcccctctgggggcagaggcctgtcccaggagggggccggtccccccacctctgctggtgaaggccgttctgggaatgaagatgctgcccaggagctcctgttgcctgagtcgaaaggg

SEQ ID NO: 31076 - DNA, 808 bp, Macaca Mulatta
  misc_feature (1)...(808): n = A,T,C or G
ggcaacatagtgagactttttctttaccagaaaaaaagctgggggtagtggctcatgcctgtagacccagctactcaagaggctgaggcaggaggatctcttgagcccggaagttagaggctacgatgagctatgattgtaccactgcaacctagcctagatgacagtgagatnnnnnnnnnnnnnnnnnnnnnnnnnnnnnnnggatagttcatgttcagtagggcttataggaaatccaaagtcagtagaagacacagtgactacccactagacaacagaaaatggccctatcttgcagagcactggccggctatgccctattgctaagtggcatgtactaaggaattgttggacttgctgatatgaaagaggatgtatttctaccaattagagccatatgatgagcttgtttgattatatcgctgcaaatgccaaaatgcaatgatatagagaatggaaattctttgaataaaaagtggaaggctaccagagacacccagttaatatcagaatgttaattacatttgtcaatgagaattatgtgttcttagtttttcttatgcatttataactatagaaatacaagaatgtaatgcatttagagtatgatgtaaagaaatatcacaaagtaataacccagtttcacccctgtcgattatagctttccacagttaatttattttcttcctcccttttgaacttcccnnnnnnnnnnnnnnnnnnnnnnnnnngaattctagctctgtttgcccaggctgggaatgcaatgggctgttatccccagccccttttgggaaggctaaag

SEQ ID NO: 31077 - DNA, 1010 bp, Macaca Mulatta
  misc_feature (1)...(1010): n = A,T,C or G
cagacnttcagtcaggaataaactttacatgccattgtagattcacactggagagaaccattncagtggcagtgagtgtgcaagacnttcagtcgaaattcagncctgtaattcataaggcagttcatactgaggagaattcttacaggtgtaatgaatgtgcaaagaccttcagtcaaacgtcatacntngtataccatcgtagacttcatactggagagaaaccttacaaatgtgaagaatgtgacaaagctttcagtttcaaatcaaaccttgaaagacataggaaaattcatactggagagaagccgtacaagtgtaatgaatgcagcaggacctttagtcggaagtcatcccttacacgccatcgtaggcttcatactggagagaaaccttataagtgtaatgagtgtggcaagaccttcagtcagatgtcatcccttgtataccaccgtagacttcatactggagagaaaccttacaaatgtgaagaatgtgatgaagctttcagtttcaaatcaaaccttgaaagacataagagaattcatactggagagaaaccttacaagtgtaatgattgtggcaagaccttcagtcagacgtcatcccttgtataccatcgtagacttcatactggacagaaaccttacaaatgtgaagaatgtgatgaagctttcagtttcaaatcaaaccttgaaagacataggataattcatactggagagaaactttacaagtgtaatgaatgtggcaagacctttagtcggaagtcatcccttacacgccatcgtagacttcatactggagaaaaaccttacaagtgtaatgagtgtggcaaagcctttcgtgggcagtcagcacttatttaccatcaagcaatccatggtatagggaaactttacaaatgtaatgattgtcaccaggtctttagtaatgctagaactattgcaaatcattggagaatccataatgaagagagatcttacaagtgtaatagatgtggaaaattt

SEQ ID NO: 31078 - DNA, 100 bp, Macaca Mulatta
ctgtggcatgtttcaggcaggattcctccttccttcaaactgcatcactcaggagtctgcaaattccccaaagtaggaggaaaaatgaccacattcaagg

SEQ ID NO: 31079 - DNA, 928 bp, Macaca Mulatta
gagcccagcgaacccagaggctaaccccctcccatggaggcttgacagctggattggagaggagaccctccctttttctagtgcccccaacttccaaaggccttttcttttctcttgcttggcttcagaatgattcctagatctcagttcctgagcttctgtgcatagaatatatttccagagacacttgcaaggggacatgaactgactgtgaacttgagacccctgcatgaaatttgggtaggagtctgccccctaacgttaaccccagccctacctctgatgggcccctttccttccttcttctatcccagatcctaactatgcttctgagaagccttcaacagccttctgcctcctggccaagggattgctcgtcctgttgctcttggtaattctggccacggtgctctgggtcatccgagcccagaaaagacgcgaaatgccaaggatgaagaaactcatgagaaacagaatgaaattgaggaagaaggcaaagcctgcctccagccctgcctgactgctccttgggaaccccagtcctgagcttggtttcttcccagcacccagagaatccttcctcagctctcttctttccaggagaaggaggtgctcaggggtgggtatccagagagccatacttctgagggaagactggctggcaataaagtcaaattaagtgaccacaactctgcaggagctgtgttgggtccttctgtcctcactgggtggctctggcaaaacccactctgctgtctttcccccaactcccagtgccttcccccaagtccacgtgctttttcaggtcctcctttggggagagaagtgggtctaaaaggcccctcaccgggaagttttggtatgctgtcactcaccacctatcccattttcccaccacatgcttgccatttatgcattaaataagaaa

SEQ ID NO: 31080 - DNA, 3317 bp, Macaca Mulatta
  misc_feature (1)...(3317): n = A,T,C or G
ggcccactcttttcttctccccggagtgcagtcaagttgaccaagaagcgggcactgtccatttcacctctgtcggacgccagcctggacctgcagacggttatccgcacttcacccagctccctcgtagctttcatcaactcgcgatgcacatctccaggaggctcttatggccatctctccatcagcaccatgannnnnnnnnnnnnnnnnnnnnnnnnnnnnnnnnnnnnnnnnnnnnnnnnnnnnnnnnnnnnnnnnnnnnnnnnnnnnnnnnnnnnnnnnnnnnnnnnnnnnnnnnnnnnnnnnnnnnnnnnnnnnnnnnnnnnnnnnnnnnnnagctgaagtctgagctggacatgctggttggcaagtgccgggaggagcccttggaaggtgatatgtccagccccaactccacaggcatacaggnaggattccctgttgggaatgctggatgggcgagaggaccttgagagagaggagaagcatgagcctgaatctgtgtatgagactgactgccgctgggatggctgcagccaggaatttgactcccaagagcagctggtgcacnnntcaacagcgagcacatccacggggagcggaaggagttcgtgtgccactnnnnnnnnnnnnnnnnnnnnnnnnnnnnnnnnnnnnnnnnnnnnnnnnnnnnnnnnnnnnnnnnnnnnnnnnnnnnnnnnnnnnnnnnnnnnnnnnngtttgaagggtgccggaagtcatactcacgcctcgaaaacctgaagacgcacctgcggtcacacacgggtgagaagccatacatgtgtgagcatgagggctgcagtaaagccttcagcaatgccagtgaccgagccannnnnnnnnnnnnnnnnnnnnnnnnnnnnnnnnnnnnnnnnnnnnnnnnnnnnnnnnnnnnnnnnnnnnnnnnnnnnnnnnnnnnnnnnnnnnnnnnnnnnnnnnnnnnnnnnnnnnnnnnnnnnnnnnnnnnnnnnnnnnnnnnnnnnnnnnnnnnnnnnnnnnnnnnnnnnnnnnnnnnnnnnnnnnnnnnnnnnnnnnnnnnnnnnnnnnnnnnnnnnnnnnnnnnnnnnnnnnnnnnnnnnnnnnnnnnnnnnnnnnnnnnnnnnnnnnnnnnnnnnnnnnnnnnnnnnnnnnnnnnnnnnnnnnnnnnnnnnnnnnnnnnnnnnnnnnnnnnnnnnnnnnnnnnnnnnnnnnnnnnnnnnnnnnnnnnnnnnnnnnnnnnnnnnnnnnnnnnnnnnnnnnnnnnnnnnnnnnnnnnnnnnnnnnnnnnnnnnnnnnnnnnnnnnnnnnnnnnnnnnnnnnnnnnnnnnnnnnnnnnnnnnnnnnnnnnnnnnnnnnnnnnnnnnnnnnnnnnnnnnnnnnngtacccctgtgtcccgccgcgtgggccccccagtttctcttgaccgccgcagcagcagctccagcagcatcagctctgcctatactgtcagccgccgctcctccctggcctctccttttccccctggctccccaccagagaatggagcatcctccctgcctnnnnnnnnnnnnnnnnnnnnnnnnnnnnnnnnnnnnnnnnnnnnnnnnnnnnnnnnnnnnnnnnnnnnnnnnnnnnnnnnnnnnnnnnnnnnnnnnnnnnnnnnnnnnnnnnnnnnnnnnnnnnnnnnnnnnnnnnnnnnnnnnnnnnnnnnnnnnnnnnnnnnnnnnnnnnnnnnnnnnnnnnnnnnnnnnnnnnnnnnnnnnnnnnnnnnnnnnnnnnnnnnnnnnnnnnnnnnnnnnnnnnnnnnnnnnnnnnnnnnnnnnnnnnnnnnnnnnnnnnnnnnnnnnnnnnnnnnnnnnnnnnnnnnnnnnnnnnnnnnnnnnnnnnnnnnnnnnnnnnnnnnnnnnnnnnnnnnnnnnnnnnnnnnnnnnnnnnnnnnnnnnnnnnnnnnnnnnnnnnnnnnnnnnnnnnnnnnnnnnnnnnnnnnnnnnnnnnnnnnnnnnnnnnnnnnnnnnnnnnnnnnnnnnnnnnnnnnnnnnnnnnnnnnnnnnnnnnnnnnnnnnnnnnnnnnnnnnnnnnnnnnnnnnnnnnnnnnnnnnnnnnnnnnnnnnnnnnnnnnnnnnnnnnnnnnnnnnnnnnnnnnnnnnnnnnnnnnnnnnnnnnnnnnnnnnnnnnnnnnnnnnnnnnnnnnnnnnnnnnnnnnnnnnnnnnnnnnnnnnnnnnnnnnnnnnnnnnnnnnnnnnnnnnnnnnnnnnnnnnnnnnnnnnnnnnnnnnnnnnnnnnnnnnnnnnnnnnnnnnnnnnnnnnnnnnnnnnnnnnnnnnnnnnnnnnnnnnnnnnnnnnnnnnnnnnnnnnnnnnnnnnnnnnnnnnnnnnnnnnnnnnnnnnnnnnnnnnnnnnnnnnnnnnnnnnnnnnnnnnnnnnnnnnnnnnnnnnnnnnnnnnnnnnnnnnnnnnnnnnnnnnnnnnnnnnnnnnnnnnnnnnnnnnnnnnnnnnnnnnnnnnnnnnnnnnnnnnnnnnnnnnnnnnnnnnnnnnnnnnnnnnnnnnnnnnnnnnnnnnnnnnnnnnnnnnnnnnnnnnnnnnnnnnnnnnnnnnnnnnnnnnnnnnnnnnnnnnnnnnnnnnnnnnnnnnnnnnnnnnnnnnnnnnnnnnnnnnnnnnnnnnnnnnnnnnnnnnnnnnnnnnnnnnnnnnnnnnnnnnnnnnnnnnnnnnnnnnnnnnnnnnnnnnnnnnnnnnnnnnnnnnnnnnnnnnnnnnnnnnnnnnnnnnnnnnnnnnnnnnnnnnnnnnnnnnnnttctgcccccattgcccacttgctatgggcccctcaaagtgggaggcacaaaccccagctgtggccatcctgaggtgggcaggttaggagggggtcctgccttgtaccctcctcccgaaggacaggtatgtaaccctctggactctcttgatcttgacaacactcagctggactttgtggctattctggatgaggcccaggggctgagtcctcctccttcccatgatcaggggggcagctctggacataccccacctccctctgggccccccaacatggctgtgggcaatatgagtgtcttactgagatccttgcctggggaaacacaattcctcaactctagtgcctaaagagtagggaatctcatccgtcccagattgcatttcctaaggggtctctatccttccagaaaaattggggcagctgcagtcccctgcacaagatgccccagggatgggaggtatgggctgggggctgtgtatagtgtgtatatgttttgaggagaaatttgataatgacactgtttcctgataataaa

SEQ ID NO: 31081 - DNA, 119 bp, Macaca Mulatta
ccacagggtcgctccacaaggctgtggtgagtggggacagcggtgctcatctggtggaagagattcagctgttccctgaccccgaacctgttcgtaacctgcagctggcccccacccag

SEQ ID NO: 31082 - DNA, 553 bp, Macaca Mulatta
ctccttccctctcaatccactagctttcatgttgggcaaggaaaagttgaagaaggatggctgatggtgatggaaagctgtgttaatggtatgaggaatgtgtgaaaagtatacacaaagggctctgaagctcaagtcagaggagtgggaggtctgatcattgttggtggaaaaaatgtaaggttatttgtgtttttaagttggttttacaattctttcctggggaaattatttctggaggggaaaaagatccattctacatatccatgtggagaaaagtcaaataacctttaagaatgagggtggtattggagaaagatgaattatagctctggagaatcaagatcttaagtgaagcctttctgttcagatgtgatctataaaaaaattataatttggggaaagtttaagcaaatctggctttgcagtcctgatgttataagtgactttgtgatcaaaatgtcaggcttgggttcttgttatagaatgcttggtgtagaaaaaccatgccatcatcaatgactaacaacatgtagggacttcatgtcatgtc

SEQ ID NO: 31083 - DNA, 662 bp, Macaca Mulatta
gggacggggagcatgccgtgtggccatggcgggctgctgcgccgcgctggcggccttcctgttcgagtacgacacgccgcgcatcgtgctcatccgcagccgcaaagtggggctcatgaaccgcgccgtgcagctgctcattctgatctacgtcatcgggtgggtgtttgtgtgggaaaagggctaccaggaaactgactccgtggtcagctccgttacgaccaaggtcaagggcgtggctgtgaccaacacttctaaacttggattccggatctgggatgtggcggattatgtgataccagctcagcaggaaaactccctcttcgtcatgaccaacatgatcctcaccatgaaccagacccaggacctgtgtcccgagattccagatgtgaccactgtgtgtaaatcagatgccaactgtactgctggctctgccggcacccacagtaatggagtctcaacaggcagatgcgtacctttcaaccggtccgtcaagacgtgtgaggtggcagcctggtgcccagtggaggatgacacacacgtgccacaacctgcttttttaaggctgcagaaaacttcactcttttggttaagaacaacatctggtatcccaaatttaatttcagcaagaggaatatccttcccaacatcaccactaccta

SEQ ID NO: 31084 - DNA, 135 bp, Macaca Mulatta
caggtactttaacccaagcggtgagcccctggaatcggactcccgattctgggagctccgggacagcattgtgcagtgtgagcttctcatgctgagagttctgcgcttccaggtctccttccagcatccacacaa

SEQ ID NO: 31085 - DNA, 2654 bp, Macaca Mulatta
  misc_feature (1)...(2654): n = A,T,C or G
naccaggagctgacccggctgaaggctgcagtgggtgagcttccagagaaatctaagcagcaggagatctaccaggagctatcccggctgaaggctgcagtgggtgatctcccagagaaatccaagcagcaggagatctaccagaagctgacccagctgaaggctgcagnnnnnnnnnnnnnnnnnnnnnnnnnnnnnnnnnnnnnnnnnnnnnnnnnnnnnnnnnnnnnnnnnnnnnnnnnnnnnnnnnnnnnnnnnnnnnnnnnnnnnnnnnnnnnnnnnnnnnnnnnnnnnnnnnnnnnnnnnnnnnnnnnnnnnnnnnnnnnnnnnnnnnnnnnnnnnnnnnnnnnnnnnnnnnnnnnnnnnnnnnnnnnnnnnnnnnnnnnnnnnnnnnnnnnnnnnnnnnnnnnnnnnnnnnnnnnnnnnnnnnnnnnnnnnnnnnnnnnnnnnnnnnnnnnnnnnnnnnnnnnnnnnnnnnnnnnnnnnnnnnnnnnnnnnnnnnnnnnnnnnnnnnnnnnnnnnnnnnnnnnnnnnnnnnnnnnnnnnnnnnnnnnnnnnnnnnnnnnnnnnnnnnnnnnnnnnnnnnnnnnnnnnnnnnnnnnnnnnnnnnnnnnnnnnnnnnnnnnnnnnnnnnnnnnnnnnnnnnnnnnnnnnnnnnnnnnnnnnnnnnnnnnnnnnnnnnnnnnnnnnnnnnnnnnnnnnnnnnnnnnnnnnnnnnnnnnnnnnnnnnnnnnnnnnnnnnnnnnnnnnnnnnnnnnnnnnnnnnnnnnnnnnnnnnnnnnnnnnnnnnnnnnnnnnnnnnnnnnnnnnnnnnnnnnnnnnnnnnnnnnnnnnnnnnnnnnnnnnnnnnnnnnnnnnnnnnnnnnnnnnnnnnnnnnnnnnnnnnnnnnnnnnnnnnnnnnnnnnnnnnnnnnnnnnnnnnnnnnnnnnnnnnnnnnnnnnnnnnnnnnnnnnnnnnnnnnnnnnnnnnnnnnnnnnnnnnnnnnnnnnnnnnnnnnnnnnnnnnnnnnnnnnnnnnnnnnnnnnnnnnnnnnnnnnnnnnnnnnnnnnnnnnnnnnnnnnnnnnnnnnnnnnnnnnnnnnnnnnnnnnnnnnnnnnnnnnnnnnnnnnnnnnnnnnnnnnnnnnnnnnnnnnnnnnnnnnnnnnnnnnnnnnnnnnnnnnnnnnnnnnnnnnnnnnnnnnnnnnnnnnnnnnnnnnnnnnnnnnnnnnnnnnnnnnnnnnnnnnnnnnnnnnnnnnnnnnnnnnnnnnnnnnnnnnnnnnnnnnnnnnnnnnnnnnnnnnnnnnnnnnnnnnnnnnnnnnnnnnnnnnnnnnnnnnnnnnnnnnngagtagctgggattacagtcatgtgccaccaggcccggctaattttttgtgtttttagtagagatggcgtttctccatgttggtcaggctggtctccaactcccgacctcaggagatctgcccgcctcggcctcccaaagtgctgggattacaggtgtgcactaccgcgcctggcctattattttttgtaagaataaaacaggtttatttggatttgggaatctgaatagttctgtctctgctacctgatctcctcctgccatgaattcaggacctagagaactttggctccagctgtgagggctcctgcagttctggctctggctgcaccggcccctgctgcggtcactatttcttcctctacttggtgaactgtgcctctcctgnnnnnnnnnnnnnnnnnnnnnnnnnnnnnnnnnnnnnnnnnnnnnnnnnnnnnnnnnnnnnnnnnnnnnnnnnnnnnnnnnnnnnnnnnnnnnnnnnnnnnnnnnnnnnnnnnnnnnnnnnnnnnnnnnnnnnnnnnnnnnnnnnnnnnnnnnnnnnnnnnnnnnnnnnnnnnnnnnnnnnnnnnnnnnnnnnnnnnnnnnnnnnnnnnnnnnnnnnnnnnnnnnnnnnnnnnnnnnnnnnnnnnnnnnnnnnnnnnnnnnnnnnnnnnnnnnnnnnnnnnnnnnnnnnnnnnnnnnnnnnnnnnnnnnnnnnnnnnnnnnnnnnnnnnnnnnnnnnnnnnnnnnnnnnnnnnnnnnnnnnnnnnnnnnnnnnnnnnnnnnnnnnnnnnnnnnnnnnnnnnnnnnnnnnnnnnnnnnnnnnnnnnnnnnnnnnnnnnnnnnnnnnnnnnnnnnnnnnnnnnnnnnnnnnnnnnnnnnnnnnnnnnnnnnnnnnnnnnnnnnnnnnnnnnnnnnnnnnnnnnnnnnnnnnnnnnnnnnnnnnnnnnnnnnnnnnnnnnnnnnnnnnnnnnnnnnnnnnnnnnnnnnnnnnnnnnnnnnnnnacaaaaattagctgggcgtgcacnnnnnnnnnnnnnnnnnnnnnnnnnnnnnnnnnnnnnnnnnnnnnnnnnnnnnnnnnnnnnnnnnnnnnnnnnnnnnnnnnnnnnnnnnnnnnnnnnnnnnnnnnnnnnnnnnnnnnnnnnnnnnnnnnnnnnnnnnnnnnnnnnnctctccccacgttcttgaactcgggcagcacattctcctagaaatctaggaactgttggtaggtttcttccttgctgtactccaggcttgcgtcggggtcatagtcatacctcctgcattgctccattccaaacgctgcaaacatgttcttaataagaagggtaggactgga

SEQ ID NO: 31086 - DNA, 3894 bp, Macaca Mulatta
  misc_feature (1)...(3894): n = A,T,C or G
ttagaaccatcagagagccttgaggaaaaccagcggaacctccttcagatgactgaaaagttcttccatgccatcatcagttcttcctcagaattcccccctcaacttcgaagtgtgtgccactgtttataccagnnnnnnnnnnnnnnnnnnnnnnnnnnnnnnnnnnnnnnnnnnnnnnnnnnnnnnnnnnnnnnnnnnnnnnnnnnnnnnnnnnnnnnnnnnnnnnnnnnnnnnnnnnnnnnnnnnnnnnnnnnnnnnnnnnnnnnnnnnnnnnnnnnnnnnnnnnnnnnnnnnnnnnnnnnnnnnnnnnnnnnnnnnnnnnnnnnnnnnnnnnnnnnnnnnnnnnnnnnnnnnnnnnnnnnnnnnnnnnnnnnnnnnnnnnnnnnnnnnnnnnnnnnnnnnnnnnnnnnnnnnnnnnnnnnnnnnnnnnnnnnnnnnnnnnnnnnnnnnnnnnnnnnnnnnnnnnnnnnnnnnnnnnnnnnnnnnnnnnnnnnnnnnnnnnnnnnnnnnnnnnnnnnnnnnnnnnnnnnnnnnnnnnnnnnnnnnnnnnnnnnnnnnnnnnnnnnnnnnnnnnnnnnnnnnnnnnnnnnnnnnnnnnnnnnnnnnnnnnnnnnnnnnnnnnnnnnnnnnnnnnnnnnnnnnnnnnnnnnnnnnnnnnnnnnnnnnnnnnnnnnnnnnnnnnnnnnnnnnnnnnnnnnnnnnnnnnnnnnnnnnnnnnnnnnnnnnnnnnnnnnnnnnnnnnnnnnnnnnnnnnnnnnnnnnnnnnnnnnnnnnnnnnnnnnnnnnnnnnnnnnnnnnnnnnnnnnnnnnnnnnnnnnnnnnnnnnnnnnnnnnnnnnnnnnnnnnnnnnnnnnnnnnnnnnnnnnnnnnnnnnnnnnnnnnnnnnnnnnnnnnnnnnnnnnnnnnnnnnnnnnnnnnnnnnnnnnnnnnnnnnnnnnnnnnnnnnnnnnnnnnnnnnnnnnnnnnnnnnnnnnnnnnnnnnnnnnnnnnnnnnnnnnnnnnnnnnnnnnnnnnnnnnnnnnnnnnnnnnnnnnnnnnnnnnnnnnnnnnnnnnnnnnnnnnnnnnnnnnnnnnnnnnnnnnnnnnnnnnnnnnnnnnnnnnnnnnnnnnnnnnnnnnnnnnnnnnnnnnnnnnnnnnnnnnnnnnnnnnnnnnnnnnnnnnnnnnnnnnnnnnnnnnnnnnnnnnnnnnnnnnnnnnnnnnnnnnnnnnnnnnnnnnnnnnnnnnnnnnnnnnnnnnnnnnnnnnnnnnnnnnnnnnnnnnnnnnnnnnnnnnnnnnnnnnnnnnnnnnnnnnnnnnnnnnnnnnnnnnnnnnnnnnnnnnnnnnnnnnnnnnnnnnnnnnnnnnnnnnnnnnnnnnnnnnnnnnnnnnnnnnnnnnnnnnnnnnnnnnnnnnnnnnnnnnnnnnnnnnnnnnnnnnnnnnnnnnnnnnnnnnnnnnnnnnnnnnnnnnnnnnnnnnnnnnnnnnnnnnnnnnnnnnnnnnnnnnnnnnnnnnnnnnnnnnnnnnnnnnnnnnnnnnnnnnnnnnnnnnnnnnnnnnnnnnnnnnnnnnnnnnnnnnnnnnnnnnnnnnnnnnnnnnnnnnnnnnnnnnnnnnnnnnnnnnnnnnnnnnnnnnnnnnnnnnnnnnnnnnnnnnnnnnnnnnnnnnnnnnnnnnnnnnnnnnnnnnnnnnnnnnnnnnnnnnnnnnnnnnnnnnnnnnnnnnnnnnnnnnnnnnnnnnnnnnnnnnnnnnnnnnnnnnnnnnnnnnnnnnnnnnnnnnnnnnnnnnnnnnnnnnnnnnnnnnnnnnnnnnnnnnnnnnnnnnnnnnnnnnnnnnnnnnnnnnnnnnnnnnnnnnnnnnnnnnnnnnnnnnnnnnnnnnnnnnnnnnnnnnnnnnnnnnnnnnnnnnnnnnnnnnnnnnnnnnnnnnnnnnnnnnnnnnnnnnnnnnnnnnnnnnnnnnnnnnnnnnnnnnnnnnnnnnnnnnnnnnnnnnnnnnnnnnnnnnnnnnnnnnnnnnnnnnnnnnnnnnnnnnnnnnnnnnnnnnnnnnnnnnnnnnnnnnnnnnnnnnnnnnnnnnnnnnnnnnnnnnnnnnnnnnnnnnnnnnnnnnnnnnnnnnnnnnnnnnnnnnnnnnnnnnnnnnnnnnnnnnnnnnnnnnnnnnnnnnnnnnnnnnnnnnnnnnnnnnnnnnnnnnnnnnnnnnnnnnnnnnnnnnnnnnnnnnnnnnnnnnnnnnnnnnnnnnnnnnnnnnnnnnnnnnnnnnnnnnnnnnnnnnnnnnnnnnnnnnnnnnnnnnnnnnnnnnnnnnnnnnnnnnnnnnnnnnnnnnnnnnnnnnnnnnnnnnnnnnnnnnnnnnnnnnnnnnnnnnnnnnnnnnnnnnnnnnnnnnnnnnnnnnnnnnnnnnnnnnnnnnnnnnnnnnnnnnnnnnnnnnnnnnnnnnnnnnnnnnnnnnnnnnnnnnnnnnnnnnnnnnnnnnnnnnnnnnnnnnnnnnnnnnnnnnnnnnnnnnnnnnnnnnnnnnnnnnnnnnnnnnnnnnnnnnnnnnnnnnnnnnnnnnnnnnnnnnnnnnnnnnnnnnnnnnnnnnnnnnnnnnnnnnnnnnnnnnnnnnnnnnnnnnnnnnnnnnnnnnnnnnnnnnnnnnnnnnnnnnnnnnnnnnnnnnnnnnnnnnnnnnnnnnnnnnnnnnnnnnnnnnnnnnnnnnnnnnnnnnnnnnnnnnnnnnnnnnnnnnnnnnnnnnnnnnnnnnnnnnnnnnnnnnnnnnnnnnnnnnnnnnnnnnnnnnnnnnnnnnnnnnnnnnnnnnnnnnnnnnnnnnnnnnnnnnnnnnnnnnnnnnnnnnnnnnnnnnnnnnnnnnnnnnnnnnnnnnnnnnnnnnnnnnnnnnnnnnnnnnnnnnnnnnnnnnnnnnnnnnnnnnnnnnnnnnnnnnnnnnnnnnnnnnnnnnnnnnnnnnnnnnnnnnnnnnnnnnnnnnnnnnnnnnnnnnnnnnnnnnnnnnnnnnnnnnnnnnnnnnnnnnnnnnnnnnnnnnnnnnnnnnnnnnnnnnnnnnnnnnnnnnnnnnnnnnnnnnnnnnnnnnnnnnnnnnnnnnnnnnnnnnnnnnnnnnnnnnnnnnnnnnnnnnnnnnnnnnnnnnnnnnnnnnnnnnnnnnnnnnnnnnnnnnnnnnnnnnnnnnnnnnnnnnnnnnnnnnnnnnnnnnnnnnnnnnnnnnnnnnnnnnnnnnnnnnnnnnnnnnnnnnnnnnnnnnnnnnnnnnnnnnnnnnnnnnnnnnnnnnnnnnnnnnnnnnnnnnnnnnnnnnnnnnnnnnnnnnnnnnnnnnnnnnnnnnnnnnnnnnnnnnnnnnnnnnnnnnnnnnnnnnnnnnnnnnnnnnnnnnnnnnnnnnnnnnnnnnnnnnnnnnnnnnnnnnnnnnnnnnnnnnnnnnnnnnnnnnnnnnnnnnnnnnnnnnnnnnnnnnnnnnnnnnnnnnnnnnnnnnnnnnnnnnnnnnnnnnnnnnnnnnnnnnnnnnnnnnnnnnnnnnnnnnnnnnnnnnnnnnnnnnnnnnnnnnnnnnnnnnnnnnnnnnnnnnnnnnnnnnnnnnnnnnnnnnnnnnnnnnnnnnnnnnnnnnnnnnnnnnnnnnnnnnnnnnnnnnnnnnnnnnnnnnnnnnnnnnnnnnnnnnnnnnnnnnnnnnnnnnnnnnnnnnnnnnnnnnnnnnnnnnnnnnnnnnnnnnnnnnnnnnnnnnnnnnnnnnnnnnnnnnnnnnnnnnnnnnnnnnnnnnnnnnnnnnnnnnnnnnnnnnnnnnnnnnnnnnngaaactcagaggatttcctcatcacaacagcatccacatttacgtaaggtttcggtgtctgaatcaaatgttctcttggatgaagaagtacttactgatccaaaaatccaggcgctgcttcttactgttcta

SEQ ID NO: 31087 - DNA, 5348 bp, Macaca Mulatta
  misc_feature (1)...(5348): n = A,T,C or G
atgaggcgtggccggtgggccgccctggccctggggctgctgcgcctctgnnnnctcaggccaatttcgccccgcacttcttcgacaacggggtcggcagcaccaacggaaacatggctttgttcagcctcccagaggacacccctgtaggnaggctctcatgtatacaccctgaacgggacagacccagagggagaccccatctcctaccacatcagctttgaccccagcgctagaagtgtcttttctgttgaccccacttttggaaacatcaccctggttgaagagctggacagagagnagagggaagatgagattgaagccatcatcagcatttctgacggcctgaatctggtgnggtggccgaaaaagtcgtgatcctggtgaccgatgccaatgacgaggcgcccaggttcttccaggagccttatgttgccctggttcctgaggnaggacatacctgctgggagcttcttctttaaggtccatgcagtggacagggacacaggctctggagggagtgtcacctacttcctgcagnnnnnnnnnnnnnnnnnnnnnnnnnnnnnnnnnnnnnnnnnnnnnnnnnnnnnnnnnnnnnnnnnnnnnnnnnnnnnnnnnnnnnnnnnnnnnnnnnnnnnnnnnnnnnnnnnaggatggcggtgggaggcttcatggggctgatgtggtgttctcagccaccaccacggtcacggtcaatgtggaggacgttcaggacacggcccctgtcttcgtgggcacaccctactatggctatgtgtacgaggacacccttccgnnnnnnnnnnnnnnnnnnnnnnnnnnnnnnnnnnnnnnnnnnnnnnnnnnnnnnnnnnnnnnnnnnnnnnnnnnnnnnnnnnnnnnnnnnnnnnnnnnnnnnnnnnnnnnnnnnnnnnnnnnnnnnnnnnnnnnnnnnnnnnnnnnnnnnnnnnnnnnnnnnnnnnnnnnnnnnnnnnnnnnnnnnnnnnnnnnnnnnnnnnnnnnnnnnnnnnnnnnnnnnnnnnnnnnnnnnnnnnnnnnnnnnnnnnnnnnnnnnnnnnnnnnnnnnnnnnnnnnnnnnnnnnnnnnnnnnnnnnnnnnnnnnnnnnnnnnnnnnnnnnnnnnnnnnnnnnnnnnnnnnnnnnnnnnnnnnnnnnnnnnnnnnnnnnnnnnnnnnnnnnnnnnnnnnnnnnnnnnnnnnnnnnnnnnnnnnnnnnnnnnnnnnnnnnnnnnnnnnnnnnnnnnnnnnnnnnnnnnnnnnnnnnnnnnnnnnnnnnnnnnnnnnnnnnnnnnnnnnnnnnnnnnnnnnnnnnnnnnnnnnnnnnnnnnnnnngctcctggctgttgaagtgaacaccccggagaagttcagttccacagcggatgttgtgatccagctcctggacaccaatgacaatgtccccaagttcgactccctctactacgttgccaggattcctgagaatgccccagggggttccagcgtggtggctgtcacagtgggntggggctctttctcttccaggctgtggatccagacacaggaccctggggtgaagtgaaatattccatctacgggactggggcagacctnnnnnnnnnnnnnnnnnnnnnnnnnnnnnnnnnnnnnnnnnnnnnnnnnnnnnnnnnnnnnnnnnnnnnnnnnnnnnnnnnnnnnnnnnnnnnnnnnnnnnnnnnnnnnnnnnnnnnnnnnnnnnnnnnnnnnnnnnnnnnnnnnnnnnnnnnnnnnnnnnnnnnnnnnnnnnnnnnnnnnnnnnnnnnnnnnnnnnnnnnnnnnnnnnnnnnnnnnnnnnnnnnnnnggccatagatgaggatgcagaggaacctaacaacctggtggattattccatcacccatgcagagccggccaatgtgtttgacatcaatgcccacacgggggagatctggctcaagaattccatccgctccctggatgccctgcacaacatcacacctggaagggactgtatatggtccctagaggtgcaggccaaggaccggggctccccatccttcagcaccacagccttactcaagattgacatcacagatgctgagnagaccctttcccggagccccatggctgccttcctgatacagaccaaggacaaccccatgaaggccgtgggtgtgctggccggcaccatggccaccgtcgtggccatcactgtcctcatctctaccgccaccttctggcgcaacaagaagtctaacaaggtcctgccagtgcggcgggtggtccgcaagcggcccagccctgcgccccgcaccatccgcatcgagtggctcaagtccaagagcgccaaagccgctaccaagttcatgctcaaagagaaacctcccaatgagaactgcaacaacaacagcccagaaagctccctgcccccgagagctccagctctccctccaccacccagcgtcgcgcccagcactggcgcagcccactggaccgtgcctactgtctctggctctctcaccccccagccgacccaacccccaccaaaacccaaaactatgggaagccccatccagtcaactctgatctctgagctcaagcaaaagtttgagaagaagagggtgcacaacaaagcttacttctagtgcatgccctatggtccccactctttcctccacccctgacccacacctccctgctgctcagacaatgctgcccttcctctcctccttaaggtcacccctgttttttacaatggtgtaatccccactgtcctcatctctacctccaccttctggcacaacaagaagttgcgctgtgacagggctctggtcagggccttgggcaagacattgggctataggatgcaattggcaaatacttccccattactcaaatccttggcactgctacaatgctccccattcttcagggctgggaattgatgagaagacagctcnntcaccaaccccagacctcacagtccctcaggtcctactgggagctcatcatccttagtcaagcagcagggccctggccatgtggagcaacgtggactggaatctggatcctgatgcctgcagctgacagcagagcaggaaaaagaggcttagcattgtttcaggctggaggtcagcgaacctcgtgagctataggaaagcaaatgtaggtaaggggagggcaaatgtgtgctgaaaacacactgactgcgggactgtgctgggatgcatttggaaagatagagcattctgtctgggcagagactgtggtccctggtatgcccatgtgggacaagggacacagaggtggaagacgggccttgccaagagtgagggcagatgtctccagccagaactgccatgaacccaaaattgtcaaagctggagctatcgaggtagccctaaaagcatctagaagagcatcagggcccctctctgaggagctgccccaccggccatccttgaagagacaattcagggcagtcgatgaatatcagggctgagatgcggggagacttccatttttatccagctcttctgctcacatcacgtgaccttgggaaagctgtttaaagtcactgatcatcttcttcctcatctgtaaatgaagagagaaagccctgtctgcctcacttgcaggtctagggtgaggattgaagaaaatggtggtgatgagggctttaaccaaagaggcatgaatgcaaagtatttttctgcagcccagttctctgggtgcagctcttgcagaaagtattaggagcctcacagctactctgccaagcgccccaacaggcactgtgctgggctaaggagctaccactggatgatgtccttgccgtgactcacacacctctccttccattcttccctcaccccatccccactgtggtcctggccagctactgtcagagagaaccagagctccaagtctccagtttgccaagatgaagaaaatgagttcccaagaacggaatgctttgcctgaggccacacaacaggctggtagcaaggatctggtctagccagggcagacctcatcagcttgtgacaaccttccccaggacagaagtcgtaccaggcctctgggattaatacaaagaggttgtgccctgctttaaggaacctgctatcaggaaatctagatgtgtgcacagagagagaaaagtagaacagtctgcatttgactccactcactaacaacccctctagaatacagtgatgattttatttaaagagattgtatgcacatgtggctttcctgatttctgagtctatttggaggtgttactgagatgtgccagtgtgcagaatccttgctggagtttctatagtccctggcttgaacggtattaagtaagaggtggactctagcaatccaggagcccagaatgagcaaacaggtactttccagcccgtgtttcaggagagggctgtgctggatcatgcttggcctccacagggaatacagcatccttaaagcttgcgtgcaatcaacctcttttataaatggaaaataaagtctgttacccaaaggccatgctgatcccctgctccctgctttcatttgtgtttgctgacctgtggagaccagtcttactgacacacagcaaatctcaacttgcttcctggctccttcagcaggtggatccattctttcaccccagatctgactctaaagaaggctgaaaagttttgtccaaattgccatgcatatatcttgaataggacatttgtgggccttgtctactggacttttctcccaaacaggacaagcccaggcagggctgcatggagaggaatggaacctggagctaaaattaattgcccactctcccaccctaccagtgcagcccagcaagggcaggaattgggaggcctagggtgggcgtgaaagcttgggaagcactgtcatctctcagacaggggtcataaagacctctggactggaagctcaggcttgcaagtggatccgggaccgagagtattctcttggacaaccccaggaacttgaaccaaggcagagccaatcttgcaaactggccacagatggggaaatgcccagtagccagcatgagccacactgggaaagaggaggagggtgcagccaaacctaaggcacccgcaagtgtggtcagcactggaggaggccctgccagtggggtgaggccagtcaagtccctgtgttacgaatggtgggccacggggctgcctgctcagtcccagtaggacaagcagagttccaggctggcaccatggtaggcctccagggaaagagcggggaggcaggaaaggcacactgggcaggcttgcccattcctggccctaagaatggagaagtagcctcatggacaataaacagatgtgactccaa

SEQ ID NO: 31088 - DNA, 1634 bp, Macaca Mulatta
  misc_feature (1)...(1634): n = A,T,C or G
gttttgggctggaggatagttgcaagtattgtttggtcagtgctgcttctacccctctgcaccacagtatttataattttcagcaggattgatttgtttcatcctgtacagtggctgtctgnnnnnnnnnnnnnnnnnnnnnnnnnnnnnnnnnnnnnnnnnnnnnnnnnnnnnnnnnnnnnnnnnnnnnnnnnnnnnnnnnnnnnnnnnnnnnnnnnnnnnnnnnnnnnnnnnnnnnnnnnnnnnnnnnnnnnnnnnnnnnnnnnnnnnnnnnnnnnnnnnnnnnnnnnnnnnnnnnnnnnnnnnnnnnnnnnnnnnnnnnnnnnnnnnnnnnnnnnnnnnnnnnnnnnnnnnnnnnnnnnnnnnnnnnnnnnnnnnnnnnnnnnnnnnnnnnnnnnnnnnnnnnnnnnnnnnnnnnnnnnnnnnnnnnnnnnnnnnnnnnnnnnnnnnnnnnnnnnnnnnnnnnnnnnnnnnnnnnnnnnnnnnnnnnnnnnnnnnnnnnnnnnnnnnnnnnnnnnnnnnnnnnnnnnnnnnnnnnnnnnnnnnnnnnnnnnnnnnnnnnnnnnnnnnnnnnnnnnnnnnnnnnnnnnnnnnnnnnnnnnnnnnnnnnnnnnnnnnnnnnnnnnnnnnnnnnnnnnnnnnnnnnnnnnnnnnnnnnnnnnnnnnnnnnnnnnnnnnnnnnnnnnnnnnnnnnnnnnnnnnnnnnnnnnnnnnnnnnnnnnnnnnnnnnnnnnnnnnnnnnnnnnnnnnnnnnnnnnnnnnnnnnnnnnnnnnnnnnnnnnnnnnnnnnnnnnnnnnnnnnnnnnnnnnnnnnnnnnnnnnnnnnnnnnnnnnnnnnnnnnnnnnnnnnnnnnnnnnnnnnnnnnnnnnnnnnnnnnnnnnnnnnnnnnnnnnnnnnnnnnnnnnnnnnnnnnnnnnnnnnnnnnnnnnnnnnnnnnnnnnnnnnnnnnnnnnnnnnnnnnnnnnnnnnnnnnnnnnnnnnnnnnnnnnnnnnnnnnnnnnnnnnnnnnnnnnnnnnnnnnnnnnnnnnnnnnnnnnnnnnnnnnnnnnnnnnnnnnnnnnnnnnnnnnnnnnnnnnnnnnnnnnnnnnnnnnnnnnnnnnnnnnnnnnnnnnnnnnnnnnnnnnnnnnnnnnnnnnnnnnnnnnnnnnnnnnnnnnnnnnnnnnnnnnnnnnnnnnnnnnnnnnnnnnnnnnnnnnnnnnnnnnnnnnnnnnnnnnnnnnnnnnnnnnnnnnnnnnnnnnnnnnnnnnnnnnnnnnnnnnnnnnnnnnnnnnnnnnnnnnnnnnnnnnnnnnnnnnnnnnnnnnnnnnnnnnnnnnnnnnnnnnnnnnnnnnnnnnnnnnnnnnnnnnnnnnnnnnnnnnnnnnnnnnnnnnnnnnnnnnnnnnnnnnnnnnnnnnnnnnnnnnnnnnnnnnnnnnnnnnnnnnnnnnnnnnnnnnnnnnnnnnnnnnnnnnnnnnnnnnnnnnnnnnnnnnnnnnnnnnnnnnnnnnnnnnnnnnnnnnnnnnnnnnnnnnnnnnnnnnnnnnnnnnnnnnnnnnngcacttagtagcagcatcatttacagaggatagatttgaagttgtccagactacactaccagctatctttaatactttgttgacgctgcaagagg

SEQ ID NO: 31089 - DNA, 406 bp, Macaca Mulatta
caagccaggcctctttgcaagccccccaagctgaccacagatgccactgcttctgtagcaggggcctcctaagccaggctgccctgatgctaggaagccagctctggggtgccataggccagactatccccttcctcatccatgtaaggttaacccaccccccagcaaggtactggatgccctcattcagctgcctccttagaggacagggcatcccctttccaggaaggtaaagcaggggaccagagcgccccctcatgtatgccccagttcagggggcaaactcaggagtttcctttttatcataacatggcctctaattccaccccctaagtgaaacggtttgagagacacagacagtgtcctgacctggacaagctgtgcacgtctcctgttctggtctctt

SEQ ID NO: 31090 - DNA, 428 bp, Macaca Mulatta
aaaacagtccaggccaaagaggaagcatttatgtttgataagaaacccagccattccgtatgggcggttcctgagtggctttggtgatattcgccagccacctgctgacattcagaatctcagacctcgggactgctgttgcggtaccgtgtgcctgacacccgccaggagccccttgctgtctgcgcacaggatggggtgactgcccagacattcccgcttgatgggctctgatttctggggagcctttcagatacagcagacatacaccaccgtactttggagttgtaaggaacaaaaatcagaagtgctggttagatagtgaaaacttaggataacttagaaaggttagttttagcttcctttgtggctccctcgtgcaaaacaattagcagttagcaatggacctgattctagtttattctaat

SEQ ID NO: 31091 - DNA, 93 bp, Macaca Mulatta
gttcagccgtgccgcctcgttacgatgaccagtgtggttaagacagtgtatagcctgcagcccgcctctgcgctgagcggcggccagcccgca

SEQ ID NO: 31092 - DNA, 983 bp, Macaca Mulatta
  misc_feature (1)...(983): n = A,T,C or G
acctcatgcagcaccatccaatccacactgggagagaaaccctatcattgcagtcaatgtcgaaaggccttcacccaccggtctaccttcattcgccataacaggacccacaccggagaaaaaccctttgagtgcaaagaatgtaagaaagcctttagcaatagggcccacctaattcaacactacatcatccacactggagagaaaccctatgattgcatggcgtgtggcaaggccttcagatgcagctcagaactcatacagcaccagcggattcacactggggagaagccctatgaatgcacccagtgtgggaaggcctttcaccggagcacatacctcattcagcactctgtcatccacactggggagatgccctacaagtgtatcgagtgtggaaaggccttcaaacgcaggtcacaccttctgcagcaccaaagagtccatacatgagagaaccctattgttgcaatgaatatagcaaagccttcacccactgtccttattttatcattcataatgggacccacactggaggaagaagcccttcgagtgcaaagaatgtcaggaaacttcattttcttcctcagctctttaactaacacacgagcagtcactttggagagaaaccctgtgaatacagtgaatgtaaggatcccttcagtcaccactcagttctcactgcagaaggattcatgccagagggaaatgtggaaggcactccatncacatcagaggactcaggctggagaaacattccaaatataactcttaaggacagtctttggccagaggaaaaatcttactatccgagcatcataatgaannagtactacataattgtcattgatgtgagaaaacttctgaacagtttctcactttactgtcctataagagccatgctggaatttgaccnanctcggggatttctctatgaacttatgaaaaccttcggtcacaggatcttcctggcttatgtccta

SEQ ID NO: 31093 - DNA, 354 bp, Macaca Mulatta
  misc_feature (1)...(354): n = A,T,C or G
gacatctcctttatccagtcacagtgaatacgctctttaataaaagttggtttcccacaaacaagaagaaaatcaaggagttccatcagtattttcaagcttatgatgaagattttgagtatggttcccagttgccagagtgtcttctaagnnnnnnnnnnnnnnnnnnnnnnnnnnnnnnnnnnnnnnnnnnnnnnnnnnnnnnnnnnnnnnnnnnnnnnnnnnnnnnnnnnnnnnnnnnnnnacattattgcaagctacgctggatattgtagagacggaaacaagtaaggaaaactcacccaattatgggctcttactgctttgggcttctctgtctaatgccgttcctgt

SEQ ID NO: 31094 - DNA, 719 bp, Macaca Mulatta
  misc_feature (1)...(719): n = A,T,C or G
taaatgtctccaaagtcacacattcagaactgtctctggcagtcgaatatcactagagaaaagtcaatagagaagcatcctttggatattttgtatgcaaagatggctctccccccaaatcccagtttttcagctcaggattatatttgtaannnnnnnnnnnnnnnnnncttggcgcaggagggagaactttgtaagaagctgccctctgttttttttacccactcgtcaatctggatttacttcttctgttttatacaagctctgttaagttatgtttacagtattttgtatcgctgtttacaaatcttgcatggactcctgccacgtgaaagagaaaatcttcgtgtcttcaaaaattaggcaggtaatctttgtatacttctgacaattgccagatctatggcataaataataggcacacaaaaaggtacttaaacagttatagtcaccatcacctgcttaagaatggtcttttagatttgtgtttgttttgttcaagttgttggcaccaggatgcagagaaccagactggcctgaggtgaaggagcacacagccctgagggcttggaaaccctgggtccagttcctcttcacacccccttccactctgagtggcacaactccccaggttgccatggaacacctgctttcatgccaaactatccgtcaactaagcgggtgatgtgtctaacgttctcgaatttgtgccctcattc

SEQ ID NO: 31095 - DNA, 138 bp, Macaca Mulatta
cagataatgttgaattctctgcataagtatgaaccccaggttcacatagtgcgtgttggaagtgcgcatcgaatggtaacgaactgctccttccctgaaacccagttcatagccgtgactgcctatcagaatgaggag

SEQ ID NO: 31096 - DNA, 2158 bp, Macaca Mulatta
  misc_feature (1)...(2158): n = A,T,C or G
ctgctctttggcttcggcctcctccggctgtgctcaggnnnnnnnnnnnnnnnnnnnnnnnnnnnnnnnnnnnnnnnnnnnnnnnnnnnnnnnnnnnnnnnnnnnnnnnnnnnnnnnnnnnnnnnnnnnnnnnnnnnnnnnnnnnnnnnnnnnnnnnnnnnnnnnnnnnnnnnnnnnnnnnnnnnnnnnnnnnnnnnnnnnnnnnnnnnnnnnnnnnnnnnnnnnnnnnnnnnnnnnnnnnnnnnnnnnnnnnnnnnnnnnnnnnnnnnnnnnnnnnnnnnnnnnnnnnnnnnnnnnnnnnnnnnnnnnnnnnnnnnnnnnnnnnnnnnnnnnnnnnnnnnnnnnnnnnnnnnnnnnnnnnnnnnnnnnnnnnnnnnnnnnnnnnnnnnnnnnnnnnnnnnnnnnnnnnnnnnnnnnnnnnnnnnnnnnnnnnnnnnnnnnnnnnnnnnnnnnnnnnnnnnnnnnnnnnnnnnnnnnnnnnnnnnnnnnnnnnnnnnnnnnnnnnnnnnnnnnnnnnnnnnnnnnnnnnnnnnnnnnnnnnnnnnnnnnnnnnnnnnnnnnnnnnnnnnnnnnnnnnnnnnnnnnnnnnnnnnnnnnnnnnnnnnnnnnnnnnnnnnnnnnnnnnnnnnnnnnnnnnnnnnnnnnnnnnnnnnnnnnnnnnnnnnnnnnnnnnnnnnnnnnnnnnnnnnnnnnnnnnnnnnnnnnnnnnnnnnnnnnnnnnnnnnnnnnnnnnnnnnnnnnnnnnnnnnnnnnnnnnnnnnnnnnnnnnnnnnnnnnnnnnnnnnnnnnnnnnnnnnnnnnnnnnnnnnnnnnnnnnnnnnnnnnnnnnnnnnnnnnnnnnnnnnnnnnnnnnnnnnnnnnnnnnnnnnnnnnnnnnnnnnnnnnnnnnnnnnnnnnnnnnnnnnnnnnnnnnnnnnnnnnnnnnnnnnnnnnnnnnnnnnnnnnnnnnnnnnnnnnnnnnnnnnnnnnnnnnnnnnnnnnnnnnnnnnnnnnnnnnnnnnnnnnnnnnnnnnnnnnnnnnnnnnnnnnnnnnnnnnnnnnnnnnnnnnnnnnnnnnnnnnnnnnnnnnnnnnnnnnnnnnnnnnnnnnnnnnnnnnnnnnnnnnnnnnnnnnnnnnnnnnnnnnnnnnnnnnnnnnnnnnnnnnnnnnnnnnnnnnnnnnnnnnnnnnnnnnnnnnnnnnnnnnnnnnnnnnnnnnnnnnnnnnnnnnnnnnnnnnnnnnnnnnnnnnnnnnnnnnnnnnnnnnnnnnnnnnnnnnnnnnnnnnnnnnnnnnnnnnnnnnnnnnnnnnnnnnnnnnnnnnnnnnnnnnnnnnnnnnnnnnnnnnnnnnnnnnnnnnnnnnnnnnnnnnnnnnnnnnnnnnnnnnnnnnnnnnnnnnnnnnnnnnnnnnnnnnnnnnnnnnnnnnnnnnnnnnnnnnnnnnnnnnnnnnnnnnnnnnnnnnnnnnnnnnnnnnnnnnnnnnnnnnnnnnnnnnnnnnnnnnnnnnnnnnnnnnnnnnnnnnnnnnnnnnnnnnnnnnnnnnnnnnnnnnnnnnnnnnnnnnnnnnnnnnnnnnnnnnnnnnnnnnnnnnnnnnnnnnnnnnnnnnnnnnnnnnnnnnnnnnnnnnnnnnnnnnnnnnnnnnnnnnnnnnnnnnnnnnnnnnnnnnnnnnnnnnnnnnnnnnnnnnnnnnnnnnnnnnnnnnnnnnnnnnnnnnnnnnnnnnnnnnnnnnnnnnnnnnnnnnnnnnnnnnnnnnnnnnnnnnnnnnnnnnnnnnnnnnnnnnnnnnnnnnnnnnnnnnnnnnnnnnnnnnnnnnnnnnnnnnnnnnnnnnnnnnnnncaggatcgtctgctgcctccgagtcatgggagaagaggagtataggacaaggggtggaagggcaggagctcagaccgcaccaggctggcctgacacaatggtagctctgaagggaggggaagaggagagaggcctgagtgtgacctgaaacctgccactacttgagtggacagcagctggactgggtgggccccatagtggtcagctgttcctgcccagtaggtttagcctggccccactgtcacagacccctgggggaggcttccagatcagtcccacagccccttgcttctaaggggtccagatacctgccccagattctctttccccactgaagaattc

SEQ ID NO: 31097 - DNA, 781 bp, Macaca Mulatta
  misc_feature (1)...(781): n = A,T,C or G
ggggaatatccaggaagcgttagtgattgccaggcaggcctaagagacaggaaacatttagcatgttggtaaaccattttagcacatcagcaaaagcatataaacagctttaggactggaaattattgccatggggaaaggcaacaattagaggaacaattccaattaaaaatgtaaagattggttctttagattaattcttgagttgctcccctatgcctgtgtagcagaatctaacagataatcatgttaaacaggaaattatattttaaaaataaactctgaaattcataaaaaggaaaatgttaaagaatgtaaaattacactggtannnnnnnnnnnnnnnnnnnnnnnnnntggagtttcactcttggtgcccaagctggtgtgcactggcatgatctctgctcactgcaacttccacctcctgggttcaagcagnnnnnnnnnnnnnnnnnnnnnnnnnnnnnnnnnnnnnnnnncgcgccaccacnnnnnnnnnnnnnnnnnngtttttagtagaannnnnnnnnnnnnnnnnnnannnnnnnnnnnnnnnnnnnnnnnnnnnnnttgatctgcccannnnnnnnnnnnnnnnnnnnnnnnnnnngggcatgagccaattgcgcctggcagacattttttaaaatagaaaaaagtagtccattcatgatgcatgaannnnnnnnnnnnnnnnnnnnnnaaaacatgttcggccaccttcgggcccttcaaaaagcttttctagaccatttcgtttgggcgcgccgggccccat

SEQ ID NO: 31098 - DNA, 140 bp, Macaca Mulatta
cagggatcacaagaatcatcactgcgcaagacagactctcgagggtaccttgtgcgcagtcaatggtctagaacatcccgcagcccatccaccaaggctccatccatagatgagcctagaagcaggaacaccagtgctaa

SEQ ID NO: 31099 - DNA, 268 bp, Macaca Mulatta
  misc_feature (1)...(268): n = A,T,C or G
cacgcttgtcaactacatcgagcctgtcaagttcaagtcctttgaagctgctcgaanagaggaacaaatgcttcgagatgtcgtccttcgtggagaccaaggccatggagcaactgaccaagagccccatggagtttgtgganatacaacaagcagcagctcagccgcatctaccccaagggcacccgcgtggactcctccaactacatgccccagctcttctggaacgtagggtgccagcttgttgcgctcaacttccagaccctcg

SEQ ID NO: 31100 - DNA, 149 bp, Macaca Mulatta
gtgaacataagatccactttattccgggaatgattggtccttttctgggtgtgacactggtcccacagccagaagtacggaatatcatgattcctatctttcatgacatgatggactgggagcagagaaaaaatggcaacttcaaacag

SEQ ID NO: 31101 - DNA, 163 bp, Macaca Mulatta
agctctcaaatcgactagaagtggtgaaggaatttctgagaaacaatgaggatcttagaaatggccttacagaagatatgcagaagctagacagcctccgtctacatcagaaactggattcacaggaacctgggagacagacacctgacaggaaggcctgagg

SEQ ID NO: 31102 - DNA, 1117 bp, Macaca Mulatta
  misc_feature (1)...(1117): n = A,T,C or G
gcagcggtggcagggggctgcaggagcaagtgaccaggagcaggactggggacaggnnnnnnnnnnnnnnnnnnnnnnnnnnnnnnnnnnnnnnnnnnnnnnnnnnnnnnnnnnnnnnnnnnnnnnnnnnnnnnnnnnnnnnnnnnnnnnnnnnnnnnnnnnnnnnnnnnnnnnnnnnnnnnnnnnnnnnnnnnnnnnnnnnnnnnnnnnnnnnnnnnnnnnnnnnnnnnnnnnnnnnnnnnnnnnnnnnnnnnnnnnnnnnnnnnnnnnnnnnnnnnnnnnnnnnnnnnnnnnnnnnnnnnnnnnnnnnnnnnnnnnnnnnnnnnnnnnnnnnnnnnnnnnnnnnnnnnnnnnnnnnnnnnnnnnnnnnnnnnnnnngtggctgcaggtttcgtcctccgccagtgtggcagtgatggccagtggggactttggagagaccacacacaatgtgagaacccagagaagaatgaggcctttctgnnnnnnnnnnnnnnnnnnnnnnnnnnnnnnnnnnnnnnnnnnnnnnnnnnnnnnnnnnnnnnnnnnnnnnnnnnnnnnnnnnnnnnnnnnnnnnnnnnnnnnnnnnnnnnnnnnnnnnnnnnnnnnnnnnnnnnnnnnnnnnnnnnnnnnnnnnnnnnnnnnnnnnnnnnnnnnnnnnnnnnnnnnnnnnnnnnnnnnnnnnnnnnnnnnnnnnnnnnnnnnnnnnnnnnnnnnnnnnnnnnnnnnnnnnnnnnnnnnnnnnnnnnnnnnnnnnnnnnnnnnnnnnnnnnnnnnnnnnnnnnnnnnnnnnnnnnnnnnnnnnnnnnnnnnnnnnnnnnnnnnnnnnnnnnnnnnnnnnnnnnnnnnnnnnnnnnnnnnnnnnnnnnnnnnnnnnnnnnnnnnnnnnngggcccccgcgcttttcgtcattccctgggtgatcgtcaggtacctgtacgagaacacgcagtgngtgctgggagcgcaacgaagtcaaggccatttggtggattatacggacccccatcctcatgaccatcttgngattaatttcctcatttttatccgcattcttggcattctcctgtccaagctgaggacacggcaaatgcgctgccgggattaccggctgagg

SEQ ID NO: 31103 - DNA, 1698 bp, Macaca Mulatta
  misc_feature (1)...(1698): n = A,T,C or G
tggggaattagaaaagggatagtgatgggattctttacgggattcgtgtggtgtctcatctttctgtgttatgcactggccttctggtatggctccacacttgtcctggatgaaggagaatatacaccaggaaccctcgtccagnnnnnnnnnnnnnnnnnnnnnnnnnnnnnnnnnnnnnnnnnnnnnnnnnnnnnnnnnnnnnnnnnnnnnnnnnnnnnnnnnnnnnnnnnnnnnnnnnnnnnnnnnnnnnnnnnnnnnnnnnnnnnnnnnnnnnnnnnnnnnnnnnnnnnnnnnnnnnnnnnnnnnnnnnnnnnnnnnnnnnnnnnnnnnnnnnnnnnnnnnnnnnnnnnnnnnnnnnnnnnnnnnnnnnnnnnnnnnnnnnnnnnnnnnnnnnnnnnnnnnnnnnnnnnnnnnnnnnnnnnnnnnnnnnnnnnnnnnnnnnnnnnnnnnnnnnnnnnnnnnnnnnnnnnnnnnnnnnnnnnnnnnnnnnnnnnnnnnnnnnnnnnnnnnnnnnnnnnnnnnnnnnnnnnnnnnnnnnnnnnnnnnnnnnnnnnnnnnnnnnnnnnnnnnnnnnnnnnnnnnnnnnnnnnnnnnnnnnnnnnnnnnnnnnnnnnnnnnnnnnnnnnnnnnnnnnnnnnnnnnnnnnnnnnnnnnnnnnnnnnnnnnnnnnnnnnnnnnnnnnnnnnnnnnnnnnnnnnnnnnnnnnnnnnnnnnnnnnnnnnnnnnnnnnnnnnnnnnnnnnnnnnnnnnnnnnnnnnnnnnnnnnnnnnnnnnnnnnnnnnnnnnnnnnnnnnnnnnnnnnnnnnnnnnnnnnnnnnnnnnnnnnnnnnnnnnnnnnnnnnnnnnnnnnnnnnnnnnnnnnnnnnnnnnnnnnnnnnnnnnnnnnnnnnnnnnnnnnnnnnnnnnnnnnnnnnnnnnnnnnnnnnnnnnnnnnnnnnnnnnnnnnnnnnnnnnnnnnnnnnnnnnnnnnnnnnnnnnnnnnnnnnnnnnnnnnnnnnnnnnnnnnnnnnnnnnnnnnnnnnnnnnnnnnnnnnnnnnnnnnnnnnnnnnnnnnnnnnnnnnnnnnnnnnnnnnnnnnnnnnnnnnnnnnnnnnnnnnnnnnnnnnnnnnnnnnnnnnnnnnnnnnnnnnnnnnnnnnnnnnnnnnnnnnnnnnnnnnnnnnnnnnnnnnnnnnnnnnnnnnnnnnnnnnnnnnnnnnnnnnnnnnnnnnnnnnnnnnnnnnnnnnnnnnnnnnnnnnnnnnnnnnnnnnnnnnnnnnnnnnnnnnnnnnnnnnnnnnnnnnnnnnnnnnnnnnnnnnnnnnnnnnnnnnnnnnnnnnnnnnnnnnnnnnnnnnnnnnnnnnnnnnnnnnnnnnnnnnnnnnnnnnnnnnnnnnnnnnnnnnnnnnnnnnnnnnnnnnnnnnnnnnnnnnnnnnnnnnnnnnnnnnnnnnnnnnnnnnnnnnnnnnnnnnnnnnnnnnnnnnnnnnnnnnnnnnnnnnnnnnnnnnnnnnnnnnnnnnnnnnnnnnnnnnnnnnnnnnnnnnnnnnnnnnnagggatatgcctttgctaaatccggggagctcctaacaaaaaggctacgtaaattcggtttcagggcaatgttggggcaagacattggctggtttgatgacctcagaaatagccctggagcattgacaacaagacttgctacagatgcttcccaagttcaaggg

SEQ ID NO: 31104 - DNA, 219 bp, Macaca Mulatta
aggggttgtactgggccgtgggggtggtgccatcggccacatgctgctgccctttcggctgggcctggggggccccatcggctcaggccaccaattcttcccctggatacacatcggggacctggcaggaatcctgacccatgctcttgaagcaaaccacgtgcacggggtcctgaatggagtggctccatcctccgccaataatgctgagtttgccca

SEQ ID NO: 31105 - DNA, 622 bp, Macaca Mulatta
gaagctcactgtcggccgacctgcgccaggctcacaccttgcggggctcctgcctcttctgacttcactgggggcccagagacagatgagtgggcgggtgagcaggtggcctgccaggccaggagtgggctggagctgctgaggcccagaaagcccgcatggttcctcaccaggagggtctccctccagcacgggccccacctgctcagtccccgtgctttccaagtggagggggtgtcagttcggtcaccaagagaagcgacttcccaggagcaccagtcccctcacagaggtgctgtgagcgaggcctccttcggcccaggcggagcctcgggcagtctctcctggtcccgcatgtgtccacctcccgctaataataggtattttgtatacagatggacagatatttttttaaacaggggagttttcctgatcttggttcctccttagggggccagacaagaaaggaaaggcctacagtttctggagcaaccctgtcccccacctgtgaccagtcactctggggcaagcatctctgggaagggcacagccggagacctttctcctagtgactggcagtcagcggggcattttaggatgtcagggccccagggtgacatgt

SEQ ID NO: 31106 - DNA, 146 bp, Macaca Mulatta
acctgtgttaaactccttgttgcctgtaaacagttaaccatcagcattaagagaagagctgaccctttccttgactgtctcctggtgggtgagggtccctcaggagggagctgtgggttgaacaggcagattttcccctatgcatg

SEQ ID NO: 31107 - DNA, 728 bp, Macaca Mulatta
tgatttaatgaatcttggctttctaataaataaattgagtgattctggttgcattcctatttccctaagatctactagtgataattttaccttaactgtaagccttttagtcttcaaagtcttccacctgagcccattgttctcatggaggttttgtgatattaaccctcccccaaagactgggatcaccaaatagtttcaaaattctcggtttgtactaatgaccagaagatcagagaaggaaactttaatgctgtctagcctactgctattaatgcaatcaaagaatgcttttgcatatgtcttgataattaaatagtatttgttaactgtgatatgcatacacttatataagcagaattatgagttaaagtaatattttgcaatatgatttttataatggctcctcattatgcttgctgttgaaccttttatgaggagtgaatataaagtattggttttccctcacaaatttaaaggttatgttattaatactattataactgcatccaatcaaatcagataaaggcaactataaaatagtagtagtgtttgtttcctatcccaagggcaaaattttataggaactcaatttattatgcagttttcaaatctaaagtaccaagaaagatgtcactaggttctcttctatgtgatttttgttttttatataaagcagtgtagtggtgtttagaagctgaggccacctataaggcaaatctgcctta

SEQ ID NO: 31108 - DNA, 306 bp, Macaca Mulatta
gggagctgccgcgacggctggacgtggagaagtggatcgacgggcgcctggaggagctgtacagcggcatggaggcagacatgcccgacgagatcaacattgacgaattgttggagttagagagtgaagaggagagaagccggaaaatccagggactcctgaagtcgtgtgggaaacctgtcgaggacttcatccaggagctgctggcaaagcttcaaggcctccacaggcagcccggcctccgccagcccagtacctcccaagatggcagacatcaaaccccctccaggaccgagcccggactga

SEQ ID NO: 31109 - DNA, 3778 bp, Macaca Mulatta
  misc_feature (1)...(3778): n = A,T,C or G
actagatttagaactcaaagaccacgagggcagcacggctctgtggctcgcagtgcagcatatcacggtgtcttctgaccagtctgtgaaccccttcgaagatgtccccgtggtaaatgggacttcatttgatgagaacagctttgcagccagactcatccagcgcggcagccacacggacgcacctgacacnnnnnnnnnnnnnnnnnnnnnnnnnnnnnnnnnnnnnnnnnnnnnnnnnnnnnnnnnnnnnnnnnnnnnnnnnnnnnnnnnnnnnnnnnnnnnnnnnnnnnnnnnnnnnnnnnnnnnnnnnnnnnnnnnnnnnnnnnnnnnnnnnnnnnnnnnnnnnnnnnnnnnnnnnnnnnnnnnnnnnnnnnnnnnnnnnnnnnnnnnnnnnnnnnnnnnnnnnnnnnnnnnnnnnnnnnnnnnnnnnnnnnnnnnnnnnnnnnnnnnnnnnnnnnnnnnnnnnnnnnnnnnnnnnnnnnnnnnnnnnnnnnnnnnnnnnnnnnnnnnnnnnnnnnnnnnnnnnnnnnnnnnnnnnnnnnnnnnnnnnnnnnnnnnnnnnnnnnnnnnnnnnnnnnnnnnnnnnnnnnnnnnnnnnnnnnnnnnnnnnnnnnnnnnnnnnnnnnnnnnnnnnnnnnnnnnnnnnnnnnnnnnnnnnnnnnnnnnnnnnnnnnnnnnnnnnnnnnnnnnnnnnnnnnnnnnnnnnnnnnnnnnnnnnnnnnnnnnnnnnnnnnnnnnnnnnnnnnnnnnnnnnnnnnnnnnnnnnnnnnnnnnnnnnnnnnnnnnnnnnnnnnnnnnnnnnnnnnnnnnnnnnnnnnnnnnnnnnnnnnnnnnnnnnnnnnnnnnnnnnnnnnnnnnnnnnnnnnnnnnnnnnnnnnnnnnnnnnnnnnnnnnnnnnnnnnnnnnnnnnnnnnnnnnnnnnnnnnnnnnnnnnnnnnnnnnnnnnnnnnnnnnnnnnnnnnnnnnnnnnnnnnnnnnnnnnnnnnnnnnnnnnnnnnnnnnnnnnnnnnnnnnnnnnnnnnnnnnnnnnnnnnnnnnnnnnnnnnnnnnnnnnnnnnnnnnnnnnnnnnnnnnnnnnnnnnnnnnnnnnnnnnnnnnnnnnnnnnnnnnnnnnnnnnnnnnnnnnnnnnnnnnnnnnnnnnnnnnnnnnnnnnnnnnnnnnnnnnnnnnnnnnnnnnnnnnnnnnnnnnnnnnnnnnnnnnnnnnnnnnnnnnnnnnnnnnnnnnnnnnnnnnnnnnnnnnnnnnnnnnnnnnnnnnnnnnnnnnnnnnnnnnnnnnnnnnnnnnnnnnnnnnnnnnnnnnnnnnnnnnnnnnnnnnnnnnnnnnnnnnnnnnnnnnnnnnnnnnnnnnnnnnnnnnnnnnnnnnnnnnnnnnnnnnnnnnnnnnnnnnnnnnnnnnnnnnnnnnnnnnnnnnnnnnnnnnnnnnnnnnnnnnnnnnnnnnnnnnnnnnnnnnnnnnnnnnnnnnnnnnnnnnnnnnnnnnnnnnnnnnnnnnnnnnnnnnnnnnnnnnnnnnnnnnnnnnnnnnnnnnnnnnnnnnnnnnnnnnnnnnnnnnnnnnnnnnnnnnnnnnnnnnnnnnnnnnnnnnnnnnnnnnnnnnnnnnnnnnnnnnnnnnnnnnnnnnnnnnnnnnnnnnnnnnnnnnnnnnnnnnnnnnnnnnnnnnnnnnnnnnnnnnnnnnnnnnnnnnnnnnnnnnnnnnnnnnnnnnnnnnnnnnnnnnnnnnnnnnnnnnnnnnnnnnnnnnnnnnnnnnnnnnnnnnnnnnnnnnnnnnnnnnnnnnnnnnnnnnnnnnnnnnnnnnnnnnnnnnnnnnnnnnnnnnnnnnnnnnnnnnnnnnnnnnnnnnnnnnnnnnnnnnnnnnnnnnnnnnnnnnnnnnnnnnnnnnnnnnnnnnnnnnnnnnnnnnnnnnnnnnnnnnnnnnnnnnnnnnnnnnnnnnnnnnnnnnnnnnnnnnnnnnnnnnnnnnnnnnnnnnnnnnnnnnnnnnnnnnnnnnnnnnnnnnnnnnnnnnnnnnnnnnnnnnnnnnnnnnnnnnnnnnnnnnnnnnnnnnnnnnnnnnnnnnnnnnnnnnnnnnnnnnnnnnnnnnnnnnnnnnnnnnnnnnnnnnnnnnnnnnnnnnnnnnnnnnnnnnnnnnnnnnnnnnnnnnnnnnnnnnnnnnnnnnnnnnnnnnnnnnnnnnnnnnnnnnnnnnnnnnnnnnnnnnnnnnnnnnnnnnnnnnnnnnnnnnnnnnnnnnnnnnnnnnnnnnnnnnnnnnnnnnnnnnnnnnnnnnnnnnnnnnnnnnnnnnnnnnnnnnnnnnnnnnnnnnnnnnnnnnnnnnnnnnnnnnnnnnnnnnnnnnnnnnnnnnnnnnnnnnnnnnnnnnnnnnnnnnnnnnnnnnnnnnnnnnnnnnnnnnnnnnnnnnnnnnnnnnnnnnnnnnnnnnnnnnnnnnnnnnnnnnnnnnnnnnnnnnnnnnnnnnnnnnnnnnnnnnnnnnnnnnnnnnnnnnnnnnnnnnnnnnnnnnnnnnnnnnnnnnnnnnnnnnnnnnnnnnnnnnnnnnnnnnnnnnnnnnnnnnnnnnnnnnnnnnnnnnnnnnnnnnnnnnnnnnnnnnnnnnnnnnnnnnnnnnnnnnnnnnnnnnnnnnnnnnnnnnnnnnnnnnnnnnnnnnnnnnnnnnnnnnnnnnnnnnnnnnnnnnnnnnnnnnnnnnnnnnnnnnnnnnnnnnnnnnnnnnnnnnnnnnnnnnnnnnnnnnnnnnnnnnnnnnnnnnnnnnnnnnnnnnnnnnnnnnnnnnnnnnnnnnnnnnnnnnnnnnnnnnnnnnnnnnnnnnnnnnnnnnnnnnnnnnnnnnnnnnnnnnnnnnnnnnnnnnnnnnnnnnnnnnnnnnnnnnnnnnnnnnnnnnnnnnnnnnnnnnnnnnnnnnnnnnnnnnnnnnnnnnnnnnnnnnnnnnnnnnnnnnnnnnnnnnnnnnnnnnnnnnnnnnnnnnnnnnnnnnnnnnnnnnnnnnnnctactgaggtgtcaggagtgcagcggggccgcctggcgcctcgtagcagccgtctctttctctcgtcttgttgcgtcctgtctgtggagtcctcagtcactctgccgctggagagtgctggaggaaatgcacttttatttttctgcactttttatagagctgcattattggtgattccaatttaaaaatccatattcagaaataccctcacgcattcttgcatcagtgattctaatgctcagcggtgactgggcctccgctcacacggtctcccaggagaaactctacagagcatcttttaaagcaagagattcacacaggccaagtgatgagaggtggagtcactaaggcttcagccccaagggcatttccagcctcaggccggcaggtcctatgtccttgacacaaacgcttcttgccgaaatcctccctagtgatgctgcgagtgctgttggtcccagttctgtgtagcttgccctgccccacgaagggccaccagccgagggccctggctacctgtgcaccaccttattttggaagtctctggcttgtgtgctggatgaggccgccagaacttgttgggccggcgtcgctgctagtacatatatgaaccatgaggtgttaaacttttcttttgaaggtttggccagtttctaaaaaatgcacatttaaagagaagcatctaccactgctttaaaacaaaacaactctgagatgaacaatatgtgttatactcagagattagcaatctcaatcatacatactgattctttcagacatttaataaccactaca

SEQ ID NO: 31110 - DNA, 655 bp, Macaca Mulatta
  misc_feature (1)...(655): n = A,T,C or G
cgccgtcagaagagagccagcgtagagtctanggaacaaattgacaacctagccacagaactgtgccgcatcaatgaggatcagaaggtggccctggatcttgacccgtatgttaagaagctacttaatgcccggcgacgcgttgtcttggtcaacaacattctacagaatgctcaggaacgactgaggcggctaaaccacagtgttgccaaggaaacagcccgcaggagagcaatgctggattcgggaatttacccccctggctccccaagcaaataacagatgagcctatggactcagtagcgcaagtactgttcccagctgccttgtttcaacagacatgcaaagatcctaggagacagtccccttagaccttcagacatttaaaaaggcagctgtatgggttgtttgaagcactttgtcttactcatttatgtaggggccccaggaaagctacacacagccagaatgaggttcccaaaggacttacgttaattatggctcttgcttcctttcacaaatgagcagaggcctctactttgttttaacctgcatacttgaggcttaccttcttcaggcctagttaaccagaggggcttcctttgttacatgcctagttacatgggcctgggcagcatgtccttacctgtgactt

SEQ ID NO: 31111 - DNA, 741 bp, Macaca Mulatta
  misc_feature (1)...(741): n = A,T,C or G
aggcctctggctgtacctggcagggnnnnnnnnnnnnnnnnnnnnnnnnnnnnnnnnnnnnnnnnnnnnnnnnnnnnnnnnnnnnnnnnnnnnnnnnnnnnnnnnnnnnnnnnnnnnnnnnnnnnnnnnnnnnnnnnnnnnnnnnnnnnnnnnnnnnnnnnnnnnnnnnnnnnnnnnnnnnnnnnnnnnnnnnnnnnnnnnnnnnnnnnnnnnnnnnnnnnnnnnnnnnnnnnnnnnnnnnnnnnnnnnnnnnnnnnnnnnnnnnnnnnnnnnnnnnnnnnnnnnnnnnnnnnnnnnnnnnnnnnnnnnnnnnnnnnnnnnnnnnnnnnnnnnnnnnnnnnnnnnnnnnnnnnnnnnnnnnnnnnnnnnnnnnnnnnnnnnnnnnnnnnnnnnnnnnnnnnnnnnnnnnnnnnnnnnnnnnnnnnnnnnnnnnnnnnnnnnnnnnnnnnnnnnnnnnnnnnnnnnnnnnnnnnnnnnnnnnnnnnnnnnnnnnnnnnnnnnnnnnnnnnnnnnnnnnnnnnnnnnnnnnnnnnnnnnnnnnnnnnnnnnnnnnnnnnnnnnnnnnnnnnnnnnnnnnnnnnnnnnnnnnnnnnnnnnnnnnnnnnnnnnnnnnnnnnnnnnnnnnnnnnnnnnnnnnnnnnnnnnnnnnnnnnnnnnnnngtggcaggaaatcataactccagctaacaattaaagttccctgattctttatgtgggatgtctgctctatgtgtacataca

SEQ ID NO: 31112 - DNA, 212 bp, Macaca Mulatta
  misc_feature (1)...(212): n = A,T,C or G
gagagacacagccatcatgccagacccgtccaaatcggctcctgcgcccaagaagggttctaaaaaggccgtcaccaaggcgcagaagaaagacggcaagaagcgcanacgcggccgcaaggagagctattctatctacgtgtacaaggtgctgaagcaggtgcaccccgacaccggcatctcgtccaggccatgggcatcatgaactcctt

SEQ ID NO: 31113 - DNA, 89 bp, Macaca Mulatta
aggttctggtgtcgccctcatgtccaactttgagcagctgctccgaggggtctggaagccagagaccaacgagatcctgcacatgtctt

SEQ ID NO: 31114 - DNA, 428 bp, Macaca Mulatta
tggatgactcaaccagcccttctctgtctggtggccctggccgagagcactcagagatcatgcaggcctgggacctggaggctggtatcctagttccagcctggctctggggccctgggctgccacagcccgccctgaatgtgggccatgccaaggcagcggcccagccccctccacccactgccttccttcccagtcccagaggttgggagaacctgggggcagagggcataggaagccgtgcctgacggacaccctcagtgatcaaagacttggaaatgcagaatgttagaaacaaaccatctcagaattttggaaaatcagagcatttcagaatcttaggaaccaagaaacagaatctttgagaagcctgaaatctgagatcatagtagctaccagttaccaagttgttaaaaggcaccaggatg

SEQ ID NO: 31115 - DNA, 794 bp, Macaca Mulatta
ggatgggtagtgcttcgttccagggactttacgccccgggagtctctcagtatcttggtggtagctgggtccggtgggcataccaccgagatcctgaggctgcttgggagcttgtccaatgcctactcacctagacattatgtcattgctgacactgatgaaatgagtgccaataaaataaattcttttgaactagatcgagctgatagagaccctagtaacatgtataccaaatactacattcaccgaattccaagaagccgggaggttcggcagtcctggccctccaccgttttcaccaccttgcactccatgtggctctcctttcccctcattcaccaggtgaagccagatttggtgttgtgtaacggaccaggaacatgtgttcctatctgtgtatctgcccttctccttgggatactaggaataaagaaagtgatcattgtctacgttgaaagcatctgccgtgtagaaacgttatccctgtccggaaagattctgtttcatctctcagattacttcattgttcagtggccagctctgaaagaaaagtatccccaatctgtgtacctcgggcgaattgtttgacaaatggcaactgacttctttagaattttgcagttaacaatagtatgtactcaaattgggggggaaaaaaccctacattttattgtaaaagcatctgacagtcctgagaattattgatggtaaaggaataaaaaatgtacagatgaactcaaggaagaaaactgaagacttctcttaatgaaacaaacacttgataaacggtaacc

SEQ ID NO: 31116 - DNA, 3172 bp, Macaca Mulatta
  misc_feature (1)...(3172): n = A,T,C or G
atacactggtgatgatactcaatgctactgatgcagatgaaccaaacaatttgaattcaaaaatagccttcaagattataagacaagaaccttcagattcaccaatgtttattatcaacagaaatactggagaaattcgaacgatgaataattttctagacagagannnnnnnnnnnnnnnnnnnnnnnnnnnnnnnnnnnnnnnnnnnnnnnnnnnnnnnnnnnnnnnnnnnnnnnnnnnnnnnnnnnnnnnnnnnnnnnnnnnnnnnnnnnnnnnnnnnnnnnnnnnnnnnnnnnnnnnnnnnnnnnnnnnnnnnnnnnnnnnnnnnnnnnnnnnnnnnnnnnnnnnnnnnnnnnnnnnnnnnnnnnnnnnnnnnnnnnnnnnnnnnnnnnnnnnnnnnnnnnnnnnnnnnnnnnnnnnnnnnnnnnnnnnnnnnnnnnnnnnnnnnnnnnnnnnnnnnnnnnnnnnnnnnnnnnnnnnnnnngcccttagattatgaagctatgcagaatctgcaacttagtattggtgtcagaaataaagctgaatttcatcattcaattatgtctcagtataaactgacagcaactgcaattactgtgactgtgttaaatgtaattgaaggcgcagtgtttcgtccaggttcaaagacatatgttgtaactggtaatatgggatcaaattataaagtgggagactttgtagctactgacctggacacaggtggaccttcaacgactgttaggtannnnnnnnnnnnnnnnnnnnnnnnnnnnnnnnnnnnnnnnnnnnnnnnnnnnnnnnnnnnnnnnnnnnnnnnnnnnnnnnnnnnnnnnnnnnnnnnnnnnnnnnnnnnnnnnnnnnnnnnnnnnnnnnnnnnnnnnnnnnncttcaaagaacttgcactggtacaattaatattgacattcaaaatgttgatggagatgacaggactaatacacaggcgagcactgaagttaccaatactgtcagagaagaaagtacttcttccactaactatgaaaccagcacaacttnnnnnnnnnnnnnnnnnnnnnnnnnnnnnnnnnnnnnnnnnnnnnnnnnnnnnnnnnnnnagacaatgtgcatttcggtcctgctggcattggactgctcatcatggggttcttggtcttaggattggtcccatttttgatgatttgttgtgattgtggaggtgctcctcgtagtgcagctggctttgagcctgttcctgaatgttcagatggagcaattcattcatgggcagtagaaggaccacagcctgaaccnnnnnnnnnnnnnnnnnnnnnnnnnnnnnnncacctgataatgcaaatataattgaatgcattgacaactcagnnnnnnnnnnnnnnnnnnnnnnnnnnnnnnnnnnnnnnnnnnnnnnnnnnnnnnnnnnnnnnnnnnnnnnnnnnnnnnnnnnnnnnnnnnnnnnnnnnnnnnnnnnnnnnnnnnnnnnnnnnnnnnnnnnnnnnnnnnnnnnnnnnnnnnnnnnnnnnnnnnnnnnnnnnnnnnnnnnnnnnnnnnnnnnnnnnnnnnnnnnnnnnnnnnnnnnnnnnnnnnnnnnnnnnnnnnnnnnnnnnnnnnnnnnnnnnnnnnnnnnnnnnnnnnnnnnnnnnnnnnnnnnnnnnnnnnnnnnnnnnnnnnnnnnnnnnnnnnnnnnnnnnnnnnnnnnnnnnnnnnnnnnnnnnnnnnnnnnnnnnnnnnnnnnnnnnnnnnnnnnnnnnnnnnnnnnnnnnnnnnnnnnnnnnnnnnnnnnnnnnnnnnnnnnnnnnnnnnnnnnnnnnnnnnnnnnnnnnnnnnnnnnnnnnnnnnnnnnnnnnnnnnnnnnnnnnnnnnnnnnnnnnnnnnnnnnnnnnnnnnnnnnnnnnnnnnnnnnnnnnnnnnnnnnnnnnnnnnnnnnnnnnnnnnnnnnnnnnnnnnnnnnnnnnnnnnnnnnnnnatggtaatgtcactgtgaccgagtcttacaccacctctgacactctgaagccctctgtacactttcacgataaccgacaagcatcaaacgtggtggtgacagagagagtggtcggcccaatctctggcactgatttgcatggaatgttagagatgcctgacttgcgagatgggtcaaatgtcatagtgacagaaagggtaatagcaccaagctctagtctacctgcctctctgactattcatcatcctagagagtcttcaaatgtggtagtgacagaaagagtaatccaaccaacttccggcatgataggtagtcttagtatgcaccccgagttaaccaatgcccacaatgtgtttgtgacagagagggttgtttctggtgctggcgtaactggaattagtggcaccactgggatcagcggtggcataggcagcagtggcctggttggcaccagcatgggtgctgggggtggggccctgagctcttgctggcataagtggtggtggcattggcctgagcagcttgggagggacagccaccattggccacatgaggagttcctctgaccatcactttaaccaaaccattgggtccgcctcccctagcacagctcgaagtcgaatcacaaagtacagtaccgtgcaatatagcaagtagtcaggaccccagctcactttttcatagtcactgtggtttagatccaattcccaccactaaaaaactaacaatgtgatttataacgcacaacttcatgctcaggtcatctaggagcaaggtgagaaatcacaatgagaaaaataaatggaaacaccgctgctaggggagagctctccttagcgttcataaacatttttcttatattaggactaaggaactaaaacttgaggcagagccttctttgtgcctgaatggcctgtagtctatctccagcatgtaactggccttacaacggcaattggcataattctccttgctgttttgcttttccatatagcttgagcaaaatttaaaaagaaccaaatatgcaatatgtgttcatgtctgtgggaaaaatctaaaatgtgtgccacatgccctcagtttcacagataacataaatnnnnnnnnnnnnnnnnnnnnnnnnnnnnnnnnnnnnnnnnnnnnagtttgactacatagtcaagtccacaaaccatcaagccctcctccttaattattgcactaga

SEQ ID NO: 31117 - DNA, 3977 bp, Macaca Mulatta
  misc_feature (1)...(3977): n = A,T,C or G
accgcttgccagaacatgatcgccagcctcggggcccccaacctcaacgtgaccttcaacaagaagaacccgcccgagggcaagaggaaactgagccagaacgagaccgacggcgcggcagtggccggcaacccgggctcggattacttcccaggagggactgctcctggggccccaggaaccggaggcccatccgggaccagtagcagcggctccaaagcctcggggccacccaaccctccagcccagggggacggcaccagcctctcccccaactacaccctggaatccacgtcggggaatgacggcaagccggtccccgggggcggcggccggggacggggtcgcagaaaaagggacagtggtcacgtgagccctggcaccttctttgacaagtactcggcggctccggacagcgggggcgcacctggggtgagcccagggcagcagcaagcgtcaggtgcagccgtcgggggaagctccgcaggggagacgcgcggggcaccgacgccccacgaaaaggcgctcacgtcgccatcctgggggaagggggctgagttgctcctgggggatcagccagacctcattgggtccctggacggtggggccaaatcggacagtagttcgccacacgtgggtgagttcgcctcggacgaggtgagcacgagctacgccaatgaggacgaggtgtcgtccagttctgacaacccccaggcactagttaaagcgagcaggagtcccctggtgaccggctcgcccaaactccctccccgtgtaggcgccggggaacacggaccgaaggcgcccccgcccnnnnnnnnnnnnnnnnnnnnnnnnnnnnnnnnnnnnnnnnnnnnnnnnnnnnnnnnnnnnnnnnnnnnnnnnnnnnnnnnnnnnnnnnnnnnnnnnnnnnnnnnnnnnnnnnnnnnnnnnnnnnnnnnnnnnnnnnnnnnnnnnnnnnnnnnnnnnnnnnnnnnnnnnnnnnnnnnnnnnnnnnnnnnnnnnnnnnnnnnnnnnnnnnnnnnnnnnnnnnnnnnnnnnnnnnnnnnnnnnnnnnnnnnnnnnnnnnnnnnnnnnnnnnnnnnnnnnnnnnnnnnnnnnnnnnnnnnnnnnnnnnnnnnnnnnnnnnnnnnnnnnnnnnnnnnnnnnnnnnnnnnnnnnnnnnnnnnnnnnnnnnnnnnnnnnnnnnnnnnnnnnnnnnnnnnnnnnnnnnnnnnnnnnnnnnnnnnnnnnnnnnnnnnnnnnnnnnnnnnnnnnnnnnnnnnnnnnnnnnnnnnnnnnnnnnnnnnnnnnnnnnnnnnnnnnnnnnnnnnnnnnnnnnnnnnnnnnnnnnnnnnnnnnnnnnnnnnnnnnnnnnnnnnnnnnnnnnnnnnnnnnnnnnnnnnnnnnnnnnnnnnnnnnnnnnnnnnnnnnnnnnnnnnnnnnnnnnnnnnnnnnnnnnnnnnnnnnnnnnnnnnnnnnnnnnnnnnnnnnnnnnnnnnnnnnnnnnnnnnnnnnnnnnnnnnnnnnnnnnnnnnnnnnnnnnnnnnnnnnnnnnnnnnnnnnnnnnnnnnnnnnnnnnnnnnnnnnnnnnnnnnnnnnnnnnnnnnnnnnnnnnnnnnnnnnnnnnnnnnnnnnnnnnnnnnnnnnnnnnnnnnnnnnnnnnnnnnnnnnnnnnnnnnnnnnnnnnnnnnnnnnnnnnnnnnnnnnnnnnnnnnnnnnnnnnnnnnnnnnnnnnnnnnnnnnnnnnnnnnnnnnnnnnnnnnnnnnnnnnnnnnnnnnnnnnnnnnnnnnnnnnnnnnnnnnnnnnnnnnnnnnnnnnnnnnnnnnnnnnnnnnnnnnnnnnnnnnnnnnnnnnnnnnnnnnnnnnnnnnnnnnnnnnnnnnnnnnnnnnnnnnnnnnnnnnnnnnnnnnnnnnnnnnnnnnnnnnnnnnnnnnnnnnnnnnnnnnnnnnnnnnnnnnnnnnnnnnnnnnnnnnnnnnnnnnnnnnnnnnnnnnnnnnnnnnnnnnnnnnnnnnnnnnnnnnnnnnnnnnnnnnnnnnnnnnnnnnnnnnnnnnnnnnnnnnnnnnnnnnnnnnnnnnnnnnnnnnnnnnnnnnnnnnnnnnnnnnnnnnnnnnnnnnnnnnnnnnnnnnnnnnnnnnnnnnnnnnnnnnnnnnnnnnnnnnnnnnnnnnnnnnnnnnnnnnnnnnnnnnnnnnnnnnnnnnnnnnnnnnnnnnnnnnnnnnnnnnnnnnnnnnnnnnnnnnnnnnnnnnnnnnnnnnnnnnnnnnnnnnnnnnnnnnnnnnnnnnnnnnnnnnnnnnnnnnnnnnnnnnnnnnnnnnnnnnnnnnnnnnnnnnnnnnnnnnnnnnnnnnnnnnnnnnnnnnnnnnnnnnnnnnnnnnnnnnnnnnnnnnnnnnnnnnnnnnnnnnnnnnnnnnnnnnnnnnnnnnnnnnnnnnnnnnnnnnnnnnnnnnnnnnnnnnnnnnnnnnnnnnnnnnnnnnnnnnnnnnnnnnnnnnnnnnnnnnnnnnnnnnnnnnnnnnnnnnnnnnnnnnnnnnnnnnnnnnnnnnnnnnnnnnnnnnnnnnnnnnnnnnnnnnnnnnnnnnnnnnnnnnnnnnnnnnnnnnnnnnnnnnnnnnnnnnnnnnnnnnnnnnnnnnnnnnnnnnnntttgcagggatctgcagactcccgagggctagaggacgaagaaagagaatataacaaaatgactttgattcctacgccttttagttttgaaccctggaattcctctgccccctccccaacttttgatggaatcttaccctgttgcaaaactagagccatgtcccaagcatctcacaaaggaataactgctttgagcagagatgagtggtggttgtcatggacaggcacttttgggtgctgttgatgcctgcaaaagccatttatggcttgtggtggggggcatatagattcccgggtgggttagacaagaagtgactgataccacttcacccaaatcggtgatggttatatttaatttcagttattgttatcgagcctgtcttactaaaacgctccactttgagctcctccaccccctctaggtcctcagagtttgcagatccgggctttttttagcaagtgacctgaaggctctgggctcaccatacaacacccacattgtttatttcaaagaactcttcagcaaagggagaggagctttcagaaaaacctcactctttnnnnnnnnnnnnnnnnnnnnnnnnnnnnnnnnnnnnnnnnnnnnnnnnnnnnnnnnnnnnnnnnnnnnnnnnnnnnnnnnnnnnnnnnnnnnnnnnnnnnnnnnnnnnnnnnnnnnnnnnnnnnnnnnnnnnnnnnnnnnnnnnnnnnnnnnnnnnnnnnnnnnnnnnnnnnnnnnnnnnnnnnnnnnnnnnnnnnnnnnnnnnnnnnnnnnnnnnnnnnnnnnnnnnnnnnnnnnnnnnnnnnnnnnnnnnnnnnnnnnnnnnnnnnnnnnnnnnnnnnnnnnnnnnnnnnnnnnnnnnnnnnnnnnnnnnnnnnnnnnnnnnnnnnnnnnnnnnnnnnnnnnnnnnnnnnnnnnnnnnnnnnnnnnnnnnnnnnnnnnnnnnnnnnnnnnnnnnnnnnnnnnnnnnnnnnnnnnnnnnnnnnnnnnnnnnnnnnnnnnnnnnnnnnnnnnnnnnnnnnnnnnnnnnnnnnnnnnnnnnnnnnnnnnnnnnnnnnnnnnnnnnnnnnnnnnnnnnnnnnnnnnnnnnnnnnnnnnnnnnnnnnnnnnnnnnnnnnnnnnnnnnnnnnnnnnnnnnnnnnnnnnnnnnnnnnnnnnnnnnnnnnnnnnnnnnnnnnnnnnnnnnnnnnnnnnnnnnnnnnnnnnnnnnnnnnnnnnnnnnnnnnnnnnnnnnnnnnnnnnnnnntgctgtgtgttaggcaatcctgtaatcttttttgactcttaaaagaaattcatttctgaaatgcttggttggaagactgtgacaatagctcatgaaattgagtgtt

SEQ ID NO: 31118 - DNA, 4203 bp, Macaca Mulatta
  misc_feature (1)...(4203): n = A,T,C or G
gacccctcccgtttccctactggtctggccaacagaggagctacgaatggaacgacttggccaagcttggcagtctccagttgccctgtgcatggaagcctgggaagactttgttggaaggggaggcggggagagggtgctggaggcnnnnnnnnnnggcttctgcaccccttccaaccgccctctttccctggagtccagaaccatagctccgccaactggcttggagatgtggcgggctggcacttctctgtgggtctctgttgcactcttctgccaggagactgtcaccttggaaatgaagtttatgacgtcatcgctgtggctggccaatagaaaaagctcccgtggggcggtgttcctgccccttagactcagcttctnnnnnnnnnnnnnnnnnnnnnnnnnnnnnnnnnnnnnnnnnnnnnnnnnnnnnnnnnnnnnnnnnnnnnnnncgaagctcctcctccccgcctatatataaagggctggcgcggggctcggcggcgccatttcgcgctggagtggagcagcctctagaacgagctggaggattctgcctactgatacagagccttcgagtcgtccggggccgccattacaatccacctccatccgcttggaaatggccttaatcccggcctatgactggtcccagcggacagtacagaccccatagaagcccctgaagctcccctttttcgggccccgcccaatcctcggagtctgtcctccccttctactccgccctcaagaggatttcaaagatggaggcggcggctccctaaaccacttttcgtgttcatccgcctccatccgagaacgaaacgggacctcgtccgccccgtaggctcccgacaagaagaggggatccctgcagagcaacagcgggctatatcgacgacggtgtctgagatcgnnnnnnnnnnnnnnnnnnnnnnnnnnnnnnnnnnnnnnnnnnnnnnnnnnnnnnnnnnnnnnnnnnnnnnnnnnnnnnnnnnnnnnnnnnnnnnnnnnnnnnnnnnnnnnnnnnnnnnnnnnnnnnnnnnnnnnnnnnnnnnnnnnnnnnnnnnnnnnnnnnnnnnnnnnnnnnnnnnnnnnnnnnnnnnnnnnnnnnnnnnnnnnnnnnnnnnnnnnnnnnnnnnnnnnnnnnnnnnnnnnnnnnnnnnnnnnnnnnnnnnnnnnnnnnnnnnnnnnnnnnnnnnnnnnnnnnnnnnnnnnnnnnnnnnnnnnnnnnnnnnnnnnnnnnnnnnnnnnnnnnnnnnnnnnnnnnnnnnnnnnnnnnnnnnnnnnnnnnnnnnnnnnnnnnnnnnnnnnnnnnnnnnnnnnnnnnnnnnnnnnnnnnnnnnnnnnnnnnnnnnnnnnnnnnnnnnnnnnnnnnnnnnnnnnnnnnnnnnnnnnnnnnnnnnnnnnnnnnnnnnnnnnnnnnnnnnnnnnnnnnnnnnnnnnnnnnnnnnnnnnnnnnnnnnnnnnnnnnnnnnnnnnnnnnnnnnnnnnnnnnnnnnnnnnnnnnnnnnnnnnnnnnnnnnnnnnnnnnnnnnnnnnnnnnnnnnnnnnnnnnnnnnnnnnnnnnnnnnnnnnnnnnnnnnnnnnnnnnnnnnnnnnnnnnnnnnnnnnnnnnnnnnnnnnnnnnnnnnnnnnnnnnnnnnnnnnnnnnnnnnnnnnnnnnnnnnnnnnnnnnnnnnnnnnnnnnnnnnnnnnnnnnnnnnnnnnnnnnnnnnnnnnnnnnnnnnnnnnnnnnnnnnnnnnnnnnnnnnnnnnnnnnnnnnnnnnnnnnnnnnnnnnnnnnnnnnnnnnnnnnnnnnnnnnnnnnnnnnnnnnnnnnnnnnnnnnnnnnnnnnnnnnnnnnnnnnnnnnnnnnnnnnnnnnnnnnnnnnnnnnnnnnnnnnnnnnnnnnnnnnnnnnnnnnnnnnnnnnnnnnnnnnnnnnnnnnnnnnnnnnnnnnnnnnnnnnnnnnnnnnnnnnnnnnnnnnnnnnnnnnnnnnnnnnnnnnnnnnnnnnnnnnnnnnnnnnnnnnnnnnnnnnnnnnnnnnnnnnnnnnnnnnnnnnnnnnnnnnnnnnnnnnnnnnnnnnnnnnnnnnnnnnnnnnnnnnnnnnnnnnnnnnnnnnnnnnnnnnnnnnnnnnnnnnnnnnnnnnnnnnnnnnnnnnnnnnnnnnnnnnnnnnnnnnnnnnnnnnnnnnnnnnnnnnnnnnnnnnnnnnnnnnnnnnnnnnnnnnnnnnnnnnnnnnnnnnnnnnnnnnnnnnnnnnnnnnnnnnnnnnnnnnnnnnnnnnnnnnnnnnnnnnnnnnnnnnnnnnnnnnnnnnnnnnnnnnnnnnnnnnnnnnnnnnnnnnnnnnnnnnnnnnnnnnnnnnnnnnnnnnnnnnnnnnnnnnnnnnnnnnnnnnnnnnnnnnnnnnnnnnnnnnnnnnnnnnnnnnnnnnnnnnnnnnnnnnnnnnnnnnnnnnnnnnnnnnnnnnnnnnnnnnnnnnnnnnnnnnnnnnnnnnnnnnnnnnnnnnnnnnnnnnnnnnnnnnnnnnnnnnnnnnnnnnnnnnnnaggatgtatttgagttccgttatgccaagatgccagatgaaccactggaaccagggcctttaccagtctctaatgccatgccccctggcttggccaaatcatcttcagagtcctccagtgaggaaagtagcagtgagagctaaggtgaggaagaggaggaggaagatgaggnnnnnnnnnnnnnnnnnnnnnnnnnnnnnnnnnnnnnnnnnnnnnnnnnnnnnnnnnnnnnnnnnnnnnnnnnnnnnnnnnnnnnnnnnnnnnnnnnnnnnnnnnnnnnnnnnnnnnnnnnnnnnnnnnnnnnnnnnnnnnnnnnnnnnnnnnnnnnnnnnnnnnnnnnnnnnnnnnnnnnnnnnnnnnnnnnnnnnnnnnnnnnnnnnnnnnnnnnnnnnnnnnnnnnnnnnnnnnnnnnnnnnnnnnnnnnnnnnnnnnnnnnnnnnnnnnnnnnnnnnnnnnnnnnnnnnnnnnnnnnnnnnnnnnnnnnnnnnnnnnnnnnnnnnnnnnnnnnnnnnnctccccaaaaaggccacaaagacagccccacctgccctgcctacaggttatgattcagaggaggaggaagagagnnnnnnnnnnnnnnnnnnnnnnnnnnnnnnnnnnnnnnnnnnnnnnnnnnnnnnnnnnnnnnnnnnnnnnnnnnnnnnnnnnnnnnnnnnnnnnnnnnnnnnnnnnnnnnnnnnnnnnnnnnnnnnnnnnnnnnnnnnnnnnnnnnnnnnnnnnnnnnnnnnnnnnnnnnnnnnnnnnnnnnnnnnnnnnnnnnnnnnnnnnnnnnnnnnnnnnnnnnnnnnnnnnnnnnnnnnnnnnnnnnnnnnnnnnnnnnnnnnnnnnnnnnnnnnnnnnnnnnnnnnnnnnnnnnnnnnnnnnnnnnnnnnnnnnnnnnnnnnnnnnnnnnnnnnnnnnnnnnnnnnnnnnnnnnnnnnnnnnnnnnnnnnnnnnnnnnnnnnnnnnnnnnnnnnnnnnnnnnnnnnnnnnnnnnnnnnnnnnnnnnnnnnnnnnnnnnnnnnnnnnnnnnnnnnnnnnnnnnnnnnnnnnnnnnnnnnnnnnnnnnnnnnnnnnnnnnnnnnnnnnnnnnnnnnnnnnnnnnnnnnnnnnnnnnnnnnnnnnnnnnnnnnnnnnnnnnnnnnnnnnnnnnnnnnnnnnnnnnnnnnnnnnnnnnnnnnnnnnnnnnnnnnnnnnnnnnnnnnnnnnnnnnnnnnnnnnnnnnnnnnnnnnnnnnnnnnnnnnnnnnnnnnnnnnnnnnnnnnnnnnnnnnnnnnnnnnnnnnnnnnnnnnnnnnnnnctcttggacacagagcccccattcaaaatggggcagggcaagggtgggaatgtgcaaagccctgatgtagagttacctgaggccatagctgccctattcacttctaagggccctgttttgaggttgtttgttctaatttattttaagctaggtaaggctggggggaagggtggggccgtggtcccctcagcctccacggggagggaagaagggggagctnnnnnnnnnnnnnnnnnnnnnnnnnctactctgttttccctttttccttccgctccatttggggccctgggggtttcagtcatctccccatttggtcccctggactgtctttgttgattctaacttgtaaataaagaaaatattattca

SEQ ID NO: 31119 - DNA, 156 bp, Macaca Mulatta
aaaatggagcatgagcaaatagagacagaaggtcaggttaatgacagtggccaaaaaaataatgaatttggactagtagaaaattataaggaggcattaacacagcagttagagaatgaagatgagacagaccggccatcgttggaatcaggtaat

SEQ ID NO: 31120 - DNA, 353 bp, Macaca Mulatta
  misc_feature (1)...(353): n = A,T,C or G
tggccagtcaactaactcaaagaggagctctctctctgctgttcttcctgactccagcagtgacaccaacatggtatgcaggtnnnnnnnnnnnnnnnnnnnnnnnnnnnnnnnnnnnnnnnnnnnnnnnnnnnnnnnnnnnnnnnnnnnnnnnnnnnnnagtcccccgatggtgttatacattaaatatccaggatggagaagccacatgctactcaccgaggggaggaaattatcacagcagcctgggcacacgttgtgagctctcctgtgaccggggctttcgactgattggaagaagatcggtgcaatgcctgccaagccgtcgctggtctggaactgcctactgcagg

SEQ ID NO: 31121 - DNA, 163 bp, Macaca Mulatta
attagataactcagaaattatgcccatccacatctcatatacttaagctaattatttacttattgttattcagtgtaacatttttagaaagttatcttgagcccagttgcaataggaatattttttattacttacgtaaggggattaagactcaggctataag

SEQ ID NO: 31122 - DNA, 546 bp, Macaca Mulatta
  misc_feature (1)...(546): n = A,T,C or G
agaaaatgaaaggaggattactaactttatgccatcttcaaaccagaagatcttacattggtaagatcatgttggccatggcatggagaatgggctggagatggagagactggaggttggaagtccagttaggagattgctcctgcgctggggagttggtgttaggacagaagatccaagacgcatttcagagnnnnnnnnnnnnnnnnnnnnnnnnnnnnnnnnnnnnnnnnnnnnnnnnnnnnnnnnnnnnnnnnnnnnnnnnnnnnnnnnnnnnnnnnnnnnnnnnnnnnnnnnnnnnnnnnnnnnnnnnnnnnnnnnnnnnnnnnnnnnnnnnnnnnnnnnnnnnnnnnnnnnnnnnnnnnnnnnnnnnnnnnnnnnnnnnnnnnnnnnnnnnnnnnnnnnnnnnnnnnnnnactggtaagaggaagggaaatgcagcctcactgagaaggcctccattctgggagggcttctcaggcccagagaagggagaaagtaatttggaactacccaagtatcggtgatgccaggctacaccctacc

SEQ ID NO: 31123 - DNA, 153 bp, Macaca Mulatta
atgccccgctgcccggcgctcattctgtatctgcagagcagtgcccggatcaccatctccgagggctcctgccccgaacgcatcaccaccatcaccgggtctacagcggctgtcttccatgcagtctccatgattgctttcaaactggatgag

SEQ ID NO: 31124 - DNA, 644 bp, Macaca Mulatta
gggggcacgccccacccgatcgccctgggctgggggcgctgggggccctgcgggcgcggcgggtgccgggcagccgctgggagtccttgtttccgctcccgcccgggactgtgcgctcggctcgcgaaggggtccagcggacgcggcctcggcgggcgacagccgccgcataagagcggcgggctctgttgccatgaaggtgaagattaagtgctggaatggcgtggccacttggctctgggtggccaacgatgagaactgtggcatctgcaggatggcatttaacggctgctgccccgactgcaaggtgcctggcgacgactgcccgctggtgtggggccagtgctcccactgcttccacatgcactgcatcctcaagtggctgcacgcgcagcatgtgcagcagcactgccccatgtgtcgccaggaatggaagttcaaggagtgaggcccggcctggccctcgctggaaggggtgtcccgcggccccttcctcatgctggcgctgatggctgcagatactgctgctaggaacagctcccctaggctgtaacatgttgaaacaggactggagcgcttttgcttcccctcctatgtagcacgttttcccatagtaaaacccttaattacgacacctaaaaaaa

SEQ ID NO: 31125 - DNA, 4656 bp, Macaca Mulatta
  misc_feature (1)...(4656): n = A,T,C or G
agattgataagaacctgaagtcactggagcggtgccagtccctggaggagattcagcgactgtacgaagctggtgactacaaggctgttgtgcatctgctccgccccactttgtgcaccagtgggtttgaccgggccaaacacctggagtttatgacttccattcctgagagaccagcccagctgcttctactgcagnnnnnnnnnnnnnnnnnnnnnnnnnnnnnnnnnnnnnnnnnnnnnnnnnnnnnnnnnnnnnnnnnnnnnnnnnnnnnnnnnnnnnnnnnnnnnnnnnnnnnnnnnnnnnnnnnnnnnnnnnnnnnnnnnnnnnnnnnnnnnnnnnnnnnnnnnnnnnnnnnnnnnnnnnnnnnnnnnnnnnnnnnnnnnnnnnnnnnnnnnnnnnnnnnnnnnnnnnnnnnnnnnnnnnnnnnnnnnnnnnnnnnnnnnnnnnnnnnnnnnnnnnnnnnnnnnnnnnnnnnnnnnnnnnnnnnnnnnnnnnnnnnnnnnnnnnnnnnnnnnnnnnnnnnnnnnnnnnnnnnnnnnnnnnnnnnnnnnnnnnnnnnnnnnnnnnnnnnnnnnnnnnnnnnnnnnnnnnnnnnnnnnnnnnnnnnnnnnnnnnnnnnnnnnnnnnnnnnnnnnnnnnnnnnnnnnnnnnnnnnnnnnnnnnnnnnnnnnnnnnnnnnnnnnnnnnnnnnnnnnnnnnnnnnnnnnnnnnnnnnnnnnnnnnnnnnnnnnnnnnnnnnnnnnnnnnnnnnnnnnnnnnnnnnnnnnnnnnnnnnnnnnnnnnnnnnnnnnnnnnnnnnnnnnnnnnnnnnnnnnnnnnnnnnnnnnnnnnnnnnnnnnnnnnnnnnnnnnnnnnnnnnnnnnnnnnnnnnnnnnnnnnnnnnnnnnnnnnnnnnnnnnnnnnnnnnnnnnnnnnnnnnnnnnnnnnnnnnnnnnnnnnnnnnnnnnnnnnnnnnnnnnnnnnnnnnnnnnnnnnnnnnnnnnnnnnnnnnnnnnnnnnnnnnnnnnnnnnnnnnnnnnnnnnnnnnnnnnnnnnnnnnnnnnnnnnnnnnnnnnnnnnnnnnnnnnnnnnnnnnnnnnnnnnnnnnnnnnnnnnnnnnnnnnnnnnnnnnnnnnnnnnnnnnnnnnnnnnnnnnnnnnnnnnnnnnnnnnnnnnnnnnnnnnnnnnnnnnnnnnnnnnnnnnnnnnnnnnnnnnnnnnnnnnnnnnnnnnnnnnnnnnnnnggtttgattcctgggcaggcatggctctggcccgggccagccgcattcaggacaagctgaactccaatgagctgaagagtgatgggcccatttggaagcatgctacgcctgtcttgaactgcttccgtcgggctctggagatcgacagctccaacttgtccctatggattgagtatggcaccatgtcctatgccttgcactcgttcgcctcacgtcagctgaagcagtggaaaggcgagctgccccctgaggtcgtgcagcagnnnnnnnnnnnnnnnnnnnnnnnnnnnnnnnnnnnnnnnnnnnnnnnnnnnnnnnnnnnnnnnnnnnnnnnnnnnnnnnnnnnnnnnnnnnnnnnnnnnnnnnnnnnnnnnnnnnnnnnnnnnnnnnnnnnnnnnnnnnnnnnnnnnnnnnnnnnnnnnnnnnnnnnnnnnnnnnnnnnnnnnnnnnnnnnnnnnnnnnnnnnnnnnnnnnnnnnnnnnnnnnnnnnnnnnnnnnnnnnnnnnnnnnnnnnnnnnnnnnnnnnnnnnnnnnnnnnnnnnnnnnnnnnnnnnnnnnnnnnnnnnnnnnnnnnnnnnnnnnnnnnnnnnnnnnnnnnnnnnnnnnnnnnnnnnnnnnnnnnnnnnnnnnnnnnnnnnnnnnnnnnnnnnnnnnnnnnnnnnnnnnnnnnnnnnnnnnnnnnnnnnnnnnnnnnnnnnnnnnnnnnnnnnnnnnnnnnnnnnnnnnnnnnnnnnnnnnnnnnnnnnnnnnnnnnnnnnnnnnnnnnnnnnnnnnnnnnnnnnnnnnnnnnnnnnnnnnnnnnnnnnnnnnnnnnnnnnnnnnnnnnnnnnnnnnnnnnnnnnnnnnnnnnnnnnnnnnnnnnnnnnnnnnnnnnnnnnnnnnnnnnnnnnnnnnnnnnnnnnnnnnnnnnnnnnnnnnnnnnnnnnnnnnnnnnnnnnnnnnnnnnnnnnnnnnnnnnnnnnnnnnnnnnnnnnnnnnnnnnnnnnnnnnnnnnnnnnnnnnnnnnnnnnnnnnnnnnnnnnnnnnnnnnnnnnnnnnnnnnnnnnnnnnnnnnnnnnnnnnnnnnnnnnnnnnnnnnnnnnnnnnnnnnnnnnnnnnnnnnnnnnnnnnnnnnnnnnnnnnnnnnnnnnnnnnnnnnnnnnnnnnnnnnnnnnnnnnnnnnnnnnnnnnnnnnnnnnnnnnnnnnnnnnnnnnnnnnnnnnnnnnnnnnnnnnnnnnnnnnnnnnnnnnnnnnnnnnnnnnnnnnnnnnnnnnntttttcacagagcagtgcattgcctccttccgcctgtgcctgagtcgcttcccccagcactataagagtctctaccgtctggccttcctctacacctacagcaagacccaccggnnnnnnnnnnnnnnnnnnnnnnnnnnnnnnnnnnnnnnnnnnnnnnnnnnnnnnnnnnnnnnnnnnnnnnnnnnnnnnnnnnnnnnnnnnnnnnnnnnnnnnnnnnnnnnnnnnnnnnnnnnnnnnnnnnnnnnnnnnnnnnnnnnnnnnnnnnnnnnnnnnnnnnnnnnnnnnnnnnnnnnnnnnnnnnnnnnnnnnnnnnnnnnnnnnnnnnnnnnnnnnnnnnnnnnnnnnnnnnnnnnnnnnnnnnnnnnnnnnnnnnnnnnnnnnnnnnnnnnnnnnnnnnnnnnnnnnnnnnnnnnnnnnnnnnnnnnnnnnnnnnnnnnnnnnnnnnnnnnnnnnnnnnnnnnnnnnnnnnnnnnnnnnnnnnnnnnnnnnnnnnnnnnnnnnnnnnnnnnnnnnnnnnnnnnnnnnnnnnnnnnnnnnnnnnnnnnnnnnnnnnnnnnnnnnnnnnnnnnnnnnnnnnnnnnnnnnnnnnnnnnnnnnnnnnnnnnnnnnnnnnnnnnnnnnnnnnnnnnnnnnnnnnnnnnnnnnnnnnnnnnnnnnnnnnnnnnnnnnnnnnnnnnnnnnnnnnnnnnnnnnnnnnnnnnnnnnnnnnnnnnnnnnnnnnnnnnnnnnnnnnnnnnnnnnnnnnnnnnnnnnnnnnnnnnnnnnnnnnnnnnnnnnnnnnnnnnnnnnnnnnnnnnnnnnnnnnnnnnnnnnnnnnnnnnnnnnnnnnnnnnnnnnnnnnnnnnnnnnnnnnnnnnnnnnnnnnnnnnnnnnnnnnnnnnnnnnnnnnnnnnnnnnnnnnnnnnnnnnnnnnnnnnnnnnnnnnnnnnnnnnnnnnnnnnnnnnnnnnnnnnnnnnnnnnnnnnnnnnnnnnnnnnnnnnnnnnnnnnnnnnnnnnnnnnnnnnnnnnnnnnnnnnnnnnnnnnnnnnnnnnnnnnnnnnnnnnnnnnnnnnnnnnnnnnnnnnnnnnnnnnnnnnnnnnnnnnnnnnnnnnnnnnnnnnnnnnnnnnnnnnnnnnnnnnnnnnnnnnnnnnnnnnnnnnnnnnnnnnnnnnnnnnnnnnnnnnnnnnnnnnnnnnnnnnnnnnnnnnnnnnnnnnnnnnnnnnnnnnnnnnnnnnnnnnnnnnnnnnnnnnnnnnnnnnnnnnnnnnnnnnnnnnnnnnnnnnnnnnnnnnnnnnnnnnnnnnnnnnnnnnnnnnnnnnnnnnnnnnnnnnnnnnnnnnnnnnnnnnnnnnnnnnnnnnnnnnnnnnnnnnnnnnnnnnnnnnnnnnnnnnnnnnnnnnnnnnnnnnnnnnnnnnnnnnnnnnnnnnnnnnnnnnnnnnnnnnnnnnnnnnnnnnnnnnnnnnnnnnnnnnnnnnnnnnnnnnnnnnnnnnnnnnnnnnnnnnnnnnnnnnnnnnnnnnnnnnnnnnnnnnnnnnnnnnnnnnnnnnnnnnnnnnnnnnnnnnnnnnnnnnnnnnnnnnnnnnnnnnnnnnnnnnnnnnnnnnnnnnnnnnnnnnnnnnnnnnnnnnnnnnnnnnnnnnnnnnnnnnnnnnnnnnnnnnnnnnnnnnnnnnnnnnnnnnnnnnnnnnnnnnnnnnnnnnnnaggggaaactgaggcctgagccgagaagggaaggggaggctcaggaggctgcgagtgnnnnnnnnnnnnnnnnnnnnnnnnnnnnnnnnnnnnnnnnnnnnnnnnnnnnnnnnnnnnnnnnnnnnnnnnnnnnnnnnnnnnnnnnnnnnnnnnnnnnnnnnnnnnnnnnnnnnnnnnnnnnnnnnnnnnnnnnnnnnnnnnnnnnnnnnnnnnnnnnnnnnnnnnnnnnnnnnnnnnnnnnnnnnnnnnnnnnnnnnnnnnnnnnnnnnnnnnnnnnnnnnnnnnnnnnnnnnnnnnnnnnnnnnnnnnnnnagtcagccatcctttctgcccagtctgctgccaacgtgaggaaggagagcctgtgccagccggccctggaggtcctggagacatccagccaggagtcctcgctggagagcgagacagacgagggggacgactacatggacatttgaggggcccctgcagccccaccgccacgccccag

SEQ ID NO: 31126 - DNA, 268 bp, Macaca Mulatta
agaaggggcagaatggcgctgggaagtccacccccacgcatttgggctcagctttggacatggagacctgacagctgttgtcctttgggaaccctttgctccactggggcctcaacggaactaaagaagaaaaccgaccctttccccaactacatgtaccagcggaaggaaggaaggccaatgtaggaacccaaaatgcttatttcttctcttacttccctctcacagaaaagtcttacgagaggggaaattccaccaacatccagac

SEQ ID NO: 31127 - DNA, 304 bp, Macaca Mulatta
  misc_feature (1)...(304): n = A,T,C or G
caggatctcatagatcagaagattctggagcctgtaaccagtgcacagagggtgtgggttacaccagtgcttccaacaatctgttttcttgcctcccatgtacagcttgtaaatcagnnnnnnnnnnnnnnnnnnnnnnnnnnnnnnnnnnnnnnnnnnnnnnnnnnnnnnnnnnnnnnnnnnnnnnnnnnnnnnnnnnnnnnnnnnnnnnnnnnnnnnnnnnnnnnnnggtgtcccagagggaaggtcaaggtcaaggattgtacgccctggagtgacatcgagtgtgtccacaacgaatcag

SEQ ID NO: 31128 - DNA, 595 bp, Macaca Mulatta
  misc_feature (1)...(595): n = A,T,C or G
acatactcgggactcaaaccatctccttctctggctgcctcacgcagatgtattttatcagtgagcttgctgacatggacaatttcctcctggctgtgatggcctatgaccactttgtcgctgtgtgccaccccttgtattacacagcaaagatgacccatcagctgtgtgccctgctggtcactggatcacgggtggttaacagcttgaatgctctgctgcacaccctgctgatggctcgactctcattctgtgcagacaacaccatccctcacgtcttccgtgacgtgactcccctcccgaaactctcctgttcagacacacacctcaatgaggtgatgattcttactgaggctgccctagtcacgatcaccccatnnnnnnnnnnnnngcttcctatatgcacatcgcctgtgccatcctgagggtcccatccatgaagggaagatggaaagccgtctccacctgtggctcccacctggctgtggttctcctcttctatggcaccatcatatctctgtatttcagcccttcatcctcccactcagctcagagagatatagcagctgctgtgatgttcacagtagtgagtccc

SEQ ID NO: 31129 - DNA, 963 bp, Macaca Mulatta
  misc_feature (1)...(963): n = A,T,C or G
ggggtgctggcgtgcgttcatcttcagcctggtgtgggccttttaaacatataacataaaaatggcttccaaaagagctctggtcatcctggctaaaggagcagaggaaatggagacggtcatccctgtagatgtcatgaggcgagctgggattaaggtcaccgttgcaggtctggctggaaaagacccagtacagtgtagccgtgatgtggtcatttgtcctgatgccagtcttgaagatgcaaaaaaagagggaccgtatgatgtggtggttctaccaggaggtaatctgggtgcacagaatttatctgagtctgctgccgtgaaggagatactgaaggagcaggaaaaccggaagggcctgatagccgccatctgtgcaggtcctactgctcttttggctcatgaaataggttttggaaagtaaagttaccacacaccctctttgctaaagacaaaatgatgaatggagggtcattacaacctactctgaaaaatcgtagtgggaaaaggaacggccctgatttctttacaagccccagggggccctgggggacccaggcctttccgaagtttttgccacctttggccaattttggttagaaaagccccctgtgaaacccggccaaatggtaaaggttgggctgggcccttcaaaggttggaaaagggcctcccaacacttggtttgccctttantaggacacttaagaaggcccacgctcgaatacctgtgtgggaatgacatctccacctttataaaaagagaaaaccatgggggcccccactttaataggcgaaaaactacaagttcttcctctccaacatatatgatgttttgcagccctagcctttaagaagacctaaaaaaacctcaatactgtgggatatcaaggcgtgtataataagtgggggggcgatttcccctacaaaaaaaaaccctgggtaacattagtattttcaa

SEQ ID NO: 31130 - DNA, 724 bp, Macaca Mulatta
gctcaggttttcaacttggccccctcttctaaccccagaacttgactgatgccatcgcccgagcagctgcagacacattacaggggccgatgcaggcagcctaccgggaagccttccagagtgtggtgctgccggcctttgagaagagctgccaggccatgttccagcaaatcaatgatagcttccgactggggacacaggaatgtgagtggggtcatatggcccaaggtgggagcggttatcctctttccttctgttcctcttatagtccctgtggtcacccctcagacttgcagcagctagaaagccacatgaagagccggaaggcacgggaacaggaggccagggagcctgtgctggcccagctgcggggcctggtcagcacactgcagagtgccactgagcagatggcagccaccgtggccagcagtgttcgggctgaggtgcagcaccagctgcatgtggctgtaggcaggtgtgtgggcagagtactgggcaaggtggtgggcttgagaaaggccagactgggctccctgttcacttcacctcactcacttccctttgcagccttcaggagtccattttagcacaggtacagcgcatcgttaagggtgaggtgagtgtggcgctcaaggagcagcaggccgccgtcacctccagcatcatgcaggccatgcgctcagctgctggcacacctgtcccctctgcccaccttgactgccag

SEQ ID NO: 31131 - DNA, 491 bp, Macaca Mulatta
cagaacgcaggtgctggcgcccgttcggcctgggaccccgggaacctctcctgccggaagccagacggcatggatgggccccaacttcgccctgcccacttcaccaaaccccttcctggaggctgaacctggtgctctggagcgaaggactgtgaacttgtgtggcctgaagagccagagctagctctggccaccagctgggcgacatcaccctgcccttgccccacccccaagttttaaggactgtcttttcagagcttggaggtgtggaaggagtggctgctctccaactatgccaaggcggcggcagagctggtcttctggtctccttggagaaaggttctgttgccctgatttatgaactctataatagagtatataggtttttgtacctttttttacaggaaggtgactttctgtaacaatgcgatgtatattaaactttttataaaagttaacattttgcataataaacgatttttaaacacttg

SEQ ID NO: 31132 - DNA, 629 bp, Macaca Mulatta
ataagctggcaactgactgttcagaaagctgagtctgatctggattacattcaatacaggttggaatatgaaatcaagactaatcatcctgattcagcaagcgagaaaaatccagttacactcttaaaggaattgtcagcaataaagtctcgatatcaaactttgtatgcccgctttaaaccagttgctgttgagcagaaagagactaagagccgcatatgtgctactgtgaataaaactatgaatgtgatacaaaaactacagaagcaaacagacctggagctgtcaccactgactaaagaagagaaaactgcggcagagcaattcaaatctcacatgccagatttatgaagaaatggatctggaaaggaaactaacagagaagagcttaattccagagaaatttaggaagatgttttgttaacccttgatgtctagagattgggggctggtgaaggaggtttggcttcaatgactggataatgatgtctttcatgagagagactataagggcagataatatatgaataaagttcagccaaaagggtcaaaggcgaataaaatgatttaaatatatgtatacacgcatgcacacacacacttagtcttgccatttcaggcaagaaagt

SEQ ID NO: 31133 - DNA, 510 bp, Macaca Mulatta
  misc_feature (1)...(510): n = A,T,C or G
attaaaagacgcctcagagaagctcaaacagcttgagatggagaacagtcctttgctgtcccctcgatccaacatcgatgttaacataaacagccaggnnaggaagaagtggtgaagttgactgaaaaatgccttaataatgtcattgagaacccaggactgaatgccatgagagttcctcctgacttcaagagtaacattttgaaggctcaagtagaagcagtgcataaggnngttacgaaagaagatagcttacttatgtcataaaaatgccaatgttcaggatgctgccacaaacagnnnnnnnnnnnnnnnnnnnnnnnnnnnnnnnnnnnnnnnnnnnnnnnnnnnnnnnnnnnnnnnnnnnnnnnnnnnnnnnnnnnnnnnnnnnnnnnnnnnnnnnnnnnnnnnnnnnnnnnnnnnnnnnnnnnnnnnnnnnnnnnnnnnnnnnnnnnnnnnnnnnnnnnggtgtcttccacatccatgatcacaccccggtggattgttccg

SEQ ID NO: 31134 - DNA, 170 bp, Macaca Mulatta
ttaatttgcatccagtctatggatgggatgctgatggtatttgagcaggagagctatgcttttggaagatttctccctggctttcttctgcctggtcctcttgcctacagttcccgtacagattccttcattactgtctcttcctgccgacaagtggaaagttataagta

SEQ ID NO: 31135 - DNA, 4518 bp, Macaca Mulatta
  misc_feature (1)...(4518): n = A,T,C or G
ggtgttactgtggccgactgattggagaccatgctgggatagattattcctggaccatctcagctgccaagggtaaagaaagtgaacaatggtctgttgaaaagcacacaatgaaaagtccaacagatacttnnnnnnnnnnnnnnnnnnnnnnnnnnnnnnnnnnnnnnnnnnnnnnnnnnnnnnnnnnnnnnnnnnnnnnnnnnnnnnnnnnnnnnnnnnnnnnnnnnnnnnnnnnnnnnnnnnnnnnnnnnnnnnnnnnnnnnnnnnnntccatgggggcatccagaactttactatgccctctaaatttaaagagattttcaaccaaggtttggttaaagctgcagagacaacaggagcgtggataataactgaaggcatcaatacaggnnnnnnnnnnnnnnnnnnnnnnnnnnnnnnnnnnnnnnnnnnnnnnnnnnnnnnnnnnnnnnnnnnnnnnnnnnnnnnnnnnnnnnnnnnnnnnnnnnnnnnnnnnnnnnnnnnnnnnnnnnnntggtgtgcctgtaccagactctgggtaaccccctcagcaagctcacaacactcaacagcatgcattctcacttcatcctgtctgatgatgggactgtgggcaagtatggaaatgaaatgaagctcagaaggaacctggagaagtacctctctctgcagaaaatacactgccgnnnnnnnnnnnnnnnnnnnnnnnnnnnnnnnnnnnnnnnnnnnnnnnnnnnnnnnnnnnnnnnnnnnnnnnnnnnnnnnnnnnnnnnnnnnnnnnnnnnnnnnnnnnnnnnnnnnnnnnnnnnnnnnnnnnnnnnnnnnnnnnnnnnnnnnnnnnnnnnnnnnnnnnnnnnnnnnnnnnnnnnnnnnnnnnnnnnnnnnnnnnnnnnnnnnnnnnnnnnnnnnnnnnnnnnnnnnnnnnnnnnnnnnnnnnnnnnnnnnnnnnnnnnnnnnnnnnnnnnnnnnnnnnnnnnnnnnnnnnnnnnnnnnnnnnnnnnnnnnnnnnnnnnnnnnnnnnnnnnnnnnnnnnnnnnnnnnnnnnnnnnnnnnnnnnnnnnnnnnnnnnnnnnnnnnnnnnnnnnnnnnnnnnnnnnnnnnnnnnnnnnnnnnnnnnnnnnnnnnnnnnnnnnnnnnnnnnnnnnnnnnnnnnnnnnnnnnnnnnnnnnnnnnnnnnnnnnnnnnnnnnnnnnnnnnnnnnnnnnnnnnnnnnnnnnnnnnnnnnnnnnnnnnnnnnnnnnnnnnnnnnnnnnnnnnnnnnnnnnnnnnnnnnnnnnnnnnnnnnnnnnnnnnnnnnnnnnnnnnnnnnnnnnnnnnnnnnnnnnnnnnnnnnnnnnnnnnnnnnnnnnnnnnnnnnnnnnnnnnnnnnnnnnnnnnnnnnnnnnnnnnnnnnnnnnnnnnnnnnnnnnnnnnnnnnnnnnnnnnnnnnnnnnnnnnnnnnnnnnnnnnnnnnnnnnnnnnnnnnnnnnnnnnnnnnnnnnnnnnnnnnnnnnnnnnnnnnnnnnnnnnnnnnnnnnnnnnnnnnnnnnnnnnnnnnnnnnnnnnnnnnnnnnnnnnnnnnnnnnnnnnnnnnnnnnnnnnnnnnnnnnnnnnnnnnnnnnnnnnnnnnnnnnnnnnnnnnnnnnnnnnnnnnnnnnnnnnnnnnnnnnnnnnnnnnnnnnnnnnnnnnnnnnnnnnnnnnnnnnnnnnnnnnnnnnnnnnnnnnnnnnnnnnnnnnnnnnnnnnnnnnnnnnnnnnnnnnnnnnnnnnnnnnnnnnnnnnnnnnnnnnnnnnnnnnnnnnnnnnnnnnnnnnnnnnnnnnnnnnnnnnnnnnnnnnnnnnnnnnnnnnnnnnnnnnnnnnnnnnnnnnnnnnacagtttggccagctggctctggacttgttggagaaggcattcaagcagaatgagcgcatggccatgacgctgttgacgtatgaactcaggaactggagcaattcgacctgcctgaaactggccgtgtcgggaggattacgaccctttgtttcacatacttgtacccaaatgctactgacggacatgtggatggggcgcctgaaaatgaggaagaactcttggttaaannnnnnnnnnnnnnnnnnnnnnnnnnnnnnnnnnnnnnnnnnnnnnnnnnnnnnnnnnnnnnnnnnnnnnnnnnnnnnnnnnnnnnnnnnnnnnnnnnnnnnnnnnnnnnnnnnnnnnnnnnnnnnnnnnnnnnnnnnnnnnnnnnnnnnnnnnnnnnnnnnnnnnnnnnnnnnnnnnnnnnnnnnnnnnnnnnnnnnnnnnnnnnnnnnnnnnnnnnnnnnnnnnnnnnnnnnnnnnnnnnnnnnnnnnnnnnnnnnnnnnnnnnnnnnnnnnnnnnnnnnnnnnnnnnnnnnnnnnnnnnnnnnnnnnnnnnnnnnnnnnnnnnnnnnnnnnnnnnnnnnnnnnnnnnnnnnnnnnnnnnnnnnnnnnnnnnnnnnnnnnnnnnnnnnnnnnnnnnnnnnnnnnnnnnnnnnnnnnnnnnnnnnnnnnnnnnnnnnnnnnnnnnnnnnnnnnnnnnnnnnnnnnnnnnnnnnnnnnnnnnnnnnnnnnnnnnnnnnnnnnnnnnnnnnnnnnnnnnnnnnnnnnnnnnnnnnnnnnnnnnnnnnnnnnnnnnnnnnnnnnnnnnnnnnnnnnnnnnnnnnnnnnnnnnnnnnnnnnnnnnnnnnnnnnnnnnnnnnnnnnnnnnnnnnnnnnnnnnnnnnnnnnnnnnnnnnnnnnnnnnnnnnnnnnnnnnnnnnnnnnnnnnnnnnnnnnnnnnnnnnnnnnnnnnnnnnnnnnnnnnnnnnnnnnnnnnnnnnnnnnnnnnnnnnnnnnnnnnnnnnnnnnnnnnnnnnnnnnnnnnnnnnnnnnnnnnnnnnnnnnnnnnnnnnnnnnnnnnnnnnnnnnnnnnnnnnnnnnnnnnnnnnnnnnnnnnnnnnnnnnnnnnnnnnnnnnnnnnnnnnnnnnnnnnnnnnnnnnnnnnnnnnnnnnnnnnnnnnnnnnnnnnnnnnnnnnnnnnnnnnnnnnnnnnnnnnnnnnnnnnnnnnnnnnnnnnnnnnnnnnnnnnnnnnnnnnnnnnnnnnnnnnnnnnnnnnnnnnnnnnnnnnnnnnnnnnnnnnnnnnnnnnnnnnnnnnnnnnnnnnnnnnnnnnnnnnnnnnnnnnnnnnnnnnnnnnnnnnnnnnnnnnnnnnnnnnnnnnnnnnnnnnnnnnnnnnnnnnnnnnnnnnnnnnnnnnnnnnnnnnnnnnnnnnnnnnnnnnnnnnnnnnnnnnnnnnnnnnnnnnnnnnnnnnnnnnnnnnnnnnnnnnnnnnnnnnnnnnnnnnnnnnnnnnnnnnnnnnnnnnnnnnnnnnnnnnnnnnnnnnnnnnnnnnnnnnnnnnnnnnnnnnnnnnnnnnnnnnnnnnnnnnnnnnnnnnnnnnnnnnnnnnnnnnnnnnnnnnnnnnnnnnnnnnnnnnnnnnnnnnnnnnnnnnnnnnnnnnnnnnnnnnnnnnnnnnnnnnnnnnnnnnnnnnnnnnnnnnnnnnnnnnnnnnnnnnnnnnnnnnnnnnnnnnnnnnnnnnnnnnnnnnnnnnnnnnnnnnnnnnnnnnnnnnnnnnnnnnnnnnnnnnnnnnnnnnnnnnnnnnnnnnnnnnnnnnnnnnnnnnnnnnnnnnnnnnnnnnnnnnnnnnnnnnnnnnnnnnnnnnnnnnnnnnnnnnnnnnnnnnnnnnnnnnnnnnnnnnnnnnnnnnnnnnnnnnnnnnnnnnnnnnnnnnnnnnnnnnnnnnnnnnnnnnnnnnnnnnnnnnnnnnnnnnnnnnnnnnnnnnnnnnnnnnnnnnnnnnnnnnnnnnnnnnnnnnnnnnnnnnnnnnnnnnnnnnnnnnnnnnnnnnnnnnnnnnnnnnnnnnnnnnnnnnnnnnnnnnnnnnnnnnnnnnnnnnnnnnnnnnnnnnnnnnnnnnnnnnnnnnnnnnnnnnnnnnnnnnnnnnnnnnnnnnnnnnnnnnnnnnnnnnnnnnnnnnnnnnnnnnnnnnnnnnnnnnnnnnnnnnnnnnnnnnnnnnnnnnnnnnnnnnnnnnnnnnnnnnnnnnnnnnnnnnnnnnnnnnnnnnnnnnnnnnnnnnnnnnnnnnnnnnnnnnnnnnnnnnnnnnnnnnnnnnnnnnnnnnnnnnnnnnnnnnnnnnnnnnnnnnnnnnnnnnnnnnnnnnnnnnnnnnnnnnnnnnnnnnnnnnnnnnnnnnnnnnnnnnnnnnatgaaactggtgtgtttcgcatcaagaaaaaatggcaaacctccttgccttccacttgtgacagtgattccactcggagtgaacagcaccagaagcagacccagggcagctccctatctgataactcaacgagatcggcccagagtagtgaatgctcagaggtgggaccatggcttcagccaaacacatccttttggatcaatcctctccgcagagacaggcccttcgctaggagtcatagttttagattccataaggaggagaaattgatgaagatctgtaagattaaaan

SEQ ID NO: 31136 - DNA, 120 bp, Macaca Mulatta
tgagaagattgctcacgtctggcatcgcgattcaggtgtttccactgcatgacaaagaagccctgaagaagcttgaggacagctggtacactcggtttgctttaaagtatcagcccatag

SEQ ID NO: 31137 - DNA, 172 bp, Macaca Mulatta
  misc_feature (1)...(172): n = A,T,C or G
ngggacgctcagctgatgtccggcaaggggagtttgttgttgccatgggaagtccctttgcactgcagaacacgatcacatccggcattgttagctctgctcagcgtccagccagagacctgggactcccccaaaccaatgtggaatacattcagacggatgcagctattga

SEQ ID NO: 31138 - DNA, 711 bp, Macaca Mulatta
  misc_feature (1)...(711): n = A,T,C or G
acgtggcagcggggaacgggatgaggagcggaagggttcccccactccagttttctcctctgcttctttgcctccctcaggtagaaaccagcccctgctccagttcactcctgacccctctcctcaagggaaggcctggggtgacccctccccttctcctagctccggagttgctgctctagggcagggcattatgggagaattgggggcagcccaggcagtctcatgccccacactctgtacagactgagaggccagttgatctgctctgttttataccagtgacaataaagattattttttgannnnnnnnnnnnnnnnnnnnnnnnnnnnnnnnnnnnnnnnnnnnnnnnnnnnnnnnnnnnnnnnnnnnnnnnnnnnnnnnnnnnnnnnnnnnnnnnnnnnnnnnnnnnnnnnnnnnnnnnnnnnnnnnnnnnnnnnnnnnnnnnnnnnnnnnnnnnnnnnnnnnnnnnnnnnnnnnnnnnnnnnnnnnnnnnnnnnnnnnnnnnnnnnnnnnnnnnnnnnnnnnnnnnnnnnnnnnnnnnnnnnnnnnnnnnnnnnnnnnnnnnnnnnnnnnnnnnnnnnnnnnnnnnnnnnnnnnnnnnnnnnnnnnnnnnnnnnnnnnnnnnnnnnnnnnnnnnnnnnnnnnnnnnnnnnnnnnnnnnnnnnnnnnnnnnnnnnnnnnnnnnnnnnnnnnnnnnnnnnnnnnna

SEQ ID NO: 31139 - DNA, 405 bp, Macaca Mulatta
cacagatgagcagctcgaagcccaggaggctgcacagctgttggggctctgagtgcagcggctctgcccccttggtcagcctgttgtcaggaaaagtaggaccagtgggactggcaggagcagaaagatgcaggtcctgggcctgactctgggttcacgcctgggagaccttagctaagatcaaagggggccaccttccctggaaagcaccagtgaatgaatatgtggcttcaagagccacacaagcattctgttttcttctttgggttgttgcaagatttttaactgtttaaaatgtagaagcccttcttgggcctccgagtagtgtgcagacctctccagtactgacagtgctagcgcctctggcccaccgcaccacctgcagttcatgggctctgccttgaa

SEQ ID NO: 31140 - DNA, 442 bp, Macaca Mulatta
gaatattgacaattcctcgggaacctggcctctaattagttttagatgacaaggtcttaaggagaaatgaaattatcgatttgagcaatttgtacctgtgattgtaaagtcaatatcggattttattgttgggaccatggacctcttttgtttgtatgttatattgttgtcccaatggaaggagagctcctgattccaggatggactgcaggttgcagtcagggcttgaagcaggagcccaacaaagaaccacctgatggacagtccttgacatgtgttctgtgtgcgtctgtatagccttaagaaaaagaatggcttcactttcattctgtattcttccccccaccgtgtggatgggaggacttgggagggggatggggacattgtgaacctgtcaagaagtgctttatccagagaagcaagttttgcacgattggactgc

SEQ ID NO: 31141 - DNA, 824 bp, Macaca Mulatta
ggggagcgcggccatggagcttctgctgtcggtgctgcgtgtactgctgggcggcttcttcgcgctcgtggggttggccaagctctcggaggagatctcggctccagtttcggagcggatgaacgccctgttcgtgcagtttgctgaggtgttcccgctgaaggtatttggctaccagccagatcccctgaactaccaaatagctgtgggctttctggaactgctggctgggctgctgctggccacgggcccaccgatgctgcaagagatcactaacttgttcctgattctgcctctgatgggggctatcttcaccttggcagctctaaaggagtctgtagccacctgtatcccggcccgcgtcgggcggggggtcctggctgctgccgagtgtcgggccgcgcttggccgcgactaggaggggggtcggatgccgctgggaagaagaggctaggcgccttgggcgggtgcctcgatgcacagcttccgcgcctcgggttgcccggccgcgtgtcggcgggggagtccgggccagctccagtccgtgggcgtctgggtgagatcggaaagacggggaggcgtcacagggtggaacgcgcccaggggggccgacgcggggccgggaacacgcgtgcgccggcggggggcccgccgaccggcgcggcacgcgcccctgcccgcgggctgctgcgcctccgcctgcccccgagcccgtgcgccgcggcggcgcgcgccgggtctcggtggggcccccggcgcgccgatgagcggcggtgggctgagcgcggcgatgtggttgcaccggcgttggcgtgccccgcatg

SEQ ID NO: 31142 - DNA, 638 bp, Macaca Mulatta
gggactgaacagtataaatatgtcaagatcacagcaagttaataacttcaccagtaatgatgtagacatggaaacagatcactactccaatggagttggagaaacttcatccaatggtttcctaaatggtagctctaaacatgaccacgaaatggaagattgtgacaccgaaatggaagttgattcaagtcagttgagacgccagttgtgtggaggaagtcaggccgccatagaaagaatgatccactttggacgagagctgcaagcgatgagtgaacagctaaggagagactgcggcaagaacactgcaaataaaaaaatgttgaaggatgcattcagtttactagcatattcagatccctgggacagcccagttggaaatcagcttgacccgattcagaagaacctgtgtgctcagctcttaacagtgcaatattagaaacccccaatctgccaaaagcaacctccacttgccctagcaatgggacggccaaacaatgtcaaggactgaggctccataggaattggatcctgccctttgccaagtgggaaaaaccctatttccatggctttaagaccccacttttttggggcaaaatcaaatgaaataaacccctcctgatttaaattaattttta

SEQ ID NO: 31143 - DNA, 819 bp, Macaca Mulatta
  misc_feature (1)...(819): n = A,T,C or G
tgtgctcgcggtcatcaattatagaccctataacatgcaccctgaagacagaatgttccagaccagagctgttatcttgagaaccctctccttggctttgctgctgagtctcggaggagctggggccatcaaggnnnnnnnnnnnnnnnnnnnnnnnnnnnnnnnnnnnnnnnnnnnnnnnnnnnnnnnnnnnnnnnnnnnnnnnnnnnnnnnnnnnnnnnnnnnnnnnnnnnnnnnnnnnnnnnnnnnnnnnnnnnnnnnnnnnnnnnnnnnnnnnnnnnnnnnnnnnnnnnnnnnnnnnnnnnnnnnnnnnnnnnnnnnnnnnnnnnnnnnnnnnnnnnnnnnnnnnnnnnnnnnnnnnnnnnnnnnnnnnnnnnnnatccccctgaggtcactcgtgtttcccaaggagcctgtggagctgggccaacccaacaccctcatctgccacattgacaagttcttccctccagtgctcaacgtcacgtggctgtgcaacgggcagccggccactgagggtgtcgctgagagcctcttcctgcccagaacagactacagcttccacaagttccattacttgacctttgtgccctcagccgaggactactatgattgcagggtggagcactggggcttggaccagccgctcctcaaacactgggngaggcccaagagccaatccagatgcctgagacaacggagactgtgctctgtgccctgggcctggtgctgggcctagtgngcatcatcgtgngcaccgtcctcatcataaagtctctgcgatctggccgtgacccccgggcccaggggcccctgtga

SEQ ID NO: 31144 - DNA, 205 bp, Macaca Mulatta
gaagcaacctcctgaaaccaaaacgcccgacgcggacacggtgggagacgtgggtatccctcgggggttctctctcgggtccgcactcaactggcagctgctcctcggctggacgccgaggggggccgacccccatctccacttcatgggctctccaggggcctcagcccaccgccagcgctctcccggcaaccgcgagcaattt

SEQ ID NO: 31145 - DNA, 757 bp, Macaca Mulatta
  misc_feature (1)...(757): n = A,T,C or G
gggaaaatctgtttgcaaccactggttatcctggcaaaatggcaagccagtttcaaattcatcatttaggacaccctcagggacccatttatcaacagaaaaaaaggccaggtgcaatggctcacacttgtaatcccaactctttgggaggccgaagggagtnnnnnnnnnnnnngnnnnnnnnnnnnnnnnannnnnnnnnnnnnnnnnnnnnnnnnnnnnnnnnnnnnnnnnnnnnnnnnnnnnttagccaagcatggtttggaagannnnnnnnnnnnnnnnnnnnnnnnntggaaggcagaggttacggtgagccaagatcgtgccacttcactgnnnnnnnnnnnnnnnnnnnnnnnnatctnnnnnnnnnnnnnnnnnnnnnnnnnnnnnnnnntatcttagggtactccggaagtggttgttgnnnnnnnnnnnnnnnnnnnnnnnnnnnnnnnnnnnnnnnnnnnnnnnnnacncnntgtaaaanagggttttcagtttcttaaaatatgtaatttgattatattaactttaaccctggtttattatatgcagaattccttttggaataggggggctttaaaaatcttaataaaaatgtgggtaattgggggatcaaaaatggacttcctaatggtaatccccctttaaaaacccctccctttttttacgaaatccttccaccgggtttcttttacccagagaaaaactttaaattgttttttttgaaaaaaaggggcaaccctatttg

SEQ ID NO: 31146 - DNA, 326 bp, Macaca Mulatta
  misc_feature (1)...(326): n = A,T,C or G
gcgaccattgctctcctggcggaggacggcaacctagtgagcctggaggaggacctgaaggaaggggctgcatggacccaaaccatgggcaactccctgctgaaggagcgagccatatatgtcctcgttcnnnnnnnnagggagaggacatggtccccacccgctatgagtccctactggagaacctggatgaccattacccagagctggcanncagaggaactgcgcaggctgtcaggcctctcctctgcaggccacaactggaggaagcgcatgggcacccggcgtggccgccatgagcaaagccccacttcaaggcccagaaa

SEQ ID NO: 31147 - DNA, 612 bp, Macaca Mulatta
  misc_feature (1)...(612): n = A,T,C or G
gggcatcgtcctgcagtggttgacggatatattcagacgttacgacacggatcaggatggctggattcaggtgtcgtatgaacagtacctgtccatggtcttcagtatcgtatgaccctggcctctcgtgaagagcagcacgacatggcaagagccgaaacgccaaagttcctgcctgtgagggaatggaacccagatgcagttagatgctgttcttcctttagattttaccgtgtggggacccagctgtacatatgtggataaggtgattaatgttttccaactgtaatagtagctgcatcattataatgcagacattggatttggtgactgtctcattgtgccatgaggtaaatgtaataatgtttgaggcattctgcttgcaaagaaatctatcatgtgcttttctagatgtctctggttctatagtggaaatgcttttattagccaataggaattttaaaataatatggaacttgcacaaaaggcttttcatgtgccttacttttttaaaaaggagtttattgtattcattggtatatgcgacgtaagcaataaagggaatgttagacctgtcacaaacnnnnnnnnnnnnnnnnnnnnnnnnntgtc

SEQ ID NO: 31148 - DNA, 478 bp, Macaca Mulatta
  misc_feature (1)...(478): n = A,T,C or G
tttaaatcccgatataaaaataataaccagttacttattcttttgttgtttgcaggcacctagaaatataaaagcagactggcattcatctaattttttacactgaaatgtagattgccnccaaacgtgatttnggaaagagataatttcttgaaaatcttatcagaaagatgcatagttatttaattttntccagtatgtactcatgtttttatgaaatacaataccatatnntagtgccagggattatttaaaccttaaacaatattgtgcacacatcatcgtagtcctcaatatatagtaatgctatttacagtaactcaagaaccatgtgctacctggctttgaaggaaaaaaaaagaattctactacattacagtggatggaggccttttgttttcagatgaatgctacagcaatgcgaggccgtttgtcaggcataactggcaaaacaaatccattattaaaaagccacttt

SEQ ID NO: 31149 - DNA, 169 bp, Macaca Mulatta
tacctaccaggcagaacctggagccagaccttggcctgacagccaccaagggaggctacctggctgtccctgcccagccctagtggcggcacacagatagagggagcccagttacaaatgctctttatttccaactcgcgggtgggggtgttggggaggggaggtgata

SEQ ID NO: 31150 - DNA, 950 bp, Macaca Mulatta
  misc_feature (1)...(950): n = A,T,C or G
agatttccacatggaagaggcactggattggcctggagtatacttgttgccaggccaggtttctggggtggctctagaccctaagaataacctggtgattttccacagaggtgaccatgtctgggatggaaannnnnnnnnnnnnnnnnnnnnnnnnnnnnnnnnnnnnnnnnnnnnnnnnnnnnnnnnnnnnnnnnnnnnnnnnnnnnnnnnnnnnnnnnnnnnnnnnnnnnnnnnnnnnnnnnnnnnnnnnnnnnnnnnnnnnnnnnnnnnnnnnnnnnnnnnnnnnnnnnnnnnnnnnnnnnnnnnnnnnnnnnnnnnnnnnnnnnnnnnnnnnnnnnnnnnnnnnnnnnnnnnnnnnnnnnnnnnnnnnnnnnnnnnnnnnnnnnnnnnnnnnnnnnnnnnnnnnnnnnnnnnnnnnnnnnnnnnnnnnnnnnnnnnnnnnnnnnnnnnnnnnnnnnnnnnnnnnnnnnnnnnnnnnnnnnnnnnnnnnnnnnnnnnnnnnnnnnnnnnnnnnnnnnnnnnnnnnnnnnnnnnnnnnnnnnnnnnnnnnnnnnnnnnnnnnnnnnnnnnnnnnnnnnnnnnnnnnnnnnnnnnnnnnnnnnnnnnnnnnnnnnnnnnnnnnnnnnnnnnnnnnnnnnnnnnnnnnnnnnnnnnnnnnnnnnnnnnnnnnnnnnnnnnnnnnnnnnnnnnnnnnnnnnnnnnnnnnnnnnnnnnnnnnnnnnnnnnnnnnnnnnnnnnnnnnnnnnnnnnnnnnnnnnnnnnnnnnnnnnnnnnnnnnnnnnnnnnnnnnnnnnnnnnnnnnnnnnnnnnnnnnnnnnnnnnnnnnnnnnnnnnnnnnnnnnnnnagcactttgatatgcctcatgatattgttgcatctgaagatgggaccgtgtacattggagatgctcataccaacactgtgtggaagttcactttgactgaga

SEQ ID NO: 31151 - DNA, 119 bp, Macaca Mulatta
tgatgacagagaaacagatacagcatcagaaagcagttaccagctcagcagacacaagaagagcccgagctctttaaccaatcttagcagctcctctggcatgacgtccttgtcttctg

SEQ ID NO: 31152 - DNA, 3789 bp, Macaca Mulatta
  misc_feature (1)...(3789): n = A,T,C or G
agctgggaaaactcttcagatttttaacattgaaatgaaaagtaaaatgaaggctcatactatgactgatgatgtcaccttttggaaatggatctctnnnnnnnnnnnnnnnnnnnnnnnnnnnnnnnnnnnnnnnnnnnnnnnnnnnnnnnnnnnnnnnnnnnnnnnnnnnnnnnnnnnnnnnnnnnnnnnnnnnnnnnnnnnnnnnnnnnnnnnnnnnnnnnnnnnnnnnnnnnnnnnnnnnnnnnnnnnnnnnnnnnnnnnnnnngcaaaatcgtgtggtgggagctatgcagctatattctgtagataggaaagtgtnnnnnnnnnnnnnnnnnnnnnnnnnnnnnnnnnnnnnnnnnnnnnnnnnnnnnnnnnnnnnnnnnnnnnnnnnnnnnnnnnnnnnnnnnnnnnnnnnnnnnnnnnnnnnnnnnnnnnnnnnnnnnnnnnnnnnnnnnnnnnnnnnnnnnnnnnnnnnnnnnnnnnnnnnnnnnnnnnnnnnnnnnnnnnnnnnnnnnnnnnnnnnnnnnnnnnnnnnnnnnnagatcagtgaaaagcatgatgtggtattcttgataaccaagtatggttatatccacctctatgatcttgagactggtacctgcatctacatgaatagaatcagtggagaaacgatttttgttactgcacctcatgaagccacagctggaataattggagtaaacagaaagggacaagnnnnnnnnnnnnnnnnnnnnnnnnnnnnnnnnnnnnnnnnnnnnnnnnnnnnnnnnnnnnnnnnnnnnnnnnnnnnnnnnnnnnnnnnnnnnnnnnnnnnnnnnnnnnnnnnnnnnnnnnnnnnnnnnnnnnnnnnnnnnnnnnnnnnnnnnnnnnnnnnnnnnnnnnnnnnnnnnnnnnnnnnnnnnnnnnnnnnnnnnnnnnnnnnnnnnnnnnnnnnnnnnnnnnnnnnnnnnnnnnnnnnnnnnnnnnnnnnnnnnnnnnnnnnnnnnnnnnnnnnnnnnnnnnnnnnnnnnnnnnnnnnnnnnnnnnnnnnnnnnnnnnnnnnnnnnnnnnnnnnnnnnnnnnnnnnnnnnnnnnnnnnnnnnnnnnnnnnnnnnnnnnnnnnnnnnnnnnnnnnnnnnnnnnnnnnnnnnnnnnnnnnnnnnnnnnnnnnnnnnnnnnnnnnnnnnnnnnnnnnnnnnnnnnnnnnnnnnnnnnnnnnnnnnnnnnnnnnnnnnnnnnnnnnnnnnnnnnnnnnnnnnnnnnnnnnnnnnnnnnnnnnnnnnnnnnnnnnnnnnnnnnnnnnnnnnnnnnnnnnnnnnnnnnnnnnnnnnnnnnnnnnnnnnnnnnnnnnnnnnnnnnnnnnnnnnnnnnnnnnnnnnnnnnnnnnnnnnnnnnnnnnnnnnnnnnnnnnnnnnnnnnnnnnnnnnnnnnnnnnnnnnnnnnnnnnnnnnnnnnnnnnnnnnnnnnnnnnnnnnnnnnnnnnnnnnnnnnnnnnnnnnnnnnnnnnnnnnnnnnnnnnnnnnnnnnnnnnnnnnnnnnnnnnnnnnnnnnnnnnnnnnnnnnnnnnnnnnnnnnnnnnnnnnnnnnnnnnnnnnnnnnnnnnnnnnnnnnnnnnnnnnnnnnnnnnnnnnnnnnnnnnnnnnnnnnnnnnnnnnnnnnnnnnnnnnnnnnnnnnnnnnnnnnnnnnnnnnnnnnnnnnnnnnnnnnnnagtggttagtcaactactttggttccttatcagtagaagactccctagaatgtctcagagccatgctgtctgccaacattcgtcagaatctgcagatctgtgttcaagtggcttctaaatatcatgaacaactgtcaactcagtctctgattgaactttttgaatctttcaagagttttgaaggnnnnnnnnnnnnnnnnnnnnnnnnnnnnnnnnnnnnnnnnnnnnnnnnnnnnnnnnnnnnnnnnnnnnnnnnnnnnnnnnnnnnnnnnnnnnnnnnnnnnnnnnnnnnnnnnnnnnnnnnnnnnnnnnnnnnnnnnnnnnnnnnnnnnnnnnnnnnnnnnggaagcgaaactaacagatcagctaccacttatcattgtatgtgatcgatttgactttgtcttttatttggtgctctatttatatagaaataatcttcaaaagtatatagagatatatgtacagaaggtnnnnnnnnnnnnnnnnnnnnnnnnnnnnnnnnnnnnnnnnnnnnnnnnnnnnnnnnnnnnnnnnnnnnnnnnnnnnnnnnnnnnnnnnnnnnnnnnnnnnnnnnnnnnnnnnnnnnnnnnnnnnnnnnnnnnnnnnnnngattgaaactgcttctgccttggctagaggccagaattcatgagggctgtgaggagcctgctactcacaatgccttagccaaaatctacatagacagtaataacaacccggagagatttcttcgtgaaaatccctactatgacagtcgcgttgttggaaagtattgtgagaagagagatccacatctggcctgtgttgcttatgaacgtggccagtgtgatctggaacttattaatgtnnnnnnnnnnnnnnnnnnnnnnnnnnnnnnnnnnnnnnnnnnnnnnnnnnnnnnnnnnnnnnnnnnnnnnnnnnnnnnnnnnnnnnnnnnnnnnnnnnnnnnnnnnnnnnnnnnnnnnnnnnnnnnnnnnnnnnnnnnnnnnnnnnnnnnnnnnnnnnnnnnnnnnnnnnnnnnnnnnnnnnnnnnnnnnnnnnnnnnnnnnnnnnnnnnnnnnnnnnnnnnnnnnnnnnnnnnnnnnnnnnnnnnnnnnnnnnnnnnnnnnnnnnnnnnnnnnnnnnnnnnnnnnnnnnnnnnnnnnnnnnnnnnnnnnnnnnnnnnnnnnnnnnnnnnnnnnnnnnnnnnnnnnnnnnnnnnnnnnnnnnnnnnnnnnnnnnnnnnnnnnnnnnnnnnnnnnnnnnnnnnnnnnnnnnnnnnnnnnnnnnnnnnnnnnnnnnnnnnnnnnnnnnnnnaggtcttaattgaacatattggaaacttggatcgggcatatgagtttgctgaacgttgcaatgaacctgcggtctggagtcaacttgcaaaagcccagttgcagaaaggaatggtgaaagaagccattgattcttatatcaaagcagacgatccttcctcctacatggaagttgttcaggctgccaatactagtggnnnnnnnnnnnnnnnnnnnnnnnnnnnnnnnnnnnnnnnnnnnnnnnnnnnnnnnnnnnnnnnnnnnnnnnnnnnnnnnnnnnnnnnnnnnnnnnnnnnnnnnnnnnnnnnnnnnnnnnnnnnnnnnnnnnnnnnnnnnnnnnnnnnnnnnnnnnnnnnnnnnnnnnnnnnnnnnnnnnnnnnnnnnnnnnnnnnnnnnnnnnnnnnnnnnnnnnnnnnnnnnnnnnnnnnnnnnnnnnnnnnnnnnnnnnnnnnnnnnnnnnnnnnnnnnnnnnnnnnnnnnnnnnnnnnnnnnnnnnnnnnnnnnnnnnnnnnnnnnnnnnnnnnnnnnnnnnnnnnnnnnnnnnnnnnnnnnnnnnnnnnnnnnnnnnnnnnnnnnnnnnnnnnnnnnnnnnnnnnnnnnnnnnnnnnnnnnnnnnnnnnnnntcaggatcgtggctattttgaagagctgattaccatgttggaagcagcactgggacttgagcgagctcacatgggaatgtttactgaattagctattctatactctaaatttaagcctcagaaaatgagggagcacctggagctgttctggtctagagtgaatattcccaaggt

SEQ ID NO: 31153 - DNA, 529 bp, Macaca Mulatta
  misc_feature (1)...(529): n = A,T,C or G
ttgtgagtacagaggtggtcagagcccaagaagaatgggaagctgtggacaccatccagccagagacaggnnnnnnnnnnnnnnnnnnnnnnnnnnnnnnnnnnnnnnnnnnnnnnnnnnnnnnnnnnnnnnnnnnnnnnnnnnnnnnnnnnnnnnnnnnnnnnnnnnnnnnnnnnnnnnnnnnnnnnnnnnnnnnnnnnnnnnnnnnnnnnnnnnnnnnnnnnnnnnnnnnnnnnnnnnnnnnnnnnnnnnnnnnnnnnnnnnnnnnnnnnnnnnnnnnnnnnnnnnnnnnnnnnnnnnnnnnnnnnnnnnnnnnnnnnnnnnnnnnnnnnnnnnnnnnnnnnnnnnnnnnnnnnnnnnnnnnnnnnnnnnnnnnnnnnnnnnnnnnnnnnnnnnnnnnnnnnnnngagcgaatccagccacggacctgagaggcgcaggcttccttgccctcctgcatctgctgtacctggtgatggactcaaagaccttgctgatggcacaggaaaatttccgcctgtctcgtcac

SEQ ID NO: 31154 - DNA, 504 bp, Macaca Mulatta
  misc_feature (1)...(504): n = A,T,C or G
caggtgaaatcccagcatccactaaagctggtgttgtcctatcgacccagctggatcgtgtaaccagtctatgggaagtgagnnnnnnnnnnnnnnnnnnnnnnnnnnnnnnnnnnnnnnnnnnnnnnnnnnnnnnnnnnnnnnnnnnnnnnnnnnnnnnnnnnnnnnnnnnnnnnnnnnnnnnnnnnnnnnnnnnnnnnnnnnnnnnnnnnnnnnnnnnnnnnnnnnnnnnnnnnnnnnnnnnnnnnnnnnnnnnnnnnnnnnnnnnnnnnnnnnnnnnnnnnnnnnnnnnnnnnnnnnnnnnnnnnnnnnnnnnnnnnnnnnnnnnnnnnnnnnnnnnnnnnnnnnnnnnnnnnnnnnnnnnnnnnnnnnnnnnnnnnnnnnnnnnnnnnnnnnnnnnnnnnnnnnnnnnnnnnnnnngtttgttggcatccaaagctgttggggttgatggtgctgaaaaaaaggaagactacaatgaaacagctccaatgctggagcagg

SEQ ID NO: 31155 - DNA, 682 bp, Macaca Mulatta
ttgttagcatgtttgggggaatgaggattggtgggattcttggggccacaggaatctgaggcaatggaagatacatagagtgatcttccccctgccgagaggaaactggcacctgtcaagcagatgctgtcagttcaaacttcagcttttaagatagctattcaaggcagaaggtcagcaggaggatgtgtatttctaatctgccctggtaaagtcataggtaagactcaaaagcaggatcttactcaaaaggcaggtatttcctgccttctgtcttgaaacagccccttcccctaaggtgcattctctcaagtcttcagtattgctttatttgcagtgattttttaaaagagatgagagactttggagacaacataagcaacacatatagacatgaagtgctctagacagagatgaatataaatctggcctgataaccagttttccgtgtaacagtgattttgtgtttcaggggctgaagtagtggttatattaatagccactaattcccttatccctttaaaagatttttacagttctccagccacaaacagcacttctaaaaccaactttattttctgcccataatttgttctacatggaaaaaaaaattactttggccaggggcgtgtgtaaatgtggcagaattcctagtagactgacctttacagtatgggccttt

SEQ ID NO: 31156 - DNA, 816 bp, Macaca Mulatta
  misc_feature (1)...(816): n = A,T,C or G
caggggtgctgttcctgcagttcggggaggagactcggcgcgtgcacatcacgcacgaggtcagcagcctggacacgctgcacgcactcatcgcgcatatgttcccgcagaagctcaccatgggcatgcttaagtcgcccaataccgccatcctcatcaaagncgaggctcgcaacgtcttctacgnnnnnnnnnnnnnnnnnnnnnnnnnnnnnnnnnnnnnnnnnnnnnnnnnnnnnnnnnnnnnnnnnnnnnnnnnnnnnnnnnnnnnnnnnnnnnnnnnnnnnnnnnnnngagagagatggtgtacgcgtcgcgggagtcgtcgcccacgcggcgcctcaacaatctgtcgccagcgccgcacctggcgtccggctcgccgccgcccgggctgccgtcggggctgccatcggggctgcagtccggctcgccgtcgcgctcgcgtctctcgtacgccggggggcggccgccctcgtatgccggcagcccggtgcaccacgcggccgaaaggctgggaggcgccccgcccgcccagggcgtcagccccagccccagcgccatcctggagcggcgcgacgtgaagccggacgaggacctggcgggcaaggcgggcggcatggtgctggtgaagggcgagggtctctatgcagacccctacgggttactgcacgagggccgtctgagcctggccgcggccgccggcgacccgttcgcctacccgggagctggcggcctctacaagcgcggctcggtgcgctcgctaagcacctactcggccgccgctctgcagtccgatctggaggactccctgta

SEQ ID NO: 31157 - DNA, 137 bp, Macaca Mulatta
agtctggtttgttgctggcatgataggggccgccctcttcatcctcattcagctggtgctgttggtagactttgctcattcttggaatgaatcatgggtaaatcgaatggaagaaggaaacccaaggttgtggtatg

SEQ ID NO: 31158 - DNA, 172 bp, Macaca Mulatta
gatccatgccttccagtatgtcatctatggaactgcctctttcttcttcctttatggggccctcctgctggctgagggcttctacaccaccggcgcagtcagaaagatctttggcgactacaagaccaccatctgcggcaaggaacggagcgcaacggtaacagggggccag

SEQ ID NO: 31159 - DNA, 268 bp, Macaca Mulatta
tgtctcgactccggaggatcgaaatcgccacttacctgaacctgtcggagaagcaggtgaaaatctggtttcagaaccgccgagtgaagcacaagaaggaggggaaaggcacgcagaggaacagtcacgcaggctgcaagtgcgtcgggagccaggtgcactacgcgcgctccgaggatgaggactccctgtcgccggcctctgccaacgatgacaaggagatttcccccttatgaggaagagcctcctccctcacatccccagctcc

SEQ ID NO: 31160 - DNA, 476 bp, Macaca Mulatta
agagcactgctactttttaaaatacttctttctcttaaaagtctttatcaaagctgtgtggccatgtcaaccttgggccgaggggtgtggcaacctgcaggcgggagggccggggcctgggtccaggtgagaacagtcaggaccctcctctccctgccgcacagccccagcctgtggagaaggacaggagcgtttggctgctgtcaccagggtgggggctgcactgcctgtgcctctggaaccagctgggggtcctgaaggcccgtcctctgcccatctctgttgccagggtctcgccgcccgagccccgagagtgtcttgaatcttaggaggttggagtcactgtggggggacagccaggctccgtccctcctgccacacaggctgtgccccccgcaagtgggccatgcaccctcaggagtgccctctcctcctctccctgttgctgtggcccctggagcagggacccctgggct

SEQ ID NO: 31161 - DNA, 568 bp, Macaca Mulatta
  misc_feature (1)...(568): n = A,T,C or G
ggtgcagctggtgcagtttgggcctgaggtgaagcaccctgtggcctcagtgaaggttttctgcgaggcttctggttacagctttaccacctatggtatgaattgggtgagacaggtccctggagaagggcttgagtggatgggannnnnnnnnnnnnnnnnnnnnnnnnnnnnnnnnnnnnnnnnnnnnnnnnnnnnnnnnnnnnnnnnnnnnnnnnnnnnnnnnnnnnnnnnnnnnnnnnnnnacaggtgcccagtcccaggtccagctggtgcagtccggggctgaggtgaagaagcctggggcctcagtgaaggtttcctgcaaggcttctggattcaccttcggcagctatgctatcagctgggtgcgacaggcccctggacaagggcttgagtggatgggagtgatcatccctcttgttggtataacaaactacgcagagaagttccagggcagagtcacgattaccgcggacacgtccacaagcacagcctacatggagctgagcagcctgagatctgaggacacggccgtgtattactgtgcgagaggcacagtgtgaaa

SEQ ID NO: 31162 - DNA, 89 bp, Macaca Mulatta
tttacttttagaagcccaatcaacaccatttcaggtcacaccttcaactatggcaaatattgtgaaaggcctgtataccctcagaccag

SEQ ID NO: 31163 - DNA, 767 bp, Macaca Mulatta
  misc_feature (1)...(767): n = A,T,C or G
ngattctcaaagaccaggtgcccacttaactgtgaaaaagatatttgttggtggcattaaagaagacaccgaagaacatcacctaagagattattttgaacagtatgggaaaattgaagtgattgaaatcatgactgaccgaggcagtggcaagaaaaggggctttgccttgtgtaacctttgacgaccatgactccgtggataagattgtctcagaaataccatactgtgaatggccacaactgtgaagttaggaaagccctgtcaaagcaagagatggctagtgcttcatccagccaaagaggtnaggtcgaagtggttctggaaactttggtggtggtcgtggaggtggtttcggtgggaatgacaacttcggtcgtggaggaaacttcagtggtcgtggtnnnnnnnnnnnnnnnnnnnnnnnnnnnnnnnnnnnnnnnnnnnnnggtggttatggaggaggcggccctggttactctggaggaagcagaggctatggaagtggtggacagggttatggaaaccagggcagtggctatggcgggagtggcagctatgacagctataacaacggaggcggaggcggctttggcggtggtagtggnggaagcaattttggaggtggtggaagctacaatgattttggcaattacaacaatcagtcttcaaattttggacccatgaagggaggaaattttggaggcagaagctctggcccctatggcggtggaggtcaatactttgcaaaaccacgaaaccaaggt

SEQ ID NO: 31164 - DNA, 129 bp, Macaca Mulatta
  misc_feature (1)...(129): n = A,T,C or G
agtcaggaagtgaagatcactgcagttaaccctcccacatcaagaaagttaaaacctaggacaaaattgaagttagaaaacttccaacttaannagtattgttttctgtaaacacaatttaagaacaaa

SEQ ID NO: 31165 - DNA, 487 bp, Macaca Mulatta
aagtagagaaagaaaaattaggggccagttctcaggaacacaggtcctttatttttattttaactaatttgaagacccactcaaaaagctcctgtggttttatgttcttgacctttcatctggagtcctctcattcagcaggtggcgtgtgagacatagaatacatgtctgtttgctaaagtaaaattacgtaactcagtccaattattggtgatggaagtgtcatttaaggggatctatgttttgaatcttgcagtctttctttctattttataatcttttaaaagcttctccctttaaaaaatgtatacacgaatgcacactctacacatatatttccatatatttaatattccataaattttgaaataatttcaagaaaattatcacaaataatttttccacagggcaaattatttaaatttttagtaagcattctgtaatgaaaaaccaacagctatactaaaaacattttttgaagaagaat

SEQ ID NO: 31166 - DNA, 557 bp, Macaca Mulatta
gagttttaaaagagaaaatagtaattattggtttgagctcagtgacgtagattagtatttacatgattggaaaagaaaggacgttggaactaaaaactgtattttttcttttacaggttaccgcccaagtcctcgggaccgtgcttctagaggtcgtgggggacttggaccttcctgggctagtgcaaatagcggcagtggaggctcaagaggaaagtttgttagtggaggaagtggtagaggtcgtcatgtacgctcctttacacgataagaatccttttgggaacatcttaactgtatatgaacattttgtgaggacaataaaaataagacattgaaggaccaatttagacttagcagttatctggagacatctgagagaatatttttatctgaagaaagcagattttgtttgatacctaacaagatttcaataaaaatccaaactttgtatgtacgtttctatatattttccctttttttgtatgactatttatttagaaaatttctaggtagaaaaactgaatgacgttttgtatttttcttgcctatagcac

SEQ ID NO: 31167 - DNA, 2936 bp, Macaca Mulatta
  misc_feature (1)...(2936): n = A,T,C or G
gactgctaagagggggtcaaaggggggacgatgtgaaggagagaaactggtccttgagaaggcgaagaagtaagaaaggggaagcagtgaaggaggacagagatactgggacagggagaaaaaagctgagaatagcttttaaggagtcatttggtgaccatggatccaacgtgcccttctgagtgcatttataacctcatacccagtgactgaaggagcctccccagcctcctagnnnnnnnnnnnnnnnnnnnnnnnnnnnnnnnnnnnnnnnnnnnnnnnnnnnnnnnnnnnnnnnnnnnnnnnnnnnnnnnnnnnnnnnnnnnnnnnnnnnnnnnnnnnnnnnnnnnnnnnnnnnnnnnnnnnnnnnnnnnnnnnnnnnnnnnnnnnnnnnnnnnnnnnnnnnnnnnnnnnnnnnnnnnnnnnnnnnnnnnnnnnnnnnnnnnnnnnnnnnnnnnnnnnnnnnnnnnnnnnnnnnnnnnnnnnnnnnnnnnnnnnnnnnnnnnnnnnnnnnnnnnnnnnnnnnnnnnnnnnnnnnnnnnnnnnnnnnnnnnnnnnnnnnnnnnnnnnnnnnnnnnnnnnnnnnnnnnnnnnnnnnnnnnnnnnnnnnnnnnnnnnnnnnnnnnnnnnnnnnnnnnnnnnnnnnnnnnnnnnnnnnnnnnnnnnnnnnnnnnnnnnnnnnnnnnnnnnnnnnnnnnnnnnnnnnnnnnnnnnnnnnnnnnnnnnnnnnnnnnnnnnnnnnnnnnnnnnnnnnnnnnnnnnnnnnnnnnnnnnnnnnnnnnnnnnnnnnnnnnnnnnnnnnnnnnnnnnnnnnnnnnnnnnnnnnnnnnnnnnnnnnnnnnnnnnnnnnnnnnnnnnnnnnnnnnnnnnnnnnnnnnnnnnnnnnnnnnnnnnnnnnnnnnnnnnnnnnnnnnnnnnnnnnngcatgataccaacagcacaactttgaaaactgttaagtattttgaactggaaatggtaacatgtgccttcttactactctaagtgtctccaacacattgtttctgaactccacaaatgcaaaagatgtattttcctgtggcccatgacatttgcagttattccaagtgataaatattttcagtattcataacactgtatatgatgaaaggcttctatttggaggaagaaaaattaagaagataacttacaaaatcaagactacaacttgtaaaaggcatcactgaggatgattaaggagaatagcctcctttctagcatactaacttcgatattcttgttttattccacaactcactatgcatatcttatttaaatgttttttttccttttggtcctttctacttatctattttatgaattctaaagttacatttgtaagattacataatctattaagcaataagtttatgttagtagagctgttttcaacccnnnnnnnnnnnnnnnnnnnnnnnnnnnnnnnnnnnnnnnnngttattttatgaaattttaaattagaaaaattgggtaaaatatatgcaactataaaatatcagagaagtaaccattcctactacttacactggtttttatcctctggacaacatgaaaaacaaaatatgggagtctttcaagctttttttgcaaacacagaatttggaagccttatagaaaagcttattttggctacttaaagaaaaatagttcacatacaatttttttgaagattcacttgaaactttgtctgtatgagtatctttattcctttattaacttagggtggatataaaataaaggataatatatgatacgttctcacttaccaagaatgggtgggttgctatttagggtaggctaacagctgtgaaagtacactccaaaatgtataattacataaacatatattcaattcttgctaacatagcagtgctttgctgtgagcaggccagcaggaacccttttctgcagtcactcagggaccccagacttaccagagtgggtaggatgcacctgatccagagttagggagaggcatgtacaggccaggcctagaaatgatgcatatcattcccgtttgcatcgctaagtaagcaacttaagttactttaacaaactaactccaaatctcagttgcctgatacagatacatttttcatgtacatcactgtgcaatgcgaccaagggtgggggtataactctgttccctcagtcactcaggggcccactctccttttgtctagtggctctgttgatccaggcagcctttctctgccagttcaggatgagatgtttaggtaagtattttatttgtgaaatgattgctatacatactcatttttaaataattcaaaatcggtagcaatgcaaaaatattctaattactttagccttatggatattatgctttgaagtcatgagtgggagttgccttaaatgttaaaatgaaaactttgtggttttaacagctaattcttttgccttctgtaaatgtctactaaagaatctagacttttctctatggtctacactgttgtcctagatggacattgttgcttttctttcacacagccttcagagtgaaacattcccatctattgttcctgggagggtgatccctaccatgggatcccaactttggataaagccagttcaacctcccccaatccatacacatatatacgtgggtcatcctatcacccagaagagggacaaacacctgacttggacagctggccagtgactgatcagattctctctctctcttgagagcatgaattaagagacatggagactgcagtcacttgggagtagacacctgaaactaaaaagtcaaacttcattatgcagctagtttgacttggtttctcttcctgttcaaaggaagaatgggtagaataaagatttgatgtggtctggccccttgtctgtgatctttttagcttgatttcttgaaatgctgcttcttccctacc

SEQ ID NO: 31168 - DNA, 2813 bp, Macaca Mulatta
  misc_feature (1)...(2813): n = A,T,C or G
gatgaactcccagctagcccagatgactcggataatagcgtgtcagagagcctggatgaattcgattactctgtggctgagattagccgctcattccgatcacagcaagaaatatgtgagcaactcaacatcaatcacatgatccaaaggatcttccttattactctggacaacagtgnnnnnnnnnnnnnnnnnnnnnnnnnnnnnnnnnnnnnnnnnnnnnnnnnnnnnnnnnnnnnnnnnnnnnnnnnnnnnnnnnnnnnnnnnnnnnnnnnnnnnnnnnnnnnnnnnnnnnnnnnnnnnnnnnnnnnnnnnnnnnnnnnnnnnnnnnnnnnnnnnnnnnnnnnnnnnnnnnnnnnnnnnnnnnnnnnnnnnnnnnnnnnnnnnnnnnnnnnnnnnnnnnnnnnnnnnnnnnnnnnnnnnnnnnnnnnnnnnnnnagattaccaaagttccagagaacctgctaccctttgcagtgcagtgcagaaacctcactgtgtctaatacccgaacagttcttctcacccccgagatctatgttgaccaaaacatccatgagcaactggtagatttgatgttagaagccatccagggagcccgtgagtacatgagcaaaatcnnnnnnnnnnnnnnnnnnnnnnnnnnnnnnnnnnnnnnnnnnnnnnnnnnnnnnnnnnnnnnnnnnnnnnnnnnnnnnnnnnnnnnnnnnnnnnnnnnnnnnnnnnnnnnnnnnnnnnnnnnnnnnnnnnnnnnnnnnnnnnnnnnnnnnnnnnnnnnnnnnnnnnnnnnnnnnnnnnnnnnnnnnnnnnnnnnnnnnnnnnnnnnnnnnnnnnnnnnnnnnnnnnnnnnnnnnnnnnnnnnnnnnnnnnnnnnnnnnnnnnnnnnnnnnnnnnnnnnnnnnnnnnnnnnnnnnnnnnnnnnnnnnnnnnnnnnnnnnnnnnnnnnnnnnnnnnnnnnnnnnnnnnnnnnnnnnnnnnnnnnnnnnnnnnnnnnnnnnnnnnnnnnnnnnnnnnnnnnnnnnnnnnnnnnnnnnnnnnnnnnnnnnnnnnnnnnnnnnnnnnnnnnnnnnnnnnnnnnnnnnnnnnnnnnnnnnnnnnnnnnnnnnnnnnnnnnnnnnnnnnnnnnnnnnnnnnnnnnnnnnnnnnnnnnnnnnnnnnnnnnnnnnnnnnnnnnnnnnnnnnnnnnnnnnnnnnnnnnnnnnnnnnnnnnnnnnnnnnnnnnnnnnnnnnnnnnnnnnnnnnnnnnnnnnnnnnnnnnnnnnnnnnnnnnnnnnnnnnnnnnnnnnnnnnnnnnnnnnnnnnnnnnnnnnnnnnnnnnnnnnnnnnnnnnnnnnnnnnnnnnnnnnnnnnnnnnnnnnnnnnnnnnnnnnnnnnnnnnnnnnnnnnnnnnnnnnnnnnnnnnnnnnnnnnnnnnnnnnnnnnnnnnnnnnnnnnnnnnnnnnnnnnnnnnnnnnnnnnnnnnnnnnnnnnnnnnnnnnnnnnnnnnnnnnnnnnnnnnnnnnnnnnnnnnnnnnnnnnnnnnnnnnnnnnnnnnnnnnnnnnnnnnnnnnnnnnnnnnnnnnnnnnnnnnnnnnnnnnnnnnnnnnnnnnnnnnnnnnnnnnnnnnnnnnnnnnnnnnnnnnnnnnnnnnnnnnnnnnnnnnnnnnnnnnnnnnnnnnnnnnnnnnnnnnnnnnnnnnnnnnnnnnnnnnnnnnnnnnnnnnnnnnnnnnnnnnnnnnnnnnnnnnnnnnnnnnnnnnnnnnnnnnnnnnnnnnnnnnnnnnnnnnnnnnnnnnnnnnnnnnnnnnnnnnnnnnnnnnnnnnnnnnnnnnnnnnnnnnnnnnnnnnnnnnnnnnnnnnnnnnnnnnnnnnnnnnnnnnnnnnnnnnnnnnnnnnnnnnnnnnnnnnnnnnnnnnnnnnnnnnnnnnagaatgaagaatccccacctgagggccaaactagcagaggtgttggaagcagtgatgccccacctggatcagaccccaaatcctttggtatccagtgtgttccaccggaaacgtgtgttctgcaactttcagtatgcaccccaacttgcagaggctctaatcaaggtttttgtggacatcgaatttacagnnnnnnnnnnnnnnnnnnnnnnnnnnnnnnnnnnnnnnnnnnnnnnnnnnnnnnnnnnnnnnnnnnnnnnnnnnnnnnnnnnnnnnnnnnnnnnnnnnnnnnnnnnnnnnnnnnnnnnnnnnnnnnnnnnnnnnnnnnnnnnnnnnnnnnnnnnnnnnnnnnnnnnnnnnnnnnnnnnnnnnnnnnnnnnnnnnnnnnnnnnnnnnnnnnnnnnnnnnnnnnnnnnnnnnnnnnnnnnnnnnnnnnnnnnnnnnnnnnnnnnnnnnnnnnnnnnnnnnnnnnnnnnnnnnnnnnnnnnnnnnnnnnnnnnnnnnnnnnnnnnnnnnnnnnnnnnnnnnnnnnnnnnnnnnnnnnnnnnnnnnnnnnnnnnnnnnnnnnnnnnnnnnnnnnnnnnnnnnnnnnnnnnnnnnnnnnnnnnnnnnnnnnnnnnnnnnnnnnnnnnnnnnnnnnnnnnnnnnnnnnnnnnnnnnnnnnnnnnnnnnnnnnnnnnnnnnnnnnnnnnnnnnnnnnnnnnnnnnnnnnnnnnnnnnnnnnnnnnnnnnnnnnnnnnnnnnnnnnnnnnnnnnnnngggatgaggagaatttctgtgccactgtgcccaaggatggacgttcctattccccaactctctttgcacagacagttcgagtcttgaagaaaataaataagcctgggaacatgattgtggctttcagcaacttggcagagagaatcaa

SEQ ID NO: 31169 - DNA, 318 bp, Macaca Mulatta
  misc_feature (1)...(318): n = A,T,C or G
gatcttgcgtctaatgctgctccacatcaaatacctgtacgggatccgagtggaggtgcgaggggctcaccacttccctccctcacagccctatgttgttgtctccaaccaccagagctccctcgatctgcttggngggatgatggaagtgctgccaggccgctgtgtgcccattgccaagcgtgagctactgtgggctggctctgccgggctggcctgctggctggcaggagtcatcttcatcgaccggaagcgcacgggggatgccatcagtgtcatgtctgaagtcgcccagaccctgctcacccaggacgtgag

SEQ ID NO: 31170 - DNA, 126 bp, Macaca Mulatta
aattagtgatgttcagagatgttgccattgacttttctcatgaagagtgggaatgtctggactccgctcagagagatttgtatagagatgtgatgtcggagaactacagcaacttggtatcactag

SEQ ID NO: 31171 - DNA, 490 bp, Macaca Mulatta
  misc_feature (1)...(490): n = A,T,C or G
aggtttcaaagctttggtaattactttggatacacctgtatgtggcaataggcgacatgacattcgaaaccaattgaggaggaacttaacactaacagatcttcagtcacctaaaaagnnagggaaactcaataccttatttccagatgactcctatcagcacttctctctgctggaatgatctctcctggtttcagagcataactcgattgcccatcatccttaaagggattctgacgaaagaggatgcagagnnnnnnnnnnnnnnnnnnnnnnnnnnnnnnnnnnnnnnnnnnnnnnnnnnnnnnnnnnnnnnnnnnnnnnnnnnnnnttgatgctttgacagaagtggtggctgctgtaaaggggaaaattgaagtctaccttgatggcggggtccgaactggcaatgatgtgctgaaggctctggcccttggggctaggtgcatttttcttgggagaccaatcttatggggtcttgcctacaagg

SEQ ID NO: 31172 - DNA, 412 bp, Macaca Mulatta
  misc_feature (1)...(412): n = A,T,C or G
ttgttaagtcgtttcctctgcaaaggacttcctggcaggtgtgaaaggcagcggtggccacagaggcggtggagagatggccttcagctgttcccaggctccctacctgagcccagnnnnnnnnnnnnnngggactatccaagggggtctccaggacggacttcagatcactgtcaatgggactgttctcagctccagtggaannaggtttgctgtgactttcagaccagcttcggtggaaacgacctgcctttccacttcaaccctccattgaaagagggagggtaagtggtgtgcaacacaaggcagaaaggaagctgggagcctgaggataggaagatgcacattctctcccagcagggaatgccctttgacctctgcttcctggtgcagagctcagatttcaaggtga

SEQ ID NO: 31173 - DNA, 1283 bp, Macaca Mulatta
  misc_feature (1)...(1283): n = A,T,C or G
tcgtaaccgcaccctgcgacggcccagagacgctccagcgcgagttcctcaaatgttttcctgtgttgccaggaccgtccgccgctctgagtcatgtgcgagtgggaagtctcactgacactgagaccggccagtgggagcggagccgagcgcggcgcggggctgagggactcgcagtgtatatagagcgccgggctcctgcgaatgggggctgcccccggnnnnnnnnnnnnnnnnnnnnnnnnnnnnnnnnnnnnnnnnnnnnnnnnnnnnnnnnnnnnnnnnnnnnnnnnnnnnnnnnntgcgggaccatggagcggtagccgaggaggaagcatgctggccgtcggctgcgcgctgctggctgccctgctggccgcgccgggggcggcgctggccccggggggctgccctgcgcaggnnnnnnnnnnnnnnnnnnnnnnnnnnnnnnnnnnnnnnnnnnnnnnnnnnnnnnnnnnnnnnnnnnnnnnnnnnnnnnnnnnnnnnnnnnnnnnnnnnnnnnnnnnnnnnnnnnnnnnnnnnnnnnnnnnnnnnnnnnnnnnnnnnnnnnnnnnnnnnnnnnnnnnnnnnnnnnnnnnnnnnnnnnnnnnnnnnnnnnnnnnnnnnnnnnnnnnnnnnnnnnnnnnnnnnnnnnnnnnnnnnnnnnnnnnnnnnnnnnnnnnnnnnnnnnnnnnnnnnnnnnnnnnnnnnnnnnnnnnnnnnnnnnnnnnnnnnnnnnnnnnnnnnnnnnnnnnnnnnnnnnnnnnnnnnnnnnnnnnnnnnnnnnnnnnnnnnnnnnnnnnnnnnnnnnnnnnnnnnnnnnnnnnnnnnnnnnnnnnnnnnnnnnnnnnnnnnnnnnnnnnnnnnnnnnnnnnnnnnnnnnnnnnnnnnnnnnnnnnnnnnnnnnnnnnnnnnnnnnnnnnnnnnnnnnnnnnnnnnnnnnnnnnnnnnnnnnnnnnnnnnnnnnnnnnnnnnngcagcctgatccgcctgccaacatcacagtcactgccgtggccagaaacccccgctggctcagtgtcacctggcaagacccccactcctggaactcatctttctacagactacggtttgagctcagatatcgagctgaacggtcaaagacattcacaacatggatggtnnnnnnnnnnnnnnnnnnnnnnnnnnnnnnnnnnnnnnnnnnnnnnnngaggcacgtggtgcagcttcgtgcccaggaggagttcgggcaaggcgagtggagcgagtggagcccggaggccatgggcacgccttggaca

SEQ ID NO: 31174 - DNA, 402 bp, Macaca Mulatta
ataaaacacaggctttcacaaattttgtattgctttttttccagttttgcagaaaatttacattctagttctcttcacacagtagaagttgtaaataatttatgaatgacagtacacattaaaaggtatgcattaacagcatattagtatgctgttttatttgctgaagaaaatactgtcttctatttttaatgatacgttaggtacgacgtgtagttcggtagagttctaaaatttttgtactactttcaatttggtgaaaacgtattaagttgtctaccatgttttcttttctagctgaataaaccacatcaaagaaaagggaccacagtatttgaatgtttgaaagtctgtaaagcttaaggttttaaaaatgttgcccgtaatgttgaacatgtctgt

SEQ ID NO: 31175 - DNA, 436 bp, Macaca Mulatta
atgtgttgtatttttaagatcctttaaataaaaaatccttataagtttatgtaaagcaaaataacactaacatgttgtacatataaatcaactgttggaatattttattctagagggcttgaaatgtggatgaatacagattatgaatacagaatggtctgggggaagaagttaaaacatttgatttaaatacaggaaagaaggaatcttagagcagaagataaaagaacagccttttctaaacaataccttgcaaaagtcaagtcagtggaaaccaggaaagccaaaaaaacgaagaatatccacttgcttcttatctaacctataggctgaagaatttccggtttgaggaaggctctaaagaaagtaaacagttaacagtacaccacacagtaatctcagaataaaagagggaccttctttgtaaagaatggtg

SEQ ID NO: 31176 - DNA, 4471 bp, Macaca Mulatta
  misc_feature (1)...(4471): n = A,T,C or G
nagctgccttctcctatgaggagacagccaagctggcagtgggccgcctctctgagtacagccaccacttcgtgagtgcctttgcacgtggggccagcgcctacttcctgttcctgcggcgggacctgcaggctcagtctagagcctttcgtgcctatgtgtctcgagtgtgcctccgggaccagcactactattcctatgtggagttgcctctggcctgccaaggtggccgctacgggctgatccaggctgcagctgtggccacgtccagggaggtggcgcatggggaggtgctctttgcagccttctcctcggctgcaccccccactgtgggccgacccccattggtggctgctggggcatctggagcctctgccctctgtgccttccccctggatgaggtggaccggcttgctaatcgcacgcgagatgcctgctacacccgggagggccgtgctgaggatgggaccgaggtggcctacatcgagtatgatgtcaattctgactgtgcacagctgccagtgnnnnnnnnnnnnnnnnnnnnnnnnnnnnnnnnnnnnnnnnnnnnnnnnnnnnnnnnnnnnnnnnnnnnnnnnnnnnnnnnnnnnnnnnnnnnnnnnnnnnnnnnnnnnnnnnnnnnnnnnnnnnnnnnnnnnnnnnnnnnnnnnnnnnnnnnnnnnnnnnnnnnnnnnnnnnnnnnnnnnnnnnnnnnnnnnnnnnnnnnnnnnnnnnnnnnnnnnnnnnnnnnnnnnnnnnnnnnnnnnnnnnnnnnnnnnnnnnnnnnnnnnnnnnnnnnnnnnnnnnnnnnnnnnnnnnnnnnnnnnnnnnnnnnnnnnnnnnnnnnnnnnnnnnnnnnnnnnnnnnnnnnnnnnnnnnnnnnnnnnnnnnnnnnnnnnnnnnnnnnnnnnnnnnnnnnnnnnnnnnnnnnnnnnnnnnnnnnnnnnnnnnnnnnnnnnnnnnnnnnnnnnnnnnnnnnnnnnnnnnnnnnnnnnnnnnnnnnnnnnnnnnnnnnnnnnnnnnnnnnnnnnnnnnnnnnnnnnnnnnnnnnnnnnnnnnnnnnnnnnnnnnnnnnnnnnnnnnnnnnnnnnnnnnnnnnnnnnnnnnnnnnnnnnnnnnnnnnnnnnnnnnnnnnnnnnnnnnnnnnnnnnnnnnnnnnnnnnnnnnnnnnnnnnnnnnnnnnnnnnnnnnnnnnnnnnnnnnnnnnnnnnnnnnnnnnnnnnnnnnnnnnnnnnnnnnnnnnnnnnnnnnnnnnnnnnnnnnnnnnnnnnnnnnnnnnnnnnnnnnnnnnnnnnnnnnnnnnnnnnnnnnnnnnnnnnnnnnnnnnnnnnnnnnnnnnnnnnnnnnnnnnnnnnnnnnnnnnnnnnnnnnnnnnnnnnnnnnnnnnnnnnnnnnnnnnnnnnnnnnnnnnnnnnnnnnnnnnnnnnnnnnnnnnnnnnnnnnnnnnnnnnnnnnnnnnnnnnnnnnnnnnnnnnnnnnnnnnnnnnnnnnnnnnnnnnnnnnnnnnnnnnnnnnnnnnnnnnnnnnnnnnnnnnnnnnnnnnnnnnnnnnnnnnnnnnnnnnnnnnnnnnnnnnnnnnnnnnnnnnnnnnnnnnnnnnnnnnnnnnnnnnnnnnnnnnnnnnnnnnnnnnnnnnnnnnnnnnnnnnnnnnnnnnnnnnnnnnnnnnnnnnnnnnnnnnnnnnnnnnnnnnnnnnnnnnnnnnnnnnnnnnnnnnnnnnnnnnnnnnnnnnnnnnnnnnnnnnnnnnnnnnnnnnnnnnnnnnnnnnnnnnnnnnnnnnnnnnnnnnnnnnnnnnnnnnnnnnnnnnnnnnnnnnnnnnnnnnnnnnnnnnnnnnnnnnnnnnnnnnnnnnnnnnnnnnnnnnnnnnnnnnnnnnnnnnnnnnnnnnnnnnnnnnnnnnnnnnnnnnnnnnnnnnnnnnnnnnnnnnnnnnnnnnnnnnnnnnnnnnnnnnnnnnnnnnnnnnnnnnnnnnnnnnnnnnnnnnnnnnnnnnnnnnnnnnnnnnnnnnnnnnnnnnnnnnnnnnnnnnnnnnnnnnnnnnnnnnnnnnnnnnnnnnnnnnnnnnnnnnnnnnnnnnnnnnnnnnnnnnnnnnnnnnnnnnnnnnnnnnnnnnnnnnnnnnnnnnnnnnnnnnnnnnnnnnnnnnnnnnnnnnnnnnnnnnnnnnnnnnnnnnnnnnnnnnnnnnnnnnnnnnnnnnnnnnnnnnnnnnnnnnnnnnnnnnnnnnnnnnnnnnnnnnnnnnnnnnnnnnnnnnnnnnnnnnnnnnnnnnnnnnnnnnnnnnnnnnnnnnnnnnnnnnnnnnnnnnnnnnnnnnnnnnnnnnnnnnnnnnnnnnnnnnnnnnnnnnnnnnnnnnnnnnnnnnnnnnnnnnnnnnnnnnnnnnnnnnnnnnnnnnnnnnnnnnnnnnnnnnnnnnnnnnnnnnnnnnnnnnnnnnnnnnnnnnnnnnnnnnnnnnnnnnnnnnnnnnnnnnnnnnnnnnnnnnnnnnnnnnnnnnnnnnnnnnnnnnnnnnnnnnnnnnnnnnnnnnnnnnnnnnnnnnnnnnnnnnnnnnnnnnnnnnnnnnnnnnnnnnnnnnnnnnnnnnnnnnnnnnnnnnnnnnnnnnnnnnnnnnnnnnnnnnnnnnnnnnnnnnnnnnnnnnnnnnnnnnnnnnnnnnnnnnnnnnnnnnnnnnnnnnnnnnnnnnnnnnnnnnnnnnnnnnnnnnnnnnnnnnnnnnnnnnnnnnnnnnnnnnnnnnnnnnnnnnnnnnnnnnnnnnnnnnnnnnnnnnnnnnnnnnnnnnnnnnnnnnnnnnnnnnnnnnnnnnnnnnnnnnnnnnnnnnnnnnnnnnnnnnnnnnnnnnnnnnnnnnnnnnngccatgtcaactcctcccagctcatcacatgccgcacacctgccctcccaggcctgcccgaggacccctgggtccgggtggaatttatccttgacaacctgatctttgactttgcaacactgaaccccacacctttctcctacgaggctgaccccaccctgcagccactcaaccctgaggaccccaccatgccattccggcacaagcctgggagtgtgttctctgtggaggnnnnnnnnnnnnnnnnnnnnnnnnnnnnnnnnnnnnnnnnnnnnnnnnnnnnnnnnnnnnnnnnnnnnnnnnnnnnnnnnnnnnnnnnnnnnnnnnnnnnnnnnnnnnnnnnnnnnnnnnnnnnnnnnnnnnnnnnnnnnnnnnnnnnnnnnnnnnnnnnnnnnnnnnnnnnnnnggtgcagatgggaaacttgcgcttctccctgggtcacgtgcagtatgatggcgagagccctggggcttttcctgtggcaaaaaaggtgggcttgggggtgggcacctctcttctggctctgggtgtcatcatcattgtcctcatgtacagnnnnnnnnnnnnnnnnnnnnnnnnnnnnnnnnnnnnnnnnnnnnnnnnnnnnnnnnnnnnnnnnnnnnnnnnnnnnnnnnnnnnnnnnnnnnnnnncagacctcatgaccgagatgaccgatctcaccagtgacctcctgggcagtggcatccccttcctcgactacaaggtgtatgcggagaggatcttcttccccgggcaccgcgagtcgcccttgcaccgggacctgggtgtgcctgagagcagacggcccaccgtggagcaagggctggggcagctctctaacctgctcaacagcaagctcttcctcaccaagnagttcatccacacgctggagagccagcgcaccttctcagctnnnnnnnnnnnnnnnnnnnnnnnnnnnnnnnnnnnnnnnnnnnnnnnnnnnnnnnnnnnnnnnnnnnnnnnnnnnnnnnnnnnnnnnnnnnnnnnnnnnnnnnnnnnnnnnnnnnnnnnnnnnnnnnnnnnnnnnnnnnnnnnnnnnnnnnnnnnnnnnnnnnnnnnnnnnnnnnnnnnnnnnnnnnnnnnnnnnnnnnnnnnnnnnnnnnnnnnnnnnnnnnnnnnnnnnnnnnnnnnnnnnnnnnnnnnnnnnnnnnnnnnnnnnnnnnnnnnnnnnnnnnnnnnnnnnnnnnnnnnnnnnnnnnnnnnnnnnnnnnnnnnnnnnnnnnnnnnnnnnnnnnnnnnnnnnnnnnnnnnnnnnnnnnnnnnnnnnnnnnnnnnnnnnnnnnnnnnnnnnnnnnnnnnnnncgtgaaggttctggactgtgacaccatctcccagcccaaggagaagatgctggaccagctttataaaggagtgtctctcacccagcggccagaccctcgcacccttgatgttnnnnnnnnnnnnnnnnnnnnnnnnnnnnnnnnnnnnnnnnnnnnnnnnnnnnnnnnnnnnnnnnnnnnnnnnnnnnnnnnnnnnnnnnnnnnnnnnnnnnnnaggtcccggatggagcaactgtggccctcgtcccctgcctcaccaagcatgtctccgggagaaaacaggattatgtccctggagagc

SEQ ID NO: 31177 - DNA, 795 bp, Macaca Mulatta
catttgtaataaaaaatctgttttggaacaaaaaggaaatcagaataattaatatgagacgcagaattgttagttacttgggggaaatatgttttaatatgtataaaaccatcatcttgatttgtgattgggtcagtattgttactagtattttaaagttctctgaaaagacctcagaaagtctccagaaatttcttgcattgaaacaatctttcaaattgcaaatttttatagaaattattcctaatcttacatgtccttcttattttaacaggcctatcagctcctgtacccaggggtcgaaaagggaagaaagtaaaaactcaaacaagctcatttgatatacaaaaagcagaatggcttcgaaaatataatcccgagcagctgcttcaagatgaaggctacaaaaaacatataaaacaccactgtaataagtaggtagtagggtattttaaacacaactctttaaatgtttactgttttaaatttattaataatctttaagcatgctgattttgagtacagagacagcatggtctagggccaatcctaatcttaattttacaaggtatccttcaagcaaatcatgatacctcttgtgtcattgttctcaccaacagataaataaaactggcctccaaatgagctcattatatcttacttggatatgaaataatgatgattatgaagattttggagaagttctttatatatatggtagtaataagattcatttaatcagaagtaattattatttcattattttaaaatctgtacacaaattccttcctaatt

SEQ ID NO: 31178 - DNA, 804 bp, Macaca Mulatta
  misc_feature (1)...(804): n = A,T,C or G
tttatcatttcaggatccctctctgtggcagnnnnnnnnnnnnnnnnnnnnnnnnnnnnnnnnnnnnnnnnnnnnnnnnnnnnnnnnnnnnnnnnnnnnnnnnnnnnnnnnnnnnnnnnnnnnnnnnnnnnnnnnnnnnnnnnnnnnnnnnnnnnnnnnnnnnnnnnnnnnnnnnnnnnnnnnnnnnnnnnnnnnnnnnnnnnnnnnnnnnnnnnnnnnnnnnnnnnnnnnnnnnnnnnnnnnnnnnnnnnnnnnnnnnnnnnnnnnnnnnnnnnnnnnnnnnnnnnnnnnnnnnnnnnnnnnnnngtgagtgtcatgtatccaaacgtctatgcagcaaacccagtggtcatcccagaaccagtgacctcaccaccaagttattccagtgagttccaagcaaacaagtaaagctacagattctggaagcatctttcactgggaccaaaagaagtcctcctccctttctgggcttccataacccaggtcgttcctgttctgacagctgaggaaatgtctctcccactcttcgtactctcaccttcattcttcaatcagtctagtaaatcatgctgtttctctatcaagaagaagacagagattttaaatggatgttaacgaagagggcctccctagggtgcatgcacctgcacatatgcgggcatccagcctggggccttggcacacacacattcatgtgctctgctgcatgtgagcttgtgggttagaggaacaaatatctagacatttaatcttcactctttcaattgtgcattcatttaataaatagatactgagcattca

SEQ ID NO: 31179 - DNA, 444 bp, Macaca Mulatta
  misc_feature (1)...(444): n = A,T,C or G
cgggcacctcacagagctccaggtacaggacagcaccctcagcgagtcgacctttgtgacctggtgtacccagctgaggcatcccagctgtcgccttcagnnnnnnnnnnnnnnnnnnnnnnnnnnnnnnnnnnnnnnnnnnnnnnnnnnnnnnnnnnnnnnnnnnnnnnnnnnnnnnnnnnnnnnnnnnnnnnnnnnnnnnnnnnnnnnnnnnnnnnnnnnnnnnnnnnnnnnnnnnnnnnnnnnnnnnnnnnnnnnnnnnnnnnnnnnnnnnngctggtagattgtttcctttcacccatcgattgtgaagtccttgcctgccttctaaccaacaacaagaagctgacgtatctgaatgtatcctgcaacgacttagacgcaggcttgcctcttctgtgtgaagctctgtgcaacccagacacggtcctggtatacctgatg

SEQ ID NO: 31180 - DNA, 187 bp, Macaca Mulatta
caactccacttctcaagtggaaaagatgggatggcctagagataactgtagaaaggggaaggataccagaccaccaaatcttgccagaagaggttttggttttgttttcacttttaagttgctatagctatagcctaccctctggatgatcctcactcagggaatataccctaattttaatgccatt

SEQ ID NO: 31181 - DNA, 795 bp, Macaca Mulatta
tctctggggcctgtcactattcctgctggtcagggccaggagccaagggccattttatccagagcactaggggcttctgggattactgtcttctgctatgggaagtggaaaagctagaagaaaggtggtctcagcaattgggttccatttcaatctgaaatgctgggattttcattggcacagacctccctgttgtccttcaatgcatggcctaaatctgggccagagaatacccgccgatattgttatacctcacccctgctttccctccacagcctcagtgggttgggccgcaacatcatcctcacaactatgccagcgggcactaagcttattgctggcaataagcctgttagtttcctcactgctcagcagttgcagcagcttcagcagcaaggtcaggccacacaggtaaggcccagggcaaattcttcgccattatcaggctcctctctgactccactgctgttcttaactggtgagcccacttgcagtccattgacctgaccttctctctttgcaaacaggtgcgcatccagactgtccctgcatcccatctccaacagggaacagcttctggctcctccaaagcagtctccactgttgttgtgactacagctccatctcctaaacaggcacctgagcaacaatgattatgagagaggatggcttccatgaaacaccgtgcctggtctgtcctggctgagaagggagcagggaggttgcatcattcttttaagcttgcctgttcaaggcagccaagctgggggtgatggcagcagtggcctggattct

SEQ ID NO: 31182 - DNA, 713 bp, Macaca Mulatta
agggcggttctgaaggacttcaccgtgtccggcaacctactgttatgtcgttcgggaccaggacagggaagggactgggcggacgatggtggtgggttgggggctgggatccgcatccccggaggggtagaaagctagagacctgggaacacccaagcacagggtctcagaacagagacctggtacaccaggtccgccgccacccgagggagcccggggagatgggtgcagaggtgtcgcctttaacctgatgttcttcgcccctcacatttagccgactgactgctgcagaccaccgccaactccagctctccatcagctcctgtctccagcagctttccctgttgatgtggatcgtgcagtgctttctgcctatgtttttggctctgcttcactcaggacagaggcgctaagcccagcctggtgccccttcctaggtcgtgcctcctcccctaggggatggtccttgcacgagcggccacttcattgtgggggcctgattgtttgtcgctggaggaggccggcttacatgtttgtttctgtaggaaataaaactgagctacaattccgtgtctgagtctcttctcggcgagcgaaggcaccttcagacttgcctgcccttgtcctcgggttgcaggggaggctctgggattcagagattgaagtagcacaaggtaatggaagacaattgggaaatgggggaaaagaaaagc

SEQ ID NO: 31183 - DNA, 708 bp, Macaca Mulatta
  misc_feature (1)...(708): n = A,T,C or G
ggggggcagacggcgctgcagtttcagactggagggcggcggacggctgctcagcggcccaactctctcgcagcccttctctccgcaagatgtcagcctccacctcctcgcaccggcccatcaaggggatcctgaaaaacaaaagctcctcgggttcctcggtggcgacttccggtcagcagtctggagggaatattcaaggatgcctcggaccacagctgtgaggtggaggaggaagagagcaacgaggcctacatgagaaaactcctcctccacaaacaggagaaaaagcggcagttcgaaataagaagaaggcttcactacaacgaagaattgaacatcaaattagctagacaattaatgtggaacgacctacaaagtgaagacgatgaaaacgaagaaaggccacaagccacgaatgaagaaaagactgctgcagaagaatcagaggaagctcctctaagcggtggactgcaaacccaatcatgcgacccttagaattctgataccggcttcacccttgcaattgtttgtgaatatacgacgcttagaagatatctgcttcaccctttgcattgtttgtgaaaatacaaccttgttactgtnnnnnnnnnnnnnnnnnnnnnnnnnnnnnnnnnnnnnnnnnnnnnnnnnnnnnnnnnnnnnnnnnnnnnnnnnnnnnnnnnnnnnngaaaaanannnaaanna

SEQ ID NO: 31184 - DNA, 3721 bp, Macaca Mulatta
  misc_feature (1)...(3721): n = A,T,C or G
aattttgataagagacaacatgaagcgagaatccagcaactggagaatgaaattcactatttgcaagaaaatctaaaaagtatggaggaaatccaaggccttacagatctccaacttcaggaagctgatgaagagaaggagagaattctggcccaactccgagagttagagaaaaannnnnnnnnnnnnnnnnnnnnnnnnnnnnnnnnnnnnnnnnnnnnnnnnnnnnnnnnnnnnnnnnnnnnnnnnnnnnnnnnnnnnnnnnnnnnnnnnnnnnnnnnnnnnnnnnnnnnnnnnnnnnnnnnnnnnnnnnnnnnnnnnnnnnnnnnnnnnnnnnnnnnnnnnnnnnnnnnnnnnnnnnnnnnnnnnnnnnnnnnnnnnnnnnnnnnnnnnnnnnnnnnnnnnnnnnnnnnnnnnnnnnnnnnnnnnnnnnnnnnnnnnnnnnnnnnnnnnnnnnnnnnnnnnnnnnnnnnnnnnnnnnnnnnnnnnnnnnnnnnnnnnnnnnnnnnnnnnnnnnnnnnnnnnnnnnnnnnnnnnnnnnnnnnnnnnnnnnnnnnnnnnnnnnnnnnnnnnnnnnnnnnnnnnnnnnnnnnnnnnnnnnnnnnnnnnnnnnnnnnnnnnnnnnnnnnnnnnnnnnnnnnnnnnnnnnnnnnnnnnnnnnnnnnnnnnnnnnnnnnnnnnnnnnnnnnnnnnnnnnnnnnnnnnnnnnnnnnnnnnnnnnnnnnnnnnnnnnnnnnnnnnnnnnnnnnnnnnnnnnnnnnnnnnnnnnnnnnnnnnnnnnnnnnnnnnnnnnnnnnnnnnnnnnnnnnnnnnnnnnnnnnnnnnnnnnnnnnnnnnnnnnnnnnnnnnnnnnnnnnnnnnnnnnnnnnnnnnnnnnnnnnnnnnnnnnnnnnnnnnnnnnnnnnnnnnnnnnnnnnnnnnnnnnnnnnnnnnnnnnnnnnnnnnnnnnnnnnnnnnnnnnnnnnnnnnnnnnnnnnnnnnnnnnnnnnnnnnnnnnnnnnnnnnnnnnnnnnnnnnnnnnnnnnnnnnnnnnnnnnnnnnnnnnnnnnnnnnnnnnnnnnnnnnnnnnnnnnnnnnnnnnnnnnnnnnnnnnnnnnnnnnnnnnnnnnnnnnnnnnnnnnnnnnnnnnnnnnnnnnnnnnnnnnnnnnnnnnnnnnnnnnnnnnnnnnnnnnnnnnnnnnnnnnnnnnnnnnnnnnnnnnnnnnnnnnnnnnnnnnnnnnnnnnnnnnnnnnnnnnnnnnnnnnnnnnnnnnnnnnnnnnnnnnnnnnnnnnnnnnnnnnnnnnnnnnnnnnnnnnnnnnnnnnnnnnnnnnnnnnnnnnnnnnnnnnnnnnnnnnnnnnnnnnnnnnnnnnnnnnnnnnnnnnnnnnnnnnnnnnnnnnnnnnnnnnnnnnnnnnnnnnnnnnnnnnnnnnnnnnnnnnnnnnnnnnnnnnnnnnnnnnnnnnnnnnnnnnnnnnnnnnnnnnnnnnnnnnnnnnnnnnnnnnnnnnnnnnnnnnnnnnnnnnnnnnnnnnnnnnnnnnnnnnnnnnnnnnnnnnnnnnnnnnnnnnnnnnnnnnnnnnnnnnnnnnnnnnnnnnnnnnnnnnnnnnnnnnnnnnnnnnnnnnnnnnnnnnnnnnnnnnnnnnnnnnnnnnnnnnnnnnnnnnnnnnnnnnnnnnnnnnnnnnnnnnnnnnnnnnnnnnnnnnnnnnnnnnnnnnnnnnnnnnnnnnnnnnnnnnnnnnnnnnnnnnnnnnnnnnnnnnnnnnnnnnnnnnnnnnnnnnnnnnnnnnnnnnnnnnnnnnnnnnnnnnnnnnnnnnnnnnnnnnnnnnnnnnnnnnnnnnnnnnnnnnnnnnnnnnnnnnnnnnnnnnnnnnnnnnnnnnnnnnnnnnnnnnnnnnnnnnnnnnnnnnnnnnnnnnnnnnnnnnnnnnnnnnnnnnnnnnnnnnnnnnnnnnnnnnnnnnnnnnnnnnnnnnnnnnnnnnnnnnnnnnnnnnnnnnnnnnnnnnnnnnnnnnnnnnnnnnnnnnnnnnnnnnnnnnnnnnnnnnnnnnnnnnnnnnnnnnnnnnnnnnnnnnnnnnnnnnnnnnnnnnnnnnnnnnnnnnnnnnnnnnnnnnnnnnnnnnnnnnnnnnnnnnnnnnnnnnnnnnnnnnnnnnnnnnnnnnnnnnnnnnnnnnnnnnnnnnnnnnnnnnnnnnnnnnnnnnnnnnnnnnnnnnnnnnnnnnnnnnnnnnnnnnnnnnnnnnnnnnnnnnnnnnnnnnnnnnnnnnnnnnnnnnnnnnnnnnnnnnnnnnnnnnnnnnnnnnnnnnnnnnnnnnnnnnnnnnnnnnnnnnnnnnnnnnnnnnnnnnnnnnnnnnnnnnnnnnnnnnnnnnnnnnnnnnnnnnnnnnnnnnnnnnnnnnnnnnnnnnnnnnnnnnnnnnnnnnnnnnnnnnnnnnnnnnnnnnnnnnnnnnnnnnnnnnnnnnnnnnnnnnnnnnnnnnnnnnnnnnnnnnnnnnnnnnnnnnnnnnnnnnnnnnnnnnnnnnnnnnnnnnnnnnnnnnnnnnnnnnnnnnnnnnnnnnnnnnnnnnnnnnnnnnnnnnnnnnnnnnnnnnnnnnnnnnnnnnnnnnnnnnnnnnnnnnnnnnnnnnnnnnnnnnnnnnnnnnnnnnnnnnnnnnnnnnnnnnnnnnnnnnnnnnnnnnnnnnnnnnnnnnnnnnnnnnnnnnnnnnnnnnnnnnnnnnnnnnnnnnnnnnnnnnnnnnnnnnnnnnnnnnnnnnnnnnnnnnnnnnnnnnnnnnnnnnnnnnnnnnnnnnnnnnnnnnnnnnnnnnnnnnnnnnnnnnnnnnnnnnnnnnnnnnnnnnnnnnnnnnnnnnnnnnnnnnnnnnnnnnnnnnnnnnnnnnnnnnnnnnnnnnnnnnnnnnnnnnnnnnnnnnnnnnnnnnnnnnnnnnnnnnnnnnnnnnnnnnnnnnnnnnnnnnnnnnnnnnnnnnnnnnnnnnnnnnnnnnnnnnnnnnnnnnnnnnnnnnnnnnnnnnnnnnnnnnnnnnnnnnnnnnnnnnnnnnnnnnnnnnnnnnnnnnnnnnnnnnnnnnnnnnnnnnnnnnnnnnnnnnnnnnnnnnnnnnnnnnnnnnnnnnnnnnnnnnnnnnnnnnnnnnnnnnnnnnnnnnnnnnnnnnnnnnnnnnnnnnnnnnnnnnnnnnnnnnnnnnnnnnnnnnnnnnnnnnnnnnnnnnnnnnnnnnnnnnnnnnnnnnnnnnnnnnnnnnnnnnnnnnnnnnnnnnnnnnnnnnnnnnnnnnnnnnnnnnnnnnnnnnnnnnnnnnnnnnnnnnnnnnnnnnnnnnnnnnnnnnnnnnnnnnnnnnnnnnnnnnnnnnnnnnnnnnnnnnnnnnnnnnnnnnnnnnnnnnnnnnnnnnnnnnnnnnnnnnnnnnnnnnnnnnnnnnnnnnnnnnnnnnnnnnnnnnnnnnnnnnnnnnnnnnnnnnnnnnnnnnnnnnnnnnnnnnnnnnnnnnnnnnnnnnnnnnnnnnnnnnnnnnnnnnnnnnnnnnnnnnnnnnnnnnnnnnnnnnnnnnnnnnnnnnnnnnnnnnnnnnnnnnnnnnnnnnnnnnnnnnnnnnnnnnnnnnnnnnnnnngagcaaaaacaggagaacagctgcatgcaaaaggaaatggcaacaattgaactggtagcccaggacaaccatgagcgggccaggcgcctgatgaaggagctcaaccagatgcagtatgagtacacggagctcaagaaaca

SEQ ID NO: 31185 - DNA, 802 bp, Macaca Mulatta
tttgtgtgaggaaatatgaatgaaatacacattcatatttaaaaacagagtattttactgccaaaactttaaatatctcaagagcacaccacattttaaacacattatggtcacgtagctatttcaatattcctgggaagtggtgggcgattagcttgtctatggcttaggatctgtttccatgcttgcttcctgagcgtcttctacctctgagagtttttcatcattttccaatgtttgctgaagttcatggatggtactaagaagaacgtgaaactgtttccgtctcaattccagcttatcttcaacactttctttaatgtgtgaaagatgctctaattcttttcccagagcctctagttcctttaatgtctcatgcctgtctggatggtgttgaatcacttttgccaaagcatcatattcttggcgattttttcgtattcgttttgcttgaagaatttgctttttgcactcagcaattttttcatgtgctccagctatgctacattctatttccttgtaaattttttcataattttccatttctctgagattcatatcatatactagtaaagttttgcccattgaaaattcacattgagacagcgtgctcagcatacgttggtactggctatacccctcttcctgggacccagagttgcaccatttaatgaaactcttcactagcagattaattctccgatcatctccagcaccatctccatcaatgaggagacgcttccgtataacttcatcgtcagtcacggctcccatggcgtgcgcggcggccccggcggccccc

SEQ ID NO: 31186 - DNA, 746 bp, Macaca Mulatta
tcgcaggcctagacgccccggccgggcagagaccctttttaaagccacgttcgtaacatgcgttgaacaaatagcttttgaaatagccacgatcttagattcaggatagaatattctggacttaaaaattactgtaattttgtgtaaatggtttcttactagatttcacatctttacacttctgatgcttttttaaaaaaaactaaactttaatatttccatttaaagttaaagaaatgggaaattgcctacagagcatattgctttttcagatcataaagttacattttccaataacttgactattgtaaattttaagggaatttcattggaccctagagccataccttcactgacatctcatctgtttgtgtttccagaagctgcttttacaggtcttagccgctgtcccggaggccggtgtgggtgtgacccgcaggcgtccaccctgcggctggggagaagtgttagtagcttgtatctggagtcttgagaaacacaaaacttacaaatgcatctttcttttgtcataaaatttgaattgcaattttcaactgggaaacaaacacacatttcttagcgagctcagcttttgtatgtcaccttatcaattgtttcaaaaacatgatttaaagcaacatctgtcctagtataattgttgcattttaaataacaatttattgaaaaagcgttaagtttgaccagcctaaaaaaaagtaacaaaccaattaagtgtactttggggg

SEQ ID NO: 31187 - DNA, 94 bp, Macaca Mulatta
gtcataatgattacggttatcagcaaccgtcgtatcctgaacaaggctacgataggccttatgaggattcctcacaacattactacgaaggagg

SEQ ID NO: 31188 - DNA, 598 bp, Macaca Mulatta
accttttgtcaacctgcaggtctgacgcgcctgccaatcggagcacagctggactgtgtggctggggcctgacattgagctgtagggaacctgaactgtggggacctctggtgagaggccagtgccctgccccaccctggagcttcaaataaagagctttttaccccctcttgcctggtgctgccctgttgaagataggggattcgaagttggggaggaaaagtcagacaggcatagtatcccagtcttgaggcagaaatgaccagaatgcactcacaccttccttgggccacctttactgtgcccatggaggcagctccgagagtaggttaacactatggagcaaagaaatagagaagggggacaggagttaaggggcccctgtgtaggggtatagggctcctgcatccctctgggatctgagcctaaaaggctcgggcagagtccagcgagtgcctcaatggaagcggtactttctggccggcttgaggttgatgtatgtggctttcatctcctcggcctcagggttccgcacgtctttgaatcgctcccctttggtgctcactacctggttgtcgatgtatcggatcagcttctt

SEQ ID NO: 31189 - DNA, 145 bp, Macaca Mulatta
tttcacttctcccacctgtcaatttcaccattaaagttactggtttggctcaagttcttttacgttgggaaccaaatcctgatcaagagcaaaggaatgttaatctagaatatcaagtgaaaataaacgctccaaaagaagatga

SEQ ID NO: 31190 - DNA, 686 bp, Macaca Mulatta
ggggggtcgcggtttgtcaaggagctgagagaagaggcttaagaaaattattcaccactcatcagtcatggagacatcctcaaagggtctgctcacccaagttactcaattttggaacctcctagatgatctagctgaaagtgaccctgagggctatgagaagtttattcaacagcagctgaaagaagggaaacagctctgtgctgacccacaaccacagctttgtctacagaccaggattctgaaaccaaaagaaaaaatactttttatcaacctgtgtcagtggacaaggatcccagctccccaatcagccactcatccagtacctctaactgttggcaaaccagaagatacaactgagacatcagatgcttacatggtcattgatgttgcctacaatcctgatgttcttcaggcagcagaaaagaaccaagtggaaaaaaatcagttaattcagatggccatgaaatgcattgaggagaaattccagtttaccctttcacactcttaccatattaccaaatttagaataaagggaagcattcaaagaatgaaacaaatctgatgggaatcaaactgattcatagatttagaagaaaatgagacgggaactactctgacagatcgagcagtactatgagcatcagatcatttctcactgtactcgaaagacagttcaggcagcg

SEQ ID NO: 31191 - DNA, 161 bp, Macaca Mulatta
  misc_feature (1)...(161): n = A,T,C or G
nggtgactaagtccccggcagttctcaggcctctggtacgtggtctccatggcatctgactgcaaggtcttcctgggcaagaaggaccacctgtctatgtccaccagggccatcaggcccacagaggagggcggcctccacgtccacatggagttcccggg

SEQ ID NO: 31192 - DNA, 181 bp, Macaca Mulatta
tattaatttactgttgtcatgttctcatgcttagatcagtagtgtcagccagagctttctctgcagacatgtaggaagtgagtggccatttttccccctccatgtattagagttttacaaaaaggcttactttgagacaactgttgcgtttggggtactaataaatgattgctggtgagtt

SEQ ID NO: 31193 - DNA, 1873 bp, Macaca Mulatta
  misc_feature (1)...(1873): n = A,T,C or G
ctcccaagctagcctgctccgcctgcaccaccggttccgggcactggacaggaacaagaagggctacctgagnagccgcatggatctccagcagataggggcgctggccgtgaaccccctgggagaccgcattatagaaagcttcttccccgatgggnggagccagcaagttgatttcccaggctttgtcagggtcctggctcattttcgccctgtagaagatgaggacacagannnnnnnnnnnnnnnnnnnnnnnnnnnnnnnnnnnnnnnnnnnnnnnnnnnnnnnnnnnnnnnnnnnnnnnnnnnnnnnnnnnnnnnnnnnnnnnnnnnnnnnnnnnnnnnnnnnaggttctccgtctgatggtcggggtacaggtaacagaagagcagctggagaacatcgctgaccgcacggtgcaggaggctgatgaagatggggatggggctgtgtcctttgtggagttcaccaagnagtccttagagaagatggacgttgagcaaaaaatgagcatcaggatcctaaagtgactctgtttgtgccttgggcttgctcctgcaaccagtatctccttggaattcatccaaagcccccatggacgcagggcgccaataaactgtattcttgcttctaactctatttagggccaagggaagaaagctggaaggatgtgtactaaagtctagctcagcagtccccagcctttttggcatcggggacaatttttccacggatgggtgacaggggatggttttggaatgattcaagtgcattacatttattgtgnnnnnnnnnnnnnnnnnnnnnnnnnnnnnnnnnnnnnnnnnnnnnnnnnnnnnnnnnnnnnnnnnnnnnnnnnnnnnnnnnnnnnnnnnnnnnnnnnnnnnnnnnnnnnnnnnnnnnnnnnnnnnnnnnnnnnnnnnnnnnnnnnnnnnnnnnnnnnnnnnnnnnnnnnnnnnnnnnnnnnnnnnnnnnnnnnnnnnnnnnnnnnnnnnnnnnnnnnnnnnnnnnnnnnnnnnnnnnnnnnnnnnnnnnnnnnnnnnnnnnnnnnnnnnnnnnnnnnnnnnnnnnnnnnnnnnnnnnnnnnnnnnnnnnnnnnnnnnnnnnnnnnnnnnnnnnnnnnnnnnnnnnnnnnnnnnnnnnnnnnnnnnnnnnnnnnnnnnnnnnnnnnnnnnnnnnnnnnnnnnnnnnnnnnnnnnnnnnnnnnnnnnnnnnnnnnnnnnnnnnnnnnnnnnnnnnnnnnnnnnnnnnnnnnnnnnnnnnnnnnnnnnnnnnnnnnnnnnnnnnnnnnnnnnnnnnnnnnnnnnnnnnnnnnnnnnnnnnnnnnnnnnnnnnnnnnnnnnnnnnnnnnnnnnnnnnnnnnnnnnnnnnnnnnnnnnnnnnnnnnnnnnnnnnnnnnnnnnnnnnnnnnnnnnnnnnnnnnnnnnnnnnnnnnnnnnnnnnnnnnnnnnnnnnnnnnnnnnnnnnnnnnnnnnnnnnnnnnnnnnnnnnnnnnnnnnnnnnnnnnnnnnnnnnnnnnnnnnnnnnnnnnnnnnnnnnnnnnnnnnnnnnnnnnnnnnnnnnnnnnnnnnnnnnnnnnnnnnnnnnnnnnnnnnnnnnnnnnnnnnnnnagagccagggaaacaaggtctgaggattcaggatggggtgaaagtggttgcttaaaggaaaatgaaatacaattaggagaataaggggaaatgagtggtctgctctgcttgggcaaaacaagagatgcccattactgtgagggaccgttgaagtctggactcttaaatgggtttttgctgatttcctgggtgcatgctaggatgatcgggcttgatggggtagggaagagttgatgtaaaaataataaacaatacatacctt

SEQ ID NO: 31194 - DNA, 503 bp, Macaca Mulatta
acctcttcaagaattaatagagacatttggatcaaaagacagataaatgtttcttctagaacacagttaccctcgtttcatctattgctagaactatctcattgctatctgttatagactagtcatacagactttaagaaaacaggataaaaagatacccattgactgtgtctactgataagattatcccaaaagtacgttggcatgatagtttccgagtaagaccttaaggacacagccaaatcttaagtactgtgtgaccactcctgttattatcacatagtcatacttggttgttatatgtgatggttaacctgtagcttataaatttacttattattcttttactcatttactcagtcatttctttacaagaaaatgagtaaatctgttttaggtgacagcataatggatgtgaagaatttccatcaataatttatgaatgagtttccagaacaaatttcttaataacacaaccagattggttttattcttttatttta

SEQ ID NO: 31195 - DNA, 444 bp, Macaca Mulatta
agcttcctcctgctgcagcagtcggtgacgctgggcagctcgggcgaggtggaccggctggtggcccagatcggcgagacgctgcagctggacgcggcgcaggacagcccggcctcgccgtgcgcgcccccgggggcgccgctgcgggccccggggtccctggctgcggcggtgccggcggacaaggcccggcccccggcggtaccgctactcctgccgcctgcatcggctgaaacggtgggcccggcgccccctggggccctgcgctgcgccctgggggaccgcggccgcgtgcggggacgcgccgctccctactgcgtggccgagctcgccgcaggccccagcgcgctgccggggccgtgccggcgaggatggctcagggacgcggtcacctcccgccgcctgcagcagcgacgatggacccaagccggggcacgctccggc

SEQ ID NO: 31196 - DNA, 167 bp, Macaca Mulatta
aggcttcagaagaagtgtcgaaatcactgcaagcaatgaaagaaattctgtgtggtacaaatgaaaaagaacccccaacagaagcagtggctcagctagcacaagaactctacaatagtggcctgctggtgacactgatagctgacttgcagctgatagactttgag

SEQ ID NO: 31197 - DNA, 784 bp, Macaca Mulatta
  misc_feature (1)...(784): n = A,T,C or G
gggtacattagctggtgagcctacacatgatacagatacactatatgactctgctccacctatagaatctaatacattgcagcacaactgaattccttccctaaagaaaaagtcctgccattgtaacatcataacttaaaacatttttttggaagaaaaagatttaacatatttgcccatgctacaggaagagactgtattaaaaatggatacacaaggtcagttgacactatgaagctcaagctaccaaaaagaaagtggcaatatattgactcaggatctcaaagctgggtgttttagcattactgtgtaaagacttgaagggacagaagtgaagaaaataagctgcaattttgtacagataccaacttctgaaaagctggtgtttttacaactagcattgaatgcagtccaatttgcagtagtaatcttcaatagacaagcagctttgttgctgcctttatggacatgggtaccaattgcttttgtaataatggtaaaaaaggtgaacttaacctttttgggctttccccttttgnnnnnnnnnnnnnnnnnnnnnnnnngcgggatattaannnnnnnnnnnnnnnnnnnnngacgggaaatgacaatataaaaaacacaataataaacctaacaaagaattatttattttatacaccaaacatgatacacccnatctataaatatttaacagaaacacccggcaagacatgtcatatggccagcacaccaatagataattaaaaggacaacaagaataaaacaacccacaatattaaac

SEQ ID NO: 31198 - DNA, 478 bp, Macaca Mulatta
tatttgtaaatgtgatagaaatctgggggagttgggggacggctgcagatgttagccaggtctgctctccccattcaagccgcttctccactgtagcaaaataagtgccccatcccatctgccttcaggtcctcttcatagcctgcactgcccagtgagccactaggggcagtctctggaagggctgtttcaggctgtttgggtataggggtcaggtaccaatgaagaatcacgacttgtctcactcctttggaaattatttgttttctttcctgcgtaattactttatacctctgtttttgagaaactgttccttttgtcatctgtcatggtcttcttcctccaaatcttgatctgagaatagcagcgatatccctccacccaacacaaatatgggcacctgtttgtcttcaaatagaacaggggcttctggtctggtcatgtccctagagacttactagagactggctgaccatga

SEQ ID NO: 31199 - DNA, 476 bp, Macaca Mulatta
  misc_feature (1)...(476): n = A,T,C or G
ttcagtcacaggcatggcccattgtgttgcaaggaatagatcttataggagtagcccagactggaacaggaaagacattgtgttatttaatgcctggatttattcatctggaccttcaacccgccttaaaggtcaaaggaatagacccggcatgttagttctaactcccactcgggaattagcacttcaagtagaaggagaatgttgcaaatattcatataaagggcttcggagnnnnnnnnnnnnnnnnnnnnnnnnnnnnnnnnnnnnnnnnnnnnnnnnnnnnnnnnnnnnnnnnnnnnnnnnnnnnnnnnnnnnnnnnnnnnnnnnnnnnnnnnnnnnnnnnnnnnnnnnnnnnnnnnnnnnnnnnnnnnnggttttagatgaagcagacaagatgttggacatgggatttgaaccccagataatgaagattttgttagatgtgcgtccggataggcagacggttatgacca

SEQ ID NO: 31200 - DNA, 267 bp, Macaca Mulatta
gatttggagtggtatgagaagtcagaagaaactcacgcctcccagatagaactgcttgagacaagctctacccaggaacctctcaacccttcggagcccttttgcccaagagactgcatagtaccagtggtgtttcctgggcctgtaagccaggaaggctgctgtcagtttacttgtgaacttctaaagcatatcatgtaccaacgccagcaactccctctgccctatgaacagcttaagaacttttaccgaaaaccttctccccag

SEQ ID NO: 31201 - DNA, 13962 bp, Macaca Mulatta
  misc_feature (1)...(13962): n = A,T,C or G
tacatcaagatcccagacagacaaacttgcctttgatgtatgtctacgggaacatgccacaggnnnnnnnnnnnnnnnnnnnnnnnnnnnnnnnnnnnnnnnnnnnnnnnnnnnnnnnnnnnnnnnnnnnnnnnnnnnnnnnnnnnnnnnnnnnnnnnnnnnnnnnnnnnnnnnnnnnnnnnnnnnnnnnnnnnnnnnnnnnnnnnnnnnnnnnnnnnnnnnnnnnnnnnnnnnnnnnnnnnnnnnnnnnnnncaggaagtagcatcgaagaaggnnnnnnnnnnnnnnnnnnnnnnnnnnnnnnnnnnnnnnnnnnnnnnnnnnnnnnnnnnnnnnnnnnnnnnnnnnnnnnnnnnnnnnnnnnnnnnnnnnnnnnnnnnnnnnnnnnnnnnnnnnnnnnnnnnnnnnnnnnnnnnnnnnnnnnnnnnnnnnnnnnnnnnnnnnnnnnnnnnnnnnnnnnnnnnnnnnnnnnnnnnnnnnnnnnnnnnnnnnnnnnnnnnnnnnnnnnnnnnnnnnnnnnnnnnnnnnnnnnnnnnnnnnnnnnnnnnnnnnnnnnnnnnnnnnnnnnnnnnnnnnnnnnnnnnnnnnnnnnnnnnnnnnnnnnnnnnnnnnnnnnnnnnnnnnnnnnnnnnnnnnnnnnnnnnnnnnnnnnnnnnnnnnnnnnnnnnnnnnnnnnnnnnnnnnnnnnnnnnnnnnnnnnnnnnnnnnnnnnnnnnnnnnnnnnnnnnnnnnnnnnnnnnnnnnnnnnnnnnnnnnnnnnnnnnnnnnnnnnnnnnnnnnnnnnnnnnnnnnnnnnnnnnnnnnnnnnnnnnnnnnnnnnnnnnnnnnnnnnnnnnnnnnnnnnnnnnnnnnnnnnnnnnnnnnnnnnnnnnnnnnnnnnnnnnnnnnnnnnnnnnnnnnnnnnnnnnnnnnnnnnnnnnnnnnnnnnnnnnnnnnnnnnnnnnnnnnnnnnnnnnnnnnnnnnnnnnnnnnnnnnnnnnnnnnnnnnnnnnnnnnnnnnnnnnnnnnnnnnnnnnnnnnnnnnnnnnnnnnnnnnnnnnnnnnnnnnnnnnnnnnnnnnnnnnnnnnnnnnnnnnnnnnnnnnnnnnnnnnnnnnnnnnnnnnnnnnnnnnnnnnnnnnnnnnnnnnnnnnnnnnnnnnnnnnnnnnnnnnnnnnnnnnnnnnnnnnnnnnnnnnnnnnnnnnnnnnnnnnnnnnnnnnnnnnnnnnnnnnnnnnnnnnnnnnnnnnnnnnnnnnnnnnnnnnnnnnnnnnnnnnnnnnnnnnnnnnnnnnnnnnnnnnnnnnnnnnnnnnnnnnnnnnnnnnnnnnnnnnnnnnnnnnnnnnnnnnnnnnnnnnnnnnnnnnnnnnnnnnnnnnnnnnnnnnnnnnnnnnnnnnnnnnnnnnnnnnnnnnnnnnnnnnnnnnnnnnnnnnnnnnnnnnnnnnnnnnnnnnnnnnnnnnnnnnnnnnnnnnnnnnnnnnnnnnnnnnnnnnnnnnnnnnnnnnnnnnnnnnnnnnnnnnnnnnnnnnnnnnnnnnnnnnnnnnnnnnnnnnnnnnnnnnnnnnnnnnnnnnnnnnnnnnnnnnnnnnnnnnnnnnnnnnnnnnnnnnnnnnnnnnnnnnnnnnnnnnnnnnnnnnnnnnnnnnnnnnnnnnnnnnnnnnnnnnnnnnnnnnnnnnnnnnnnnnnnnnnnnnnnnnnnnnnnnnnnnnnnnnnnnnnnnnnnnnnnnnnnnnnnnnnnnnnnnnnnnnnnnnnnnnnnnnnnnnnnnnnnnnnnnnnnnnnnnnnnnnnnnnnnnnnnnnnnnnnnnncaggccggatacccagagctgtggcttccatcaaccagcacctcctgagatcagatgatgtggtaagctgctgcctggacctcggggtgcccagcatttcattccgcatcaatggacaacctgtgcaggggatgtttgagaacttcaacacagacgggctcttcttccctgtgatgagcttttcagcaggtgtcannnnnnnnnnnnnnnnnnnnnnnnnnnnnnnnnnnnnnnnnnnnnnnnnnnnnnnnnnnnnnnnnnnnnnnnnnnnnnnnnnnnnnnnnnnnnnnnnnnnnnnnnnnnnnnnnnnnnnnnnnnnnnnnnnnnnnnnnnnnnnnnnnnnnnnnnnnnnnnnnnnnnnnnnnnnnnnnnnnnnnnnnnnnnnnnnnnnnnnnnnnnnnnnnnnnnnnnnnnnnnnnnnnnnnnnnnnnnnnnnnnnnnnnnnnnnnnnnnnnnnnnnnnnnnnnnnnnnnnnnnnnnnnnnnnnnnnnnnnnnnnnnnnnnnnnnnnnnnnnnnnnnnnnnnnnnnnnnnnnnnnnnnnnnnnnnnnnnnnnnnnnnnnnnnnnnnnnnnnnnnnnnnnnnnnnnnnnnnnnnnnnnnnnnnnnnnnnnnnnnnnnnnnnnnnnnnnnnnnnnnnnnnnnnnnnnnnnnnnnnnnnnnnnnnnnnnnnnnnnnnnnnnnnnnnnnnnnnnnnnnnnnnnnnnnnnnnnnnnnnnnnnnnnnnnnnnnnnnnnnnnnnnnnnnnnnnnnnnnnnnnnnnnnnnnnnnnnnnnnnnnnnnnnnnnnnnnnnnnnnnnnnnnnnnnnnnnnnnnnnnnnnnnnnnnnnnnnnnnnnnnnnnnnnnnnnnnnnnnnnnnnnnnnnnnnnnnnnnnnnnnnnnnnnnnnnnnnnnnnnnnnnnnnnnnnnnnnnnnnnnnnnnnnnnnnnnnnnnnnnnnnnnnnnnnnnnnnnnnnnnnnnnnnnnnnnnnnnnnnnnnnnnnnnnnnnnnnnnnnnnnnnnnnnnnnnnnnnnnnnnnnnnnnnnnnnnnnnnnnnnnnnnnnnnnnnnnnnnnnnnnnnnnnnnnnnnnnnnnnnnnnnnnnnnnnnnnnnnnnnnnnnnnnnnnnnnnnnnnnnnnnnnnnnnnnnnnnnnnnnnnnnnnnnnnnnnnnnnnnnnnnnnnnnnnnnnnnnnnnnnnnnnnnnnnnnnnnnnnnnnnnnnnnnnnnnnnnnnnnnnnnnnnnnnnnnnnnnnnnnnnnnnnnnnnnnnnnnnnnnnnnnnnnnnnnnnnnnnnnnnnnnnnnnnnnnnnnnnnnnnnnnnnnnnnnnnnnnnnnnnnnnnnnnnnnnnnnnnnnnnnnnnnnnnnnnnnnnnnnnnnnnnnnnnnnnnnnnnnnnnnnnnnnnnnnnnnnnnnnnnnnnnnnnnnnnnnnnnnnnnnnnnnnnnnnnnnnnnnnnnnnnnnnnnnnnnnnnnnnnnnnnnnnnnnnnnnnnnnnnnnnnnnnnnnnnnnnnnnnnnnnnnnnnnnnnnnnnnnnnnnnnnnnnnnnnnnnnnnnnnnnnnnnnnnnnnnnnnnnnnnnnnnnnnnnnnnnnnnnnnnnnnnnnnnnnnnnnnnnnnnnnnnnnnnnnnnnnnnnnnnnnnnnnnnnnnnnnnnnnnnnnnnnnnnnnnnnnnnnnnnnnnnnnnnnnnnnnnnnnnnnnnnnnnnnnnnnnnnnnnnnnnnnnnnnnnnnnnnnnnnnnnnnnnnnnnnnnnnnnnnnnnnnnnnnnnnnnnnnnnnnnnnnnnnnnnnnnnnnnnnnnnnnnnnnnnnnnnnnnnnnnnnnnnnnnnnnnnnnnnnnnnnnnnnnnnnnnnnnnnnnnnnnnnnnnnnnnnnnnnnnnnnnnnnnnnnnnnnnnnnnnnnnnnnnnnnnnnnnnnnnnnnnnnnnnnnnnnnnnnnnnnnnnnnnnnnnnnnnnnnnnnnnnnnnnnnnnnnnnnnnnnnnnnnnnnnnnnnnnnnnnnnnnnnnnnnnnnnnnnnnnnnnnnnnnnnnnnnnnnnnnnnnnnnnnnnnnnnnnnnnnnnnnnnnnnnnnnnnnnnnnnnnnnnnnnnnnnnnnnnnnnnnnnnnnnnnnnnnnnnnnnnnnnnnnnnnnnnnnnnnnnnnnnnnnnnnnnnnnnnnnnnnnnnnnnnnnnnnnnnnnnnnnnnnnnnnnnnnnnnnnnnnnnnnnnnnnnnnnnnnnnnnnnnnnnnnnnnnnnnnnnnnnnnnnnnnnnnnnnnnnnnnnnnnnnnnnnnnnnnnnnnnnnnnnnnnnnnnnnnnnnnnnnnnnnnnnnnnnnnnnnnnnnnnnnnnnnnnnnnnnnnnnnnnnnnnnnnnnnnnnnnnnnnnnnnnnnnnnnnnnnnnnnnnnnnnnnnnnnnnnnnnnnnnnnnnnnnnnnnnnnnnnnnnnnnnnnnnnnnnnnnnnnnnnnnnnnnnnnnnnnnnnnnnnnnnnnnnnnnnnnnnnnnnnnnnnnnnnnnnnnnnnnnnnnnnnnnnnnnnnnnnnnnnnnnnnnnnnnnnnnnnnnnnnnnnnnnnnnnnnnnnnnnnnnnnnnnnnnnnnnnnnnnnnnnnnnnnnnnnnnnnnnnnnnnnnnnnnnnnnnnnnnnnnnnnnnnnnnnnnnnnnnnnnnnnnnnnnnnnnnnnnnnnnnnnnnnnnnnnnnnnnnnnnnnnnnnnnnnnnnnnnnnnnnnnnnnnnnnnnnnnnnnnnnnnnnnnnnnnnnnnnnnnnnnnnnnnnnnnnnnnnnnnnnnnnnnnnnnnnnnnnnnnnnnnnnnnnnnnnnnnnnnnnnnnnnnnnnnnnnnnnnnnnnnnnnnnnnnnnnnnnnnnnnnnnnnnnnnnnnnnnnnnnnnnnnnnnnnnnnnnnnnnnnnnnnnnnnnnnnnnnnnnnnnnnnnnnnnnnnnnnnnnnnnnnnnnnnnnnnnnnnnnnnnnnnnnnnnnnnnnnnnnnnnnnnnnnnnnnnnnnnnnnnnnnnnnnnnnnnnnnnnnnnnnnnnnnnnnnnnnnnnnnnnnnnnnnnnnnnnnnnnnnnnnnnnnnnnnnnnnnnnnnnnnnnnnnnnnnnnnnnnnnnnnnnnnnnnnnnnnnnnnnnnnnnnnnnnnnnnnnnnnnnnnnnnnnnnnnnnnnnnnnnnnnnnnnnnnnnnnnnnnnnnnnnnnnnnnnnnnnnnnnnnnnnnnnnnnnnnnnnnnnnnnnnnnnnnnnnnnnnnnnnnnnnnnnnnnnnnnnnnnnnnnnnnnnnnnnnnnnnnnnnnnnnnnnnnnnnnnnnnnnnnnnnnnnnnnnnnnnnnnnnnnnnnnnnnnnnnnnnnnnnnnnnnnnnnnnnnnnnnnnnnnnnnnnnnnnnnnnnnnnnnnnnnnnnnnnnnnnnnnnnnnnnnnnnnnnnnnnnnnnnnnnnnnnnnnnnnnnnnnnnnnnnnnnnnnnnnnnnnnnnnnnnnnnnnnnnnnnnnnnnnnnnnnnnnnnnnnnnnnnnnnnnnnnnnnnnnnnnnnnnnnnnnnnnnnnnnnnnnnnnnnnnnnnnnnnnnnnnnnnnnnnnnnnnnnnnnnnnnnnnnnnnnnnnnnnnnnnnnnnnnnnnnnnnnnnnnnnnnnnnnnnnnnnnnnnnnnnnnnnnnnnnnnnnnnnnnnnnnnnnnnnnnnnnnnnnnnnnnnnnnnnnnnnnnnnnnnnnnnnnnnnnnnnnnnnnnnnnnnnnnnnnnnnnnnnnnnnnnnnnnnnnnnnnnnnnnnnnnnnnnnnnnnnnnnnnnnnnnnnnnnnnnnnnnnnnnnnnnnnnnnnnnnnnnnnnnnnnnnnnnnnnnnnnnnnnnnnnnnnnnnnnnnnnnnnnnnnnnnnnnnnnnnnnnnnnnnnnnnnnnnnnnnnnnnnnnnnnnnnnnnnnnnnnnnnnnnnnnnnnnnnnnnnnnnnnnnnnnnnnnnnnnnnnnnnnnnnnnnnnnnnnnnnnnnnnnnnnnnnnnnnnnnnnnnnnnnnnnnnnnnnnnnnnnnnnnnnnnnnnnnnnnnnnnnnnnnnnnnnnnnnnnnnnnnnnnnnnnnnnnnnnnnnnnnnnnnnnnnnnnnnnnnnnnnnnnnnnnnnnnnnnnnnnnnnnnnnnnnnnnnnnnnnnnnnnnnnnnnnnnnnnnnnnnnnnnnnnnnnnnnnnnnnnnnnnnnnnnnnnnnnnnnnnnnnnnnnnnnnnnnnnnnnnnnnnnnnnnnnnnnnnnnnnnnnnnnnnnnnnnnnnnnnnnnnnnnnnnnnnnnnnnnnnnnnnnnnnnnnnnnnnnnnnnnnnnnnnnnnnnnnnnnnnnnnnnnnnnnnnnnnnnnnnnnnnnnnnnnnnnnnnnnnnnnnnnnnnnnnnnnnnnnnnnnnnnnnnnnnnnnnnnnnnnnnnnnnnnnnnnnnnnnnnnnnnnnnnnnnnnnnnnnnnnnnnnnnnnnnnnnnnnnnnnnnnnnnnnnnnnnnnnnnnnnnnnnnnnnnnnnnnnnnnnnnnnnnnnnnnnnnnnnnnnnnnnnnnnnnnnnnnnnnnnnnnnnnnnnnnnnnnnnnnnnnnnnnnnnnnnnnnnnnnnnnnnnnnnnnnnnnnnnnnnnnnnnnnnnnnnnnnnnnnnnnnnnnnnnnnnnnnnnnnnnnnnnnnnnnnnnnnnnnnnnnnnnnnnnnnnnnnnnnnnnnnnnnnnnnnnnnnnnnnnnnnnnnnnnnnnnnnnnnnnnnnnnnnnnnnnnnnnnnnnnnnnnnnnnnnnnnnnnnnnnnnnnnnnnnnnnnnnnnnnnnnnnnnnnnnnnnnnnnnnnnnnnnnnnnnnnnnnnnnnnnnnnnnnnnnnnnnnnnnnnnnnnnnnnnnnnnnnnnnnnnnnnnnnnnnnnnnnnnnnnnnnnnnnnnnnnnnnnnnnnnnnnnnnnnnnnnnnnnnnnnnnnnnnnnnnnnnnnnnnnnnnnnnnnnnnnnnnnnnnnnnnnnnnnnnnnnnnnnnnnnnnnnnnnnnnnnnnnnnnnnnnnnnnnnnnnnnnnnnnnnnnnnnnnnnnnnnnnnnnnnnnnnnnnnnnnnnnnnnnnnnnnnnnnnnnnnnnnnnnnnnnnnnnnnnnnnnnnnnnnnnnnnnnnnnnnnnnnnnnnnnnnnnnnnnnnnnnnnnnnnnnnnnnnnnnnnnnnnnnnnnnnnnnnnnnnnnnnnnnnnnnnnnnnnnnnnnnnnnnnnnnnnnnnnnnnnnnnnnnnnnnnnnnnnnnnnnnnnnnnnnnnnnnnnnnnnnnnnnnnnnnnnnnnnnnnnnnnnnnnnnnnnnnnnnnnnnnnnnnnnnnnnnnnnnnnnnnnnnnnnnnnnnnnnnnnnnnnnnnnnnnnnnnnnnnnnnnnnnnnnnnnnnnnnnnnnnnnnnnnnnnnnnnnnnnnnnnnnnnnnnnnnnnnnnnnnnnnnnnnnnnnnnnnnnnnnnnnnnnnnnnnnnnnnnnnnnnnnnnnnnnnnnnnnnnnnnnnnnnnnnnnnnnnnnnnnnnnnnnnnnnnnnnnnnnnnnnnnnnnnnnnnnnnnnnnnnnnnnnnnnnnnnnnnnnnnnnnnnnnnnnnnnnnnnnnnnnnnnnnnnnnnnnnnnnnnnnnnnnnnnnnnnnnnnnnnnnnnnnnnnnnnnnnnnnnnnnnnnnnnnnnnnnnnnnnnnnnnnnnnnnnnnnnnnnnnnnnnnnnnnnnnnnnnnnnnnnnnnnnnnnnnnnnnnnnnnnnnnnnnnnnnnnnnnnnnnnnnnnnnnnnnnnnnnnnnnnnnnnnnnnnnnnnnnnnnnnnnnnnnnnnnnnnnnnnnnnnnnnnnnnnnnnnnnnnnnnnnnnnnnnnnnnnnnnnnnnnnnnnnnnnnnnnnnnnnnnnnnnnnnnnnnnaggagaaggaaatttatcgctggcctgcccgagagtccctgaaaaccatgctagctgtgggctggactgtggagaggaccaaagagggagaagcgttggttcaacagcgggaaaatgagaagcttcgaagcgtgtcccaggccaaccagnnnnnnnnnnnnnnnnnnnnnnnnnnnnnnnnnnnnnnnnnnnnnnnnnnnnnnnnnnnnnnnnnnnnnnnnnnnnnnnnnnnnnnnnnnnnnnnnnnnnnnnnnnnnnnnnnnnnnnnnnnnnnnnnnnnnnnnnnnnnnnnnnnnnnnnnnnnnnnnnnnnnnnnnnnnnnnnnnnnnnnnnnnnnnnnnnnnnnnnnnnnnnnnnnnnnnnnnnnnnnnnnnnnnnnnnnnnnnnnnnnnnnnnnnnnnnnnnnnnnnnnnnnnnnnnnnnnnnnnnnnnnnnnnnnnnnnnnnnnnnnnnnnnnnnnnnnnnnnnnnnnnnnnnnnnnnnnnnnnnnnnnnnnnnnnnnnnnnnnnnnnnnnnnnnnnnnnnnnnnnnnnnnnnnnnnnnnnnnnnnnnnnnnnnnnnnnnnnnnnnnnnnnnnnnnnnnnnnnnnnnnnnnnnnnnnnnnnnnnnnnnnnnnnnnnnnnnnnnnnnnnnnnnnnnnnnnnnnnnnnnnnnnnnnnnnnnnnnnnnnnnnnnnnnnnnnnnnnnnnnnnnnnnnnnnnnnnnnnnnnnnnnnnnnnnnnnnnnnnnnnnnnnnnnnnnnnnnnnnnnnnnnnnnnnnnnnnnnnnnnnnnnnnnnnnnnnnnnnnnnnnnnnnnnnnnnnnnnnnnnnnnnnnnnnnnnnnnnnnnnnnnnnnnnnnnnnnnnnnnnnnnnnnnnnnnnnnnnnnnnnnnnnnnnnnnnnnnnnnnnnnnnnnnnnnnnnnnnnnnnnnnnnnnnnnnnnnnnnnnnnnnnnnnnnnnnnnnnnnnnnnnnnnnnnnnnnnnnnnnnnnnnnnnnnnnnnnnnnnnnnnnnnnnnnnnnnnnnnnnnnnnnnnnnnnnnnnnnnnnnnnnnnnnnnnnnnnnnnnnnnnnnnnnnnnnnnnnnnnnnnnnnnnnnnnnnnnnnnnnnnnnnnnnnnnnnnnnnnnnnnnnnnnnnnnnnnnnnnnnnnnnnnnnnnnnnnnnnnnnnnnnnnnnnnnnnnnnnnnnnnnnnnnnnnnnnnnnnnnnnnnnnnnnnnnnnnnnnnnnnnnnnnnnnnnnnnnnnnnnnnnnnnnnnnnnnnnnnnnnnnnnnnnnnnnnnnnnnnnnnnnnnnnnnnnnnnnnnnnnnnnnnnnnnnnnnnnnnnnnnnnnnnnnnnnnnnnnnnnnnnnnnnnnnnnnnnnnnnnnnnnnnnnnnnnnnnnnnnnnnnnnnnnnnnnnnnnnnnnnnnnnnnnnnnnnnnnnnnnnnnnnnnnnnnnnnnnnnnnnnnnnnnnnnnnnnnnnnnnnnnnnnnnnnnnnnnnnnnnnnnnnnnnnnnnnnnnnnnnnnnnnnnnnnnnnnnnnnnnnnnnnnnnnnnnnnnnnnnnnnnnnnnnnnnnnnnnnnnnnnnnnnnnnnnnnnnnnnnnnnnnnnnnnnnnnnnnnnnnnnnnnnnnnnnnnnnnnnnnnnnnnnnnnnnnnnnnnnnnnnnnnnnnnnnnnnnnnnnnnnnnnnnnnnnnnnnnnnnnnnnnnnnnnnnnnnnnnnnnnnnnnnnnnnnnnnnnnnnnnnnnnnnnnnnnnnnnnnnnnnnnnnnnnnnnnnnnnnnnnnnnnnnnnnnnnnnnnnnnnnnnnnnnnnnnnnnnnnnnnnnnnnnnnnnnnnnnnnnnnnnnnnnnnnnnnnnnnnnnnnnnnnnnnnnnnnnnnnnnnnnnnnnnnnnnnnnnnnnnnnnnnnnnnnnnnnnnnnnnnnnnnnnnnnnnnnnnnnnnnnnnnnnnnnnnnnnnnnnnnnnnnnnnnnnnnnnnnnnnnnnnnnnnnnnnnnnnnnnnnnnnnnnnnnnnnnnnnnnnnnnnnnnnnnnnnnnnnnnnnnnnnnnnnnnnnnnnnnnnnnnnnnnnnnnnnnnnnnnnnnnnnnnnnnnnnnnnnnnnnnnnnnnnnnnnnnnnnnnnnnnnnnnnnnnnnnnnnnnnnnnnnnnnnnnnnnnnnnnnnnnnnnnnnnnnnnnnnnnnnnnnnnnnnnnnnnnnnnnnnnnnnnnnnnnnnnnnnnnnnnnnnnnnnnnnnnnnnnnnnnnnnnnnnnnnnnnnnnnnnnnnnnnnnnnnnnnnnnnnnnnnnnnnnnnnnnnnnnnnnnnnnnnnnnnnnnnnnnnnnnnnnnnnnnnnnnnnnnnnnnnnnnnnnnnnnnnnnnnnnnnnnnnnnnnnnnnnnnnnnnnnnnnnnnnnnnnnnnnnnnnnnnnnnnnnnnnnnnnnnnnnnnnnnnnnnnnnnnnnnnnnnnnnnnnnnnnnnnnnnnnnnnnnnnnnnnnnnnnnnnnnnnnnnnnnnnnnnnnnnnnnnnnnnnnnnnnnnnnnnnnnnnnnnnnnnnnnnnnnnnnnnnnnnnnnnnnnnnnnnnnnnnnnnnnnnnnnnnnnnnnnnnnnnnnnnnnnnnnnnnnnnnnnnnnnnnnnnnnnnnnnnnnnnnnnnnnnnnnnnnnnnnnnnnnnnnnnnnnnnnnnnnnnnnnnnnnnnnnnnnnnnnnnnnnnnnnnnnnnnnnnnnnnnnnnnnnnnnnnnnnnnnnnnnnnnnnnnnnnnnnnnnnnnnnnnnnnnnnnnnnnnnnnnnnnnnnnnnnnnnnnnnnnnnnnnnnnnnnnnnnnnnnnnnnnnnnnnnnnnnnnnnnnnnnnnnnnnnnnnnnnnnnnnnnnnnnnnnnnnnnnnnnnnnnnnnnnnnnnnnnnnnnnnnnnnnnnnnnnnnnnnnnnnnnnnnnnnnnnnnnnnnnnnnnnnnnnnnnnnnnnnnnnnnnnnnnnnnnnnnnnnnnnnnnnnnnnnnnnnnnnnnnnnnnnnnnnnnnnnnnnnnnnnnnnnnnnnnnnnnnnnnnnnnnnnnnnnnnnnnnnnnnnnnnnnnnnnnnnnnnnnnnnnnnnnnnnnnnnnnnnnnnnnnnnnnnnnnnnnnnnnnnnnnnnnnnnnnnnnnnnnnnnnnnnnnnnnnnnnnnnnnnnnnnnnnnnnnnnnnnnnnnnnnnnnnnnnnnnnnnnnnnnnnnnnnnnnnnnnnnnnnnnnnnnnnnnnnnnnnnnnnnnnnnnnnnnnnnnnnnnnnnnnnnnnnnnnnnnnnnnnnnnnnnnnnnnnnnnnnnnnnnnnnnnnnnnnnnnnnnnnnnnnnnnnnnnnnnnnnnnnnnnnnnnnnnnnnnnnnnnnnnnnnnnnnnnnnnnnnnnnnnnnnnnnnnnnnnnnnnnnnnnnnnnnnnnnnnnnnnnnnnnnnnnnnnnnnnnnnnnnnnnnnnnnnnnnnnnnnnnnnnnnnnnnnnnnnnnnnnnnnnnnnnnnnnnnnnnnnnnnnnnnnnnnnnnnnnnnnnnnnnnnnnnnnnnnnnnnnnnnnnnnnnnnnnnnnnnnnnnnnnnnnnnnnnnnnnnnnnnnnnnnnnnnnnnnnnnnnnnnnnnnnnnnnnnnnnnnnnnnnnnnnnnnnnnnnnnnnnnnnnnnnnnnnnnnnnnnnnnnnnnnnnnnnnnnnnnnnnnnnnnnnnnnnnnnnnnnnnnnnnnnnnnnnnnnnnnnnnnnnnnnnnnnnnnnnnnnnnnnnnnnnnnnnnnnnnnnnnnnnnnnnnnnnnnnnnnnnnnnnnnnnnnnnnnnnnnnnnnnnnnnnnnnnnnnnnnnnnnnnnnnnnnnnnnnnnnnnnnnnnnnnnnnnnnnnnnnnnnnnnnnnnnnnnnnnnnnnnnnnnnnnnnnnnnnnnnnnnnnnnnnnnnnnnnnnnnnnnnnnnnnnnnnnnnnnnnnnnnnnnnnnnnnnnnnnnnnnnnnnnnnnnnnnnnnnnnnnnnnnnnnnnnnnnnnnnnnnnnnnnnnnnnnnnnnnnnnnnnnnnnnnnnnnnnnnnnnnnnnnnnnnnnnnnnnnnnnnnnnnnnnnnnnnnnnnnnnnnnnnnnnnnnnnnnnnnnnnnnnnnnnnnnnnnnnnnnnnnnnnnnnnnnnnnnnnnnnnnnnnnnnnnnnnnnnnnnnnnnnnnnnnnnnnnnnnnnnnnnnnnnnnnnnnnnnnnnnnnnnnnnnggccaagaaaattgagcgtgtttattttgaaatcagtgagtccagtcgcactcagtgggagaagccccaggtgaaggaatctaagcgacagttcatttttgatgttgtcaacgaaggtggggagcaggaaaagatggagctgtttgtgaacttctgtgaggacaccatctttgaaatgcagttagcatctcagatctctgaatccgattcagcggacaggccagaagaggaggaagaaggtgaagattcttcttacgtgttagaaattgcgggtgaagaggaggaagacgggtctttcgagccggcctctgcatttgcaatggcctgtgcctctgtgaagaggaacgtcgccgactttctgaagagagcaaccctgaagaacctcaggaagcagtacaggaacgtgaaaaagatgactgcgaaggagctggtgaaggtgctctgctcctttttctggatgctgttcctggggctgttccagatgctcttcaccatcctgggaggaatctttcagatcctctggagcacagtgttcggagggggcctggtagaaggnnnnnnnnnnnnnnnnnnnnnnnnnnnnnnnnnnnnnnnnnnnnnnnnnnnnnnnnnnnnnnnnnnnnnnnnnnnnnnnnnnnnnnnnnnnnnnnnnnnnnnnnnnnnnnnnnnnnnnnnnnnnnnnnnnnnnnnnnnnnnnnnnnnnnnnnnnnnnnnnnnnnnnnnnnnnnnnnnnnnnnnnnnnnnnnnnnnnnnnnnnnnnnnnnnnnnnnnnnnnnnnnnnnnnnnnnnnnnnnnnnnnnnnnnnnnnnnnnnnnnnnnnnnnnnnnnnnnnnnnnnnnnnnnnnnnnnnnnnnnnnnnnnnnnnnnnnnnnnnnnnnnnnnnnnnnnnnnnnnnnnnnnnnnnnnnnnnnnnnnnnnnnnnnnnnnnnnnnnnnnnnnnnnnnnnnnnnnnnnnnnnnnnnnnnnnnnnnnnnnnnnnnnnnnnnnnnnnnnnnnnnnnnnnnnnnnnnnnnnnnnnnnnnnnnnnnnnnnnnnnnnnnnnnnnnnnnnnnnnnnnnnnnnnnnnnnnnnnnnnnnnnnnnnnnnnnnnnnnnnnnnnnnnnnnnnnnnnnnnnnnnnnnnnnnnnnnnnnnnnnnnnnnnnnnnnnnnnnnnnnnnnnnnnnnnnnnnnnnnnnnnnnnnnnnnnnnnnnnnnnnnnnnnnnnnnnnnnnnnnnnnnnnnnnnnnnnnnnnnnnnnnnnnnnnnnnnnnnnnnnnnnnnnnnnnnnnnnnnnnnnnnnnnnnnnnnnnnnnnnnnnnnnnnnnnnnnnnnnnnnnnnnnnnnnnnnnnnnnnnnnnnnnnnnnnnnnnnnnnnnnnnnnnnnnnnnnnnnnnnnnnnnnnnnnnnnnnnnnnnnnnnnnnnnnnnnnnnnnnnnnnnnnnnnnnnnnnnnnnnnnnnnnnnnnnnnnnnnnnnnnnnnnnnnnnnnnnnnnnnnnnnnnnnnnnnnnnnnnnnnnnnnnnnnnnnnnnnnnnnnnnnnnnnnnnnnnnnnnnnnnnnnnnnnnnnnnnnnnnnnnnnnnnnnnnnnnnnnnnnnnnnnnnnnnnnnnnnnnnnnnnnnnnnnnnnnnnnnnnnnnnnnnnnnnnnnnnnnnnnnnnnnnnnnnnnnnnnnnnnnnnnnnnnnnnnnnnnnnnnnnnnnnnnnnnnnnnnnnnnnnnnnnnnnnnnnnnnnnnnnnnnnnnnnnnnnnnnnnnnnnnnnnnnnnnnnnnnnnnnnnnnnnnnnnnnnnnnnnnnnnnnnnnnnnnnnnnnnnnnnnnnnnnnnnnnnnnnnnnnnnnnnnnnnnnnnnnnnnnnnnnnnnnnnnnnnnnnnnnnnnnnnnnnnnnnnnnnnnnnnnnnnnnnnnnnnnnnnnnnnnnnnnnnnnnnnnnnnnnnnnnnnnnnnnnnnnnnnnnnnnnnnnnnnnnnnnnnnnnnnnnnnnnnnnnnnnnnnnnnnnnnnnnnnnnnnnnnnnnnnnnnnnnnnnnnnnnnnnnnnnnnnnnnnnnnnnnngtgttaccttttccacatgtacgtgggagtgagagcaggaggtggcattggtgacgagattgaagaccctgctggtgatccttatgaaatgtatcgcattgtctttgacattacctttttcttctttgtcattgtcatcttgctggccatcattcaagg

SEQ ID NO: 31202 - DNA, 331 bp, Macaca Mulatta
aagtttgcacgactccagagtatcttcccggatttctctaaagctggcatggaacgagcttttctcccagtcacctccccaaataagcatttggggccagtgactcttcacaagacagaactggtatgagcaggatttctgcgggttcttcttcccgaagctgaggctcaggggtgtgcctgtctgtcacactggaggagagaagaatgagcctacgctgaagatggcatcctcctgtgaagtccttcacctcactgagaacatccaaaggtggatcccaccccatttgctgtgagcagacttcgaaaagcatcacatgaccacatagcat

SEQ ID NO: 31203 - DNA, 697 bp, Macaca Mulatta
  misc_feature (1)...(697): n = A,T,C or G
aaaggtttcagtctacaggaaagttaacaggacacctaggccgtgttatgtgccttactgtggatcagatttccaatggacaagatgtaatcatcactggctccaaggatcattacatcaannnnnnnnnnnnnnnnnnnnnnnnnnnnnnnnnnnnnnnnnnnnnnnnnnnnnnnnnnnnnnnnnnnnnnnnnnnnnnnnnnnnnnnnnnnnnnnnnnnnnnnnnnnnnnnnnnnnnnnnnnnnnnnnnnnnnnnnnnnnnnnnnnnnnnnnnnnnnnnnnnnnnnnnnnnnnnnnnnnnnnnnnnnnnnnnnnnnnnnnnnnnnnnnnnnnnnnnnnnnnnnnnnnnnnnnnnnnnnnnnnnnnnnnnnnnnnnnnnnnnnnnnnnnnnnnnnnnnnnnnnnnnnnnnnnnnnnnnnnnnnnnnnnnnnnnnnnnnnnnnnnnnnnnnnnnnnnnnnnnnnnnnnnnnnnnnnnnnnnnnnnnnnnnnnntgatcgaactgtgagaatttggaaggctcgcaatttgcaagatggtcagatctctgacacaggagatctgggggaagatactgccagtaattaaacatgagtgaagataagttgtaaactgaatgctgtgataatactctgtattctttatggaaaatttcctgcacttattaggcaaagcgtatgaatgggattaactggtaaa

SEQ ID NO: 31204 - DNA, 69 bp, Macaca Mulatta
ggttctccacatacgattctacttgtcaaattgcccaagaaattgcggagaaaattcaacaacaaaatc

SEQ ID NO: 31205 - DNA, 1705 bp, Macaca Mulatta
  misc_feature (1)...(1705): n = A,T,C or G
aggttctaaacgaagccgtgggtgccatgatgtaccacaccatcaccctcaccagggaggacctggagaagttcaaggccctgagagtgatcgtgcggataggcagtggctatgacaacgtggacatcaaggctgccggcgagctcggnnnnnnnnnnnnnnnnnnnnnnnnnnnnnnnnnnnnnnnnnnnnnnnnnnnnnnnnnnnnnnnnnnnnnnnnnnnnnnnnnnnnnnnnnnnnnnnnnnnnnnnnnnnnnnnnnnnnnnnnnnnnnnnnnnnnnnnnnnnnnnnnnnnnnnnnnnnnnnnnnnnnnnnnnnnnnnnnnnnnnnnnnnnnnnnnnnnnnnnnnnnnnnnnnnnnnnnnnnnnnnnnnnnnnnnnnnnnnnnnnnnnnnnnnnnnnnnnnnnnnnnnnnnnnnnnnnnnnnnnnnnnnnnnnnnnnnnnnnnnnnnnnnnnnnnnnnnnnnnnnnnnnnnnnnnnnnnnnnnnnnnnnnnnnnnnnnnnnnnnnnnnnnnnnnnnnnnnnnnnnnnnnnnnnnnnnnnnnnnnnnnnnnnnnnnnnnnnnnnnnnnnnnnnnnnnnnnnnnnnnnnnnnnnnnnnnnnnnnnnnnnnnnnnnnnnnnnnnnnnnnnnnnnnnnnnnnnnnnnnnnnnnnnnnnnnnnnnnnnnnnnnnnnnnnnnnnnnnnnnnnnnnnnnnngctttgctcagggtccgttgaaagatgcaccgaatctcatctgcactcctcacactgcctggtatagcgagcaggcatcactggagatgagggaggcagctgccacggagatccgccgagccatcacaggtnaggtcgcatcccagaaagcttaagaaactgtgtgaacaaggaattttttgtcacatcagcgccttggtcagtaatagaccagcaagcaattcatcctgagctcaatggtgccacatacannnnnnnnnnnnnnnnnnnnnnnnnnnnnnnnnnnnnnnnnnnnnnnnnnnnnnnnnnnnnnnnnnnnnnnnnnnnnnnnnnnnnnnnnnnnnnnnnnnnnnnnnnnnnnnnnnnnnnnnnnnnnnnnnnnnnnnnnnnnnnnnnnnnnnnnnnnnnnnnnnnnnnnnnnnnnnnnnnnnnnnnnnnnnnnnnnnnnnnnnnnnnnnnnnnnnnnnnnnnnnnnnnnnnnnnnnnnnnnnnnnnnnnnnnnnnnnnnnnnnnnnnnnnnnnnnnnnnnnnnnnnnnnnnnnnnnnnnnnnnnnnnnnnnnnnnnnnnnnnnnnnnnnnnnnnnnnnnnnnnnnnnnnnnnnnnnnnnnnnnnnnnnnnnnnnnnnnnnnnnnnnnnnnnnnnnnnnnnnnnnnnnnnnnnnnnnnnnnnnnnnnnnnnnnnnnnnnnnnnnnnnnnnnnnnnnnnnnnnnnnnnnnnnnnnnnnnnnnnnnnnnnnnnnnnnnnnnnnnnnnnnnnnctgctctacaatgttgcatcaagagttcaaacaacaaaataaaaaatattaagaggaaatccccatcctgtgacttgagtcccttaagtctacaggggctggagacctctttttgctaataggaaaatcacatgactacaaaatggggagaaaactgtttgcctgtggtagacacctgcacgcataggattgaagacagtacaggctcctgtacagaaaagcgtctctcacacctgaactgcatactga

SEQ ID NO: 31206 - DNA, 1390 bp, Macaca Mulatta
  misc_feature (1)...(1390): n = A,T,C or G
gaagaagctggtcgaggatatgggagcaatcaccatggaacagaagtctctctgggcaggtgnnnnnnnnnnnnnnnnnnnnnnnnnnaggatctgcctacaaactggtttgctactttaccaactggtcccaggaccggcaggaaccaggaaaattcacccctgagaatgttgaccccttcctatgctctcacctcatctactcattcgccagcatcgagaacaacaaggttatcatcaaggacaagaatgaagtgatgctctaccagaccatcaacagtctcaaaaccaannnnnnnnnnnnnnnnnnnnnnnnnnnnnnnnnnnnnnnnnnnnnnnnnnnnnnnnnnnnnnnnnnnnnnnnnnnnnnnnnnnnnnnnnnnnnnnnnnnnnnnnnnnnnnnnnnnnnnnnnnnnnnnnnnnnnnnnnnnnnnnnnnnnnnnnnnnnnnnnnnnnnnnnnnnnnnnnnnnnnnnnnnnnnnnnnnnnnnnnnnnnnnnagttagcagaagcctttcagaaggacttcacaaaatccaccaaggaaaggcttctcttgactgcaggtgtatctgctgggaggcaaatgattgataacagctatcaagttgagaaactggcaaanagatttggatttcatcaacctcctatcatttgacttccatgggtcttgggaaaagccccttatcactggccacaacagccctctgagcaaggggtggcaggacagagggccaagctcctactacaatgtggnnnnnnnnnnnnnnnnnnnnnnnnnnnnnnnnnnnnnnnnnnnnnnnnnnnnnnnnnnnnnnnnnnnnnnnnnnnnnnnnnnnnnnnnnnnnnnnnnnnnnnnnnnnnnnnnnnnnnnnnnnnnnnnnnnnnnnnnnnnnnnnnnnnnnnnnnnnnnnnnnnnnnnnnnnnnnnnnnnnngatctgccagtttctgaaaggagccaagatcacgaggctccaggatcagcaggttccctatgcagtcaaggggaaccagtgggtgggctatgacgatgcggagagtatggagaccaaggtnnnnnnnnnnnnnnnnnnnnnnnnnnnnnnnnnnnnnnnnnnnnnnnnnnnnnnnnnnnnnnnnnnnnnnnnnnnnnnnnnnnnnnnnnnnnnnnnnnnnnnnnnnnnnnnnnnnnnnnnnnnnnnnnnnnnnnnnggattaacttacagagaagcaggcaaggtgaccttgctgcctggggcctgctctctcccaggaattctaatgtgggattccccttgccaggctggcctttggatctctcttccaagcctttcctgacttcctcttaaatcatggattggacctggttttgttttcctgcagctgttgacttgttgccctgaagtacaat

SEQ ID NO: 31207 - DNA, 2144 bp, Macaca Mulatta
  misc_feature (1)...(2144): n = A,T,C or G
aagaggagctggaccaggaatttgagctggagactgacactttatttggaggattaaagaaggnnnnnnnnnnnnnnnnnnnnnnnnnnnnnnnnnnnnnnnnnnnnnnnnnnnnnnnnnnnnnnnnnnnnnnnnnnnnnnnnnnnnnnnnnnnnnnnnnnnnnnnnnnnnnnnnnnnnnnnnnnnnnnnnnnnnnnnnnnnnnnnnnnnnnnnnnnnnnnnnnnnnnnnnnnnnnnnnnnnnnnnnnnnnnnnnnnnnnnnnnnnnnnnnnnnnnnnnnnnnnnnnnnnnnnnnnnnnnnnnnnnnnnnnnnnnnnnnnnnnnnnnnnnnnnnnnnnnnnnnnnnnnnnnnnnnnnnnnnnnnnnnnnnnnnnnnnnnnnnnnnnnnnnnnnnnnnnnnnnnnnnnnnnnnnnnnnnnnnnnnnnnnnnnnnnnnnnnnnnnnnnnnnnnnnnnnnnnnnnnnnnnnnnnnnnnnnnnnnnnnnnnnnnnnnnnnnnnnnnnnnnnnnnnnnnnnnnnnnnnnnnnnnnnnnnnnnnnnnnnnnnnnnnnnnnnnnnnnnnnnnnnnnnnnnnnnnnnnnnnnnnnnnnnnnnnnnnnnnnnnnnnnnnnnnnnnnnnnnnnnnnnnnnnnnnnnnnnnnnnnnnnnnnnnnnnnnnnnnnnnnnnnnnnnnnnnnngcgtgagcaccatgttcagtttcaccgggatgtggaggnnnnnnnnnnnnnnnnnnnnnnnnnnnnnnnnnnnnnnnnnnnnnnnnnnnnnnnnnnnnnnnnnnnnnnnnnnnnnnnnnnnnnnnnnnnnnnnnnnnnnnnnnnnnnnnnnnnnnnnnnnnnnnnnnnnnnnnnnnnnnnnnnnnnnnnnnnnnnnnnnnnnnnnnnnnnnnnnnnnnnnnnnnnnnnnnnnnnnnnnnnnnnnnnnnnnnnnnnnnnnnnnnnnnnnnnnnnnnnnnnnnnnnnnnnnnnnnnnnnnnnnnnnnnnnnnnnnnnnnnnnnnnnnnnnnnnnnnnnnnnnnnnnnnnnnnnnnnnnnnnnnnnnnnnnnnnnnnnnnnnnnnnnnnnnnnnnnnnnnnnnnnnnnnnnnnnnnnnnnnnnnnnnnnnnnnnnnnnnnnnnngtcctgggattcttgtactgctactcccacgtgggcattgcctgggcccagacgtatgctatggactaatgctgttgggcccaggccagtccttgctgctggcctccaaggcaaacagtgcttcaccctgacctctcactccaggacagcctctaagggatttgatctgttcatcttcggttgaatgttctcactccaagactggatgctggatctcacagaaaattcacagccagacaatcttctaacctggagtctttgaaatcttctaccccaacccatcattttcctattgaggaagctggggtccagggcagttttgtgtcttgcccaactacacaaggtgacattttggtctagaacctactctcatgagccctttgcattctttccccttaagcaagaatagaatgtagtgtacatttattgattgagacacagaaatcctgattaggcctgtcttctgggcagtatttctaaaatatttgagtgacgttgatgtttaagtgacctccttcatcacatcccacagtgtctctagaagcagcactagagtttgagcttcacacttcagcccctctgtaggaaagagagcaagccacagctgtcttttgaattacctagtccaagaagacagtagcagccctgtagcattctaaggcatccatacccaaggagtcctgtgatttgagcttcagcagggtgatctacatttgggtgcttgtttctgagatttgcagagaagtataacatggtagttcctctaccttacagttaatagtttcttaatacagaagcagcatttagaaaccacagcatagtgtatccacagatgggtgctatcaggctagtcacgatgatggtgtcctggagtcttgtccaccctctctacacgtctcaaaagtcatcctcctactcagtgattcacgtttagtggtttatattgttatggtttgattcaaatggagccttttttgtcatgtggataatctacatgtttgtagaattatttttaatatgtttga

SEQ ID NO: 31208 - DNA, 616 bp, Macaca Mulatta
tcaaagttctgggttggaaagagaccagcttctgcttgtgtactgctatcctgaaccatcagacatccacgtgtgtgtcatatgctatgatgtggccagtctgagtgcgatacttgcagcaggaaggagcagctgggtgcatgctgtgctctagaattagtccttccactggggtttggtaagttctgagggcattgatcctggggcagaagtggctgagtctgtgtctagggtacagtgtgcaagaaagaaatgtaacagcaagtcacgatccagccaagtgataatggaaaaggggtagttgggtcccagataaggagcagggtgacctgacctgtggaaaagacacagagacaaggaatctggctcagatgatagccaggagaccaggtgagcagccagttagtgtctgggaggcctgtcaacagggcatggtcctatcactaagcagggctcagatcctcataatgggggagaggaaggctggtcaaacagaaatcagggcctggaaacagaatgagggggtggatataggggacggaggcctgaaaattagtttattacttttagctcttcagttacaagcaataataatcacttctagattatttaagca

SEQ ID NO: 31209 - DNA, 681 bp, Macaca Mulatta
  misc_feature (1)...(681): n = A,T,C or G
ggagtggagacatgtggaattctctgntggaaaactgatgagaaatgaatttaccattactcatgttctcatccccaagcaaagtgctgggtctgattactgcaacacagagaatgaagaagaacttttcctcatacaggatcagcagggcctcatcacactgggctggattcatactcaccccacacagaccgcatttctctccagtgtcgacctacacactcactgctcttaccagatgatgttgccagagtcgatagccattgtttgctccccaaagttccaggaaactggattctttaaactaactgaccatggactagaggagatttcttcctgccgccagaaaggatttcacccacacagcaaggatccaccgctgttctgtagctgcagccacgtgactgttgtggacagagcagtgaccatcacagaccttcgatgagcgtttgagtccaacactttccaagaacaacaaaaccatatcagtgtactgtagccccttaatttaaggtttctagaaagctttggaagtttttgtagacagaatagaaagtggggcatcacctgagaaagagttgattttgtttcaggtttgaaaagaaataactgaacatattttttagacaagtcagaaagagaacatgatcacccaaaagcaactgtaactcagaaattaag

SEQ ID NO: 31210 - DNA, 128 bp, Macaca Mulatta
gagttgggtatcggaaattaaaaaagaagaagataaaatgcactttcatgaaaccgagacatttccagcaatgaaagataatttgcctccagttcgtggttcaaacagctgtcttcatgttggcaagg

SEQ ID NO: 31211 - DNA, 841 bp, Macaca Mulatta
  misc_feature (1)...(841): n = A,T,C or G
ggaggggcaatcctcaaatggggcatagggaccaanaagagagggcagcntcctcctgagctcctgtcccctgctaccctattatcccagctgcctagattcagggaaagtggaacagcttgtaggggaggggctcctttccataaatccttgatgattaacaacacccatttttccttttgccaacccaagagttttgggagttgtagttaatcatcaaaagactttggggcttcctagttgtttgggccaaggacctgagacctgaagggttgactttacccatttgggtgtgagtattgagcatctgttcccttttagatctctgaagccagaaatgggatgcttgggaagacccctagctgtccttttccctctccgcacagtgctcaaggccagcttatagtcgtatatatcaccccgacctaaaagaaaaagaccctttttttaggaaatgttttttannnnnnnnnnnnnnnnnnnnnnnnnnnnnnnnnngaaccccttaacccttttgtgtgctcccccatttctgctcctttcctttccccttcgtttgcccccccttttctgaggtggcactgggggggctcccccttccattttggggccttgatgaactttccttttggtaactgggggcttttggggtttccttcccaggggtcaattttctcatcccacattaccccggaccttggcccccccccaagtggttagtcacaccagatcttggattttttaaaccccccttggaaagggacacgaaaaaaaatttaaatgggcacattcttccgggccccccctttcccaaaatgggtcccccacaatgcgccctccc

SEQ ID NO: 31212 - DNA, 939 bp, Macaca Mulatta
  misc_feature (1)...(939): n = A,T,C or G
tgaattgggtaaataagagcatcatacaggagtttattctgctggatttctcagatcgaccttggctggaatttctactctttgtggtcttcttgatttctttcgtcatgaccatctttggcaatctgaccattattctagtgtcacgcctggactccaaactccatacccctatgtannnnnnnnnnnnnnnnnnnnnnnnnnnnnnnnnnnnntacaccacatgtacagtcccacaaatgctagtaaatttatgcatcatcagaaaagtaatcagttatggcggctgtgtagctcagcttttcatatttctggccttgggggctactgaatgtcttctcctggctgtcaggtcccttgataggtttgtagctatttttcagcctctccattactcagttatcatgcactagagactctgtctccagttggcagctgcatcctggattactggttttggtaactcagtgtggttgtctaccctgactctccagctgccactctgtgacccttatgtgatagatcactttctctgtgaagcccctgcaatgctcaagttatcctgtgttgagacaacagcaaatgaggctgaactattccttgtcagtgtgctcttccatctaatacccctaacactcatccttatatcatacgcttttattgtgcgagcagtgttgaggatacagtctgttgaaggtcgacaaaaagcatttgggacatgtggttcccatctaattgtggtgtcacttttttatggtacagctatctccgtgtacgtgcaaccaccttcaccccgctccaaggaccgaggaaagatggtttctctcttctatggaatcattgcacccatgctgaatccccttatatatacacttaggaacaaagaggtaaaggaagcctttaaaaggttggttgcaagagtcttctaatcaagaaata

SEQ ID NO: 31213 - DNA, 189 bp, Macaca Mulatta
ggctttagcaacagataaagttcttattttcctctgaagggaaagggctcttttcctgctgtttcaaaaataaaagaacacattagatgttactgtgtgaaggataatgccttgtgtggtgttgatacgtgtgtgaagtattcttattttatttgtctgacaaactcttgtgtacctttgtgtaaagaa

SEQ ID NO: 31214 - DNA, 1240 bp, Macaca Mulatta
  misc_feature (1)...(1240): n = A,T,C or G
agtcacaggatttgatctgtggggcgcggtggtggcaacaggggtggtctgcacattctactgcacactgnnnnnnnnnnnnnnnnnnnnnnnnnnnnnnnnnnnnnnnnnnnnnnnnnnnnnnnnnnnnnnnnnnnnnnnnnnnnnnnnnnnnnnnnnnnnnnnnnnnnnnnnnnnnnnnnnnnnnnnnnnnnnnnnnnnnnnnnnnnnnnnnnnnnnnnnnnnnnnnnnnnnnnnnnnnnnnnnnnnnnnnnnnnnnnnnnnnnnnnnnnnnnnnnnnnnnnnnnnnnnnnnnnnnnnnnnnnnnnnnnnnnnnnnnnnnnnnnnnnnnnnnnnnnnnnnnnnnnnnnnnnnnnnnnnnnnnnnnnnnnnnnnnnnnnnnnnnnnnnnnnnnnnnnnnnnnnnnnnnnnnnnnnnnnnnnnnnnnnnnnnnnnnnnnnnnnnnnnnnnnnnnnnnnnnnnnnnnnnnnnnnnnnnnnnnnnnnnnnnnnnnnnnnnnnnnnnnnnnnnnnnnnnnnnnnnnnnnnnnnnnnnnnnnnnnnnnnnnnnnnnnnnnnnnnnnnnnnnnnnnnnnnnnnnnnnnnnnnnnnnnnnnnnnnnnnnnnnnnnnnnnnnnnnnnnnnnnnnnnnnnnnnnnnnnnnnnnnnnnnnnnnnnnnnnnnnnnnnnnnnnnnnnnnnnnnnnnnnnnnnnnnnnnnnnnnnnnnnnnnnnnnnnnnnnnnnnnnnnnnnnnnnnnnnnnnnnnnnnnnnnnnnnnnnnnnnnnnnnnnnnnnnnnnnnnnnnnnnnnnnnnnnnnnnnnnnnnnnnnnnnnnnnnnnnnnnnnnnnnnnnnnnnnnnnnnnnnnnnnnnngagcacttgttggtctgatggctggatttgctacttctctatgggttggaattggagctcaaatgtatcctccacttcctgagagaacgttgccattgcagcttgannnnnnnnnnnnnnnnnnnnnnnnnnnnnnnnnnnnnnnnnnnnnnnnnnnnnnnnnnnnnnnnnnnnnnnnnnnnnnnnnnnnnnnnnnnnnnnnnnnnnnnnnnnnnnnnnnnnnnnnnnnnnnnnnnnnnnnnnnnnnnnnnnnnnnnnnnnnnnnnnnnnnnnnnnnnnnnnnnnnnnnnnnnnnnnnnnnnnnnncaggaggaagaaaacagaacttagaccccagatatatactaaccaaagaggactttttatccaattttgagatttttaagaa

SEQ ID NO: 31215 - DNA, 956 bp, Macaca Mulatta
  misc_feature (1)...(956): n = A,T,C or G
cagaaactntacaactcaattccaccttcctacacccaaccttcttcatactgactggctttccagggctaggaagtgcccagacttggctgacactggcctttgggcccatttatttgctggccctgctgggcaatggagcactgttggcagtggtgtggatagactccacactgcaccagcccatgtttctactcttggccatgccagcagccacagacctgggcttagccacatctatagccccagggttactggctgtgctgcggcttgggccccgatctgtgccatatgctgtgtgcctgggcaagatgttctttgtacatgcactgactnnnnnnnnnnnnnnnnnnnnnnnnnnnnnnnnnnnnnnnnnnnnnnnnnnnnnnnnnnnnnnnnnnnnnnnnnnnnnnnnnnnnnnnnnnnnnnnnnnnnnnnnnnnnnnnnnnnnnnnnnnnnnnnnnnnnnnnnnnnnnnnnnnnnnnnnnnnnnnnnnnnnnnnnnnnnnnnnnnnnnnnnnnnnnnnnnnnnnnnnnnnnnnnnnnnnnnnnnnnnnnnnnnnnnnnnnnnnnnnnnnnnnnnnnnnnnnnnnnnnnnnnnnnnnnnnnnnnnnnnnnnnnnnnnnnnnnnnnnnnnnnnnnnnnnnnnnnnnnnnnnnnnnnnnnnnnnnnnnnnnnnnnnnnnnnnnnnnnnnnnnnnnnnnnnnnnnnnnnnnnnnnnnnnnnnnnnnnnnnnnntcacatctgtgtcattctggccttctacatacctgggctcttctcctacctcacacaccactttggtcatcacaccgtcccaaagcctgtgcacatccttctctccaacatctacttgctgctgccacctgccctcaacctcctcatctatgtggcccgcaccaagcagatcaggattttttcttggacaccttcacattcagaaaaagcccggtgtaa

SEQ ID NO: 31216 - DNA, 368 bp, Macaca Mulatta
gggttctttctaggtgacatgaccccgaagcagtccaaagtggtgaaggccatcctgtgggtctgcggaatacaggacaagggcaaggaagagctcccggccagagcagaacccgtcatagtttccctggaagaaaaccccttggtgaagaccctcctggacgccaaccttattttctgcgtgacctgcgccatctttatctggggctactttgcttaatgtggggtgaacccgggggttcaaaggccgtttctcttcaatgctccattttttttaatgaaagaaaaaagaataaagcttttgtttgtttaccacaaggcttccaactgtttatagatcattttcaacatgacacttagttcttttct

SEQ ID NO: 31217 - DNA, 637 bp, Macaca Mulatta
  misc_feature (1)...(637): n = A,T,C or G
gcatgctctgaagaatggtgacatttgtgaaacttcaggtaaaccaaaaaccacacctaaaagaaaacctgctaagaagaataaaagccaaaagaagaatactgcagctcccttaaaacagnnnnnnnnnnnnnnnnnnnnnnnnnnnnnnnnnnnnnnnnnnnnnnnnnnnnnnnnnnnnnnnnnnnnnnnnnnnnnnnnnnnnnnnnnnnnnnnnnnnnnnnnnnnnnnnnnnnnnnnnnnnnnnnnnnnnnnnnnnnnnnnnnnnnnnnnnnnnnnnnnnnnnnnnnnnnnnnnnnnnnnnnnnnnnnnnnnnnnnnnnnnnnnnnnnnnnnnnnnnnnnnnnnnnnnnnnnnnnnnnnnnnnnnnnnnnnnnnnnnnnnnnnnnnnnnnnnnnnnnnnnnnnnnnnnnnnnnnnnnnnnnnnnnnnnnnnnnnnnnnnnnnnnnnnnnnnnnnnnnnnnnnnnnnnnnnnnntaattcccccaccacctcccatatgtccagattctcttgatgatgctgatgctttgggaagtatgttaatttcatggtacatgagtggctatcacactggctattatatgggtttcagacaaaatcagaaagaaggaaggtgctcacattccttaaattaa

SEQ ID NO: 31218 - DNA, 511 bp, Macaca Mulatta
catacttatgtctaatcataggaacatgtgattttgagtgtaaaatgtgggctagctttaaattatttgacagccatctatatatcttatgtttaataaaattataatttaagtacaatcttaattattttactttgaaaattctttttaatgcctttgtttactgtactatggcctgcagtcttatttggtacatcaaagttaagtttggacatggaaaattgttaggaaaactgctttagggagttaaatatccagcatatttgcttttttgttaatgagtatcgtaagtgtgtatcctacttgttagtttcttcttaaatgaaaccctttctgtgtcttggctgtctgctttaacgctgtaggaggcagcttcttgcttgggacaaaggcattggtggtgtgttccatgttgaatctgccttcagtgcctgggctggctggctatggaaatgtacttagcattgattagggggtagagagctgtttctaaatcctgcttttctacttt

SEQ ID NO: 31219 - DNA, 261 bp, Macaca Mulatta
  misc_feature (1)...(261): n = A,T,C or G
ctttaataaacacttttaagtgcatcttcccccttcaggctttgtttggagtcccagtgctacaaacattgtatttttcacagcagatatgttcctgaaaagtgtatagaaacctgttctgggaacttgaatgcttttggaatgcacggggagagtctgccagctaaaggactcctggcaacattctgtganatatgaaactganaaactggatttgtcgaaaacaaattgtgcccattttctcacatttttgatccattc

SEQ ID NO: 31220 - DNA, 702 bp, Macaca Mulatta
  misc_feature (1)...(702): n = A,T,C or G
gctggcaaagcctcaaggctccacaggcagcccggcctccgtcagcccagcccctcccacgatggcagcctcagccccctccaggagcgagcccggactgctcacccctgaacctctcgcactctccctgccctgccgacaccgcccagcttgtgtataagttgtatttaatggttctgtaacnnnnnnnnnnnnnnnnnnnnnnnnnnnnnnnnnnnnnnnnnnnnnnnnnnnnnnnnnnnnnnnnnnnnnnnnnnnnnnnnnnnnnnnnnnnnncaaannnnnnnnnnnnnnnnnnnnnnnnnnnnnnnnnnnnnnnnnnnnnnnnnnnnnnnnnnnnnnnnnnnnnnnnnnnnnnnnnnnnnnnnnnnnnnnnnnnnnnnnnnnnnnnnnnnnnnnnnnnnnnnnnnnnnnnnnnnnnnnnnnnnnnnnnnnnnnnnnnnnnnnnnnnnnnnnnnnnnnnnnnnnnnnnnnnnnnnnnnnnnnnnnnnnnnnnnnnnnnnnnnnnnnnnnnnnnnnnnnnnnnnnnnnnnnnnnnnnnnnnnnnnnnnnnnnnnnnnnnnnnnnnnnnnnnnnnnnnnnnnnnnnnnnnnnnnnnnnnnnnnnnnnnnnnnnnnnnnnnnnnnnnnnnnnnnnnnnnnnnnnnnnnnnnnnnnnnnnnnnnnnnnnnnnnnnnnnnnnnnnnnnnnnnnnnnnnnnnnn

SEQ ID NO: 31221 - DNA, 955 bp, Macaca Mulatta
  misc_feature (1)...(955): n = A,T,C or G
gttttaagacaattatgtcgtatattgatgagcagtttgagaggtacctgcatgacgagagcggcttgaacaggcggcacatcattgataatagggtgcattgttgcttttactttatttcaccttttggacatggngacttaagcccttagatgtggcgtttatgaaggcaatacacaacaaggtgaatattgtgcctgtcattgcaaaagctgacactctcaccctgaaggaacgggagcggnnnnnnnnnnnnnnnnnnnnnnnnnnnnnnnnnnnnnnnnnnnnnnnnnnnnnnnnnnnnnnnnnnnnnnnnnnnnnnnnnnnnnnnnnnnnnnnnnnnnnnnnnnnnnnnnaggctagcatcccgttctctgtggttggctccaatcagttgattgaagccaaaggaaagaaggtcagaggccgcctctacccctggggtgttgtggaggtggagaacccagagcacaacgactttctgaagctgagaaccatgctcatnnnnnnnnnnnnnnnnnnnnnnnnnnnnnnnnnnnnnnnnnnnnnnnnnnnnnnnnnnnnnnnnnnnnnnnnnnnnnnnnnnnnnnnnnnnnnnnnnnnnnnnnnnnnnnnnnnnnnnnnnnnnnnnnnnnnnnnnnnnnnnnnnnnnnnnnnnnnnnnnnnnnnnnnnnnnnnnnnnnnnnnnnnnnnnnnnnnnnnnnnnnnnnnnnnnnnnnnnnnnnnnnnnnnnnnnnnnnnnnnnnnnnnnnnnnnnnnnnnnnnnnnnnnnnnnagaaaacactttcctggataaaaaagaaaacattccagatgcgtgatccagctgtgtgttttcaatccttgggagggtgccatctacattttaacagtacctgtgcctgagaatttaatttttaaaagacttttgatgtgttttttgtatgaagtactgttaacatatgtatttcattgc

SEQ ID NO: 31222 - DNA, 1409 bp, Macaca Mulatta
cgtcaccagccgccgcccggcctcaccacccctcgtttgcacgcacgcacgttcattctccgtcctcgcgcccgttttcctacactttcctcttctccccgaccggaggagccgctctttccgcgcggtgcattctggggaccgaggtcgagcccgccgctgccgccgtcgcctgagggaagcgagaagaggccgcgaccggggagaaaacgcggagtcgccactggagagaagtcgactccctagcagcagccaccgccagagaggcccgcccacccgttcgcccgtccccctgccccgttcacaatgcagcctgcttctgcaaagtggtacgatcgaagggactatgtcttcattgaattttgtgttgaagacagtaaggatgttaatgtaaattttgaaaaatccaaacttacattcagttgtctcggaggaagtgataattttaagcatttaaatgaaattgatctttttcactgtattgatccaaatgattccaagcataaaagaacggacagatcaattttatgctgtttacgaaaaggagaatctggccagtcatggccaaggttaacaaaagaaagggcaaagcttaattggcttagtgtcgacttcaataattggaaagactgggaagatgattcagatgaagacatgtctaattttgatcgtttttctgagatgatgaacaacatgggtggtgatgaggatgtagatttaccagaagtagatggagcagatgatgattcacaagacagtgatgatgaaaaaatgccagatctggagtaaggagtattgtcatcacttggattttgagaaagaaaaataacttctctgcaagatttcataattgagagaattcctgagttgatagctctaaaggcagatgctgtatttgcctactttaacccatttttcaacctgtttgttttttaaaaggcttcactaagggttgatatgtaccattgtatggggcaattttaagtcagctaaggcaataaccttatgcatgaacatttcccagactttcatgaagctgttgaggtcctaagcaattgatgcagctgttgtgataaatagaaacatctcacctaagtctccttttcttcataacatagatactgacatgataggaagctctcagcttagggaaagataactaaattttagattatagaacatggattcaaaagtggctggaacaaattggctgacaccttactggtaacctgctgttctcctggtggtccttcaggatttttccactaaaatttattttttcaaaaatttacttcataatgattctatggtaagtgatcactttgccacggttcccagggggtatccttagctaaaaactagaagaatggcccctaaccttaaaatgggttttttggagggccctataa

SEQ ID NO: 31223 - DNA, 198 bp, Macaca Mulatta
atgaatgatgatggaaaagtcaatgctagctctgaggggtactttattttagttggattttctaactggcctcatctagaagtagttctcttcgtggttgtcttgatcttctacttgatgacactgataggaaatctgttcatcatcatcctgtcatacctggactcccatctccatactcccatgtactttttcctt

SEQ ID NO: 31224 - DNA, 173 bp, Macaca Mulatta
  misc_feature (1)...(173): n = A,T,C or G
natacaatggctcaaatcatggcagaacaagaagtggaaaatctctcaggcctttccactaaccctgaaaaagatatatttgtggtgcgggaaaatgggacgacgtgtctcatggcagagtttgcagccaaatttattgtaccttatgatgtgtgggccagcaattacgtaga

SEQ ID NO: 31225 - DNA, 870 bp, Macaca Mulatta
  misc_feature (1)...(870): n = A,T,C or G
cagggaaaatcatgaggcgagtgcttcggaagattgctcagaatgaccatgacctgggagacacatccactgtggctgacccatctgtcatcagtcacctcttcagccaccgctgcctgaccatccagtgaacatgatcctgacctttacccaggattccccctgctccaaactttgcccatcctctttgccccctcaggagtgctgagggccagcgttgacccacaccaccctccctagaccagctgtctgggaccagaaaccagctttgtctccgggtggagacaacttcctgtgactgccaggcagaagggacagggcccaggtcaacctcgtctgctgtgcccccagactgcagagctctcagaacccagggatgaaaaggctacctctcctacccaagttaagtgttcagagaggatatgagggcctccactgnnnnnnnnnnnnnnnnnnnnnnnnnnnnnnnnnnnnnnnnnnnnnnnnnnnnnnnnnnnnnnnnnnnnnnnnnnnnnnnnnnnnnnnnnnnnnnnnnnnnnnnnnnnnnnnnnnnnnnnnnnnnnnnnnnnnnnnnnnnnnnnnnnnnnnnnnnnnnnnnnnnnnnnnnnnnnnnnnnnnnnnnncccattggcttcggggctgtgtgggcagattcagtatccagagggcattcagatcatttgcttttttgaaggagtaaatgtgttttgttcctagggccagaggagcttgtcttccttgtcctctgttcccaccctcccctgaacagaacccagcccatgagagacattctcagacgaaactctgttttcttgcctcagtcaggctcaagccctgtggttgtaggaataaagcctgtgatctcaagaa

SEQ ID NO: 31226 - DNA, 955 bp, Macaca Mulatta
  misc_feature (1)...(955): n = A,T,C or G
gggggctttttcttcagcgaggcgactgagctggttggtggcggcggtcgaacggcagacgcaaacatgcagnnnnnnnnnnnnnnnnnnnnnnnnnnnnnnnnnnnnnnnnnnnnnnnnnnnnnnnnnnnnnnnnnnnnnnnnnnnnnnnnnnnnnnnnnnnnnnnnnnnnnnnnnnnnnnnnnnnnnnnnnnnnnnnnnnnnnnnnnnnnggagctggaagatggccgtactctctcagactacaacatccagaaagagtccaccctgcacctggtgttgcgcctgcgaggtggcattattgagccttccctccgccagcttgcccagaaatacaactgcgacaagatgatctgccgcaagtgctatgctcgccttcaccctcgtgctgtcaactgccgcaagaagaagtgtggccacaccaacaacctgcgccccaagaagaaggtcaaataaggctcttctttccttgaagggcaacctcctgcccaggccccgtggccctggagcctcaataaagtgtccctttcgttgactggagcagctnattnnaaagtaaagaattatagaacatattgatagatggggggaggnnnnnnnnnnnnnnnnnnnnnnnnnnnnnnnnnnnnnnnntgtgggttgggcgcgccttgggacccttgaaaaaaaacttttcaatgattcatttcttttttgggccgcccgggggcccccngtaaagagttaaagttgagaaaaggtggggcgggaaaaaaaccgtgttattccccccaagagggaaatgcacccctttttttcaannnnnnnnnnnnnnnnnnnnnnnnnnnnnnnnnnnnttttnnnnnnnnnnnnnnnnannnnnnnnnnnnnnnnnnnnnnnnnnnnnnnnnnnacccnnnnnnnnnnnnnnnnnnnnnnnnnnnnnnnnnnngcnnnnnnnnnnnnnnnnngtggg

SEQ ID NO: 31227 - DNA, 103 bp, Macaca Mulatta
gcgcttccggccattcatactgcagtcggtcagtattcggttgttggattctgtgcgctctcggacccgaagggtgacggcgccgctaggatgaagctcgtga

SEQ ID NO: 31228 - DNA, 4799 bp, Macaca Mulatta
  misc_feature (1)...(4799): n = A,T,C or G
aggcctttgatgacttcatctttgccttcttcgccgtggagatggtggtgaagatggtggccttgggcatctttgggaaaaagtgttacctgggagacacttggaaccggcttgactttttcatcgtcattgcaggnnnnnnnnnnnnnnnnnnnnnnnnnnnnnnnnnnnnnnnnnnnnnnnnnnnnnnnnnnnnnnnnnnnnnnnnnnnnnnnnnnnnnnnnnnnnnnnnnnnnnnnnnnnnnnnnnnnnnnnnnnnnnnnnnnnnnnnnnnnnnnnnnnnnnnnnnnnnnnnnnnnnnnnnnnnnnnnnnnnnnnnnnnnnnnnnnnnnnnnnnnnnnnnnnnnnnnnnnnnnnnnnnnnnnnnnnnnnnnnnnnnnnnnnnnnnnnnnnnnnnnnnnnnnnnnnnnnnnnnnnnnnnnnnnnnnnnnnnnnnnnnnnnnnnnnnnnnnnnnnnnnnnnnnnnnnnnnnnnnnnnnnnnnnnnnnnnnnnnnnnnnnnnnnnnnnnnnnnnnnnnnnnnnnnnnnnnnnnnnnnnnnnnnnnnnnnnnnnnnnnnnnnnnnnnnnnnnnnnnnnnnnnnnnnnnnnnnnnnnnnnnnnnnnnnnnnnnnnnnnnnnnnnnnnnnnnnnnnnnnnnnnnnnnnnnnnnnnnnnnnnnnnnnnnnnnnnnnnnnnnnnnnnnnnnnnnnnnnnnnnnnnnnnnnnnnnnnnnnnnnnnnnnnnnnnnnnnnnnnnnnnnnnnnnnnnnnnnnnnnnnnnnnnnnnnnnnnnnnnnnnnnnnnnnnnnnnnnnnnnnnnnnnnnnnnnnnnnnnnnnnnnnnnnnnnnnnnnnnnnnnnnnnnnnnnnnnnnnnnnnnnnnnnnnnnnnnnnnnnnnnnnnnnnnnnnnnnnnnnnnnnnnnnnnnnnnnnnnnnnnnnnnnnnnnnnnnnnnnnnnnnnnnnnnnnnnnnnnnnnnnnnnnnnnnnnnnnnnnnnnnnnnnnnnnnnnnnnnnnnnnnnnnnnnnnnnnnnnnnnnnnnnnnnnnnnnnnnnnnnnnnnnnnnnnnnnnnnnnnnnnnnnnnnnnnnnnnnnnnnnnnnnnnnnnnnnnnnnnnnnnnnnnnnnnnnnnnnnnnnnnnnnnnnnnnnnnnnnnnnnnnnnnnnnnnnnnnnnnnnnnnnnnnnnnnnnnnnnnnnnnnnnnnnnnnnnnnnnnnnnnnnnnnnnnnnnnnnnnnnnnnnnnnnnnnnnnnnnnnnnnnnnnnnnnnnnnnnnnnnnnnnnnnnnnnnnnnnnnnnnnnnnnnnnnnnnnnnnnnnnnnnnnnnnnnnnnnnnnnnnnnnnnnnnnnnnnnnnnnnnnnnnnnnnnnnnnnnnnnnnnnnnnnnnnnnnnnnnnnnnnnnnnnnnnnnnnnnnnnnnnnnnnnnnnnnnnnnnnnnnnnnnnnnnnnnnnnnnnnnnnnnnnnnnnnnnnnnnnnnnnnnnnnnnnnnnnnnnnnnnnnnnnnnnnnnnnnnnnnnnnnnnnnnnnnnnnnnnnnnnnnnnnnnnnnnnnnnnnnnnnnnnnnnnnnnnnnnnnnnnnnnnnnnnnnnnnnnnnnnnnnnnnnnnnnnnnnnnnnnnnnnnnnnnnnnnnnnnnnnnnnnnnnnnnnnnnnnnnnnnnnnnnnnnnnnnnnnnnnnnnnnnnnnnnnnnnnnnnnnnnnnnnnnnnnnnnnnnnnnnnnnnnnnnnnnnnnnnnnnnnnnnnnnnnnnnnnnnnnnnnnnnnnnnnnnnnnnnnnnnnnnnnnnnnnnnnnnnnnnnnnnnnnnnnnnnnnnnnnnnnnnnnnnnnnnnnnnnnnnnnnnnnnnnnnnnnnnnnnnnnnnnnnnnnnnnnnnnnnnnnnnnnnnnnnnnnnnnnnnnnnnnnnnnnnnnnnnnnnnnnnnnnnnnnnnnnnnnnnnnnnnnnnnnnnnnnnnnnnnnnnnnnnnnnnnnnnnnnnnnnnnnnnnnnnnnnnnnnnnnnnnnnnnnnnnnnnnnnnnnnnnnnnnnnnnnnnnnnnnnnnnnnnnnnnnnnnnnnnnnnnnnnnnnnnnnnnnnnnnnnnnnnnnnnnnnnnnnnnnnnnnnnnnnnnnnnnnnnnnnnnnnnnnnnnnnnnnnnnnnnnnnnnnnnnnnnnnnnnnnnnnnnnnnnnnnnnnnnnnnnnnnnnnnnnnnnnnnnnnnnnnnnnnnnnnnnnnnnnnnnnnnnnnnnnnnnnnnnnnnnnnnnnnnnnnnnnnnnnnnnnnnnnnnnnnnnnnnnnnnnnnnnnnnnnnnnnnnnnnnnnnnnnnnnnnnnnnnnnnnnnnnnnnnnnnnnnnnnnnnnnnnnnnnnnnnnnnnnnnnnnnnnnnnnnnnnnnnnnnnnnnnnnnnnnnnnnnnnnnnnnnnnnnnnnnnnnnnnnnnnnnnnnnnnnnnnnnnnnnnnnnnnnnnnnnnnnnnnnnnnnnnnnnnnnnnnnnnnnnnnnnnnnnnnnnnnnnnnnnnnnnnnnnnnnnnnnnnnnnnnnnnnnnnnnnnnnnnnnnnnnnnnnnnnnnnnnnnnnnnnnnnnnnnnnnnnnnnnnnnnnnnnnnnnnnnnnnnnnnnnnnnnnnnnnnnnnnnnnnnnnnnnnnnnnnnnnnnnnnnnnnnnnnnnnnnnnnnnnnnnnnnnnnnnnnnnnnnnnnnnnnnnnnnnnnnnnnnnnnnnnnnnnnnnnnnnnnnnnnnnnnnnnnnnnnnnnnnnnnnnnnnnnnnnnnnnnnnnnnnnnnnnnnnnnnnnnnnnnnnnnnnnnnnnnnnnnnnnnnnnnnnnnnnnnnnnnnnnnnnnnnnnnnnnnnnnnnnnnnnnnnnnnnnnnnnnnnnnnnnnnnnnnnnnnnnnnnnnnnnnnnnnnnnnnnnnnnnnnnnnnnnnnnnnnnnnnnnnnnnnnnnnnnnnnnnnnnnnnnnnnnnnnnnnnnnnnnnnnnnnnnnnnnnnnnnnnnnnnnnnnnnnnnnnnnnnnnnnnnnnnnnnnnnnnnnnnnnnnnnnnnnnnnnnnnnnnnnnnnnnnnnnnnnnnnnnnnnnnnnnnnnnnnnnnnnnnnnnnnnnnnnnnnnnnnnnnnnnnnnnnnnnnnnnnnnnnnnnnnnnnnnnnnnnnnnnnnnnnnnnnnnnnnnnnnnnnnnnnnnnnnnnnnnnnnnnnnnnnnnnnnnnnnnnnnnnnnnnnnnnnnnnnnnnnnnnnnnnnnnnnnnnnnnnnnnnnnnnnnnnnnnnnnnnnnnnnnnnnnnnnnnnnnnnnnnnnnnnnnnnnnnnnnnnnnnnnnnnnnnnnnnnnnnnnnnnnnnnnnnnnnnnnnnnnnnnnnnnnnnnnnnnnnnnnnnnnnnnnnnnnnnnnnnnnnnnnnnnnnnnnnnnnnnnnnnnnnnnnnnnnnnnnnnnnnnnnnnnnnnnnnnnnnnnnnnnnnnnnnnnnnnnnnnnnnnnnnnnnnnnnnnnnnnnnnnnnnnnnnnnnnnnnnnnnnnnnnnnnnnnnnnnnnnnnnnnnnnnnnnnnnnnnnnnnnnnnnnnnnnnnnnnnnnnnnnnnnnnnnnnnnnnnnnnnnnnnnnnnnnnnnnnnnnnnnnnnnnnnnnnnnnnnnnnnnnnnnnnnnnnnnnnnnnnnnnnnnnnnnnnnnnnnnnnnnnaggtggtggcgctgggctggtgcttcggggagcaggcgtacctgcgcagcagctggaacgtgctggacgggctgttggtgctcannnnnnnnnnnnnnnnnnnnnnnnnnnnnnnnnnnnnnnnnnnnnnnnnnnnnnnnnnnnnnnnnnnnnnnnnnnnnnnnnnnnnnnnnnnnnnnnnnnagggtgatcagccgggcgcaggggctgaagctgtttgtggagacgctgatgtcctcactgaaacccatcggcaacattgtagtcatctgctgtgccttcttcatcattttcggcatcttgggggtgcagnnnnnnnnnnnnnnnnnnnnnnnnnnnnnnnnnnnnnnnnnnnnnnnnnnnnnnnnnnnnnnnnnnnnnnnnnnnnnnnnnnnnnnnnnnnnnnnnnnnnnnnnnnnnnnnnnnnnnnnnnnnnnnnnnnnnnnnnnnnnnnnnnnnnnnnnnnnnnnnnnnnnnnnnnnnnnnnnnnnnnnnnnnnnnnnnnnnnnnnnnnnnnnnnnnnnnnnnnnnnnnnnnnnnnnnnnnnnnnnnnnnnnnnnnnnnnnnnnnnnnnnnnnnnnnnnnnnnnnnnnnnnnnnnnnnnnnnnnnnnnnnnnnnnnnnnnnnnnnnnnnnnnnnnnnnnnnnnnnnnnnnnnnnnnnnnnnnnnnnnnnnnnnnnnnnnnnnnnnnnnnnnnnnnnnnnnnnnnnnnnnnnnnnnnnnnnnnnnnnnnnnnnnnnnnnnnnnnnnnnnnnnnnnnnnnnnnnnnnnnnnnnnnnnnnnnnnnnnnnnnnnnnnnnnnnnnnnnnnnnnnnnnnnnnnnnnnnnnnnnnnnnnnnnnnnnnnnnnnnnnnnnnnnnnnnnnnnnnnnnnnnnnnnnnnnnnnnnnnnnnnnnnnnnnnnnnnnnnnnnnnnnnnnnnnnnnnnnnnnnnnnnnnnnnnnnnnnnnnnnnnnnnnnnnnnnnnnnnnnnnnnnnnnnnnnnnnnnnnnnnnnnnnnnnnnnnnnnnnnnnnnnnnnnnnnnnnnnnnnnnnaggtggaaccagctggacctggccattgtgctgctgtccatcatgggcatcacgctggaggaaatcgaggtcaacgcctcactgcccatcaaccccaccatcatccgcatcatgagggtactgcgcattgcccgag

SEQ ID NO: 31229 - DNA, 408 bp, Macaca Mulatta
gcccggggcaggaacctggcagggtggcacctcctgggaaggtcctgggtgcttccagccccatctcactgacagagactcagaggctcagaggtgagtggaaacatgatagtccaacagcagacttgcaaaacggtgaatgactgagtacataaaacacagaagcaaacaagtacaagcctagacatgggtggagttcgagaaggtctcacttaatgcagatttccagaatcagccgggtgctgacaccctccagccttctgggctctggggtgatggttctgagcagcagcccagagtgcgggacacgtacttggaaatctttacctcaccaataattaaagaataattaacacgtaaaaacagctctgatacaccatatcatgtaacaagaataaccttagttta

SEQ ID NO: 31230 - DNA, 158 bp, Macaca Mulatta
ggtgcccccatcgaccccaccttcctgctgagctgcagcgtttccaacgtcatcagttctgttgtctttggaagtcgcttcgactatgaggacaagcagttcctgaatctgctgcagttgatcaatgagagtttcactgagatgagcactccctgggc

SEQ ID NO: 31231 - DNA, 838 bp, Macaca Mulatta
  misc_feature (1)...(838): n = A,T,C or G
ggtgactattagaagtgcccaagatggggctaacctttattaaacagatcacatattatgatcttgctgcagccacagtgcagctccacattaactctacagaccaaaccatttgtatctggcatcacttactaacacatgacatgcggcttttctgcatcaactgctatgacggttaagaatgtcagtatacaagaaggaatagaaaactgatactgttttaaataatctgtaatttnnnnnnnnnnnnnnnnnnnnnnnngaaatacattatattgtatgtttgagataattctagtacaaagtataataaaactagatgtataataaaccctttaaatcattggtaagtgtacaagtggtggaactgaagcatttactggacaaagtaatgttactttaatggttacttgctcgtgcgttgccacactgtgttataatttgcttcatttccttgctatttgataaatagtgtggcatttctctgttcactgtaactattgtaaatggcaaatttttcctccttactgcaccaatccaaatggacattggatagggaatgaaactccaaaaggcttgggcctgaaaacggggaagtgggttcgccccagggccctggtggcccaaatccataaaaaactggaacctcctcaacctttttggcccaaaccggggtaaaaaaatagggcataaggggcatttaaaatggccgtttctaaatccgtntggacaaataaggccaacttcagccataagttatagtttttcccaatttcagagccgacgggacgacacgagcagttgttaaataaaaaagtcgatagttagcggcgattat

SEQ ID NO: 31232 - DNA, 584 bp, Macaca Mulatta
agaaaccatacaaatgtaaggtttgtgacaaggctttcaggtatgattcacatttggcacaacatactggaattcacatttggagagaaaccgtacaagtgtaatgagtgtggcaaagccttctgtggccagtcaacacttattcaccatcaagcaatccatgttgtagggaaactttactaatgtaatgattgtcgcagtcttaagtaacgctacgaccattgcaaatcattggagaaccataacgaagtgagatcttacaagtgttataaatgtggcagatttttcaggcatcattcttaccttgcagtttatcagcgaactcatactggagagaaaccttacaaatgtgatgactgtggcaagatcttcagtcaagtttcatcttacgcaaaacatagaagaattcatacaggaaagaaacctcacaagtgtgatgattgtgtcaaagcctttatttcacgttcatgccccattacacatcaaagaatccgtactggacagagatcttacaagtgtcatgtgtggcaaggtctttagtctgaggtgactccttgcaggacatcaggaaattcatttttgag

SEQ ID NO: 31233 - DNA, 273 bp, Macaca Mulatta
agacctggggtgggcagtcacctcagcagagcctcagtgccacctccccacaccacccaagcctagctgggtgggaagacggagcctgaagcctgcttgtggagggggtgctgcccaagggttgccttccccagcttgtgctccaggggagctccgatgctggtggggaggcaggatgtcgagggcccctcatagttgtgcccaccctgccccgctagactgcccctccagcttgcacctggcaccatctgagtctacctgttattgcattta

SEQ ID NO: 31234 - DNA, 955 bp, Macaca Mulatta
  misc_feature (1)...(955): n = A,T,C or G
ccccccccctcggggtggttatccctgagcgaggcttgtctgctcctctggaccctggtcctgtctgttctccagcatggtgtgtctgaagctccctggaggctcctgcatggcagctctgacagtgacactgatggtgctgagctccccactggctttggctggggacacccgaccacgtttcttggagtaccttacctctgagtgtcatttcttcaacgggacggagcgggtgcggttcctggagagatacttccataaccaggaggagttcgtgcgcttcgacagcgacatgggggagtaccgggcggtgtnnnnnnnnnnnnnacctgaagccgagtctggaacggtcagaagggctatcctggagcagaagcgggcccaggtggacaactactgtagacacaactaccgggttggtgagagcttcacagtgcagcggcgagtccaacctaaggtgactgtgtatccttcaaagacccaggccctgcagcaccacaacctcctggtctgctctgtgagtggtttctatccaggcagcattgaagtcaggtggttccggaacggccaggaagagaaggctggggtggtgtccacaggcctgatccagaatggagactggaccttccagaccctggtgatgctggaaacagttcctcagagtggagaggtttacacctgccaagtggagcacccaagcgtgaccaggcctctcacagtggaatggagagcaggtctgatctgccagagcagaagctgatggagttggggcctgtgctggccggtcttcttgggacgggggtccctactctcggacccgaagggcccttgctacacccaggacctcccgaggtcgggccatcaaaaaactgcgactgggcaaacccccgggtttccgaagatgacggcagccgctaagccgcgcgctcgtatatcttctctttcgcgcgatccc

SEQ ID NO: 31235 - DNA, 837 bp, Macaca Mulatta
tagattcctgtggattattgcgtttggtagggaaactgaggataaagggaaggtgtttatccttgggaatttcataaaaaggttcctatggctcagccatgggaaggagatttttctttctgcatgcttctctatctcctgatggctggtgctgagaacagaagtgcatctctctaggaactctgagcctcaccaccctggggactatgttttttttcttttcattagagctgtttctacatcctgtgctgagagtcagctcttccacgcccatagaggggagtcccatgaccctgatctgtgagacccagctctctccacagaggccaaaagtccagctgcaattctccttcttcagagatagtcagaccctcggatcaggctggagcacatcccccaaactccagatccctgccatgtggactgaagactctgggtcttactggtgtgagacagagacagtgactcacaacatcaaaaaaaggagcctgacatctcagatacttgtacagagtgagtgtccaagtggctacactttcagagtcagagctggggagaggaaggcagaccagtgacaactccagcacccctaggatggtagacataacagagaggagtgtccagctattctggtaatcttctctaagctcaacattggtttaacagccctagaacattttcttccacctgagtcaggtaatagtaattattgatcagttactgagtgcctaaccctatggggttacagagatgtacaagatcggttctctcatgaatcaagagacaactagaagcatagctgaacacatgcagttttgagaggcccctgtggtgctt

SEQ ID NO: 31236 - DNA, 99 bp, Macaca Mulatta
cggagaagaagatgatgagctcagcctctgcagcaggaacccagcagatctactcccaaggaagcccatttccctccggacactccgggaaggccttca

SEQ ID NO: 31237 - DNA, 255 bp, Macaca Mulatta
  misc_feature (1)...(255): n = A,T,C or G
ggagacctgttcaatgtatagagagctgtgtgcatgctgagcaacaccacagcagttgctgaggcctgggcttccctggaccacacgtttgacctgatgtatgataagcatgcctctgctcactggtnnnnnnnnnnnnnnnnnnnnnnnnnnnnnnnnnnnnnnnnnnngaggacatggctgcccttaagaaggattatgaggaggttggagcagatagcacagagggagaggataaaagtgaagaatattaac

SEQ ID NO: 31238 - DNA, 1471 bp, Macaca Mulatta
  misc_feature (1)...(1471): n = A,T,C or G
ctccgtgggagcccgcgagcctctctccctgatcttacgtgcttaagnnnncacacattcaccaactcacccttgaaatcatctcaaaaatgaaagacaactgaaannnnnnnnnnnnnnnnnnnnnnnnnnnnnnnnnnnnnnnnnnnnnnnnnnnnnnnnnnnnnnnnnnnnnnnnnnnnnnnnnnnnnnnnnnnnnnnnnnnnnnnnnnnnnnnnnnnnnnnnnnnnnnnnnnnnnnnnnnnnnnnnnnnnnnnnnnnnnnnnnnnnnnnnnnnnnnnnnnnnnnnnnnnnnnnnnnnnnnnnnnnnnnnnnnnnnnnnnnnnnnnnnnnnnnnnnnnnnnnnnnnnnnnnnnnnnnnnnnnnnnnnnnnnnnnnnnnnnnnnnnnnnnnnnnnnnnnnnnnnnnnnnnnnnnnnnnnnnnnnnnnnnnnnnnnnnnnnnnnnnnnnnnnnnnnnnnnnnnnnnnnnnnnnnnnnnnnnnnnnnnnnnnnnnnnnnnnnnnnnnnnnnnnnnnnnnnnnnnnnnnnnnnnnnnnnnnnnnnnnnnnnnnnnnnnnnnngtagaaataccattagccagtttacgaggggaacaaggtccccgtggagagcctggcccaagaggaccacctgggccccctggtttgccaggtcatgggatacctggaattaaaggaaaaccagggccacagggatatccaggagttggaaagccaggtatgcctggaatgccagggaagccaggagccatgggcatgcctggggcaaaaggagaaattggacagaaaggggaaattgggcctatggggatcccaggaccacaaggacctccagggcctcacggacttcctggcattgggaagccaggtgggccagggttaccagggcaaccaggaccaaagggtgatcgaggacccaaaggactaccaggacctcaaggccttcggggtcctaaaggagacaagggcttcgggatgccaggtgcaccaggtgtaaagggccctccagggatgcatggccctcccggccctgttggactgccaggagtgggcaaaccaggagtgacaggcttccctggaccccagggccccctgggaaagccaggggctccaggagaacctgggccacaaggccctattggggtaccaggggttcaaggacctcctgggatacctggagttggaaagccaggccaggatgggatcccgggccagccaggatttccaggtggcaaaggggagcaaggactgccagggttaccaggacctccaggccttccagggattgggaaaccaggcttcccaggacccaaaggtgaccggggcatgggaggtgttcctggggctcttggaccaagaggggagaaaggaccaataggtgccccaggaatagggggtcctccaggcgagccaggcctgcctggaatcccaggtcctatgggccctccaggtgctattggttttcctggac

SEQ ID NO: 31239 - DNA, 735 bp, Macaca Mulatta
attcagaagactccagtagtaggacagagtttcaacaaataatcaatttagcattacaaacaatagggatggtagggaaaacggaaggagaaaactctaaagtaggtgatgatattgagaatttaacctttaaagtcaaagaagtaaatgagctgagcaggaaattagacaacgctgatgaatacaataggaaggaaggtaagaaattaccccagaatgaatcacaaagttacgaagtccttggaagtatggaagaaaccttatgcaatgtagatgacagacatggaaatcacaatgtccatttagacattacaggagagagaaggaaagatggggaggatgaatttgtcaaagacatgggagaggaaaaaaaatttcagaaattcaagaataaagaggacattttaaaagcctccagagaagaaaaagtgttgatggatgaaggagcagtacttaccctggctgccaacctttcatcagcaacgctgaatattagtaagcaatggagtgatgtcttcaacattctgagagaacatgattttgaacctaaatttctgtgcaaagttaaattggcatttaaatgtgatggtgaaataaagacattttcagatctgcaaagccttagaaaatttgccagccaaaaatcttctatgaaagaattattgaaagatgtactcccacaaaaggaagaaataagtggaggaggaagaagatatggaactcaagaaaaaaggg

SEQ ID NO: 31240 - DNA, 818 bp, Macaca Mulatta
atggataaatgttcagtgggaggattagaataaactgagcagactcctgctttattagggaatatggccatggcaactagtctcatggacataggggattcatttggtcatccagcttgtcctttagttagtagatctagaaactcaccagtggaagatgatgatgatgttgtatttattgaatctatacaacctctttcagtttctgctccagcaatagctgatcaaagaaacttcatacttgcgtcatcaaaaaatgaaaagccacaaggaaattattctgtaattcctcctccttcaagagatttggcgtctcagaaaggaaatataagtgagacaattgttattcgatgatgaagaggatatagaaacaaatggaggagcggagaaaaattcttcctgttttattgaatggggacttcctggaactaaaaacaaaaccaaagatttggacttctccacttccagtctttcaagaagtaaggtaaatgcaggaatgggtaatagtggtatcactacagaattgactctgaaatacgttattgctaatgttacaaccttagaaacaggtataagctctgtgaatgctgggcaagatatgaacataatgattacatataaaacatcactatagaataccaacttgggagatgtcgctaaaggacttcagtcaagtaattttggtgttaatatacaaacgtacaccccatctttaactccacagaccaagactggagtaagaccttttaaccctggtagaatgaatgtggcaggagacttatttcagaatggagaatttgcaactcatcatagtcctg

SEQ ID NO: 31241 - DNA, 2452 bp, Macaca Mulatta
  misc_feature (1)...(2452): n = A,T,C or G
ggtctctggcctatcaggaggacgattggtgctggcataaaagccagtggctaatcctcctgtatggnnnnnnnnnnnnnnnnnnnnnnnnnnnnnnnnnnnnnnnnnnnnnnnnnnnnnnnnnnnnnnnnnnnnnnnnnnnnnnnnnnnnnnnnnnnnnnnnnnnnnnnnnnnnnnnnnnnnnnnnnnnnnnnnnnnnnnnnnnnnnnnnnnnnnnnnnnnnnnnnnnnnnnnnnnnnnnnnnnnnnnnnnnnnnnnnnnnnnnnnnnnnnnnnnnnnnnnnnnnnnnnnnnnnnnnnnnnnnnnnnnnnnnnnnnnnnnnnnnnnnnnnnnnnnnnnnnnnnnnnnnnnnnnnnnnnnnnnnnnnnnnnnnnnnnnnnnnnnnnnnnnnnnnnnnnnnnnnnnnnnnnnnnnnnnnnnnnnnnnnnnnnnnnnnnnnnnnnnnnnnnnnnnnnnnnnnnnnnnnnnnnnnnnnnnnnnnnnnnnnnnnnnnnnnnnnnnnnnnnnnnnnnnnnnnnnnnnnnnnnnnnnnnnnnnnnnnnnnnnnnnnnnnnnnnnnnnnnnnnnnnnnnnnnnnnnnnnnnnnnnnnnnnnnnnnnnnnnnnnnnnnnnnnnnnnnnnnnnnnnnnnnnnnnnnnnnnnnnnnnnnnnnnnnnnnnnnnnnnnnnnnnnnnnnnnnnnnnnnnnnnnnnnnnnnnnnnnnnnnnnnnnnnnnnnnnnnnnnnnnnnnnnnnnnnnnnnnnnnnnnnnnnnnnnnnnnnnnnnnnnnnnnnnnnnnnnnnnnnnnnnnnnnnnnnnnnnnnnnnnnnnnnnnnnnnnnnnnnnnnnnnnnnnnnnnnnnnnnnnnnnnnnnnnnnnnnnnnnnnnnnnnnnnnnnnnnnnnnnnnnnnnnnnnnnnnnnnnnnnnnnnnnnnnnnnnnnnnnnnnnnnnnnnnnnnnnnnnnnnnnnnnnnnnnnnnnnnnnnnnnnnnnnnnnnnnnnnnnnnnnnnnnnnnnnnnnnnnnnnnnnnnnnnnnnnnnnnnnnnnnnnnnnnnnnnnnnnnnnnnnnnnnnnnnnnnnnnnnnnnnnnnnnnnnnnnnnnnnnnnnnnnnnnnnnnnnnnnnnnnnnnnnnnnnnnnnnnnnnnnnnnnnnnnnnnnnnnnnnnnnnnnnnnnnnnnnnnnnnnnnnnnnnnnnnnnnnnnnnnnnnnnnnnnnnnnnnnnnnnnnnnnnnnnnnnnnnnnnnnnnnnnnnnnnnnnnnnnnnnnnnnnnnnnnnnnnnnnnnnnnnnnnnnnnnnnnnnnnnnnnnnnnnnnnnnnnnnnnnnnnnnnnnnnnnnnnnnnnnnnnnnnnnnnnnnnnnnnnnnnnnnnnnnnnnnnnnnnnnnnnnnnnnnnnnnnnnnnnnnnnnnnnnnnnnnnnnnnnnnnnnnnnnnnnnnnnnnnnnnnnnnnnnnnnnnnnnnnnnnnnnnnnnnnnnnnnnnnnnnnnnnnnnnnnnnnnnnnnnnnnnnnnnnnnnnnnnnnnnnnnnnnnnnnnnnnnnnnnnnnnnnnnnnnnnnnnnnnnnnnnnnnnnnnnnnnnnnnnnnnnnnnnnnnnnnnnnnnnnnnnnnnnnnnnnnnnnnnnnnnnnnnnnnnnnnnnnnnnnnnnnnnnnnnnnnnnnnnnnnnnnnnnnnnnnnnnnnnnnnnnnnnnnnnnnnnnnnnnnnnnnnnnnnnnnnnnnnnnnnnnnnnnnnnnnnnnnnnnnnnnnnnnnnnnnnnnnnnnnnnnnnnnnnnnnnnnnnnnnnnnnnnnnnnnnnnnnnnnnnnnnnnnnnnnnnnnnnnnnnnnnnnnnnnnnnnnnnnnnnnnnnnnnnnnnnnnnnnnnnnnnnnnnnnnnnnnnnnnnnnnnnnnnnnnnnnnnnnnnnnnnnnnnnnnnnnnnnnnnnnnnnnnnnnnnnnnnnnnnnnnnnnnnnnnnnnnnnnnnnnnnnnnnnnnnnnnnnnnnnnnnnnnnnnnnnnnnnnnnnnnnnnnnnnnnnnnnnnnnnnnnnnnnnnnnnnnnnnnnnnnnnnnnnnnnnnnnnnnnnnnnnnnnnnnnnnnnnnnnnnnnnnnnnnnnnnnnnnnnnnnnnnnnnnnnnnnnnnnnnnnnnnnnnnnnnnnnnnnnnnnnnnnnnnnnnnnnnnnnnnnnnnnnnnnnnnnnnnnnnnnnnnnncagcaggggatgaggatgaggatgaatccggggaggagaggctgccctcctgctttgactacgtcatgcacttcctgacagtcttctggaaggtgctgtttgcctgtgtgccccccacagagtactgccacggctgggcctgcttcgccgtctccatcctcatcatcggcatgctcaccgccatcattggggacctggcctcgcacttcggctgcaccattggtctcaaggattcagtcacagctgttgttttcgtggcatttggcacctctgtcccag

SEQ ID NO: 31242 - DNA, 119 bp, Macaca Mulatta
ggggtcccagccctcctggtgctgctttgcctctctgtcaagagctcagtgtacggaccccacacaatccccgtcttcaacagctgggagaatggcacgggcttccagaacatgtccat

SEQ ID NO: 31243 - DNA, 1952 bp, Macaca Mulatta
  misc_feature (1)...(1952): n = A,T,C or G
gcgcgctgcgcgtgcactctgtggtgagcgtgtacatgtgtaacctagcggccagcgacctgctcttctccctctcgctgccccttcgtctctcctactacacactgcaccactggcccttccccgacctcctgtgccagacggcgggcgccatcttccagatgaacatgtacggcagttgcatcttcctgatgctcatcaacgtggaccgctacgctgccattgtgcacccgctgcgactgcgccacctgcgacggccccgcgtggcgcggctgctctgcctgggcgtgtgggcgttcatcctggtgtttgccgtgcccgccgcccgcgtgcacaggccctcgcgctgccgctaccgggacctcgaggtgcgcctatgcttcgagagtttcagcgacgagctgtggaagggcaggctgctgcccctcgtgctgctggccgaggctctgggcttcctgctgcccctggcggcggtggtctactcgtccggccgagtcttctggacgctggggcgccccgacgccacgcggagccagcggcggctgaagacggtgcgcctcctgctggccaacctcgtcatcttcctgctgtgcttcgtgccctacaacgccacgctggcggtctacgggctgcagcgaagcaagctggtggcggccagcgtgcctgcccgcgatcgcgtgcgcggggtactgatggtgatggtgctgctggccggcgccaactgcgtgctggacccgctggtgtactacttcagcgccgagggcttccgcaacaccctgcgcggcctgggcactccgcaccgggtcaggaccttggccaccaacgggacgcaggcggcgctcgcgcaatccgaaaggtccaccgtcaccacggacgccaccaggccggatgccgccagtcaggggctgcttcgaccctccaactcctaccctctgtcttccttcacacagagtccccaggattccgccctctgaaggcacaccatgccacagcgcaaaccgtgcccgactcccaacgcctctcgttctgggaggcttgcagggtgtgcacacaagaaggtgggctgggacagttgggtctttgggtggcaactccagcttagcaacgcagaagagtacaaagtgtggaagnnnnnnnnnnnnnnnnnnnnnnntgctggaaatggcttctttaaactgtgagcacgcagaggacccccgtctccagtggtgggaagtgatgcagagagcccacccgtgcagagggcagaaggggacgaaatgcctttgggtgggcggggaattaaactgctaaaagctgtttagatggaacagaaaatgagcattctggatttaaaccgccacaggggcctgagagctgaagagccccaggtttggtggaccatgctactgagatgcctgttcatctgctgacttctgtcatggatgccacccactttcatttaggcctaggcttcccctgctcaccattgagacctaatacaagagttccatatagacagaactaggttctttctcgcacagtgacttgtgacaatttagacctggcacccagcataggatagttggggcaaggcaaaactggcttagagtttcctcctcgccaaaatccaagtccaaaccctttttaggttatcctttcttccatcactcccccttttccaggcctcctccgttttagatccttaatannnnnnnnnnnnnnnnnnnnnnnnnnnnnnnnnnnnnnnnnnnnnnnnnnnnnnnnnnnnnnnnnnnnnnnnnnnnnnnnnnnnnnnnctttgtccagagtaaggagaaaattctttctactaaagcattggttctcaaactttttggtctcagatgccactcttggaaactgaggatctcaaacagctttgcttatcttttgatacttaccatactagacattaaagcaaatacattttaaaaataaatacacatgcacac

SEQ ID NO: 31244 - DNA, 763 bp, Macaca Mulatta
ggcctgccagtgtgacatgtgtcgcctctctcgctactattccatcctctcccctccttcctcccctgggtcacaggacttgacattctggtgggggaaacctgtgttcgagcttcaaaaaccggaaggagctccaaccctgctggttacttgctatggaatttttttaaataagggagggttgttccagctttgacactttgtaagatttcgtgactgtcacctgagaagaggggagtttctgctttcttccctgcctttgcctggcccttctaaaccaatctttatcattttacttccctctttgcccttacccctaaataaagcaagcagttcttgagtttctctctttattaagtctacccacagccagggaaagaggggtagaccatgattactgtgaccccccttaccccaggacactgtgaatctcttcttgcctgtgccctcaccctccccctgcccaataaataaaaaggggacaaggaagtacacagcaagggaggggaggagtgtgcacccaggacagtgtctgtgtagagggtgagctgggcgagaataaatagaccatggaccccatggtggggatgaggaaggacctcacgctggcagaggcaggggcaggcgaggcgctgagtgcccttgcccaaggccaggagcagagggtgggagcccgcctgcagcccggagcccagctttgtggggcaggggaagatccctgatggcagcttcctggtcaagcttgcccttgtcaagtcctgct

SEQ ID NO: 31245 - DNA, 175 bp, Macaca Mulatta
catttattccttccaagaagaccatgatctcaatcgtcagttactgatgcttctgaagcctgtgtgtccatttctgcacacacgtatacctcggcgtggccgtatcccttctctgattatgtgtcctggtcagggaccagcgcccttgcacatgggcatggttgaatctgaaacc

SEQ ID NO: 31246 - DNA, 147 bp, Macaca Mulatta
agtactgaccaagtgccaggaagaggtcagccgcatccctgctgtccacccgggttcattcaggcccaagtgcgacgagctcggaaactatctgccgctccagtgctatgggagccccggctattgctggtgtgtcttccccaccgg

SEQ ID NO: 31247 - DNA, 208 bp, Macaca Mulatta
gttttagccactgcctgtttctctcttgcctctgattcaatgcctcacaccaacacctgattatagtttgctttgtctagttcttggatgttcatactggtacttctttcttctccaccagtttggaagctggagccacatatttggttttgcactctccatactgaccttttgttcagtcttggagaaagagtactaatgcccactt

SEQ ID NO: 31248 - DNA, 294 bp, Macaca Mulatta
attgtgggggtatcgaagaaggagactcattatatcagcgtccactcacgacccagaagcatgatgtcgtctgtgaaccgggtcaagttactacaacactctgggctaacaaggtgccaggctcagggaaggcgtggaggctgcagccagataagggctacaggcagagaagaactggcagagaccctggggagctgaggcctgatggcccttctccctgtaggcccagaggatcccctgaaatgtacaaagtgctctccatccccactggagtcagagaggcagcgccaggcg

SEQ ID NO: 31249 - DNA, 855 bp, Macaca Mulatta
ctcttggagtatctaacgcttcccttgtggaggggactggcttccccatgtgtactggccagcctgtgaagctctgcacaagtgtccagcgcctcccctggacagtcgcccaaggaacagctgtgtgaggaagggcaaaatcagcatcatttcatgagctgctcctcttttttcatcttaggttgtaagacaccaataggaaaaccagccgctgcaaaactttaataatcggcaagtagttatggaaaattcggtcacataattactgtcatcgaaggactcattacaacaaacagggaagtaaaggaagagaagcatcctctcgtactccctgagactccgagaacagtggacgcagagggaagagatgatcattggaagcagtcagtctactcttccccaccacagtggttaaaaggcatttgtatccaacactatgcatgtgttttaaaataaacttttggaaacatgtttggaaaagcaaagctcagctcatttcactaccacttttcagcttactgtatgtattaaacttttacttgacttttgaatgaaagattgatatcactgagagctctgggtagtaaaagaaaatactgaaaagggcatctctacattatttgtagcttgctttaattaaagttgcctcaaacaagtacaaatttgacagagatatttaataaattagctagcttactttaaattttggccacccaagggccttaattaacaaaaatgaattaagcatgtgcaacaaaaagatgctatgtgatgcgccataaatatgtgtaagaaatcaagagaagagaaatttagagtaagtaggtaacaccagaaaccttggcaggtagccac

SEQ ID NO: 31250 - DNA, 145 bp, Macaca Mulatta
tcctggaagttcatctaaatgggaggaagtacagtccaaagcaaaccatttattattgaacacatttggcatgtatagatgtactattcagcttcagagttacaggcaagaagtggacagaacttgtgcaaattgtcatagttct

SEQ ID NO: 31251 - DNA, 300 bp, Macaca Mulatta
  misc_feature (1)...(300): n = A,T,C or G
agggaagatgtgagaacagcaaatgtaattgctgcagaagctgtaacctgccttgtgattgacagagnnnnnnnnnnnnnnnnnnnnnnnnnnnnnnnnnnnnnnnnnnnnnnnnnnnnnnnnnnnnnnnnnnnnnnnnnnnnnnnnnnnnnnnnnnnnnnnnnnnnnnnnnnnnnnnnnnnnnnnnnnnnnnnnnnnnnnnnnnnnnnnnnnnnnnnnnnnnnnnnnnnnnnnnnnnnnnnnnnnnnnnnnnngaagaatccaaaacatttgcaatgaagagtctcaagaaacgtcaca

SEQ ID NO: 31252 - DNA, 1156 bp, Macaca Mulatta
  misc_feature (1)...(1156): n = A,T,C or G
atccttcacaatcatccttgcaagaattacagcataatagcggccgcacagtcagcattgttacagcaggtccattcagcttcggctctggaaagctatccagctcagcctgatgggtttcctagttatccttcggcgccaggaacaccattttctttgcaaccaagcctgtcccaaagtgggtggcagtgaatacttttaacttttattctccttcagagaaacatcagaattgcctaagaactgcagtgaacaatctgacaaatgtgaagctggccaaaagtcagaaaatgacaatgaggataatcctggagaaattatgacaacaatttgaaaattgtggttgcattttaaaaaatggttttaagtatgaacactcccctatgtaaatatgctgacaataaattgtatggagaatggtatttaaaaagtgtttggagacttttcacctgtcctataaaattttggattgtgtatgtgatcgacatagaaaaagtattaaagagtagattgaactctttatagccgaatacagccttaaatatgcttgtatagcatccactggcagaagtaatagttgtgcctcagacttaggggttgcatgtggccctgggggagttactacccttggtatgcatgagcggttcctattagcatcagtgggaactcagtactctatctgtatccacaaaagggaacttgagacccacagttattcttaatttctgatattaacaaccatacatactgctgaatttaactcaatatattcaggtaagtggaagtggtgcttaatgtagtcttcagaatgactttcaggtgttttcaactaaaagtatccagaactacatccttatcagaaatacaagtaagactttagaataatttgccttcaaaacagttctcctaatctcagcagtatccaatgagtgaagaacacttgactgactcttgggccacctctattacttactgcactatggaagctcctggtgaatgtttacaattatgggatgtagtatttctacttgtactttttagtcaatgcttatatgaaatatgtgancacaaatagagaagactggctctnngtagtattatgcagtatgtactctaaggattgtgtagtatacgagcgatgtcattattttgagta

SEQ ID NO: 31253 - DNA, 332 bp, Macaca Mulatta
accaggtctcacaagttaaggctgtatgagagagatgactaccgaggccttatgtctgagctcactgatgactgcgcctgtgtcccagaactcttccgtctccatgagatctattccctccacgtactggagggctgctgggtcctctatgaaatgcccaactaccgggggcggcagtatctgctgaggcctggggactacaggaggtaccacgactgggggggtgcagatgccaaagtcggctctttgagacgggtcatcgatttgtactaagctgtgcctgccttgttatgatccacatagaaacaagataaatatacaaattgtgttcc

SEQ ID NO: 31254 - DNA, 3413 bp, Macaca Mulatta
  misc_feature (1)...(3413): n = A,T,C or G
ccccaccccggagggtccagactcccctactccgagccactgtggccagctccacccagaaattccaggacctgggcgtgaagaactcagagccctcagcccgccatgtggactccctaagccagcgctcccccaaggcatccctgcggagggtggagctctcgggccccaaggcggctgagccggtgtcccggcgcaccgagctgtccattgacatctcatccaagcaggtggagaacgccggggccatcgggccgtcccgatttgggctcaagagggctgaggtgttgggccacaagacgccagagccagctcctcggaggacggagatcaccctcgtcaaaccccaggagtcagcacaccggaggatggagccccccgcctccaagatccccgaggtgcccactgccccagccaccgacacagccccnnnnnnnnnnnnnnnnnnnnnnnnnnnnnnnnnnnnnnnnnnnnnnnnnnnnnnnnnnnnnnnnnnnnnnnnnnnnnnnnnnnnnnnnnnnnnnnnnnnnnnnnnnnnnnnnnnnnnnnnnnnnnnnnnnnnnnnnnnnnnnnnnnnnnnnnnnnnnnnnnnnnnnnnnnnnnnnnnnnnnnnnnnnnnnnnnnnnnnnnnnnnnnnnnnnnnnnnnnnnnnnnnnnnnnnnnnnnnnnnnnnnnnnnnnnnnnnnnnnnnnnnnnnnnnnnnnnnnnnnnnnnnnnnnnnnnnnnnnnnnnnnnnnnnnnnnnnnnnnnnnnnnnnnnnnnnnnnnnnnnnnnnnnnnnnnnnnnnnnnnnnnnnnnnnnnnnnnnnnnnnnnnnnnnnnnnnnnnnnnnnnnnnnnnnnnnnnnnnnnnnnnnnnnnnnnnnnnnnnnnnnnnnnnnnnnnnnnnnnnnnnnnnnnnnnnnnnnnnnnnnnnnnatattgaggagaaaggcgtccgaatgaagctgacggtgattgacacaccagggttcggggaccacatcaacaacgagaactgnnnnnnnnnnnnnnnnnnnnnnnnnnnnnnnnnnnnnnnnnnnnnnnnnnnnnnnnnnnnnnnnnnnnnnnnnnnnnnnnnnnnnnnnnnnnnnnnnnnnnnnnnnnnnnnnnnnnnnnnnnnnnnnnnnnnnnnnnnnnnnnnnnnnnnnnnnnnnnnnnnnnnnnnnnnnnnnnnnnnnnnnnnnnnnnnnnnnnnnnnnnnnnnnnnnnnnnnnnnnnnnnnnnnnnnnnnnnnnnnnnnnnnnnnnnnnnnnnnnnnnnnnnnnnnnnnnnnnnnnnnnnnnnnnnnnnnnnnnnnnnnnnnnnnnnnnnnnnnnnnnnnnnnnnnnnnnnnnnnnnnnnnnnnnnnnnnnnnnnnnnnnnnnnnnnnnnnnnnnnnnnnnnnnnnnnnnnnnnnnnnnnnnnnnnnnnnnnnnnnnnnnnnnnnnnnnnnnnnnnnnnnnnnnnnnnnnnnnnnnnnnnnnnnnnnnnnnnnnnnnnnnnnnnnnnnnnnnnnnnnnnnnnnnnnnnnnnnnnnnnnnnnnnnnnnnnnnnnnnnnnnnnnnnnnnnnnnnnnnnnnnnnnnnnnnnnnnnnnnnnnnnnnnnnnnnnnnnnnnnnnnnnnnnnnnnnnnnnnnnnnnnnnnnnnnnnnnnnnnnnnnnnnnnnnnnnnnnnnnnnnnnnnnnnnnnnnnnnnnnnnnnnnnnnnnnnnnnnnnnnnnnnnnnnnnnnnnnnnnnnnnnnnnnnnnnnnnnnnnnnnnnnnnnnnnnnnnnnnnnnnnnnnnnnnnnnnnnnnnnnnnnnnnnnnnnnnnnnnnnnnnnnnnnnnnnnnnnnnnnnnnnnnnnnnnnnnnnnnnnnnnnnnnnnnnnnnnnnnnnnnnnnnnnnnnnnnnnnnnnnnnnnnnnnnnnnnnnnnnnnnnnnnnnnnnnnnnnnnnnnnnnnnnnnnnnnnnnnnnnnnnnnnnnnnnnnnnnnnnnnnnnnnnnnnnnnnnnnnnnnnnnnnnnnnnnnnnnnnnnnnnnnnnnnnnnnnnnnnnnnnnnnnnnnnnnnnnnnnnnnnnnnnnnnnnnnnnnnnnnnnnnnnnnnnnnnnnnnnnnnnnnnnnnnnnnnnnnnnnnnnnnnnnnnnnnnnnnnnnnnnnnnnnnnnnnnnnnnnnnnnnnnnnnnnnnnnnnnnnnnnnnnnnnnnnnnnnnnnnnnnnnnnnnnnnnnnnnnnnnnnnnnnnnnnnnnnnnnnnnnnnnnnnnnnnnnnnnnnnnnnnnnnnnnnnnnnnnnnnnnnnnnnnnnnnnnnnnnnnnnnnnnnnnnnnnnnnnnnnnnnnnnnnnnnnnnnnnnnnnnnnnnnnnnnnnnnnnnnnnnnnnnnnnnnnnnnnnnnnnnnnnnnnnnnnnnnnnnnnnnnnnnnnnnnnnnnnnnnnnnnnnnnnnnnnnnnnnnnnnnnnnnnnnnnnnnnnnnnnnnnnnnnnnnnnnnnnnnnnnnnnnnnnnnnnnnnnnnnnnnnnnnnnnnnnnnnnnnnnnnnnnnnnnnnnnnnnnnnnnnnnnnnnnnnnnnnnnnnnnnnnnnnnnnnnnnnnnnnnnnnnnnnnnnnnnnnnnnnnnnnnnnnnnnnnnnnnnnnnnnnnnnnnnnnnnnnnnnnnnnnnnnnnnnnnnnnnnnnnnnnnnnnnnnnnnnnnnnnnnnnnnnnnnnnnnnnnnnnnnnnnnnnnnnnnnnnnnnnnnnnnnnnnnnnnnnnnnnnnnnnnnnnnnnnnnnnnnnnnnnnnnnnnnnnnnnnnnnnnnnnnnnnnnnnnnnnnnnnnnnnnnnnnnnnnnnnnnnnnnnnnnnnnnnnnnnnnnnnnnnnnnnnnnnnnnnnnnnnnnnnnnnnnnncctaggaaggagagaccgggtgtcaggggtgcacagtccacagtgagctgaagagcgaggtttcatggcaacatggcccggcccctcaccctccgtccccacaacgggacccgtggggcctgcctttgcagggcacagatgaccaaagtcccttcctgcttcctgttccctgtcttgctctggggagaaagaggggcctgatgagactccacacgggtagacacatcttcttttgcatctgcaggccccgggctggctgcttgcagccaggagaagggcagcnnnnnnnnnnnnnnnnnnnnnnnnnnnnnnnnnnnnnnnnnnnnnnnnnnnngtctgactccctccccacccaagcgaggaaggacccctcaccacccccatcggcgggacagtttacttgccaacttgccgtgtttttgccaaaaccaagattttgaaggaaatgagtggccagcgccagggcccaggccatgtggcctgcccagcctcagcgtcactcggtggcggggtaaagtggggggtgggcagcagcatcccagcctagagacgcttcactttctttc

SEQ ID NO: 31255 - DNA, 2005 bp, Macaca Mulatta
  misc_feature (1)...(2005): n = A,T,C or G
aaaaacctactgaccaaggttcgagatgctgccctgtggctggagaccttgtcagagagcagacctgccaaggcttccctctccactacctcctccattgctgatttcttccttgccttaaccatctgcaactctgtcatggtgtctacaaccaccgagcccaggcagagggtnnnnnnnnnnnnnnnnnnnnnnnnnnnnnnnnnnnnnnnnnnnnnnnnnnnnnnnnnnnnnnnnnnnnnnnnnnnnnnnnnnnnnnnnnnnnnnnnnnnnnnnnnnnnnnnnnnnnnnnnnnnnnnnnnnnnnnnnnnnnnnnnnnnnnnnnnnnnnnnnnnnnnnnnnnnnnnnnnnnnnnnnnnnnnnnnnnnnnnnnnnnnnnnnnnnnnnnnnnnnnnnnnnnnnnnnnnnnnnnnnnnnnnnnnnnnnnnnnnnnnnnnnnnnnnnnnnnnnnnnnnnnnnnnnnnnnnnnnnnnnnnnnnnnnnnnnnnnnnnnnnnnnnnnnnnnnnnnnnnnnnnnnnnnnnnnnnnnnnnnnnnnnnnnnnnnnnnnnnnnnnnnnnnnnnnnnnnnnnnnnnnnnnnnnnnnnnnnnnnnnnnnnnnnnnnnnnnnnnnnnnnnnnnnnnnnnnnnnnnnnnnnnnnnnnnnnnnnnnnnnnnnnnnnnnnnnnnnnnnnnnnnnnnnnnnnnnnnnnnnnnnnnnnnnnnnnnnnnnnnnnnnnnnnnnnnnnnnnnnnnnnnnnnnnnnnnnnnnnnnnnnnnnnnnnnnnnnnnnnnnnnnnnnnnnnnnnnnnnnnnnnnnnnnnnnnnnnnnnnnnnnnnnnnnnnnnnnnnnnnnnnnnnnnnnnnnnnnnnnnnnnnnnnnnnnnnnnnnnnnnnnnnnnnnnnnnnnnnnnnnnnnnnnnnnnnnnnnnnnnnnnnnnnnnnnnnnnnnnnnnnnnnnnnnnnnnnnnnnnnnnnnnnnnnnnnnnnnnnnnnnnnnnnnnnnnnnnnnnnnnnnnnnnnnnnnnnnnnnnnnnnnnnnnnnnnnnnnnnnnnnnnnnnnnnnnnnnnnnnnnnnnnnnnnnnnnnnnnnnnnnnnnnnnnnnnnnnnnnnnnnnnnnnnnnnnnnnnnnnnnnnnnnnnnnnnnnnnnnnnnnnnnnnnnnnnnnnnnnnnnnnnnnnnnnnnnnnnnnnnnnnnnnnnnnnnnnnnnnnnnnaggagacctgtgaatccatcctcaattgtgcattggaagagctaaagcaatttcatgaactacagaagccagaccgcaagctctttgggttccacttaccttccaagacaccatccatcacctcagaagctgtggttccagaagctggattggtcatcgacgggaagacattgaatgccatcttccagggaaagctagagaagaagtttctggaattgacccagtattgtcggtccgtcctgtgctgccgctccacgccactccagaagagtatggtagtcaagttggtgcgagacaagttgcacgtcatgaccctttccataggtnnnnnnnnnnnnnnnnnnnnnnnnnnnnnnnnnnnnnnnnnnnnnnnnnnnnnnnnnnnnnnnnnnnnnnnnnnnnnnnnnnnnnnnnnnnnnnnnnnnnnnnnnnnnnnnnnnnnnnnnnnnnnnnnnnnnnnnnnnnnnnnnnnnnnnnnnnnnnnnnnnnnnnnnnnnnnnnnnnnnnnnnnnnnnnnnnnnnnnnnnnnnnnnnnnnnnnnnnnnnnnnnnnnnnnnnnnnnnnnnnnnnnnnnnnnnnnnnnnnnnnnnnnnnnnnnnnnnnnnnnnnnnnnnnnnnnnnnnnnnnnnnnnnnnnnnnnnnnnnnnnnnnnnnnnnnnnnnnnnnnnnnnnnnnnnnnnnnnnnnnnnnnnnnnnnnnnnnnnnnnnnnnnnnnnnnnnnnnnnnagtgctataacctatcgactttctggatttctatggcagatgcattctaccagagcctcatctgtttctttatcccttacctgg

SEQ ID NO: 31256 - DNA, 1324 bp, Macaca Mulatta
  misc_feature (1)...(1324): n = A,T,C or G
ggacaactggcacaagcgtgcaaaaccgggggcaagagaaagccctaccacaagaagcggaaatatgagttggggcgcccggctgccgaacgccaagattggcccccgccgcatccacacagtccgtgtgcggggaggtaacaagaaataccgtgccctgaggctggacgtagggaatttctcctggggctcagagtgttgtactcgtaaaacaaggatcattgatgttgtctacaatgcatctaataatgagctggtccgtaccaagactctggtgaagaattgcatcgtgcttatcgacagcacaccgtaccgacagtggtacgagtcacactacgcgctgcccctgggccgcaagaagggagccaagctgactcctgaagaagaagagattttaaacaaaaaaagatctaaaaaaattcagaagaaatatgatgaaaggaaaaagaatgccaaaatcagcagtctcctggaggagcagttccagcagggcaagcttcttgcgtgcattgcttccaggccgggacagtgtggccgagcagatggttatgtgctagagggcaaagagttggagttctatcttaggaaaatcaaagcccggaaaggcaaataaatcctcgttttgtcttcacccgtgtaataaaggtgtttattgttctgtttcccnnnnnnnnnnnnnnnnnnnnnnnanaaaatttaaaaactctcacaaataataaaataaaaattttatatataaacncnnnnnnnnnnnnnnnnnaattctttttggggccccccctggccctccttggggcccccctggcccctcaaaaacttttttaaacctttctttggccccggttaggggaaaggaaattaaagtggtcaatacgtgttttcccaagagaaaccctggggcaggaaaagggcttgggatatcccccccattaaaaaacccccgggggtaaccaagcttttgaaaaaaatccgaagggatttcgggggtctttccgggttcttccaagggggtcccaacggagtttaatcccattttccccccccccggccactttggaaaatcggtttaattttttaagcattctccccattgaaccctccaaacggttgaaaccgaatccccgttccctgtctgtattgctggacggcatgctctaacgatcggatatcnctgtgtcangttggnnnnnnnnannannacccccggtncnnnntacaaacccgcgcacaaaaaaagcgtaccgcgtnctngcggacccccgcgtgttgatgataaacaaccgcgtgggagagaatctctctcctcagaaaatatatgtaattt

SEQ ID NO: 31257 - DNA, 220 bp, Macaca Mulatta
tggatgcactggtagaagatgatatctgtattctgaatcatgaaaaagcccataagagagatacagtgactccagtttcaatatattcaggagatgaatctgttgcttcccattttgctcttgtcactgcatatgaagacatcaaaaaacgacttaaggattcagagaaagagaactctttgttaaagaagagaataagatttttggaagaaaaggtaat

SEQ ID NO: 31258 - DNA, 761 bp, Macaca Mulatta
ggtgactctttgtccctttttgttaattctcataatatttcacacattttcattattatctctgttatggttatgtatgatcagtgacctttgatgttacttactataaggtgaagttaataaatgttgtatgcattctgactgctgtaccagctcgctgttccgtcatctctctctactctcctcaggcctccctgttccctaagacacaacaatgttgaatgtaggccaattagtagccctttgacagtgtacatagtcacctaggagctctgatgaagatgtacaagaaaatgttcttttcatgcctgctaacacaacatccatcctgcagtctctggatccaggagtcaatttgacatataagtcttatttaagaaacacatttcgaaaggctatggctgctatatagagggtgattcctctgatggatctggacaaagtacattgaaaattttctggaaagaattcaccattctaggtaccattaagaacatttgtgttttgtgggtggaggtcaaaatatcaacatgaacgggagtttgaaagaagttgattgtatccttcatggatgactgagagattcaagactttgatggaggctgcagatgtggtggccagtggcaagagagctagaattagaagtggaacctgaagatgtgactgaattgctgcaatctcatggtcaaacttcagtgaatatcttctcatagatgaaagaaagaaagtgcttttctttgagatggaaaatctgtttcctg

SEQ ID NO: 31259 - DNA, 1216 bp, Macaca Mulatta
  misc_feature (1)...(1216): n = A,T,C or G
cgttaaagtctctcttctccctgctgtcatgtcgaagtcagagtctcctaaagagcccaaacagctgaggaaatgtttcattggagggttgagctttgaaacaaccgaaaagagcctgaggagccattttgagcaatggggaacactcatggactgtgtggtaatgagagatccaaacaccaagtactccaggggctttgggtttgttacatatgccactgtggaggaggtggatgcagccatgagtgcaaggccacacaaggtggatggaagagttgtggaaccaaagagagctgtctcaaaagaagattctcaaagaccaggtgcccacctaactgtgaaaaagatatttgttggtggccttaaagaagacactgaagaacatcacctaagagattattttgaacagtatggataaattgaagcgattgaaatcatgactgactgaggcagtggcaagaaaaggggctttgctattataacctttgatgaccatgactccgtggataagaatgtcattcagaaataacgtactgtgagtgaccacaactgtgaagttaggaaagccctgtcaaagcaagagatggctagtgcttcatccagtcaaagaggtcaaagtggttctgtaaactttggtggtggtcctggagggtatttttggtgggaatgacaaccttggtcatagaggaaacttcagtggtcatggtggctttggtggcagccatagtggtggtggatatagtggcagtgggaatgactataatggatttgggaatgatggaaccaaatttgggagagttgaagctacaatggatcttgcaataacaacattcagtcttccaattttggaccctnnnnnnnnnnnnnnnnnnnnnnnnnnnnnnnnnnnnnnnnnnnnnnnnnnnnnnnnnnnnnnnnnnnnnnnnnnnnnnnnnnnnnnnnnnnnnnnnnnnnnnnnnnnnnnnnnnnnnnnnnnnnnnnnnnnnnnnnnnnnnnnnnnnnnnnnnnnnnnnnnnnnnnnnnnnnnnnnnnnnnnnnnnnnnnnnnnnnnnnnnnnnnnnnnnnnnnnnnnnnnnnnnnnnnnnnnnnnnnnnnnnnnnnnnnnnnnnnnnnnnnnnnnnnnnnnnnnnnnnnnnnnnnnnnnncaaaaaactcnacnactctatttntnactaatttaaaagaggttattttagtttctgttctgtggaaagtg

SEQ ID NO: 31260 - DNA, 1002 bp, Macaca Mulatta
  misc_feature (1)...(1002): n = A,T,C or G
ggattctagaggccgaggcgcccgacnnnnnnnnnnnnnnnnnnnnnnnnnnnnnnnnnngatttatttctctttatttcaatcatacagagtccgggatcccttatcatcctccctcctcattgtctccaccatcccccagccctaaccagatttaccagggcagcatcggctatattttccggcccacatatgcccgctgcctgcccagcagccccttccggatgtttgcttccttccacccttctgccatcaccgcagggacctttggggacggttaacccctcttacatgtcaccccctggaacttctttttggtttccccactgactttccttttttttgcctcccccttcaatggattgcccccatttttcctttttgctttattccccatttctccggtttttttctttaagaatccttttagcacctcttttttctttttttggggcggtttaagcttttttcccccttgtgttactgggtgggcagtattttttctacgttttttttctttattttacctttttccccttatggggcaccttttgtttccggttggttcatttatcccctgatggtgttaacggggatattgtttatttctttcgtgttattgtagaataactacacactgtgttcttggtggataaaacgaatgttgtgcttttttttttcagggttttggggtctgtcatttttggtgttttatattttccccattttatctctttattataccactgtatttnnnnnnnnnnnnnnnnnnnnnnnntccttttatatttcgnnnnnnnnnnnnnnnnnnnnctctcttcttttttcctattttttttttcgactcgattttttctgttatttgttttccactttttttcctttctctttatacggccgtgttttattcgttgtttataccccctcttttattccttttttataatgccgttgttttttccctgactattatatagcgttttcgccattaactacaaaatn

SEQ ID NO: 31261 - DNA, 780 bp, Macaca Mulatta
cagtgggcgtccccgagtcctctctgctgggaggacactggacgtctgtggttactgtgccgaggtgtccttctgggacttgctagtttgggggcctcaccaaagggagtgcagtgggctaaatgtgccgtgggttccacgctatgtgtgcaggttccctgtgtgaaagcacgtctgtcttccaggtggtgagagaagcatgtccggtcactcggggcctggccacatgatgaaccgaggagggatgtcagggtaagacgcatgccagggcggctcccctttctcctgctttgcatattggcctaccttggaggacgcttaacaaccagtccttccagctaacgccccctcccccaagtgtgacatgaggccaggcatggggtactgtggagcctgccaccactcaggaggggaaggcatcaggaaggggccttgcctgcaggcaatgtccagggaagctgtgcaggctgggatgggccaggggagcaggatgatttcacagtcaaaccaatgtgaatttgttcctaggcgcggcagctttgccccaggcggggcctcccggggccaccccatcccacacggtggcatgcaaggcgggttcggaggccagagccgggggagcaggcccagcgacgcccgcttcactcgccgctactgagtacttggaatcctgtgtcctgtcacatggcaacaaggctatgttctgttaggagttatcttaaactgtgtaaaaatatttttttttaatctgctgccatattgtagctcaatacaatgtga

SEQ ID NO: 31262 - DNA, 1061 bp, Macaca Mulatta
ggagtaagtagcataagaagaatcaagtctgggaagcgatcaggaaaatgagtattaaaacagtatttgaaacagaaaacattgtccccagggcccctaagtccagaaagggccccacccagccaaggcaagttgttttggatgctgtaagtaggtgtagccaagagaagccacgagcatctgatatatggcagcaggggtttctggttgccaggggaaaataacttgtcaagtgctgagctttcaattataagatcgaatttaatttcctttccctctttctgcagcaatcagagcacacaatcttaaccactcggtccttagtggttttgttccattttgtgttggatattttcactgcctcatagagtccatttcaagtgttttggctgaaagggctttttgcatttgcatgttctgagttcagatcctgctggcgcacccatgcattatggaaacaggagctcaacttagctcttccagtagaggaatgagggatggattctgcttttaaaattcatagcatttatctttttctactaggtttccatttacagttgaataagtgcttcatatttttccatcattagacaaatacaaaatggactaaataattttaagagatagtggaggagagggggtacagatttccttcttagagagtgtcaaagagtatgctcccaatggtagaaagtactcagtctagcggctaagtacctcctacacatttctcatcccatcaaaagatatacaggtgcactaggggaccctgagaactcgtatcgtaatttcaacatacccaatatcaagggcctggatgccagcaactgcagcaagcaggtttctcctccctgttgatccagataggtgaacgagacagaacttggctttcttacatgatgcggtatcttgtgacttgtgtctttttccctaccgtgctagtgggaagaaaaatagttgagctttctaaaacgatagctctctatttttaaacgaatttgaaaagtcgattaaattatgtattttattgcctctgtgagtatcatattaaatgaatattt

SEQ ID NO: 31263 - DNA, 123 bp, Macaca Mulatta
gacatggaaggtgatctgcaagagctgcatcagtcaaatactgaggataaatctggatttgggttctggtgtcaaggcgaagattataccaaaagtagaacattgtaaaatgccagaaacagg

SEQ ID NO: 31264 - DNA, 306 bp, Macaca Mulatta
ttccctccctttatcaagggttgaaggaagggagccatccttactgttcagagataccaactccctcctgtaactcaggctgagaagggaccagccagctcttaccgcctcctggttatttttcttcccgcctcaccccccaagtttatttttgttttcccccggccccctacctctgaagccattttatgacctgtcatttgccacctgagcctccagtaaaaacaaaaacaggctttcctgtggtcttggtctctgtctcttctgttttggagaatcgctagtaactcactgttgaaggtgggg

SEQ ID NO: 31265 - DNA, 725 bp, Macaca Mulatta
ctcaggtatggatattctgtttatcactggctcctatggactcattgcccatgctgtgctgcagctgcctacccgggaggcctgtgccaaggcctttggtacatgtagttctcacatctgtgtcattctggccttctacatacctggtctcttctcctacctcacacaccactttggtcatcacaccgtcccaaagcctgtgcacatcctgtctctccaacatctacttgctgctgccacctgccctcaacctcctcatctatggggcccgcaccaagcagatcaggaaccaactcctggacaccttcacattcagaaaaagcccgttgtaatgtccagtggtaacaatggagcctaagagtggaggtgaggggacactcggaggggagtctgggggtgtgaattatgttatcttcatcccactgtctgcatatgactgttaccatcatttaacaggtaattgttgtggagtccctactatgtgcaacactggcatctgtaaactttgacttaaacatgtattctgcttgggaggaggcaggaggtagaggtcagggggctacactaccatgcaggaaaaatcagtgaaggatcataataaacaagatctaacttaactccccttcctgctcgccacctccattatttcagtctaagtcttcccatgctcccacacaaaagctcctctatagatctcaaacttgatggatgtgcttggcactgct

SEQ ID NO: 31266 - DNA, 1187 bp, Macaca Mulatta
  misc_feature (1)...(1187): n = A,T,C or G
gtggaatctggtgtgtgaggacaactggaaggtgcccctcaccacctccctgttcttcgtaggagtgctcctcggctccttcctttccgggcaactgtcagacaggtnnnnnnnnnnnnnnnnnnnnnnnnnnnnnnnnnnnnnnnnnnnnnnnnnnnnnnnnnnnnnnnnnnnnnnnnnnnnnnnnnnnnnnnnnnnnnnnnnnnnnnnnnnnnnnnnnnnnnnnnnnnnnnnnnnnnnnnnnnnnnnnnnnnnnnnnnnnnnnnnnnnnnnnnnnnnnnnnnnnnnnnnnnnnnnnnnnnnnnnnnnnnnnnnnnnnnnnnnnnnnnnnnnnnnnnnnnnnnnnnnnnnnnnnnnnnnnnnnnnnnnnnnnnnnnnnnnnnnnnnnnnnnnnnnnnnnnnnnnnnnnnnnnnnnnnnnnnnnnnnnnnnggttcattcctgaatctccccgatggctgatatcccagagaagatttagagaggctgaagatatcatccaaaaagctgcaaaaatgaacaacatagctgtaccagcagtgatatttgattctgtggagnnnnnnnnnnnnnnnnnnnnnnnnnnnnnnnnnnnnnnnnnnnnnnnnnnnnnnnnnnnnnnnnnnnnnnnnnnnnnnnnnnnnnnnnnnnnngatgctgacctcagtgggttactttgctctgtctctggatactcctaatttacatggagatgcctacctgaactgtttcctctctgctttgattgaaattccagcttacattacagcctggctgctattgcgaaccctgcccaggcgttatatcatagctgcagtactgttctggggaggaggtgtgcttctcttcattcaactggtacctgtggnnnnnnnnnnnnnnnnnnnnnnnnnnnnnnnnnnnnnnnnnnnnnnnnnnnnnnnnnnnnnnnnnnnnnnnnnnnnnnnnnnnnnnnnnnnnnnnnnnnnnnnnnnnnnnnnnnnnnnnnnnnnnnnnnnnnnnnnnnnnnnnnnnnnnnnnnnnnnnnnnnnnnnnnnnnnnnnnnnnnnngtgcttacaacagaatgctgccctacatcgtcatgggtagtctgactgtcctgattggaattctcaccctttttttccctgaaagtttaggaatgactcttcccgaaaccttagagcagatgcagaaagtgaaatggt

SEQ ID NO: 31267 - DNA, 301 bp, Macaca Mulatta
tccaaagaccaaaatgcatctagcttagattccaaatagtagcattaaaggacactgtcccttcctataaacattctcaccctcatccacacagtcattgtgactcttccctaacccactgagtgctcatcagtcctcctcagtcctccctccagtgatggagaaaagcaagtgattgagagcaacatgtaacctgggtgcagactcttactagtcaggttcgcctcagatttcaagtatttatctttcttttattttccttttttttcttacttatattgatcagtaagatgtctcattt

SEQ ID NO: 31268 - DNA, 1087 bp, Macaca Mulatta
  misc_feature (1)...(1087): n = A,T,C or G
atgaacgcgagcgcagcctcgctcaacgactcccaggtggtggtagtggcggccgaaggagcggcggcggcggccannnnnnnnnnnnnnnnnnnnnnnnnnnnnnnnnnnnnnnnnnnnnnnnnnnnnnnnnnnnnnnnnnnnnnnnnnnnnnnnnnnnnnnnnnnnnnnnnnnnnnnnnnnnnnnnnnnnnnnnnnnnnnnnnnnnnnnnnnnnnnnnnnnnnnnnnnnnnnnnnnnnnnnnnnnnnnnnnnnnnnnnnnnnnnnnnnnnnnnnnnnnnnnnnnnnnnnnnnnnnnnnnnnnnnnnnnnnnnnnnnnnnnnnnnnnnnnnnnnnnnnnnnnnnnnnnnnnnnnnnnnnnnnnnnnnncctcatcttgcactttgtgttccagtacgtggtgccctcggagactgtgagtctgctcacggtgggcttcctcgtggcttccttcgccgcttctgtcagcagcctgctggccattacggtggaccgctacctgtccctgtataacgcgctcacctattactcgcgccggaccctgttgggcgtgcacctcctgcttgccgccacctggaccgtgtccctaggcctggggctgctgcctgtgctgggctggaactgcctggcagagcgtgccgcctgcagcgtggtgcgcccgctggcgcgcagccacgtggtgctgctctccgtcgccttcttcatggtcttcggcatcatgctgcacctgtacgtgcgcatctgccaggtggtctggcgccacgcgcaccagatcgcgctgcagcagcactgcctggcgccaccccacctcgccgccaccagaaaaggtgtgggtacgctggctgttgtgctgggcactttcggcgccagctggctgcccttcgccatctattgcgtggtgggcagccacgaggacccggcagtctacacttacgccaccctgctgcccgccacctacaactccatgatcaatcccatcatctatgccttccgcaaccaggagattcagcgcgccctgtggctcctgttttgtggctgtttccagtccaaagtgccctttcgttccaggtcccccagcgaggtctga

SEQ ID NO: 31269 - DNA, 879 bp, Macaca Mulatta
  misc_feature (1)...(879): n = A,T,C or G
gtccaaggaccagcgtctggaggagcagcagctggacatcgagggcgaactgcgccggctcatggccaagcctggtgcgtcccccatgcgccagccaaaagccaaggggccccaccccagccagggatgccgcggagcccagagtgcctgggggccnnnnnnnnnnnnnnnnnnnnnnnnnnngtggtgagaccttccctggagccaggcgggcctgcattcgagtttcagctctcccacatcctggctgtgtgtcctnnnnnnnnnnnnnnnnnnnnnnnnnnnnnnnnnnnnnnnnnnnnnnnnnnnnnnnnnnnnnnnnnnnnnnnnnnnnnnnnnnnnnnnnnnnnnnnnnnnnnnnnnnnnnnnnnnnnnnnnnnnnnnnnnnnnnnnnnnnnnnnnnnnnnnnnnnnnnnnnnnnnnnnnnnnnnnnnnnnnnnnnnnnnnnnnnnnnnnnnnnnnnnnnnnnnnnnnnnnnnnnnnnnnnnnnnnnnnnnnnnnnnnnnnnnnnnnnnnnnnnnnnnnnnnnnnnnnnnnnnnnnnnnnnnnnnnnnnnnnnnnnnnnnnnnnnnnnnnnnnnnnnnnnnnnnnnnnnnnnnnnnnnnnnnnnnnnnnnnnnnnnnnnnnnnnnnnnnnnnnnnnnnnnnnnnnnnnnnnnnnnnnnnnnnnnnnnnnnnnnnnnnnnnnnnnnnnnnnnnnnnnnnnnnnnnnnnnnnnnnnnnnnnnnnnnnnnnnnnnnnnnnnnnnnnnnnnnnnnnnnnnnnnntctgaagtccccacaggagcggcagcaggagcaggagctgctggagcggtacgtgagcaccgtgaatgaccgcagtgatatcgtggactcactggacgaggaccggctccggt

SEQ ID NO: 31270 - DNA, 287 bp, Macaca Mulatta
  misc_feature (1)...(287): n = A,T,C or G
cattcaagcataaagagaaaacctgagagatggatttgcaaagacatgcaaagaattctttttcctttgcaatcacttctgagtttaccttttctggataacatctcgtanaatataataatcaaaatatttaacttatgaatctagctaagggaaagaaggaatagaaaattaaatgcatcaaccaattccccataaattgtaattttctaaacaactggattttgaccattcagtcaataaatatacattgcgtaatctgctatgtttattatatgttcaaacta

SEQ ID NO: 31271 - DNA, 215 bp, Macaca Mulatta
ggagcagagcggaccgcaccggcccgagcggagcgccgcgcgtgcccagccgcgaggccagggacatctgactgttggtgtgagaccggtgctcctggtggtgtgccctgagccatggaggtgcctttgcagacagagatggtggagctggtgcccaatggcaaacactcagaggggctgctcccagtcatcacccctatggcaggcaaccagag

SEQ ID NO: 31272 - DNA, 113 bp, Macaca Mulatta
cgtgggtggggtgaactactactttaatgtgaagtttggtcgaaccacatgcaccaagtcccaacccaacttggacaactgccccttcaatgaccagccagaactgaaagagg

SEQ ID NO: 31273 - DNA, 124 bp, Macaca Mulatta
acatggccattcgtggtctcgggaagaccggactctgacaccaaagaagtttccgcagccaacagactatgtggaaccaccgcttaaatcgtactggaattcacttgatgggattattcgttaa

SEQ ID NO: 31274 - DNA, 1562 bp, Macaca Mulatta
  misc_feature (1)...(1562): n = A,T,C or G
tcctagatacctgcactcaaataacatagttgtggttccggaannnnnnnnnnnnnnnnnnnnnnnnnnnnnnnnnnnnnnnnnnnnnnnnnnnnnnnnnnnnnnnnnnnnnnnnnnnnnnnnnnnnnnnnnnnnnnnnnnnnnnnnnnnnnnnnnnnnnnnnnnnnnnnnnnnnnnnnnnnnnnnnnnnnnnnnnnnnnnnnnnnnnnnnnnnnnnnnnnnnnnnnnnnnnnnnnnnnnnnnnnnnnnnnnnnnnnnnnnnnnnnnnnnnnnnnnnnnnnnnnnnnnnnnnnnnnnnnnnnnnnnnnnnnnnnnnnnnnnnnnnnnnnnnnnnnnnnnnnnnnnnnnnnnnnnnnnnnnnnnnnnnnnnnnnnnnnnnnnnnnnnnnnnnnnnnnnnnnnnnnnnnnnnnnnnnnnnnnnnnnnnnnnnnnnnnnnnnnnnnnnnnnnnnnnnnnnnnnnnnnnnnnnnnnnnnnnnnnnnnnnnnnnnnnnnnnnnnnnnnnnnnnnnnnnnnnnnnnnnnnnnnnnnnnnnnnnnnnnnnnnnnnnnnnnnnnnnnnnnnnnnnnnnnnnnnnnnnnnnnnnnnnnnnnnnnnnnnnnnnnnnnnnnnnnnnnnnnnnnnnnnnnnnnnnnnnnnnnnnnnnnnnnnnnnnnnnnnnnnnnnnnnnnnnnnnnnnnnnnnnnnnnnnnnnnnnnnnnnnnnnnnnnnnnnnnnnnnnnnnnnnnnnnnnnnnnnnnnnnnnnnnnnnnnnnnnnnnnnnnnnnnnnnnnnnnnnnnnnnnnnnnnnnnnnnnnnnnnnnnnnnnnnnnnnnnnnnnnnnnnnnnnnngacaactgttagttttgtggcttactgctgctccacccagtgtctgcagacttttgacctgctgagttgataaacactcaagagcctcaggagcgctgccagcttgacactggggaatccagccagtccagcacactcttccattctgtcctgtccaatgcgggggcactgcagaactctctggaaatgtcgtgattgagcttcagagctaaaatgccttcacccttcccccaagttggaatatatcccccaaattaaggacccgtttgtcttctgtgtttttcctttttatgtgagtgtgtcttttacacaaaccatttagattgatgggcctccccaaatctaatttaaagcaagtttcaggtgcctggaaaacagtgatttgataatctagccagattcccttttgaacacgcataccttcaatgatgcttcctctcctctcccttgttttccccagagagttatttccctgagagcatattctccacagtgtctccaatggaaacttgttagtttttgaggagtttcagaaaaccccatggcctcaatggtcttgagtagcagggtggggtgcctgagttggcggcaaagtgaggctcccatggaggctcagtgaggatcccagagcacacaccctctggaagttccagccttgtttataagttttacaatgtagcaacagacttttgtgagggattttaaaaacaaaaatgtagattgtaataaaat

SEQ ID NO: 31275 - DNA, 839 bp, Macaca Mulatta
ttataagcatgtaaaatttttgttgtttcctgtttcagttcggcaaaggtgtcctagaaatggccagagtttttgacagacaggttgggatgctctttctgcctatcaaggctaattttgtagtccttctagactcaaaccaccaaaaccctgcattacattctcctgtctgttttgtttatccagagtgtaatctccttattagaagaaaggaaaaaaaagcagaggccaaagaagtcttgtgtctgctgatgagagcaccactcatctgcgaaatgcacgtaaaacaaagtgaacagtgactgttaaactagggatgggaaattctgcatcttggagggctgtacatttatttatttattgaagattcactgatcccactttgaaatacatctttttacctaagcacgcgcatatgtgttgccatcactgtgcgtctgtagaatggggatgttttcttgcacttgtgccttttggagttagacatgaaacaaaatattgatgcaccggagctacacaaacacacatgggtctcccactcccggcttctgccccgcaagctgtcctccgaccacgctaggccttgctggaattctttccctcatgtgttttcaattaaatcctgccctcccaacttagggcttccaggctggttgtcaggccactgctccctcctggagcggtgctccttcgaaaagcccaggcgttttctcttcagctgttggcctcacatcaaagctcaaaatacatatttcaagactccagttctgttctattagaggtgtctgcttgagggtcagccttcttagaccacagacaggtctaatgtgtttgcatat

SEQ ID NO: 31276 - DNA, 393 bp, Macaca Mulatta
ctacttgatattccatgacaaagttgataagcaaactgcattttttcacaggagaaataagcatattcgtaatttcaaaagttgtataaaaatattttctattgtagttcaattgtgccaacatctttatgtgacatgtgttatgaacaattttcatatgagctaaaaacctaatttaaaataaaattttggttcaggagtttgtagttttttctcattaattttaaatgttgtgaagatctttacaatgtttaagctttgattttgcttgaatatattagttaaattcatacattttatgagttaagagactgcgtgtgctctctatagctagttttaaataaaataattgtatatacataaagtgtaaaattttggggcatatgctcttta

SEQ ID NO: 31277 - DNA, 245 bp, Macaca Mulatta
tcttgatgcctggagagctggcccagccaacacagcttttcgctgggagctccttctgccattccgattagtttcttcctggggccagttttgggtttaggttgtaattccttatatttctttcttccgcagtgcatcggatctgtcgttctggaaagaagacccttctatttagagtagaaacaaacgaaacttctaaggtatcatctgtgttaggtgatgagaccatatttctttgatgtttc

SEQ ID NO: 31278 - DNA, 735 bp, Macaca Mulatta
cgagtacatcccgctggaccagatcgacatcgatgtgggcttcgacaagggcctggaccgcatctttctcgtgtcgcccatcaccatcctgcacgagattgacgaggccagcccgctgttcggcatcagccggcaggacctggagacagacgactttgagatagtggtcatcctggaaggcatggtggaggccacagccatgaccacccaggcccgcagctcctacctggccaacgagatcctgtggggccaccgcttcgagcccgtgctctttgaggagaagaaccagtacaagatcgactactcgcacttccacaagacctatgaggtgccctctacgcctcgctgtagcgcgaaggatctggtggagaataagttcctgctgcccagtgccaactccttctgctacgagaacgaactggccttcctgagccgtgacgaggaggatgaggcggacggagaccaggacggccgaagccgggacggcctcagcccccaggccaggcatgactttgacagactccaggctggcagcggggccctggagcagcggccctacagaagggagtcagagatctgagccagccttggccaacatgcagcatccttcgagagccggggagaggccccgccatcgctcaggggccccgggtttgagcagaacgggcccggtgccctggttagggactcagtagcgttttagtcgttttatgtttctttgcaacagcctcagaa

SEQ ID NO: 31279 - DNA, 739 bp, Macaca Mulatta
  misc_feature (1)...(739): n = A,T,C or G
gaacttggtgagaacttgcccattgaagatagagagaccataattatgaatcagattctgccctatataaaggnaggaattagtatccgataccaatcaacatgtcaaatcggctctagcttctgtaattatgggattgtctactattttgggcaaagagaataccattgaacatcttctacctctttttttagctcagttaaaggatgagnnnnnnnnnnnnnnnnnnnnnnnnnnnnnnnnnnnnnnnnnnnnnnnnnnnnnnnnnnnnnnnnnnnnnnnnnnnnnnnnnnnnnnnnnnnnnnnnnnnnnnnnnnnnnnnnnnnnnnnnnnnnnnnnnnnnnnnnnnnnnnnnnnnnnnnnnnnnnnnnnnnnnnnnnnnnnnnnnnnnnnnnnnnnnnnnnnnnnnnnnnnnnnnnnnnnnnnnnnnnnnnnnnnnnnnnnnnnntacgccatccgagaagctgccaccaacaacctcatgaaactagttcagaagtttggtacagagtgggcccaaaataccatcgttcccaaagtgttagtaatggcaaatgatcctaattacttgcatagaatgaccactttattctgcattaatnnctgtctgaggcctgtggtcaggaaataaccactaagcaaatgctgcccatcgtattaaaaatggcaggagaccaagtagcaaatgttcgcttcaatgtggccaaatctctacaaaaaattggaccaattctagata

SEQ ID NO: 31280 - DNA, 328 bp, Macaca Mulatta
gtggtggttctggcattcgtagtttgctgcttgccattccacgttggcagaatcatttacataaacacagaagatctgcggatgatgtacttctctcagtactttaacatcgtcgctctgcaacttttctatctgagcgcatctatcaacccaatcctctacaacctcatttcaaagaagtacagagcggcggcctgtaaactgctgctcgcaaggaagcccaagccgacaggcttacacagaagcagggacactgcgggggaagttgcaggggacactggaggagacacagcaggctacacccagacaagtgctaacatgaagacga

SEQ ID NO: 31281 - DNA, 300 bp, Macaca Mulatta
atgaaggtttctgcagcgcttctgtgcctgctgctcatggcagccactttcagcccacagggacttgctcagccagattcagtttccattccaatcacctgctgctttaatgtgatcaataggaaaattcctatccagaggctgcagagctacacaagaatcaccaacacccagtgtcccaaggaagctgtgatcttcaagaccaaatggggcaaggaggtctgtgctgaccccaaggagagatgggtcagggattccatgaagcatctggaccaaatatttcaaaatctgaagccatga

SEQ ID NO: 31282 - DNA, 625 bp, Macaca Mulatta
  misc_feature (1)...(625): n = A,T,C or G
gggaactaagtttctatatgtgaagttagtgagtctttttgtgttactccaaaataaaggcaatgatttattttttcccagtgccaatacaattttgagctaagcactcaaggtggatacttcacattttaaagctggaatcagcaacagccctatgggaaaccagacaaaacattgacttttaaatgtagacttttaaaataaactgttttcttttggaactacaattagaatagttaatattcatccataaaccattattatgtgtacattattgttgctattgtgataatagagaattttatttatttttatgccagcttatattgtgagaacacatttagtcagtttgggttttatccatccctgtaatgcttgtccttggaacatctttcccgtattcaaggtttgtagttgaaaaagtttcctggaaaaaaatccnnnnnnnnnnnnnnnnnnnggtttttccaaataaattttttggnnnnnnnnnnnnnnnnnnnaaaccnnnnnnnnnnnnnnnnnnnnnnnnnnngccccccgccccccnnnnnnnnnnnnnnnnnnnnnnngggcccggcccccaagaaaagaaaaaggtgaaacctttcttagaaaatccggg

SEQ ID NO: 31283 - DNA, 138 bp, Macaca Mulatta
cagttctggcgctatggagagtgggtggacgtagttattgatgactgcctgccaacctacaacaatcaactggttttcaccaagtccaaccaccgcaatgagttctggagcgctctgctggagaaggcttatgctaag

SEQ ID NO: 31284 - DNA, 770 bp, Macaca Mulatta
  misc_feature (1)...(770): n = A,T,C or G
actgctatgtctaggcagcaaaacgtttacagtttagaaccttcagaaagtgataatttgattttcaaaagaaaaagtcatgggactgctttaccacttcctttggagtaggggccatttttaaatggccagacacttgaatttaacttttattatctcaactatgaaaacattgtgttactgttggcactttgaaactttaaaagaaaaattgtactcttcaggtggctatggcggttccagcagcagcagtagctatggcagtggcagaagattttaattatgtaagtaagcacctttttgtgtgtggacataattttttaaattgctgatgaacccaataaccctaatgtagctgagcagtgcaacatagttaacattataattgcagtaattgtggatataaagttaatattcagatcagcaaaatttgtgggaagcaaacttgatattggattgtagccttgagtcttaatatgtttagattaacaactttattccatattgttcaacaggaaacaaagcttagcaggagaggagagccagagaagtgacagggaagctacaggttacaacagatttgtgaactcagccaagcacagtggtggcagggcctagctgctacaaagaagacatgttttagacaaatactcatgtgtatgggcaaaanactcgaggactgtatttgtgactaattgtataacaggttattttagtttctgttctgtggaaagtgtaaagcattccaacaaagggttttaatgtagatt

SEQ ID NO: 31285 - DNA, 648 bp, Macaca Mulatta
gcctaggatctctttctgaaagctcagaatatttcttccccttccctacacacacaggacttgaagggttagagaagaaaggcagacaacagcttctgagctttgaactaatcacagcctcggttctcagtaggagccccaacactgagaccagaaaagatggtgctacgctttcctcttcttttattgctgctggttctatggggaccggtgtgtctacttcatgcttggcctaagcatctcaccagggctcattggtttgaaattcagcatatacagccaagtcctctccaatgcaacagggcaatgagtggcatcaacaattacacccagcactgtaagcatcaaaatacctttctgcatgactctttccagaatgtggctgctgtctgtgatttgctcagcatcatctgcaaaaatcgtcagcacaactgccaccagagctcaaagcctgtcaacatgactgactgcagactcacttcaggaaagtacccccagtgccggtatagtgctgccgcccagtacaaattcttcattgttgcctgtgaaccccctcagaagagcgagcccccctacaagttggttcctgtacacttagatagtattgtctaaggcatccactgcttttcctatcatttggcatagctt

SEQ ID NO: 31286 - DNA, 618 bp, Macaca Mulatta
  misc_feature (1)...(618): n = A,T,C or G
aagccatgatgcagatactacaggaaaaaaatcgctattcctggctgcttcaagagcagagtgagaccgccaccaagagaagaatgcttaaggagagaatttatcggctcactcaggcgcggcacgcgctctgtcaattctccagcaaagagatccattgaaggacggcgatgcctgtggttgttttcttgtacatactcattcattctgaggggagatggtgcaggatgctgcttctgctttgggggccacactcttctgttactatctgtgtccatctctactgtgctccctcagcatcagagcacacatcagggctccacacaggctcagctctctccaccgcccagctcttccctgaccttcatgaaggggtgggtctctagtccttgagccctgtagcacacagttgcagtgtcctaagctactgctctcattgtttactaatttgcatttgtgttcccttccccctacaagattatagaccccagggtgggaaggtccgggtcaaattcttctttagtatgtccagtcttttgcacagcacctgcaacattgtaactgcttaataaatgacatctcactgannnnnnnnnnnnnnnnnnnnnnnnnnnnnnn

SEQ ID NO: 31287 - DNA, 1364 bp, Macaca Mulatta
  misc_feature (1)...(1364): n = A,T,C or G
gggtcaggagccagaaccctctgctctagtcttagctgtgccagcgtgactccctgtgtgatttggggggtaaattactgcccctcactgggtctctgtctacacacctgcaaaatgagagggtctttggatgagtctccttaattcatttcctagacaagcttcctccaaggcttccccagattcaccggcgatgcccctccctaagtatcaacttggctgtactttgaactctggcccctcaggtttcaagggnnnnnnnnnnnnnnnnnnnnnnnnnnnnnnnnnnnnnnnnnnnnnnnnnnnnnnnnnnnnnnnnnnnnnnnnnnnnnnnnnnnnnnnnnnnnnnnnnnnnnnnnnnnnnnnnnnnnnnnnnnnnnnnnnnnnnnnnnnnnnnnnnnnnnnnnnnnnnnnnnnnnnnnnnnnnnnnnnnnnnnnnnnnnnnnnnnnnnnnnnnnnnnnnnnnnnnnnnnnnnnnnnnnnnnnnnnnnnnnnnnnnnnnnnnnnnnnnnnnnnnnnnnnnnnnnnnnnnnnnnnnnnnnnnnnnnnnnnnnnnnnnnnnnnnnnnnnnnnnnnnnnnnnnnnnnnnnggatcttgtgctgtgaagacatttcccaagtgcttcatgttagccagcaaatctgacccacaaggcctggaaagaggtgattgttaggttgtgcagaggtggtcttatccagctcagcgtcccctgggacccactgtgggacctgaggcagaactggggtggacttggcctcctccatggcacaccggctgcagatacgactgctgacatgggatgtgaaggacacgctgctcaagctccgccaccccttaggggaggagtatgccaccaaggcccgggcccatgggctggaggtggagccctcagccctggaacaaggcttcaggcaggcgtacagggtccagagccacagcttccccaactacggcctgagccatggcctcacctcccgccagtggtggctggacgtggtcctgcagaccttccacctggcaggtgtccaggatgctcaggctgtagcccccatcgctgaacagctgtatgaggacttcagccgcccctgcacctggcaggtgttggatggggctgaggacaccctgagggagtgccgcacacggggtctgaggttggcagtgatctccaactttgaccgacggctagagggcatcctgggggcccttggcctgcgtgaacacttagagtttgtgctgacctctgaggctgctggctggcccaagccagacccccgcattttccaggaggccttgcggcaggctcatacggaaccggtagtgacagccccatgttggggataattacctctgtgattaccag

SEQ ID NO: 31288 - DNA, 639 bp, Macaca Mulatta
  misc_feature (1)...(639): n = A,T,C or G
gatatgtttccaancaatttgtttaaggaagtattgtatggaagtccacaaaatgaaggaagtcatctaggttttaatatgtaagcaagataacacacaagtgtaccaagttattattaactttgttgttttacaaatttgtatgaacttggagtatctgttgcccattactatacatgtgcaaataaatgtggcttagannnnnnnnnnnnnnnnnnnnnnnnnnnnnnnnnnnnnnnnnnnnnnnnnnnnnnnnnnnnnnnnnnnnnnnnnnnnnnnnnnnnnnnnnnnnnnnnnnnnnnnnnnnnnnnnnnnnnnnnnnnnnnnnnnnnnnnnnnnnnnnnnnnnnnnnnnnnnnnnnnnnnnnnnnnnnnnnnnnnnnnnnnnnnnnnnnnnnnnnnnnnnnnnnnnnnnnnnnnnnnnnnnnnnnnnnnnnnnnnnnnnnnnnnnnnnnnnnnnnnnnnnnnnnnnnnnnnnnnnnnnnnnnnnnnnnnnnnnnnnnnnnnnnnnnnnnnnnnnnnnnnnnnnnnnnnnnnnnnnnnnnnnnnnnnnnnnnnnnnnnnnnnnnnnnnnnnnnnnnnnnnnnnnnnnnnnnnnnnnnnnnnnnnnnnnnnnnnnnnnnnnnnnnnnnnnnnnnnn

SEQ ID NO: 31289 - DNA, 763 bp, Macaca Mulatta
ccttttctcttcgtggttttcctcaccatctacttcatcagtgtggctgggaatggagccattctaatgattgtcatctctgatcctagactccattcccctatgtatttcttcctgggaaacctgtcctgcctggatatctgctactctaccgtgacactgccaaagatgctgcagaacttcctctctacacacaaagcaatttctttcttgggatgcataagccagctccatttcttccacttcctgggcagcacagaggccatgctgttggccgtgatggcatttgaccgctttgtggctatctgcaagccacttcgctacactgtcatcatgaaccctcagctctgtacccagatggccatcacaatctggaccataggtttcttccatgccctgctgcactccgtaatgacttctcgcttgaacttctgtggttccaactgtatccatcacttcttctgtgatgtgaagccattgctaaagctggcctgtgggaacacggagctcaatcagtggctgctcagtaccatcacagggacaatcgcaatgggctctttctttctcacatttctctcttatttctacattatcacccatctcttcttcaagactcattcttttggcatgctccacaaaccactgtccacttgtgcctcccacttcatggtagttattcttttctatgcacctgttctcttcacctatattcatcctgcctcagggacctccatggaccaggaccggatcattgccatcatgt

SEQ ID NO: 31290 - DNA, 825 bp, Macaca Mulatta
  misc_feature (1)...(825): n = A,T,C or G
gggaccggaagcggaaaccagaatagcgccattttgcggtacggaagctacacggcaacacgtataggagcctctccccgagatcttctagggagtgacccgtctatttttgtttgggaagaggaaactccgaaatgggatcacggaagacttaaagggccaggtccctgaggctctggttgctacagagtcaccaggagcttggcttgcttgtcgcatccttcccttgcctggtatcattttctcagttcaccccagccactgaccccagcgacctctggaaggatgggcagcagcagccacagcccgaggagccagagtccaccctggatggagctgcagcccgagctttctatgaggcccttattggggatgagagctgcattcctgactcccaaagatctcagactgaacctgccnnnnnnnnnnnnnnnnnnnnnnnnnnnntcatgggggcagctgcagcagaagcagtggcagaaagagtgagggccgtgccaaccccattcccactgtcctcaagaaggaccaggaaggactaggctacagatcaacacccccagccccgagtaacacatttcccagcttggggataacccgagctgtgggctgggnnnnnnnnnnnnnnnnnntcagggtggcccacccttgaaacccggtaaatnnnnnnnnnnnnnnnnnnnnnnnnnnnnnnnnnncagggggccttggggagaacgggggatcctaaagggaactttaacctttggaaaccctttggaagttttccggggaactttttggggtaaaaaattcttggaaccccccgggggtcctgtgcttggc

SEQ ID NO: 31291 - DNA, 298 bp, Macaca Mulatta
gctgctctgacctacaaatgcacgcgagaccagtggacggtgtattgccgggtcatccgagaaaagaacctctgccaggacatgcggtggtaccagcgctgctgccagacctgcagggacttctatgcaaacaagatgcgccagccaccgccaagctcgtgacgcgcagccccgggggtcgctcaaggctcagactcgaggtctgaaagccgcccacccccaagcgtatcagccttgcggccatgcccccacaaggctaccacaagaatacaactgcatagaacatgagtgtggactt

SEQ ID NO: 31292 - DNA, 440 bp, Macaca Mulatta
tggggggctacttcacggccgtctatgcagatgagcatgagaagcccacgctgatggaagaagaggagagaagcagctttgagaaagccgaggtggagggtgaagctcaggaaatcgagtggctcccgttccgctgcatcaaatgcttcaagctgtcctttagcactgcagagctgctgtgcatgcattatactgaccaccacagtcgggacctaaagagggacttcatcattctgggcaacggcccccgcttacagaactccacctaccagtgtaagcactgtgatagcaaactgcaaagcacagccgagctgacctcacacttgaacattcacaatgaggaattccagaagcgtgccaaacgtcaggagaggaggaaacagcttttgagcaagcagaaatatgcagatggtgcttttgcagatttcaaacaagagagg

SEQ ID NO: 31293 - DNA, 518 bp, Macaca Mulatta
  misc_feature (1)...(518): n = A,T,C or G
gaggctgtgatcaatagccaggaatggactttgagccgctccattcctgaactgcgcctggngggtgtgctgggcgacgccaggagtgggaagtcatcactcatccaccgattcctgaccggttcataccaggtgctggagaagacagagagtgannnnnnnnnnnnnnnnnnnnnnnnnnnnnnnnnnnnnnnnnnnnnnnnnnnnnnnnnnnnnnnnnnnnnnnnnnnnnnnnnnnnnnnnnnnnnnnnnnnnnnnnnnnnnnnnnnnnnnnnnnnnnnnnnnnnnnnnnnnnnnnnnnnnnnnnnnnnnnnnnnnnnnnnnnnnnnnnnnnnnnnnnnnnnnnnnnnnnnnnnnnnnnnnnnnnnnnnnnnnnnnnnnngacaggatcagtgcttcctcccctcgggtagtgggagatgctcgtgccagagctctgtgcgcagacatgaaacgctgcagctactatgagacctgtgcaacctatgggcttaatgtggatcgggtcttccaggagg

SEQ ID NO: 31294 - DNA, 524 bp, Macaca Mulatta
  misc_feature (1)...(524): n = A,T,C or G
ctgctgtcccgggaaaggcctcgtccccagggcccttcgtgccgagttttgaccacctgtgcttgttttctgacagaagccacagaagaagaaagcccgacacagctgcccgcccacgaagacctgtaacgtgctagacttgccctttaaattattcagaaggacgtcctgtggaaaatgtggccccgaggatgtgtcccctgcagtggacagcgggagggagaagctgcctggtctctaatggttgattctcatttggcccttaaacagctgcatttcttggtggttcttaaacagacttgtatattttgatacagttctttgtaataaaattgaccattgaaggtaatcaggagaacgggtatgggtttgtctcattaatcaggacagacctttaccactgagtttgcacctgtcctgccagagccgggaggtgaccagngctgccgaggtctgcagaggcagcaggtctggtcctgggctggtggctctgctgtccctgaacaggactcacgtgccgcttg

SEQ ID NO: 31295 - DNA, 770 bp, Macaca Mulatta
  misc_feature (1)...(770): n = A,T,C or G
gggctatataggttgtgatctttgtacacccatctcagattcaacgattctgctatataggttgtgtatctcttatctgaaatacttgtgactagaagcagcattttggatttgggatttttttcaaattttggaatatctccatacacacaataagacatcttggagatgggatccaagtctaaacacaaaattcacttgtttcatatataccttatgcacatagcctgaaggtaactttatatnnnnnnnnnnnnnnnnnnnngtgcattgagacaaagtttgcatacattgaaccatcagaaagaaaaggtgtcatctcagccactcatgtggtcaatttgtggtttgatgtcaccatcattcctgactgaatttatatgctaccaataagcagttactatacttattcatgcataactacttaacagtaaaaaaaatgacaaaattcgcataggaacaaagatnnnnnnnnnnnnnnnnnnnnnnnnnncataccattgatacagtgaaaaaataatgtggtcagggtagctaggcaacagtagcatcaccagaaacctttatcagctggttaacggcagcaacaaacaatggcagggctttcagtctcccgcttatgatgctggattttaaaaggttattgtatactggattttatttttgtacgtgaggaaaaacagaaacacctgaagggccaaaaaggggggcctttcctagggaagttgggggcaattcctgctgggatgggtttttttaaaatgggcttg

SEQ ID NO: 31296 - DNA, 2171 bp, Macaca Mulatta
  misc_feature (1)...(2171): n = A,T,C or G
agtggtgtccgcaaagcccaaggtgcataatcgtcaacctcgaattaactcctatgtggaggtggcggtggatggactcgccagcgagaccaagaagactgcaaagcgcattgggagctctgagcttctctggaatgagatcatcattnnnnnnnnnnnnnnnnnnnnnnnnnnnnnnnnnnnnnnnnnnnnnnnnnnnnnnnnnnnnnnnnnnnnnnnnnnnnnnnnnnnnnnnnnnnnnnnnnnnnnnnnnnnnnnnnnnnnnnnnnnnnnnnnnnnnnnnnnnnnnnnnnnnnnnnnnnnnnnnnnnnnnnnnnnnnnnnnnnnnnnnnnnnnnnnnnnnnnnnnnnnnnnnnnnnnnnnnnnnnnnnnnnnnnnnnnnnnnnnnnnnnnnnnnnnnnnnnnnnnnnnnnnnnnnnnnnnnnnnnnnnnnnnnnnnnnnnnnnnnnnnnnnnnnnnnnnnnnnnnnnnnnnnnnnnnnnnnnnnnnnnnnnnnnnnnnnnnnnnnnnnnnnnnnnnnnnnnnnnnnnnnnnnnnnnnnnnnnnnnnnnnnnnnnnnnnnnnnnnnnnnnnnnnnnnnnnnnnnnnnnnnnnnnnnnnnnnnnnnnnnnnnnnnnnnnnnnnnnnnnnnnnnnnnnnnnnnnnnnnnnnnnnnnnnnnnnnnnnnnnnnnnnnnnnnnnnnnnnnnnnnnnnnnnnnnnnnnnnnnnnnnnnnnnnnnnnnnnnnnnnnnnnnnnnnnnnnnnnnnnnnnnnnnnnnnnnnnnnnnnnnnnnnnnnnnnnnnnnnnnnnnnnnnnnnnnnnnnnnnnnnnnnnnnnnnnnnnnnnnnnnnnnnnnnnnnnnnnnnnnnnnnnnnnnnnnnnnnnnnnnnnnnnnnnnnnnnnnnnnnnnnnnnnnnnnnnnnnnnnnnnnnnnnnnnnnnnnnnnnnnnnnnnnnnnnnnnnnnnnnnnnnnnnnnnnnnnnnnnnnnnnnnnnnnnnnnnnnnnnnnnnnnnnnnnnnnnnnnnnnnnnnnnnnnnnnnnnnnnnnnnnnnnnnnnnnnnnnnnnnnnnnnnnnnnnnnnnnnnnnnnnnnnnnnnnnnnnnnnnnnnnnnnnnnnnnnnnnnnnnnnnnnnnnnnnnnnnnnnnnnnnnnnnnnnnnnnnnnnnnnnnnnnnnnnnnnnnnnnnnnnnnnnnnnnnnnnnnnnnnnnnnnnnnnnnnnnnnnnnnnnnnnnnnnnnnnnnnnnnnnnnnnnnnnnnnnnnnnnnnnnnnnnnnnnnnnnnnnnnnnnnnnnnnnnnnnnnnnnnnnnnnnnnnnnnnnnnnnnnnnnnnnnnnnnnnnnnnnnnnnnnnnnnnnnnnnnnnnnnnnnnnnnnnnnnnnnnnnnnnnnnnnnnnnnnnnnnnnnnnnnnnnnnnnnnnnnnnnnnnnnnnnnnnnnnnnnnnnnnnnnnnnnnnnnnnnnnnnnnnnnnnnnnnnnnnnnnnnnnnnnnnnnnnnnnnnnnnnnnnnnnnnnnnnnnnnnnnnnnnnnnnnnnnnnnnnnnnnnnnnnnnnnnnnnnnnnnnnnnnnnnnnnnnnnnnnnnnnnnnnnnnnnnnnnnnnnnnnnnnnnnnnnnnnnnnnnnnnnnnnnnnnnnnnnnnnnnnnnnnnnnnnnnnnnnnnnnnnnnnnnnnnnnnnnnnnnnnnnnnnnnnnnnnnnnnnnnnnnnnnnngcctgcagatcaaccctgcctcctccatcaacccagaccacctcacctacttccgctttataggcagattcatcgccatggnggcgctgtaccacggaaagttcatcgacacgggcttcaccctccctttctataagcggatgctcaacaagagaccaaccctgaaagacctggagtccgtcgaccctgagttctacaactccattgtctggatcaannnnnnnnnnnnnnnnnnnnnnnnnnnnnnnnnnnnnnnnnnnnnnnnnnnnnnnnnnnnnnnnnnnnnnnnnnnnnnnnnnnnnnnnnnnnnnnnnnnnnnnnnnnnnnnnnnnnnnnnnnnnnnnnnnnnnnnnnnnnnngctgctgaccgactggcgtttcacccgaggcgtggaagagcagaccaaagccttcctggatggcttcaacgaggtggccccgctggagtggctgcgctactttgatgaaaaagagctgga

SEQ ID NO: 31297 - DNA, 127 bp, Macaca Mulatta
gaagatggctgaagagggggagaacctggaggctgagattgtgtaccctttcacccgtggggacagcagagccaacctcatctggaggaagtttgtgtgtcctggcatcaatgtgaaatgtgttcag

SEQ ID NO: 31298 - DNA, 156 bp, Macaca Mulatta
aattacaatgggaaacatttttgaaaagctcgttaagagtctacttgggaaaaaagagatgcggattcttatattgggtttggatacagctggaaaaaccaccatcttatataaattgaagctgggggagactgtgcctaccatccctacagtagg

SEQ ID NO: 31299 - DNA, 663 bp, Macaca Mulatta
gaggtgtcaggtcgcattgaggccatcgaggatcgagagaggacatcgtggttcctgtctacctgcgggagcgccccctgcccgtgactacaacaattcctactatggcctgatgctttttgggcaccccctcctggtatcagtgccccgggaccgcttcacctgggagggcctgtataacgtcctgatgtaccggctctcacgctacgtgtctaaacccaactcagatgatgaggacgatggggatgagaaagaagatgacgaagaggataaagacgacgtccctgggccctcaactgggggcagcctccgagaccctgagccagagcaggctgggcccagctctggagtcacgaacaggtgcccattcctcctggacaattgccttggcacatctcagtggcccccaaggcgacggcgcaagcagctgttcaccctgcagacggtgaactccaatgggaccagtgaccgcacaacctcccctgaagaagtccatgcccagccatacattgctattgactgggagccagagatgaagaagcgttactatgacgagatagaggctgagggctacgtgaagcatgactgcgttgggtacgtgatgaagaaggctcccgtgcggctgcaggagtgcattgagctcttcaccactgtggagaccct

SEQ ID NO: 31300 - DNA, 903 bp, Macaca Mulatta
  misc_feature (1)...(903): n = A,T,C or G
gaaattgtgaacagaggatccgacacagacgtctggaagaccatcctctcagaggtccgctttgtgcacgtgaacacttctgcggtcttaagctaagcggggctcacctccctgactgggggtatcggcagctggagatcgtcggggagaagctgtcccggggctaccacgagagcatggtgtggaacgtggaggagcaccgatacggcgcgagnnnnnnnnnnnnnnnnnnnnnnnnnnnnnnnnnnnnnnnnnnnnnnnnnnnnnnnnnnnnnnnnnnnnnnnnnnnnnnnnnnnnnnnnnnnnnncagtggaagatgctggtgctgagaagcgatgactcggaacacaagtatagctccagcccgctggagtgggtcaccctggacaccaatatcgcctactggctgcaccccaggaccagcnnnnnnnnnnnnnnnnnnnnnnnnnnnnnnnnnnnnnnnnnnnnnnnnnnnnnnnnnnnnnnnnnnnnnnnnnnnnnnnnnnnnnnnnnnnnnnnnnnnnnnnnnnnnnnnnnnnnnnnnnnnnnnnnnnnnnnnnnnnnnnnnnnnnnnnnnnnnnnnnnnnnnnnnnnnnnnnnnnnnnnnnnnnnnnnnnnnnnnnnnnnnnnnnnnnnnnnnnnnnnnnnnnnnnnnnnnnnnnnnnnnnnnnnnnnnnnnnnnnnnnnnnnnnnnnnnnnnnnnnnnnnnnnnnnnnnncctctgcaggtcccagctcctgaggagcgtcttcagcgccctggtggtggcctggtactcctccgcatgccatgtgtcccacacgctgcgcccactcacctacggggacaagtcactctcgccacatgaactcaaggccccttcgctggaaagacaactgggacatcttgatccgaaaacacta

SEQ ID NO: 31301 - DNA, 303 bp, Macaca Mulatta
attcccctaacctcgttgcctgagtccaccaaatggaagagagggggttatttattgtcaaatgtctgtcttgcttttcatgaggaatgtataagggtgtggttagcagtctacatttatcataaccagggactctccatgcagctcttcagatgacagagagagaaacgtttattcagtggagaggagggaagattacttgaatgattggccatgaattagaatgcctacatttacagaagatgacatttatttgaaattttcttgaacaaatattagctatgttctgctctttctttatgg

SEQ ID NO: 31302 - DNA, 152 bp, Macaca Mulatta
  misc_feature (1)...(152): n = A,T,C or G
gacatggtcagatgttgaaggccacaggccggctctgctcgtctgcatagctgcagcaggacccaagcagggagctaagnnaggatctcaaggaagtgcctccatctgcagcgagcagggcagcccaagcacgctctgctctggggagttgg

SEQ ID NO: 31303 - DNA, 783 bp, Macaca Mulatta
  misc_feature (1)...(783): n = A,T,C or G
gggaatagccatgctagagcccctaactgtagacctgaatccacagtattacctgttggtcaacagacagatccagtttgaaattgcacatgcttactatgatatgatggatttgaaggttgccattgctgacaggctaagggatcccgattcacacattgtaaaaaaaataaataatcttaataagtcagcgttgaagtactaccagctcttcttagactccctgagagacccaaataaagtattccctgagcatataggggaagatgttcttcgccctgccatgttagctaagtttcgagttgcccgtctctatggtaaaatcattactgcagatcccaagaaagagttggaaaatttggcaacatcattggaacattacaaatttattgttgattactgtgaaaagcatcctgaggctgcccaagaaatagaagttgagctagaacttagtaaagaagatggttagtcttctcccaacaaaaatggagagattcagaaccaagatggccctgacttaatccctgtttttaaaaaagggaatgtgccatatttgaatgatcttttttccctagtcaaaacaggccccaatttcccattgtggataattaacccttttaccgggccaaggttgaaagtggcaagtttttgaagcctttggaagaataaccggtttcaaacctttgaaaccgcgtttttggctctatagggaattccccttaaaagggagaaaacacacagaaaaaaggtttaaaaaaattcatnnnnnnnnnnnnnnnnnnn

SEQ ID NO: 31304 - DNA, 543 bp, Macaca Mulatta
  misc_feature (1)...(543): n = A,T,C or G
gagatatagcttctcagccttctgatgaagaggagctgttaactagtactggttttgagtatcagcaggtggcctttcagccctccatacttactgnnnnnnnnnnnnnnnnnnnnnnnnnnnnnnnnnnnnnnnnnnnnnnnnnnnnnnnnnnnnnnnnnnnnnnnnnnnnnnnnnnnnnnnnnnnnnnnnnnnnnnnnnnnnnnnnnnnnnnnnnnnnnnnnnnnnnnnnnnnnnnnnnnnnnnnnnnnnnnnnnnnnnnnnnnnnnnnnnnnnnnnnnnnnnnnnnnnnnnnnnnnnnnnnnnnnnnnnnnnnnnnnnnnnnnnnnnnnnnnnnnnnnnnnnnnnnnnnnnnnnnnnnnnnnnnnnnnnnnnnnnnnnnnnnnnnnnnnnnnnnnnnnnnnnnnnnnnnnnnnnnngagccagtttttagtctttttgccttcaccaacaaaattacttctgtgcacagtagaattatttggtcttgtgattggagtcctgatagcaagtatttcttcactgggagtcgagacaaaaagg

SEQ ID NO: 31305 - DNA, 322 bp, Macaca Mulatta
tgcctcaacacctccccgatccctgttccctgtcctgggagggatagagtccaccccagagcccggagactgggcctggccctggccctgcactgatttctcatgtgtccttcgggaaaaggggagtgagagtaggaaaaagggagagttcaggacacctgatccccaggtccccatttcctggggcagcagccctcaatttctccttgtgcctcccctctcccaggtgccaaatagccataacctcctcttggaactgttatgtggcctctctggggtccaggtttcctggtcaaggctgggaatgcccaggaggaaaggc

SEQ ID NO: 31306 - DNA, 225 bp, Macaca Mulatta
  misc_feature (1)...(225): n = A,T,C or G
caggctccacaattactgccgagatccagggggtgattgatgcctgtgtcaagctgactggcatgccggatcttacactttccttcatgngaaccctaggttgttggatgatgtcagcttccatccttgtgttcgtttcaagcgctgggaatctgagcgcatcctctccttcatccctcctgatggaaacttccgcctgctgtcttaccatgtcagtgcacagaa

SEQ ID NO: 31307 - DNA, 230 bp, Macaca Mulatta
  misc_feature (1)...(230): n = A,T,C or G
gtccagccagatggtgtcaccctggagtacaacccctattcttggaatctgngattgctaatgtgttatacctggagtccccagctggggtgggcttctcctactctgatgacaagttttatgcaactaatgacactgaggtnaggtcgcccagagcaattttgaggcccttcaagatttcttccacctctttccggagtataagaacaacaaacttttcctgaccgggg

SEQ ID NO: 31308 - DNA, 1730 bp, Macaca Mulatta
  misc_feature (1)...(1730): n = A,T,C or G
aactcttgattctgaagataagttgttttctccagttattgcacgtaatctggctgatgaaatagaaagctatatgaacctaaaaagtcccctaggtagtaaatcttctagtatggaattacatggagaggaaaacagagagtctggcatgactactgcatttattcatgctctagagaggagatcaagcctacctttagatcatggttcaccagcacaggaaaatcctgaaagtgagaaaagcttgcctgcagtgtccaggtctaaaacttttactgggcgtttcaagcagcaaaccccctctcgaactcataaagaacgnnnnnnnnnnnnnnnnnnnnnnnnnnnnnnnnnnnnnnnnnnnnnnnnnnnnnnnnnnnnnnnnnnnnnnnnnnnnnnnnnnnnnnnnnnnnnnnnnnnnnnnnnnnnnnnnnnnnnnnnnnnnnnnnnnnnnnnnnnnnnnnnnnnnnnnnnnnnnnnnnnnnnnnnnnnnnnnnnnnnnnnnnnnnnnnnnnnnnnnnnnnnnnnnnnnnnnnnnnnnnnnnnnnnnnnnnnnnnnnnnnnnnnnnnnnnnnnnnnnnnnnnnnnnnnnnnnnnnnnnnnnnnnnnnnnnnnnnnnnnnnnnnnnnnnnnnnnnnnnnnnnnnnnnnnnnnnnnnnnnnnnnnnnnnnnnnnnnnnnnnnnnnnnnnnnnnnnnnnnnnnnnnnnnnnnnnnnnnnnnnnnnnnnnnnnnnnnnnnnnnnnnnnnnnnnnnnnnnnnnnnnnnnnnnnnnnnnnnnnnnnnnnnnnnnnnnnnnnnnnnnnnnnnnnnnaggttttgatgtccagttgttcacagtgtagagcttgtggaactttagtttatgatgaagaaattatggctggatggacagcagatgactcaaatttgaatacagcttgtccattctgtaaaagcaacttcttgcctcttctcaatatagaattcaaagatttgagaggttctgcaannnnnnnnnnnnnnnnnnnnnnnnnnnnnnnnnnnnnnnnnnnnnnnnnnnnnnnnnnnnnnnnnnnnnnnnnnnnnnnnnnnnnnnnnnnnnnnnnnnnnnnnnnnnnnnnnnnnnnnnnnnnnnnnnnnnnnnnnnnnnnnnnnnnnnnnnnnnnnnnnnnnnnnnnnnnnnnnnnnnagtgatgaaataaagagagccagtggagatgtccaaactatgaaaatttcatctgtgcctaatagtttatcaaagcgaaatgtatctttgactcgaagtcacagtgttggaggccccttgcagaatattgactttacccagcgaccgtttcatggcatttcaacagttagtcttccaaacagtctgcaggaagttgtggnnnnnnnnnnnnnnnnnnnnnnnnnnnnnnnnnnnnnnnnnnnnnnnnnnnnnnnnnnnnnnnnnnnnnnnnnnnnnnnnnnnnnnnnnnnnnnnnnnnnnnnnnnnnnnnnnnnnnnnnnnnnnnnnnnnnnnnnnnnnnnnnnnnnnnnnnnnnnnnnnnnnnnnnnnnnnnnnnnnnnnnnnnnnnnnnnnnnnnnnnnnnnnnnnnnnnnnnnnnnnnnnnnnnnnnnnnnnnnnnnnngcttcctctgtcatctctgtcccaggatagcaaacttgtgtatattcagctgttatgggataatatcaaccttcatcaggaaccaagagaacctctgtatgtctcatggaggaatttta

SEQ ID NO: 31309 - DNA, 261 bp, Macaca Mulatta
aggggaccagctgctgagtgcccgagtgttcttcgagaacttcaagtacgaggacgcactacgcctgctgcaatgcgccgagccttacaaagtctccttctgcctgaagcgcactgtgcccaccggggacctggcgctgcggcctgggaccgtgtctggctacgagatcaagggcccgcgggccaaggtggccaagctggtacgcgtgcttagcccggccccggccctggactgccccagcgatccggtctctgcgccgtg

SEQ ID NO: 31310 - DNA, 118 bp, Macaca Mulatta
agctttggtgcaattcccatcgaccagagttcgtccgaccagccttggaaaggtcactgaaaaatcttcaattagactatgttgacctttatcttattcattttccagtgtctctaaa

SEQ ID NO: 31311 - DNA, 2068 bp, Macaca Mulatta
  misc_feature (1)...(2068): n = A,T,C or G
gtttcgatactctgattggcaggataaattgtttatgtcgcttggtaccatcatggccatagctcatggatcaggtctccccctcatgatgatagtgtttggagagatgactgacaaatttgttgatactgcaggaaacttctcnnnnnnnnnnnnnnnnnnnnnnnnnnnnnnnnnnnnnnnnnnnnnnnnnnnnnnnnnnnnnnnnnnnnnnnnnnnnnnnnnnnnnnnnnnnnnnnnnnnnnnnnnnnnnnnnnnnnnnnnnnnnnnnnnnnnnnnnnnnnnnnnnnnnnnnnnnnnnnnnnnnnnnnnnnnnnnnnnnnnnnnnnnnnnnnnnnnnnnnnnnnnnnnnnnnnnnnnnnnnnnnnnnnnnnnnnnnnnnnnnnnnnnnnnnnnnnnnnnnnnnnnnnnnnnnnnnnnnnnnnnnnnnnnnnnnnnnnnnnnnnnnnnnnnnnnnnnnnnnnnnnnnnnnnnnnnnnnnnnnnnnnnnnnnnnnnnnnnnnnnnnnnnnnnnnnnnnnnnnnnnnnnnnnnnnnnnnnnnnnnnnnnnnnnnnnnnnnnnnnnnnnnnnnnnnnnnnnnnnnnnnnnnnnnnnnnnnnnnnnnnnnnnnnnnnnnnnnnnnnnnnnnnnnnnnnnnnnnnnnnnnnnnnnnnnnnnnnnnnnnnnnnnnnnnnnnnnnnnnnnnnnnnnnnnnnnnnnnnnnnnnnnnnnnnnnnnnnnnnnnnnnnnnnnnnnnnnnnnnnnnnnnnnnnnnnnnnnnnnnnnnnnnnnnnnnnnnnnnnnnnnnnnnnnnnnnnnnnnnnnnnnnnnnnnnnnnnnnnnnnnnnnnnnnnnnnnnnnnnnnnnnnnnnnnnnnnnnnnnnnnnnnnnnnnnnnnnnnnnnnnnnnnnnnnnnnnnnnnnnnnnnnnnnnnnnnnnnnnnnnnnnnnnnnnnnnnnnnnnnnnnnnnnnnnnnnnnnnnnnnnnnnnnnnnnnnnnnnnnnnnnnnnnnnnnnnnnnnnnnnnnnnnnnnnnnnnnnnnnnnnnnnnnnnnnnnnnnnnnnnnnnnnnnnnnnnnnnnnnnnnnnnnnnnnnnnnnnnnnnnnnnnnnnnnnnnnnnnnnnnnnnnnnnnnnnnnnnnnnnnnnnnnnnnnnnnnnnnnnnnnnnnnnnnnnnnnnnnnnnnnnnnnnnnnnnnnnnnnnnnnnnnnnnnnnnnnnnnnnnnnnnnnnnnnnnnnnnnnnnnnnnnnnnnnnnnnnnnnnnnnnnnnnnnnnnnnnnnnnnnnnnnnnnnnnnnnnnnnnnnnnnnnnnnnnnnnnnnnnnnnnnnnnnnnnnnnnnnnnnnnnnnnnnnnnnnnnnnnnnnnnnnnnnnnnnnnnnnnnnnnnnnnnnnnnnnnnnnnnnnnnnnnnnnnnnnnnnnnnnnnnnnnnnnnnnnnnnnnnnnnnnnnnnnnnnnnnnnnnnnnnnnnnnnnnnnnnnnnnnnnnnnnnnnnnnnnnnnnnnnnnnnnnnnnnnnnnnnnnnnnnnnnnnnnnnnnnnnnnnnnnnnnnnnnnnnnnnnnnnnnnnnnnnnnnnnnnnnnnnnnnnnnnnnnnnnnnnnnnnnnnnnnnnnnnnnnnnnnnnnnnnnnnnnnnnnnnnnnnnnnnnnnnnnnnnnnnnnnnnnnnnnnnnnnnnnnnnnnnnnnnnnnnnnnnnnnnnnnnnnnnnnnnnnnnnnnnnnnnnnnnnnnnnnnnnnnnnnnnnnnnnnnnnnnnnnnnnnnnnnnnnnnnnnnnnnnnnnnnnnnnnnnnnnnnnnnnnnnnnnnnnnnnnnnnnnnnnnnnnnnnnnnnnnnnnnnnnnnnnnnnnnnnnnnnnnnnnnnnnnnnnnnnnnnnnnnnnnnnnnnnnnnnnnnnnnnnnnnnnnnnnnnnnnnnnnnnnnnnnnnnnnnnnnnnnnnnnnnnnnnnnnaagcaaatgtgccaccagtgtcttttctgaaggttctgaaactgaataaaacagaatggccctacttcgtcgtgggaacagtatgtgccattgccaatggggggcttcagccggcattttcagtcatattctcagagat

SEQ ID NO: 31312 - DNA, 660 bp, Macaca Mulatta
ctttcatagagtcttggggttctactagccatggcctttgatcgttttgtgaccatctgtgacccactgagatacactaccatttttaccaatgcccgaattgccaagattgggataagcatgttgataagaaatgttgccgtcaggttgccagttgtggtctttgtgaagaggttgtccttctgcagttctatggtcctttcacattcttactgctaccatgttgatctcatccaactctcctgcacagacaacaggatcaacagcatccttggtctgtttgcgcttttctccactacagggtttgactgcccttgtatcctgctctcctatatcctgatcattcgatctgtcctcagcatcgcttcctcagaggagaggcagaaagccttcaacacctgcacatcccacatcagtgctgttgccatcttctacatccctctcatcagtttgtctcttgtccatcactatggccattcagcacctccatttgtccacaccatcatggccaatgtatttctgctaatccctcctgtgctcaaccctattattacagtgtgaagactaagcagattcgaaaggccgttatcaaggtcttaattcagaagcagtttcaaatctaatcatcagttatttctgattagagataaagccatttat

SEQ ID NO: 31313 - DNA, 493 bp, Macaca Mulatta
  misc_feature (1)...(493): n = A,T,C or G
atgattccaaataaaacttgagcccactcctgccatgcttcctctgggtgctgtgtagcttgaggaagggtccccaggtccgcccaggaacaggagcgggttcagcctgttgataggaccaagtatcctacagggacacacacacggcattcatgggacctgtgagagcaggcgctaccttcagcaacacccccagcccacccattgcctttaacatggaggaggcagcactgccttcggctccccaagacattcgacaggactcacaatcccatccacaggacagcttagctcagcctcagggtagcccccgcctgcctgctctgcatccctgaggaacccactatcagcaggaggcgaagacaggctcctgggccttccctccatgtgcggcctgngctccagggtcgcatgaggaacagggccacctaacatcctccctggggcagacgataactttcanagatggagaagtctaaacccagtgaggatc

SEQ ID NO: 31314 - DNA, 1059 bp, Macaca Mulatta
atggcatcctggccccctctagagctccagtcctccaaccagagccagctgttccctcaaaatgctacagcctgtgacaatgctccggaagcctgggacctgctgcacagagtgctgccgacatttatcatctccatctgttccttcggcctcctagggaaccttttcgtcctgttggtcttcctcctgcccaggcggcgactgaacgtggcagaaatctacctggccaacctggcggcctctgatctggtgtttgtcttgggtttgcctttctgggcagagaacatttggaaccagtttaactggcctttcggagccctcctctgccgtgtcatcaacggcatcatcaaggctaatttgttcatcagcatcttcctggtggtggccatcagccaggaccgctactgcgtgctggtgcaccctatggccagccggaggcggcagcggcggaggcaggcccgggtcacctgcgtgctcatctgggttgtggggggcctcttgagcatccccacattcctgctgcgatccatccaagccgtcccagatctgaacatcaccgcctgcatcctgctcctcccgcatgaggcctggcactttgcgaggattgtggagttaaatattctggctttcctcctaccactggctgcgatcatcttcttcaactaccacatcttggcctccctgcgagggcgggaggaggtcagcaggacaaggtgcgggggcagcaaggatagcaagaccacagcgctgatcctcacgctcgtggtggccttcctggtctgctgggccccttaccacttctttgccttcctggaattcttattccaggtgcaagcagtccgaggctgcttttgggaggacttcattgacctgggcctgcaactggccaacttcttggccttcaccaacagctccctgaatccagtcatttatgtctttgtgggccggctcttcaggaccaaggtctgggaactttataaacaatgcacccctaaaagtcttgctccaatatcttcatcccacaggaaagaaatcttccaacttttctggcggaattaa

SEQ ID NO: 31315 - DNA, 913 bp, Macaca Mulatta
  misc_feature (1)...(913): n = A,T,C or G
gagaaagaaggnnntccccctatgggggctcttttccgtggcgcctcggaggcgttcagctgcttcaagatgaagctgaacatctccttcccagccactggctgccagaaactcattgaagtggacgatgaacgcaaacttcgtactttttatgagaagcgtatggccacagaagttgctgctgacgctctgggtgaagaatggaagggttatgtggtccgaatcagtggtgggaacgacaaacaaggtttccccatgaagcagggtgtcttgacccatggccgtgtccgcctgctactgagtaaggggcattcctgttacagaccaaggagaacgggagaaagaaagagaaaatcagttcgtggttgcattgtggatgccaatctgagcgttctcaacttggttattgtaaaaaaaggagagaaggatattcctggactgactgatactacagttcctcgccgcctgggccccaaaagagctagcagaatccgcaaacttttcaatctctctaaagaagatgacgtccgccagtatgttgtaagaaagcccttaaacaaagaaggtaagaaacctaggaccaaagcacccaagattcagcgtcttgttactccacgtgtcctgcagcacaaacggcggcgtattgctctgaagaagcagcgtactaagaaaaacaaggaagaggctgcagaatatgctaaactttttggccaaaagaatgaaggaggctaaggagaaagcgcccaggaaacaaattgcaaaagagacgcagaacttttcctctctgcgaagctttctactttctaagtctgaatccagtcagaaaataagatttttttgaggtacaataattaggatcnggactcggganaaaaannnnnnnnnnnnnnnnnnnnnnnncctgtcggggccc

SEQ ID NO: 31316 - DNA, 129 bp, Macaca Mulatta
aggagccagtgacattcaaggacgtggctgtggtcttctctgaggaggagctgcgactgctgaaccttgcccagaggaagttgtaccgagatgtgatgctggagaacttcaggaatgtggtctcagtgg

SEQ ID NO: 31317 - DNA, 700 bp, Macaca Mulatta
gaagaggttcctgtcatttcttatggagttcacagaattatttggggcttaagtagtacaatggagacagtcacgtgcaatgcttaaggtggtctaacggggtcccttttgctggaggtgttcctgaagagattgaacctagtaacaggctttattttcatcttgtgtgcaacatgacaaagactgctaagattaaaatccgtctcccatttgttgcagcctcacctacaccaggatagaaagcacatgatggaatctgtgatgtctaatgtgtcttatgaaaatagccaaacaactgtccctggggattctacattgattggcatttttagtcatgggaatgtatttttgcagaaatacctgctttgtgtttgggcctctcttgctgtcattatgatgtattttgagatgattagtcaagagtcaaggttgagagtacaggccaagaccatggaaaaaaaatcatgctcgctggccaataaagagcttgatgctgcctggccaaataaggtgattcagatagaatctgatcccattcagagctcggtaactgtcactgtacagaagacattgaaaaggaagtggcatagtcatgatcacaaggatatattgacagttatctatagccagggtagttgttaatacctgcttgtttggggagatatgtttgattatagagagactctgggctaccctcaaa

SEQ ID NO: 31318 - DNA, 333 bp, Macaca Mulatta
aacaagtaaatcactgaacatttaaacccagcagttctcttttttcaaacttctccccttgattttgtgtcagccctgcctgtgctatgctttgttggggtaagcaagccctgcataaatgttctttcctgagagtgaaaaaaacatgctataataagaaaggagagatggagaagatgaaataggaaaacaaaaaaaggctttgtgtagagttgacctgcatttcactcactgaataacatcacaggatatagatgttggtcatgaaacaaatatgctttagttgcatacagcttagaaacctacattatttaatgccatcatcagaggagt

SEQ ID NO: 31319 - DNA, 261 bp, Macaca Mulatta
  misc_feature (1)...(261): n = A,T,C or G
cctgcacagctgaccacagtggggaaacgttgctgtctttggattcaggatctttgcatggatctccagaacttgaagcgtgtccgggatgacctgcgtttccgnnnnnnnnnnnnnnnnnnnnnnnnnnnnnnnnnnnnnnnnnnnnnnnnnnnnnnnnnnnnnnnnnnnnnnnnnnnnnnnnnnnnnnnnnnnnnnnnnnnnnnnnnnnnnnnnagagctttcatcatcacagggcagacatatacacgaaaagtggat

SEQ ID NO: 31320 - DNA, 1385 bp, Macaca Mulatta
  misc_feature (1)...(1385): n = A,T,C or G
taggacagcacagctggcacgaggctcggaaagattttggatccaaggtcatctccacagaggagaacacacaggcagcacaggccatggggcccctctcagcgcctccctacacactgcacatcacctggaaggagctcctgctcacagcatcacttttaatcttctggaacacgcccaccactgcccaagtcacgattgaagctcagccaaccaaagtttctgaggggaaggatgttcttctacttgtccacaatttgccccagaatcttactgcctacatctggtacaaagggcaaaaaaacggacttccaccattacattacatcatatacaatagacactgaaacaattatatttgggcctgcatacagtggacgagaaacagtatattccaatgcatccctgctgatccagaatgtcaccaagaaggacacaggatcctacaccattcaaatgataaagcaaggtgataagactaaaggagtaattggacatttcaccttatacctggagactcccaagccctacatctccagcagcaacttaaaccccagagaggccgtggagactgtgatcttatcctgtgatcctgacactcaggatgtaagctacctgtggtggataaacggtcagagcctccctatcagtcgcaagtggcagctgtctggaaacaacaggaccctcgttctatttggtgtcacaaaggatactgcaggaccctatgaatgtgaaatgaagaacccagtgagttccagccgcagtgacccagtcaccctgaatctcctttatggtcctgacttccccaggattttcccttcattcacggattaccgttcaggagataacctctacttgtcctgcctcgcgaactctaacccaccggcagagtattcttggacgattaatgggaagtttgtgcaatcaggacaagagctctttatcccccaaattagtacaaagcataacgggatctatggttgctctgctcgtaactcagccactggcagggaatgttccacattcaagatggtcatagtctctgctcctttaggaagaggatatctatcttgggttattccgaaacaacaaccatgatgtcatttctgtatttcaggaagactggcagacagttgctttgattcttcctcaaagtatttatattcagctacagtccaaaattgctttttcttcaacgagatatatggaaaagactctgacaatgactcttgaatacaagtttctgataacttcaagatcataccggcacaagtatacatatgtaacaaacctgcacgttatgcacatgtaccctacaacttaaagtataataataataaataaatttaaacacaacagaaaaactcgaggggggccggnnnnna

SEQ ID NO: 31321 - DNA, 206 bp, Macaca Mulatta
cactgtggtcatcttgtcctttgggccctgatgtttttctacacgtggccttctgcccctttaagctggataaatatcttgctatttttgatgcatttattactccttttctgaatccagttatctacacattcaggaacaatgacatgaaagtggcaatgaggagactgtgcagtcgccttgcgcattttacaaagattttgtaa

SEQ ID NO: 31322 - DNA, 3742 bp, Macaca Mulatta
  misc_feature (1)...(3742): n = A,T,C or G
gtgaagagattgttttctgaaagctgcgttggaggctgtgacagagctgagagcctgtgtggagaggatggagaggcnnnnnnnnnnnnnnnnnnnnnnnnnnnnnnnnnnnnnnnnnnnnnnnnnnnnnnnnnnnnnnnnnnnnnnnnnnnnnnnnnnnnnnnnnnnnnnnnnnnnnnnnnnnnnnnnnnnnnnnnnnnnnnnnnnnnnnnnnnnnnnnnnnnnnnnnnnnnnnnnnnnnnnnnnnnnnnnnnnnnnnnnnnnnnnnnnnnnnnnnnnnnnnnnnnnnnnnnnnnnnnnnnnnnnnnnnnnnnnnnnnnnnnnnnnnnnnnnnnnnnnnnnnnnnnnnnnnnnnnnnnnnnnnnnnnnnnnggcacatggccacccactcagcccagaaaccccaccagtgtatgtactgtgataagatgtttcaccgcaaggaccatctgcggaaccatctgcagacccatgaccctaacaaagaggccctccactgctctgagtgcggtaagaattacaatacgaagctgggctaccggcgccacctggccatgcatgctgccagcagcggtgacctcagctgcaaggtgtgcctgcagacctttgagagtacccaggccctgctagagcacctgaaggcccactcacgccgggtagcaggcggtgccaaggagaagaagcacccctgtgaccactgcgaccggcggttctatactcgtaaggatgtacggcggcaccttgtggtgcacacaggccgtaaggacttcctgtgccagtactgtgcccagcggtttggccgtaaggaccacctgacgcgtcatgtcaagaagagccactcgcaggagctgcttaagatcaagacagagcccgtggacatgttaggcctactcagctgcagctccacagtcagtgtgaaggaagagctgagccctgtgctgtgcatggcctctcgggacgtaatggggaccaaggccttccctggcatgttgcccatgggcatgtatggtgcccacatccctaccatgcccagcacgggcatgccacactccttggtgcacaacacgctgcccatgggtatgagctaccctctggaatcctcacctatctcttccccagctcagctccctccaaaataccagcttggatctacctcatacttgcccgacaaattgcccaaagtggaggtggatagttttctggcggagcttcctggaagcctgtctctctcatccgctgaaccccagcccgcctcacctcagccggcggcagctgcggccctcctagatgaagcactgcttgccaagagccccgccaacctctctgaggccctctgcgctgctaatgtggacttctcccacctactgggctttcttccactcaacctgcccccgtgtaacccacctggggccacaggaggcctggtcatgggctactcccaggccgaggcacagcccctgctcaccactttgcaagctcatcctcaagattccccaggagctgggggaccactgaactttgggcctctgcactccttgcctcctgtcttcacgtctggcctgagtagcaccaccctgcctcgtttccaccaagcattccagtagcccctacagaggccctcagctcagtttttggctctgttagggagccttagtacccaccccatccgtgtcccccatgaaggcagctgagctttcagagctgtgttcnnnnnnnnnnntccagtgtctgtatggagcacttggtttgggggttcaggctccaggatcaattccagaaggagccttgagccccaaccctgtgaaaagatctcataccataggacttcaggtannnnnnnnnnnnnnnnnnnnacctgaatcgggagccacacttagccctcttcctctccaaagcgccagaacctcctcctctttggagaatggggaggcctcttggagacacagagggtttcaccttggatgacctcaagagaaattgcccaagaagcccgccttctggtcccaacctgcagaccccacagcagtcagttggtcaggccctgctgtagaaggtcacttggctccatagcctgcttccaaccaatgggcaggagagaaggcctttatttcccacccacccatgcatcctgtaccagcacctccattttcagtcagtgttgtccagcaacggtaccgtttacacagtcgcctcagacacaccatttcacctcccttgccaagctgttagccttagaatgattgcagtgaacactgtttacacaccatgaatccattcccatcagtccgttccagttggcaccagcctgaaccatttggtatctggtgttaactggagtcctgtttacaaggcggagtcgggtcttgctgacttctcttcacttgaggtcacatttttcccccgtggggaaataaactgagtttggactgctccagtctctgccatcttccatgactgcatctgttcctgcctgcctcggcagtgtccacagaagacaggcaagaagattggagcagttttctcacaggtctgcaattctgtttttctccaagtacattatgaccccctcatccttctcttgaactggagaggggaaaaaatgaaannnnnnnnnnnnnnnnnnnnnnnnnnnnnnnnnnnnnnnnnnnnnnnnnnnnnnnnnnnnnnnnnnnnnnnnnnnnnnnnnnnnnnnnnnnnnnnnnnnnnnnnnnnnnnnnnnnnnnnnnnnnnnnnnnnnnnnnnnnnnnnnnnnnnnnnnnnnnnnnnnnnnnnnnnnnnnnnnnnnnnnnnnnnnnnnnnnnnnnnnnnnnnnnnnnnnnnnnnnnnnnnnnnnnnnnnnnnnnnnnnnnnnnnnnnnnnnnnnnnnnnnnnnnnnnnnnnnnnnnnnnnnnnnnnnnnnnnnnnnnnnnnnnnnnnnnnnnnnnnnnnnnnnnnnnnnnnnnnnnnnnnnnnnnnnnnnnnnnnnnnnnnnnnnnnnnnnnnnnnnnnnnnnnnnnnnnnnnnnnnnnnnnnnnnnnnnnnnnnnnnnnnnnnnnnnnnnnnnnnnnnnnnnnnnnnnnnnnnnnnnnnnnnnnnnnnnnnnnnnnnnnnnnnnnnnnnnnnnnnnnnnnnnnnnnnnnnnnnnnnnnnnnnnnnnnnnnnnnnnnnnnnnggaagggaggcagctcagggacctccatcgtgggacccttgagacgcctccactctgattcagaaacacacttctacctctttactgttaactcttaacagatgcagtcagcagtttctgggcacttctctcagtaggtgcctcctgctgacttctccactagggtttcaggacaaactaccaaggaactgcctcagcctcccaccagttctccctcacccaacttctgtctaggttcacttggtttgtcatcaggaactgagcaggtccaggactcaggcttctgctttagtccaagccagtactcatagtttgaggtaaaagccttaaaatttagctccctagcccttgattggaagcaatttggaataagtgtgtttcgatttaggcagggtagcttgggatactttttaaaaaacaaaaccagatattaaaatgtctggcaaggttagaatcagactagatgatttgcttctaaaaattagtttcagtgagtcccagggactaattaaggtttattttaaaaagagtctaccttggtacgcagccacctcctgcatgctgtgcatgttattgggccttgtattatag

SEQ ID NO: 31323 - DNA, 564 bp, Macaca Mulatta
ataatcttttagagaaagtattaatcatcagttttataaaagaacctatttcaccatagtcttttatttgcttttacagatcagtgtactgttacccggacatacctattccttcacaagttctggttcttcagtgctgcttactattttggtaactgggcctttcttggggtaagtacagatagcccaggcatgatttcaccttcttttataaattatagttaaatgtgtaaactttttgtatcttagtagtccatttgtatcatagtactgtcattgaattttaaagcattactttccaaatgattttaaatttgaaaagtaacacatagcttatttaaatttacaggtattcttgattggattaattgtatcctgttgtaaagggaagaaatcggttattgaaggagtagacgaagattcagacataagtgatgatgagccctctgtttattctgtttgacagccttctctgtcttaaaggttttataacactgactgaatatctgttatgcatttttaaagtgttagactgacattaggatgagctaactagctttcatc

SEQ ID NO: 31324 - DNA, 1486 bp, Macaca Mulatta
atggggaactgtctgcacccggtgagtatggggccaggccccacagtcctttaccccattgcccctcatttcccctgctgtttgctcctcagtctttatatatcttccttttcctcctcatcttttctcccttccctctttttcctcttcttttaaggtagttttccttctctccttcctatactagtctcctggctccctcttgtgtccctccctttgcctttgagtcagttccatcttggtcccttggtgccttcccttctgaccttgcactgctcctccagccccagctgccctggcttccccaggactgttcctgctccggatctttaggctccctgctttgtcctttcccactgtccgtactgcatctgactcctgcagagatcgtattctcccacccgaccttcctctctgtcctcccctcccacctgcccctcagttcctaggagactcttccagggttactctgatggcctcctctgggtatgtcctccaggcggaactctccccctcaactcagaactcaagtcagctgaacagtgatttatggaatttttcctatgacgggaatgattccttcccagatgtagactacgatgccaacctggaagcagctgccccctgccactcctgtaacctgctggatgactctgcactgcccttcttcatcctcgtcagtgtcctgggcatcctagctagcggcactgtcctcttcatgtttttcagacctctcttccactggcagctctgccctggctggcccgtcctggcgcagctggctgtgggcagtgctctcttcagcattgtggtgcccatcttggcaccagggctaggtaacacccgcagctccgccctatgtagcctgggctactgtgtctggtatggctcagcctttgcccaggctttgctgctagggtgccatgcctccctgggccccaaactgggtgcaggccaggtcccaggcctcaccctggggctctctgtgggcctttggggagtggcggccctactgacactgcctatcaccttggccagtggcgcttctggtggactctgcactccggcatacagcatggagctgaaggctttgcaggctacacacgctgtagcctgtcttgcagtctttgtcttgttgccactgggtttgtttggagccaaggggctgaagaaggcattgggtatggggccaggcccctggatgaatatcttgtgggcctggtttattttctggtggcctcatggggtggttctgggactggatttcctggtgaggtccaagctgttgctgttgtcaacatgtctggcccagcaggctctggatctgctgctgaacctggcagaagccttggcaattttgcactgtgtggctacgcccctgctcctcgccctattctgccaccaggccacccgcaccctcttgccctctctgcccctccctgaaggatggtcttctcatctggacacccttggaagcgaatcctag

SEQ ID NO: 31325 - DNA, 552 bp, Macaca Mulatta
  misc_feature (1)...(552): n = A,T,C or G
aaacagacaccatgtcatctgactccnnnnnnnnnnnnnnnnnnnnnnnnnnnnnnnnnnnnnnnnnnnnnnnnnnnnnnnnnnnnnnnnnnnnnnnnnnnnnnnnnnnnnnnnnnnnnnnnnnnnnnnnnnnnnnnnnnnnnnnnnnnnnnnnnnnnnnnnnnnnnnnnnnnnnnnnnnnnnnnnnnnnnnnnnnnnnnnnnnnnnnnnnnnnnnnnnnnnnnnnnnnnnnnnnnnnnnnnnnnnnnnnnnnnnnnnnnnnnnnnnnnnnnnnnnnnnnnnnnnnnnnnnnnnnnnnnnnnnnnngatcctgagaacttcannnnnnnnnnnnnnnnnnnnnnnnnnnnnnnnnnnnnnnnnnnnnnnnnnnnnnnnnnnnnnnnnnnnnnnnnnnnnnnnnnnnnnnnnnnnnnnnnnnnnnnnnnnnnnnnnnnnnnnnnnnnnnnnnaagctcactttcttgctgtccaatttctaccaaaaggttcctttgttccaaaagtccaactactgaactgggggatattatgaacgggcttgaggatctgg

SEQ ID NO: 31326 - DNA, 2137 bp, Macaca Mulatta
  misc_feature (1)...(2137): n = A,T,C or G
gcggggtcgccctgtcccgggcccactttgagaagcagcctccctccaacttgaggaaatccaacttctttcacttcgtcctggcgctctatgacaggcagggccagccggtggagatcgagcggactgctttcgtggactttgtggagaatgacaaagnnnnnnnnnnnnnnnnnnnnnnnnnnnnnnnnnnnnnnnnnnnnnnnnnnnnnnnnnnnnnnnnnnnnnnnnnnnnnnnnnnnnnnnnnnnnnnnnnnnnnnnnnnnnnnnnnnnnnnnnnnnnnnnnnnnnnnnnnnnnnnnnnnnnnnnnnnnnnnnnnnnnnnnnnnnnnnnnnnnnnnnnnnnnnnnnnnnnnnnnnnnnnnnnnnnnnnnnnnnnnnnnnnnnnnnnnnnnnnnnnnnnnnnnnnnnnnnnnnnnnnnnnnnnnnnnnnnnnnnnnnnnnnnnnnnnnnnnnnnnnnnnnnnnnnnnnnnnnnnnnnnnnnnnnnnnnnnnnnnnnnnnnnnnnnnnnnnnnnnnnnnnnnnnnnnnnnnnnnnnnnnnnnnnnnnnnnnnnnnnnnnnnnnnnnnnnnnnnnnnnnnnnnnnnnnnnnnnnnnnnnnnnnnnnnnnnnnnnnnnngctaccccctgcatcanagccattagcccgagtgaaggctggaccacaggaggagccatggtcatcatcattggggacaacttctttgatggtctccaagtggtgtttgggaccatgcttgtatggagcgagnnnnnnnnnnnnnnnnnnnnnnnnnnnnnnnnnnnnnnnnnnnnnnnnnnnnnnnnnnnnnnnnnnnnnnnnnnntataaatctaaacagttctgcaaaggagccccaggaaggttcatttacacannnnnnnnnnnnnnnnnnnnnnnnnnnnnnnnnnnnnnnnnnnnnnnnnnnnnnnnnnnnnnnnnnnnnnnnnnnnnnnnnnnnnnnnnnnnnnnnnnnnnnnnnnnnnnnnnnnnnnnnnnnnnnnnnnnnnnnnnnnnnnnnnnnnnnnnnnnnnnnnnnnnnnnnnnnnnnnnnnnnnnnnnnnnnnnnnnnnnnnnnnnnnnnnnnnnnnnnnnnnnnnnnnnnnnnnnnnnnnnnnnnnnnnnnnnnnnnnnnnnnnnnnnnnnnnnnnnnnnnnnnnnnnnnnnnnnnnnnnnnnnnnnnnnnnnnnnnnnnnnnnnnnnnnnnnnnnnnnnnnnnnnnnnnnnnnnnnnnnnnnnnnnnnnnnnnnnnnnnnnnnnnnnnnnnnnnnnnnnnnnnnnnnnnnnnnnnnnnnnnnnnnnnnnnnnnnnnnnnnnnnnnnnnnnnnnnnnnnnnnnnnnnnnnnnnnnnnnnnnnnnnnnnnnnnnnnnnnnnnnnnnnnnnnnnnnnnnnnnnnnnnnnnnnnnnnnnnnnnnnnnnnnnnnnnnnnnnnnnnnnnnnnnnnnnnnnnnnnnnnnnnnnnnnnnnnnnnnnnnnnnnnnnnnnnnnnnnnnnnnnnnnnnnnnnnnnnnnnnnnnnnnnnnnnnnnnnnnnnnnnnnnnnnnnnnnnnnnnnnnnnnnnnnnnnnnnnnnnnnnnnnnnnnnnnnnnnnnnnnnnnnnnnnnnnnnnnnnnnnnnnnnnnnnnnnnnnnnnnnnnnnnnnnnnnnnnnnnnnnnnnnnnnnnnnnnnnnnnnnnnnnnnnnnnnnnnnnnnnnnnnnnnnnnnnnnnnnnnnnnnnnnnnnnnnnnnnnnnnnnnnnnnnnnnnnnnnnnnnnnnnnnnnnnnnnnnnnnnnnnnnnnnnnnnnnnnnnnnnnnnnnnnnnnnnnnnnnnnnnnnnnnnnnnnnnnnnnnnnnnnnnnnnnnnnnnnnnnnnnnnnnnnnnnnnnatgaaaaccaccttcctatgtctgtaaaatatttaagaaaaaattggcaaacaattaatgcttaatattttggatactatttgtttttctttgtaggaaaaaaaaaagttgaaagtttctattttctatgaagcctttcagataccaatttagtttatgcagaaaaaaattgaacgaaacagggtaccagcatggaagactttctcaaaacgcaacctgaattgaatgacgaaatgttgtatgtgtgtttgcttatagcttaatctct

SEQ ID NO: 31327 - DNA, 476 bp, Macaca Mulatta
gcacaatcttgtctctgctccaccctgacgcccagttcagaagcattttagggcattgaggcacagctacagatgcctctcagggaggggctggggcaaggcttggccaggtggagctggtgaaggaggcaccagggccgggtgaggcagggctcttactaggatcacacccatgactcagatcacatctgtggagggagtgatgtttgaacctggggctcagctgtgtccgtgtcagctctctcccaccagaaccctttcaattccaggcaatgctgcaacacagacactggcccatcccctactagggcacaccgagagccctgcactccccaccctgccagtccagtcccctcacccgaactcagccgctcctgtggctgggctctcctcagtcgacctcactcccataggtggggctcccaaacaattttcatctgtttttaacttctctcactttgccgcaaactatactt

SEQ ID NO: 31328 - DNA, 1172 bp, Macaca Mulatta
gggggtcggcgtggtcttgcgagtggagtgtcagctgtgcccgggtcttcgccatgagcgtcccggccttcatcgacatcagtgaggaagatcaggctgctgagcttcgtgcttatctgaaatctaaaggagctgagatttcagaagagaactcagaaggtggacttcatgttgatttagctcaaattattgaagcctgtgatgtgtgtctgaaggaggatgataaagatgttgaaagtgtgatgaacagtgtggtatccctactcttgatcctggaaccagacaagcaagaagctttgattgaaagcctatgtgaaaagctggtcaaatttcgcgaaggtgaacgcccatctctgagactgcagttgttaagcaaccttttccatgggatggacaagaatactcctgtaagatatacagtgtattgcagccttattaaagtggcagcatcttgtggggccatccagtacattcccactgagctggatcaagttagaaaatggatttctgactggaatctcacaactgaaaaaaagcacacccttttaagactactttatgaggcccttgtggattgtaagaagagtgatgctgcttcaaaagtcatggtggaattgcttggaagttacacagaggataatgcttcccaggctcgcgttgatgcccacaggtgtattgtacgagcattgaaagacccaaatgcatttctttttgaccaccttcttactttaaaaccagtcaagtttttggaaggcgagcttattcatgatcttttaaccatttttgtgagtgctaaattggcatcatatgtcaagttttatcagaataataaagacttcattgattcacttggccttattacatgaaacagaatatggcaaaaaatgagactactttactttttatgggaaatggccagttggaaaattaaagaaattttctttttgatacacatgccagcaagaaccttcagattggagccttatagatgttttaaagcctatttgttatttggacgcgggtaagaaacttaaaaatgggtctaaatgccaaaaattgtttctgaaccccctaaggaaaagtttatttgttcattcaatagccacaccatttggaaacaattgtggaaaaaacatccaattggcaccaaaactttaatgtaaccactttta

SEQ ID NO: 31329 - DNA, 488 bp, Macaca Mulatta
cgcgctcccccgggcggcggcgaggagcgtgagctggcgctggcgttgcaggaggcactggagccggccgtgggcctgggccgctacccgcgcgcgcaactcgaggtgtcggcgttgctgctggaggacggcggctcggccctggccgccgcgctcaccgccgccgcgctcgccctggccgacgcgggcgttgagatgtacgatctggtggtgggctgtggcctgagcctcgcgccggggcccgcgcccacttggctgctggaccccacgcggctagaggaagagaacgccgccgccggcctcaccgtggcgctcatgcctgtgctgaatcaggtggccgggctgctgggcagcggcgagggcggcctaatcgagagctgggcggaggccgtacgcctgggcctcgagggctgccagcgcctctaccccgtgctgcagcagagcctggtgcgggcggcgcgccgcaggggcgccgccgcccagccctg

SEQ ID NO: 31330 - DNA, 1395 bp, Macaca Mulatta
  misc_feature (1)...(1395): n = A,T,C or G
gggggccttttccccccctctagcgccgctgggcctgcaggtctctgtcgacccgcggacgctggtctctgttccgcaggatggggtttgttaaagttgttaagaataaggcctactttaagagataccaagtgaaatttagaagacgacgagagggtaaaactgattactatgctcggaaacgcttggtgatacaggataaaaataaatacaacacacccaaatacaggatgatagttcgtgtaacaaacagagatatcatttgtcagattgcttatgcccgtatagagggggatatgatagtctgcgcagcatatgcacacgaactgccaaaatacggtgtgaaggttggcctgacaaactatgctgcagcatattgtactggcctgctgctggcccgcaggcttctcaataggtttggcatggacaagatctatgaaggccaagtggaggtaactggcgatgaatacaatgtggaaagcattgatggtcagccaggtgcctttacctgctatttggatgcaggccttgccagaactaccactggcaataaagtttttggcgccctgaagggagctgtggatggaggcttgtctatccctcacagtaccaaacgattccccggttatgattctgaaagcaaggaatttaatgcagaagtacaccgggaagcacatcatggggccagaatgtttgcagattacatgcgctacttaatggaagaagatgaagatgctttacaagaaacagtttctctcaatacctaaaggaacagtgtaactcccgaacttgaatggaggagatgtgaaagcaggggataagaaaacagttaaaagccgaagatcacaaagggcgccagtcgtccaaagagggccaagattccccgcggcgcaccctttggtcaatcgaaaaggcgtcagagataaaccaagtgtcctctccccctcaccgtcagggcgacacgaacagaacaaccaggaacaaaacaccacacaagcaaaaacacagagagacaaaacacgaacacaaccacaacaacgaaacaacacgacaagagacaggacagaaacaagagacacggacacacaaagaagaagaaaggaagaggagagagggaggggagaagggagggggaagaaaggaggaggaaggagacaagagagagcgaagaggaaagaaggaggagagagggtgagaagaaaggagagaaggagagagagagaaagagtgaaagagagacgcagaaggaagagaaagagacaaagcaggagaagagaaggagaaacaaacgagaagaagaagacacaacgagaaacgaaagggaacagaaggagagcacagaagacggacagagaggagcnnnnnnnnnnnnnnnnnnnnnnnnnnnntagagaa

SEQ ID NO: 31331 - DNA, 168 bp, Macaca Mulatta
cggaaggctcctcaggagcaacggagaagatgaagaaagggttgtctgacttcctaggggtgatctcagacacctttgccccctcaccagacaaaaccatcgactgcgatgtcatcaccctgatgggcacaccatctggcacagctgagccctatgatggcaccaagg

SEQ ID NO: 31332 - DNA, 6554 bp, Macaca Mulatta
  misc_feature (1)...(6554): n = A,T,C or G
tgctggcgcctccggcgctacgggctgggcaagatggcggccttcgggatcttgagctacgaacaccggcccctgaagcggccgcggctgnnnnnnnnnnnnnnnnnnnnnnnnnnnnnnnnnnnnnnnnnggatgaactgacggccttgaatgtaaaacaaggtttcaataaccagcctgctgtctctggggatgaacatggcagtgccaagaacgtcagcttcaatcctgccaagnagatcagttccaacttcagcagcattattgcagagaagttacgttgtaataccctccctgacactggtcgcaggaagccccaagtgaaccagaaggacaacttctggctggtgactgcacgatcccagagtgccataaatacttggttcactgacttggctggcaccaagccactcacgcaactagccaaaaaggtnnnnnnnnnnnnnnnnnnnnnnnnnnnnnnnnnnnnnnnnnnnnnnnnnnnnnnnnnnnnnnnnnnnnnnnnnnnnnnnnnnnnnnnnnnnnnnnnnnnnnnnnnnnnnnnnnnnnnnnnnnnnnnnnnnnnnnnnnnnnnnnnnnnnnnnnnnnnnnnnnnnnnnnnnnnnnnnnnnnnnnnnnnnnnnnnnnnnnnnnnnnnnnnnnnnnnnnnnnnnnnnnnnnnnnnnnnnnnnnnnnnnnnnnnnnnnnnnnnnnnnnnnnnnnnnnnnnnnnnnnnnnnnnnnnnnnnnnnnnnnnnnnnnnnnnnnnnnnnnnnnnnnnnnnnnnnnnnnnnnnnnnnnnnnnnnnnnnnnnnnnnnnnnnnnnnnnnnnnnnnnnnnnnnnnnnnnnnnnnnnnnnnnnnnnnnnnnnnnnnnnnnnnnnnnnnnnnnnnnnnnnnnnnnnactctggggaatttgttcagtctgcgtacctgtcccgccgccttgcctacttttgtacacggagactggccctgcagctagatggtgtgagcagtcactcatctcatgttatatctgctcagtcaacaagctcgctacccaccacccctgctcctcagcccccaactagcagcaccccctcgactccctttagtgacctgcttatgtgccctcagcaccggcccctggtttttggcctcagctgtatcctacagnnnnnnnnnnnnnnnnnnnnnnnnnnnnnnnnnnnnnnnnnnnnnnnnnnnnnnnnnnnnnnnnnnnnnnnnnnnnnnnnnnnnnnnnnnnnnnnnnnnnnnnnnnnnnnnnnnnnnnnnnnnnnnnnnnnnnnnnnnnnnnnnnnnnnnnnnnnnnnnnnnnnnnnnnnnnnnnnnnnnnnnnnnnnnnnnnnnnnnnnnnnnnnnnnnnnnnnnnnnnnnnnnnnnnnnnnnnnnnnnnnnnnnnnnnnnnnnnnnnnnnnnnnnnnnnnnnnnnnnnnnnnnnnnnnnnnnnnnnnnnnnnnnnnnnnnnnnnnnnnnnnnnnnnnnnnnnnnnnnnnnnnnnnnnnnnnnnnnnnnnnnnnnnnnnnnnnnnnnnnnnagatctcctcagatgatgatgctgtggtgtcattgctatgtgaatgggctgtcagctgcaagcgttctggtcggcatcgtgctatggtggtagccaagctcctggagaagagacaggcggagattgaggctganagcgttgtggagaatcagaagccgcagatgagaagggttccatcgcctctggctccctttctgctcctagtgctcccattttccaggatgtcctcctgcagtttctggatacacaggctcccatgctgggacccccgaagtgagagtgagcgggtggaattctttaacttagtactgctgttctgtgaactgattcgacatgatgttttctcccacaacatgtatacttgcactctcatctcccgaggggaccttgcctttggagcccctggtccccggcctccctctccctttgatgatcctgccgatgacccagagcacaaggaggctgaaggcagcagcagcagcaagctggannnnnnnnnnnnnnnnnnnnnnnnnnnnnnnnnnnnnnnnnnnnnnnnnnnnnnnnnnnnnnnnnnnnnnnnnnnnnnnnnntgttctcccctactatgccctgtgaggggaagggcagtccatccccggagaagccagatgtcgagaaggaggtgaagcccccacccaaggagaagatcgaagggacccttggggttctttacgaccagccgcgacacgtgcagtatgccacccactttcccatcccccaggncaggaggagtcatgcagccatgagtgcaaccagcggttggtcgtactgtttggggtgggaaagcagcgagatgatgcccgccatgccatcaagaaaatcaccaaggatatcctgaaggttctgaaccgcaaagggacagcagaaactgnnnnnnnnnnnnnnnnnnnnnnnnnnnnnnnnnnnnnnnnnnnnnnnnnnnnnnnnnnnnnnnnnnnnnnnnnnnnnnnnnnnnnnnnnnnnnnnnnnnnnnnnnnnnnnnnnnnnnnnnnnnnnnnnnnnnnnnnnnnnnnnnnnnnnnnnnnnnnnnnnnnnnncaggtctcccggaatgttctggagcagatcacgagctttgcccttggcatgtcataccacttgcctctggtgcattatgtgcagttcatcttcgacctcatggaatattcactcagcatcagtggcctcatcgactttgccattcagnagctgctgaatgaactgagtgtagttgaggctgagctgcttctcaaatcctcggatctggtgggcagctacactactagcctgtgcctgtgcattgtggctgtcctgcgtcactatcacgcctgcctcatcctcaaccaggaccagatggcacaggtctttgaggggnnnnnnnnnnnnnnnnnnnnnnnnnnnnnnnnnnnnnnnnnnnnnnnnnnnnnnnnnnnnnnnnnnnnnnnnnnnnnnnnnnnnnnnnnnnnnnnnnnnnnnnnnnnnnnnnnnnnnnnnnnnnnnnnnnnnnnnnnnnnnnnnnnnnnnnnnnnnnnnnnnnnnnnnnnnnnnnnnnnnnnnnnnnnnnnnnnnnnnnnnnnnnnnnnnnnnnnnnnnnnnnnnnnnnnnnnnnnnnnnnnnnnnnnnnnnnnnnnnnnnnnnnnnnnnnnnnnnnnnnnnnnnnnnnnnnnnnnnnnnnnnnnnnnnnnnnnnnnnnnnnnnnnnnnnnnnnnnnnnnnnnnnnnnnnnnnnnnnnnnnnnnnnnnnnnnnnnnnnnnnnnnnnnnnnnnnnnnnnnnnnnnnnnnnnnnnnnnnnnnnnnnnnnnnnnnnnnnnnnnnnnnnnnnnnnnnnnnnnnnnnnnnnnnnnnnnnnnnnnnnnnnnnnnnnnnnnnnnnnnnnnnnnnnnnnnnnnnnnnnnnnnnnnnnnnnnnnnnnnnnnnnnnnnnnnnnnnnnnnnnnnnnnnnnnnnnnnnnnnnnnnnnnnnnnnnnnnnnnnnnnnnnnnnnnnnnnnnnnnnnnnnnnnnnnnnnnnnnnnnnnnnnnnnnnnnnnnnnnnnnnnnnnnnnnnnnnnnnnnnnnnnnnnnnnnnnnnnnnnnnnnnnnnnnnnnnnnnnnnnnnnnnnnncaagcctacagtaggaatccgctcctcctgtgaccgccacctgctggctgcctcccagaaccgcatcgtggatggagctgtgtttgctgttctcaaggctgtgtttgtacttggnnnnnnnnnnnnnnnnnnnnnnnnnnnnnnnnnnnnnnnnnnnnnnnnnnnnnnnnnnnnnnnnnnnnnnnnnnnnnnnnnnnnnnnnnnnnnnnnnnnnnnnnnnnnnnnnnnnnnnnnnnnnnnnnnnnnnnnnnnnnnnnnnnnnnnnnnnnnnnnnnnnnnnnnnnnnncaggaatgggtaggagaacgttgccttaagtcgctgtgtgaggacagcaatgacctgcaagacccagtgttgagtagtgcccaggcgcagcgcctcatgcagctcatctgctacccacatcgactgctggacaatgaggatggggaaaacccccagcggcagcgcataaagcgcattctccannnnnnnnnnnnnnnnnnnnnnnnnnnnnnnnnnnnnnnnnnnnnnnnnnnnnnnnnnnnnnnnnnnnnnnnnnnnnnnnnnnnnnttggagaacattgccaaggccacaatcgaggttttccaacagtcagcagatacagggtcatcttctggaagtactgcaagcaacatgcccagcagcagcaagaccaagcctgtgctcagncagctctctagagcgctctggtgtatggctggtggcccccctcattgctaaactgcccacctcagtccagggacatgtgttaaaggctgctggggaggaattggagaagggtcagcacctgggttcctcttcacgcaaagaacgtgatcgacaaaagcagaagagngcatgtccctgttgagccagcagcccttcttatcactggtactaacatgtctgaaagggcaggatgaacaacgcgagggactccttacctccctctacagccaggtgcaccagnnnnnnnnnnnnnnnnnnnnnnnnnnnnnnnnnnnnnnnnnnnnnnnnnnnnnnnnnnnnnnnnnnnnnnnnnnnnnnnnnnnnnnnnnnnnnggggcatgtttgacacggtgcagcgcagcacccagcagaccacggagtgggccatgctcctcctggagatcatcatcagcggcactgtcgacatgcagtccaacaantgagctcttcactactgtgttggacatgctgagcgtgctcatcaatgggacattggctgcagacatgtctagcatctcccaaggtagcatggaggaaaacaagcgtgcatacatgaacctggcaaagaagntgcagaaggagttgggggaacgccagtcagacagtctggaaaaggttcgccagctgctgccactgcccaagcagacccgagatgtcatcacgtgtgagccacagggctcccttattgataccaagggcaagaagattgctggcnnnnnnnnnnnnnnnnnnnnnnnnnnnnnnnnnnnggtctacaggtttccaccaaacagaagatctcgccctgggatctttttgaggggttgaagccgtcagcaccgctgtcttggggctggtttggaacagtgcgggtggaccggcgagtggctcgaggagaggagcagcagcggttgctgctctaccacacacacctgaggccccggccccgcgcctattacctggagccgctgccactgcccccagaagatgaggagccccctgctcctaccctgctagagcctgagaaaaaggctccagagccccccaaaactgacaaaccgggggctgctccacccagtactgaggaacgcaagaagaagtccaccaagggcaagaaacgcagccagccagctgccaagacagaggncaatggannnnnnnnnnnnnnnnnnnnnnnnnnnnnnnnnnnnnnnnnnnnnnnnnnnnnnnnnnnnnnnnnnnnnnnnnnnnnnnnnnnnnnnnnnnnnnnnnnnnnnnnnnnnnnnnnnnnnnnnnnnnnnnnnnnnnnnnnncaggtggccctcgtgtggacccgtaccgccctgtgcgcttaccaatgcagaagctgcccacccgaccgacttaccctggagtgctgcccacaaccatgactggcgtcatgggcctagaaccctcctcttataagacctctgtgtaccggcagcagcaacctgcagtgccccaaggacagcgccttcgccaacagctccaggcaaagatnnnnnnnnnnnnnnnnnnnnnnnnnnnnnnnnnnnnnnnnnnnnnnnnnnnnnnnnnnnnnnnnnnnnnnnccagggctatactccttatgtttctcatgtgggattgcagcaacacacaggccctgcaggtaccatggtgccccccagctactccagccagccttaccagagcacccacccttctaccaatcctactcttgtagatcctacccgccacctgcaacagcggcccagtggctatgtgcaccagcaggcccccacctatggacatggactgacctccactcaaaggnnnggttttcacaccagacactgcagcagacacccatgataagtaccatgactccaatgagtgcccagggcgtccaggcaggcgtccgctcaacagccatcctacctgnnnnnnnnnnnnnnnnnnnnnnnnnnnnnnnnnnnnnnnnnnnnnnnnnnnnnnnnnnnnnnnnnnnnnnnnnnnnnnnnnnnnnnnnnnnnnnnnnnnnnnnnnnnnnnnnnnnnnnnnnnnnnnnnnnnnnnnnnnnnnnnnnnnnnnnnnnnnnnnnnnnnnnnnnnnnnnnnnnnnnnnnnnnnnnnnnnnnnnnnnnnnnnnnnnnnnnnnnnnnnnnnnnnnnnnnnnnnnnnnnnnnnnnnnnnnnnncccagttccagcgccaggggcttcagcagacccagcagcagcaacagacagcagctttggtccggcaacttcaacaacagctct

SEQ ID NO: 31333 - DNA, 1729 bp, Macaca Mulatta
  misc_feature (1)...(1729): n = A,T,C or G
gtcgtcgggctcgttgctggcgcaaccagggcggaaactgccggcgttgctgtagctcgtctgggaattacaccgggggactggcccgcccacttagtgcctgcgggaactcgggccgggggactcttcggaaactccaagactcagagaaatatnnnnnnnnnnnnnnnnnnnnnnnnnnnnnnnnnnnnnnnnnnnnnnnnnnnnnnnnnnnnnnnnnnnnnnnnnnnnnnnnnnnnnnnnnnnnnnnngggagcagaacagcctttccttcaggatgtctgacatctgtagctccaaacaggcagaatggagctctaaaacctcctaccagcggagnnnnnnnnnnnnnnnnnnnnnnnnnnnnnnnnnnnnnnnnnnnnnnnnnnnnnnnnnnnnnnnnnnnnnnnnnnnnnnnnnnnnnnnnnnnnnnnnnnnnnnnnnnnnnnnnnnnnnnnnnnnnnnnnnnnnnnnnnnnnnnnnnnnnnnnnnnnnnnnnnnnnnnnnnnnnnnnnnnnnnnnnnnnnnnnnnnnnnnnnnnnnnnnnnnattgctgaacaacttttgtatgaacactggaaaaagaacaacccgaaacttcgagagnnnnnnnnnnnnnnnnnnnnnnnnnnnnnnnnnnnnnnnnnnnnnnnnnnnnnnnnnnnnnnnnnnnnnnnnnnnnnnnnnnnnnnnnnnnnnnnnnnnnnnnnnnnnnnnnnnnnnnnnnnnnnnnnnnnnnnnnnnnnnnnnnnnnnnnnnnnnnnnnnnnnnnnnnnnnnnnnnnnnnnnnnnnnnnnnnnnnnnnnnnnnnnnnnnnnnnnnnnnnnnnnnnnnnnnnnnnnnnnnnnnnnnnnnnnnnnnnnnnnnnnnnnnnnnnnnnnnnnnnnnnnnnnnnnnnnnnnnnnnnnnnnnnnnnnnnnnnnnnnnnnnnnnnnnnnnnnnnnnnnnnnnnnnnnnnnnnnnnnnnnnnnnnnnnnnnnnnnnnnnnnnnnnnnnnnnnnnnnnnnnnnnnnnnnnnnnnnnnnnnnnnnnnnnnnnnnnnnnnnnnnnnnnnnnnnnnnnnnnnnnnnnnnnnnnnnnnnnnnnnnnnnnnnnnnnnnnnnnnnnnnnnnnnnnnnnnnnnnnnnnnnnnnnnnnnnnnnnnnnnnnnnnnnnnnnnnnnnnnnnnnnnnnnnnnnnnnnnnnnnnnnnnnnnnnnnnnnnnnnnnnnnnnnnnnnnnnnnnnnnnnnnnnnnnnnnnnnnnnnnnnnnnnnnnnnnnnnnnnnnnnnnnnnnnnnnnnnnnnnnnnnnnnnnnnnnnnnnnnnnnnnnnnnnnnnnnnnnnnnnnnnnnnnnnnnnnnnnnnnnnnnnnnnnnnnnnnnnnnnnnnnnnnnnnnnnnnnnnnnnnnnnnnnnnnnnnnnnnnnnnnnnnnnnnnnnnnnnnnnnnnnnnnnnnnnnnnnnnnnnnnnnnnnnnnnnnnnnnnnnnnnnnnnnnnnnnnnnnnnnnnnnnnnnnnnnnnnnnnnnnnnnnnnnnnnnnnnnnnnnnnnnnnnnnnnnnnnnnnnnnnnnnnnnnnnnnnnnnnnnnnnnnnnnnnnnnnnnnnnnnnnnnnnnnnnnnnnnnnnnnnnnnngccttatggacatccaaaaattgcttggaactgacttcatgggtactataagcacagaacaagggatgctgaggcttctgatcccagccgccaggcagtcttacagggctctgtta

SEQ ID NO: 31334 - DNA, 168 bp, Macaca Mulatta
aggctccccgggctcaggtctgctgcctggcagcgcggtcctggcttaaaacccgcttggttggagacgggacaactgtagattcttgtgccaaaaaataatcagaaagaaactcccctggtcgggacagcgccccgtggaggttcccggaggtggcggcggtgggac

SEQ ID NO: 31335 - DNA, 623 bp, Macaca Mulatta
  misc_feature (1)...(623): n = A,T,C or G
atgaaacaggtattactgtagccagtcttgaaagattcagcacatatacttcagataaagannnnnnnnnnnnnnnnnnnnnnnnnnnnnnnnnnnnnnnnnnnnnnnnnnnnnnnnnnnnnnnnnnnnnnnnnnnnnnnnnnnnnnggaaaaagtagccattgatgcttttccaggtgatgaaaatcttttcactggagtaggatttggatgaactacaacaagaattaaatacgcttgatttacaagaatgacatcaaacacgtcgctgaaaaaattaagtcagctcaacatgagttgaaattgactacattaatttctttccacctaaaatcaacaggatgtttatttcctatgctgattctgaaggagttaacctcctgcgaaaaaggaatattgtccctacgtcttctcttctgactttggctacatctcatagtaagttcagagtagttcatgataaattgaaaatataatggtcattgcagaaaatgattgattgttgtaactgtccacccaagtaagaagtgtatctgcttttccatctttggttttcatttgggcatgtgctattaccagaaacaacaaacttacatttaaaatacccttcatttgacacagtt

SEQ ID NO: 31336 - DNA, 421 bp, Macaca Mulatta
tttggatcaccacctgtgtgaactgcagtcagagttgtttaggtgtgatctggcaatgctatccagcagctttggagaccaatggtcagtcttttcctggccagagcaaagattgaaggccctcccacttgaactgacagcctgtgagccccttgggggcatagactgccttccttggacccttccaaagtgtgtggtacggaggtcagtgcacagaatattcacccagcatcatgaatcaacttgggaggagtcaaccaaatgaacagtctaccaagaatttcaaataaagtcaaaacccccacagtgctgcctctgtctttattatttatttgtctgttcctgccaccttctccagaggtcaagactaaaagtgcagagctcattcacagccaaaaacaccaccaaaagtgatggcact

SEQ ID NO: 31337 - DNA, 135 bp, Macaca Mulatta
ccttgttcccatcaggatacctaatccctctcacccagtgctcatccctgggggcagagtccattttgtctagtaaagaaaactcaggtgctctttccccaaaccacaggatttacagctccccaattgcaggtg

SEQ ID NO: 31338 - DNA, 167 bp, Macaca Mulatta
ggaaaaacaaacgaaggaagccctgactcggaagcagcagaaatgccgacggaaaaaccaggatgaggaatcccaggaggcccctgagctcctgaagcgccctaaggagtacactgtgcgcttcacttttccaggccccccaccactcagccctcctgtgctgggtc

SEQ ID NO: 31339 - DNA, 545 bp, Macaca Mulatta
aagaaatactatttggccaggcctgatgttatcaagggcaggttttggggacgcctgtgttccttgtgagttcccttttcgagaaccgtggcccccagcagattctccttcagggagagaaaacgtggcccccctaggtccccacccagggcataccgcagcgaggagggttttgcagactggcactaaaccccgtccccatgcacagaagcagccggcaaccccaaagcatatggtgcaacttttcgtggctctgaattacctcctcagcatttagaatcctggcccagcctagcagcttccttctggtcgtcagaagtgatatagtcacagttttgacaggtgggggtagggacagccatatgttgcctcccgatgtatatatatagaacagccactacacacagagaatggtgtagtattatgcaatgagatgaaacatagcaccaacttgcggactgtggcatttcccccagatctggaaattgcagtggtgaggggcttagctggcctttctcagcccaaagttagtccatttagcacag

SEQ ID NO: 31340 - DNA, 857 bp, Macaca Mulatta
  misc_feature (1)...(857): n = A,T,C or G
gggcaagaccatcacccttgaggtggagcccagtgacactattgaannnnnnnnnnnnnnnnnnnnnnnnnnnnnnnnnnnnnnnnnnnnnnnnnnnnnnnnnnnnnnnnnnnnnnnnnnnnnnnnnnnnnnnnnnnnnnnnnnnnnnnnnnnnnnnnnnnnnnnnnnnnnnnnnnnnnnnnnnnnnnnnnnnnnnnnnnnnnnnnnnnnnnnnnnnnnnnnnnnnnnnnnnnnnnnnnnnnnnnnnnnnnnnnnnnnnnnnnnnnnnnnnnnnnnnnnnnnnnnnnnnnnnnnnnnnnnnnnnnnnnnnnnnnnnnnnnnnnnnnnnnnnnnnnnnnnnnnnnnnnnnnnnnnnnnnnnnnnnnnnnnnnnnnnnnnnnnnnnnnnnnnnnnnnnnnnnnnnnnnnnnnnnnnnnnnnnnnnnnnnnnnnnnnnnnnnnnnnnnnnnnnnnnnnnnnnnnnnnnnnnnnnnnnnnnnnnnnnnnnnnnnnnnnnnnnnnnnnnnnnnnnnnnnnnnnnnnnnnnnnnnnnnnnnnnnnnnnnnnnnnnnnnnnnnnnnnnnnnnnnnnnnnnnnnnnnnnnnnnnnnnnnnnnnnnnnnnnnnnnnnngcgcaccctgtctgactaccacatccagaaagagtccaccctgcacctcgtgcctcgccctcagaggggggggatgcaaatctttcgtgaaagaccctcactgggcaaagaccattaccctttgaggtgggagccccaccgaacccattgtagaaatggtcaaggccaaaaatccccggaacaggggaaagggcttcccccccctgaacccagccaaaaggttgggatccttttgcctgggggaaaac

SEQ ID NO: 31341 - DNA, 635 bp, Macaca Mulatta
  misc_feature (1)...(635): n = A,T,C or G
gcgaggagggaggctcagccgaggagcggagactcgagccgccgtccagcagccactactgtctttacagctaccgcggaagcagnnnnnnnnnnnnnnnnnnnnnnnnnnnnnnnnnnnnnnnnnnnnnnnnnnnnnnnnnnnnnnnnnnnnnnnnnnnnnnnnnnnnnnnnnnnnnnnnnnnnnnnnnnnnnnnnnnnnnnnnnnnnnnnnnnnnnnnnnnnnnnnnnnnnnnnnnnnnnnnnnnnnnnnnnnnnnnnnnnnnnnnnnnnnnnnnnnnnnnnnnnnnnnnnnnnnnnnnnnnnnnnnnnnnnnnnnnnnnnnnnnnnnnnnnnnnnnnnnnnnnnnnnnnnnnnnnnnnnnnnnnnnnnnnnnnnnnnnnnnnnnnnnnnnnnnnnnnnnnnnnnnnnnnnnnnnnnnnnnnnnnnnnnnnnnnnnnnnnnnnnnnnnnnnnnnnnnnnnnnnnnnnnnnnnnnnnnnnnnnnnnnnnnnnnnnnnnnnnnnnnnnnnnnnnnnnaggggcctggagagtcacagaaagtcctatctgagcagctggtttgaggatgttgtatgcccaatccaaagggttgttcttctctttcaggaaaagcttacctttctgctacatgctg

SEQ ID NO: 31342 - DNA, 584 bp, Macaca Mulatta
tccggatggcacagtggatgggacaagggacaggagcgaccagcacagtaagcccatctctatgacacccccttccctttctgacagcttctgtagtcgaggtgggaggaaggtacatatttaagtacaggtacttgcttcttcagggttctattcaggcgtgacacattcagaggtggagtcacataaatgtgtagaatgtctgggtttggaaaatagggagttgtgggggccaccacttacccaaacgtgtcctatttcaagttttttaaagcactctctgctgacccaacagaactggctgccggtgctcgatccctgtatgttttcccaggtttctgtaactagtgaaggatctggcccccaaggctagtcaggggtctgcatgctccatgatgggatgaaccagacgggcatggcggtaaatcctgcacagagatgtgggctccgtttcaagtcaactgactctcctggttatgtttccactgggcttgatttgtgaaatcctagttcataatcgtagtcttacacaacataaattacgcagctttccctctgcgtatcacacagatgtggctgtggta

SEQ ID NO: 31343 - DNA, 855 bp, Macaca Mulatta
  misc_feature (1)...(855): n = A,T,C or G
gccagcagcgccgcggcggttccgggcgcaggggagcgagcccggccccgccagcccagcccagacctactccctccccacgccagggcagacgccgttgctcagagagaaggtggaggaagaaatccagcccctagcacgcgcgcaccatcatggaccattatgattctcagcaaaccaacgattacatgcagccagaagaggactgggaccgggacctgctcctggacccggcctgggagaagcagcagagaaagnagacattcacggcatggtgtaactcccacctccggaaggcgggcacgcagaggagnacatcgaagaggacttccgggatnnnnnnnnnnnnnnnnnnnnnnnnnnnnnnnnnnnnnnnnnnnnnnnnnnnnnnnnnnnnnnnnnnnnnnnnnnnnnnnnnnnnnnnnnnnnnnnnnnnnnnnnnnnnnnnnnnnnnnnnnnnnnnnnnnnnnnnnnnnnnnnnnnnnnnnnnnnnnnnnnnnnnnnnnnnnnnnnnnnnnnnnnnnnnnnnnnnnnnnnnnnnnnnnnnnnnnnnnnnnnnnnnnnnnnnnnnnnnnnnnnnnnnnnnnnnnnnnnnnnnnnnnnnnnnnnnnnnnnnnnnnnnnnnnnnnnnnnnnnnnnnnnnnnnnnnnnnnnnnnnnnnnnnnnagctggaaggatggcctcggcttctgtgccttgatccaccgacaccggcccgagctgattgactacgggaagctgcggaagnnnnnnnnnnnnnnnnnnnnnnnnnnnnnnnnnnnnnnnnnnnnnnnnnnnnnnnnnnnnnnnnnnnnnnnnnnnnnnngacatcgttggaactgcccgaccggatga

SEQ ID NO: 31344 - DNA, 229 bp, Macaca Mulatta
aggtaaccctcactgcagaaactgattgtcgatatgtgtcttggaggagaaagaaattgtatctgctctttgctcagcatcgttatatctcccgcttgttttcagtgctaattggcagtgacattgcagataaactctatgccttgaatgacagggtatatataggaaaaagatatcactatgatattcggctacccaacttctatcaaatgtcaagtccagaaatacg

SEQ ID NO: 31345 - DNA, 1001 bp, Macaca Mulatta
  misc_feature (1)...(1001): n = A,T,C or G
ngagagagcgagtccgtgctagtggcgccgggtcggcctgggtaggcgaagcgggagtggacccggatgccgagcggagccgctgccatgggcctgggcgtcagcgctgagcagcccgcgggcggcgccgagggcttccacctgcacggggtnnnnnnnnnnnnnnnnnnnnnnnnnnnnnnnnnnnnnnnnnnnnnnnnnnnnnnnnnnnnnnnnnnnnnnnnnnnnnnnnnnnnnnnnnnnnnnnnnnnnnnnnnnnnnnnnnnnnnnnnnnnnnnnnnnnnnnnnnnnnnnnnnnnnnnnnnnnnnnnnnnnnnnnnnnnnnnnnnnnnnnnnnnnnnnnnnnnnnnnnnnnnnnnnnnnnnnnnnnnnnnnnnnnnnnnnnnnnnnnnnnnnnnnnnnnnnnnnnnnnnnnnnnnnnnnnnnnnnnnnnnatgtgtaaccatcttcacctgctgcccttgccggtctgcgcccctacacagactatgcggttggttcggaccacatcctccaggagnnnnnnnnnnnnnnnnnnnnnnnnnnnnnnnnnnnnnnnnnnnnnnnnnnnnnnnnnnnnnnnnnnnnnnnnnnnnnnnnnnnnnnnnnnnnnnnnnnnnnnnnnnnnnnnnnnnnnnnnnnnnnnnnnnnnnnnnnnnnnnnnnnnnnnnnnnnnnnnnnnnnnnnnnnnnnnnnnnnnnnnnnnnnnnnnnnnnnnnnnnnnnnnnnnnnnnnnnnnnnnnnnnnnnnnnnnnnnnnnnnnnnnnnnnnnnnnnnnnnnnnnnnnnnnnnnnnnnnnnnnnnnnnnnnnnnnnnnnnnnnnnnnnnnnnnnnnnnnnnnnnnnnnnaggccctgctgcaggcacctgactcctccatggaggatccccttcctgggcctgggagtcccagccagagtgctccagaccctgatggacttccccatttcatggagactcctcttcagcccccacctccagtgcagcgagtcatggacccag

SEQ ID NO: 31346 - DNA, 698 bp, Macaca Mulatta
  misc_feature (1)...(698): n = A,T,C or G
gggcctccctgcttgctgcctccccgggtcctggatgtgaaggccacgactgccagctggcaggtggctgtcccnnnnnnnnnnnnnnnnnnnnnnnnnnnggggcctgggggtgcagccggcctgctccgagctcccctgcagatggaggaggccatccttgtcccctgcgtgctggggctcctgctgctgcccatcctggccgtgttgatggcactgtgtgtgcactgccacagattgccagnnnnnnnnnnnnnnnnnnnnnnnnnnnnnnnnnnnnnnnnnnnnnnnnnnnnnnnnnnnnnnnnnnnnnnnnnnnnnnnnnnnnnnnnnnnnnnnnnnnnnnnnnnnnnnnnnnnnnnnnnnnnnnnnnnnnnnnnnnnnnnnnnnnnnnnnnnnnnnnnnnnnnnnnnnnnnnnnnnnnnnnnnnnnnnnnnnnnnnnnnnnnnnnngccaacagtgtggcgagctacgagaacgagggtgcgtctgggatctgaggtgcctgggttgggtagggaggcggggcccatcctgggctaggctgacccctgtgtcgttacccccagaaccagcctgtgaggatgcggatgaggatgaggnnnnnnnnnnnnnnnnnnnnnnnnggtggtgcttcccgacagcactccggccgctagcactgccgccccatcagctactgcactcagcacccctgg

SEQ ID NO: 31347 - DNA, 632 bp, Macaca Mulatta
  misc_feature (1)...(632): n = A,T,C or G
ggagtccatatgcagcgccgtgcccaccattccctaccacaagctagccggcgtgcgctccatgagccgcggcgcctcgggcactgcgtcgtccgcccgccacgcagactggcgcgtccaggtggccgtgaagcacgtgcacatccacacccctctgctcgacannnnnnnnnnnnnnnnnnnnnnnnnnnnnnnnnnnnnnnnnnnnnnnnnnnnnnnnnnnnnnnnnnnnnnnnnnnnnnnnnnnnnnnnnnnnnnnnnnnnnnnnnnnnnnnnnnnnnnnnnnnnnnnnnnnnnnnnnnnnnnnnnnnnnnnnnnnnnnnnnnnnnnnnnnnnnnnnnnnnnnnnnnnnnnnnnnnnnnnnnnnnnnnnnnnnnnnnnnnnnnnnnnnnnnnnnnnnnnnnnnnnnnnnnnnnnnnnnnnnnnnnnnnnnnnnnnnnnnnnnnnnnnnnnnnnnnnnnnnnnnnnnnnngattgcagattttggtttatcaaaatggcgcatgatgtccctctcacaatcacgaagtagcaaatctgcaccagaaggagggacaattatctatatgccacctgaaaactatgaacctggacaaaaatcaagggccagtatcaagcatgatatatatagn

SEQ ID NO: 31348 - DNA, 101 bp, Macaca Mulatta
tttaaagaagtaccggcgctatgaagtaataatgactgcctataacatcattggtgagagcccagccagcgcacccgtggaggtctttgtcggcgaggctg

SEQ ID NO: 31349 - DNA, 283 bp, Macaca Mulatta
  misc_feature (1)...(283): n = A,T,C or G
tgccggcggcccgggcgggctggcagctagagtgggtgcgatnnnnnnnnnnnnnnnnnnnnnnnnnnnnnnnnnnnnnnnnnnngggccgttcgctgctgcgcggggagagcgaggcggggccgccggggccgccatggagcccgactcggtgattgaggacaagaccatcgagctcatgtgttctgtgccaaggtctttgtgcctaggctgcgccaacctggtagagagcatgtgcgcactgagttgcctgcatagcatgcccagtgtcagatgtctccag

SEQ ID NO: 31350 - DNA, 830 bp, Macaca Mulatta
atagagggacagggaaaacacttcaagcacagaaagagcagagcaggaaaggagatggctcacggctgaggtgggccaggcatcctgaccattctacccactttctcctctttttagctctgaatgcccaggctgccctctcccaagctcgggagcaccagctggcctctgcctcagagctccccttgggctctcgacctgtgccgcagcccccagtacctcgtccggagcactgtgagggagctgcagcaggactcaaggcagcccaggggccacccactcctgctgtgcctccaaatacagatgtcatggcctgcacacagacagccctcttgcagaagctgacctgggcctctgctgaactaggctctagcacctccctggagactagcatccagctgtgtggccttatccgcgcatgtgcggaggccctgcgcagcctgcagcagctgcagcactaagagaagcccctgagaaaaaccctctagaaaaacagctgttcctctgtgtggtttattcttttcctggttccgagtgtgcatgccagccccagctgcactcacgtttttcctacttttggcctctcacctctccactctctgctctccttgacgccctgagatgagttgaacttgtttctgctcagtttcccgtcaggatgcgggagtaggtagatgactatgtgatgcaccttttctaaggaagaggtgatagccttttcaaaggtagcagccagaggggtggaccctagccttgtgtctggcagcacatctgcagcctcctccgccatccggtgcccattccccacctggaagtgagattttgggttc

SEQ ID NO: 31351 - DNA, 146 bp, Macaca Mulatta
  misc_feature (1)...(146): n = A,T,C or G
ngctggaacctgtggacccttcctccaggcacagcagctccgcagccactgctggtctctgcctcagtcacatccaggagctgtgggtgcgcctggcgtggcctgaccctgcccaggctcaggggctgggcacccagcttggccag

SEQ ID NO: 31352 - DNA, 989 bp, Macaca Mulatta
  misc_feature (1)...(989): n = A,T,C or G
ggggctcagccatcgccaagatcgtgggtggcaatgcagcccagctggcacagtttgacccacgggtgaccatgtgggtgtttgaggaagacattggaggcaaaaagctgactgagatcatcaacacgcagcatgagaatgtcaaatacctgccagggcacaagctgcccccaaatgtggtnnnnnnnnnnnnnnnnnnnnnnnnnnnnnnnnnnnnnnnnnnnnnnnnnnnnnnnnnnnnnnnnnnnnnnnnnnnnnnnnnnnnnnnnnnnnnnnnnnnnnnnnnnnnnnnnnnnnnnnnnnnnnnnnnnnnnnnnnnnnnnnnnnnnnnnnnnnnnnnnnnnnnnnnnnnnnnnnnnnnnnnnnnnnnnnnnnnnnnnnnnnnnnnnnnnnnnnnnnnnnnnnnnnnnnnnnnnnnnnnnnnnnnnnnnnnnnnnnnnnnnnnnnnnnnnnnnnnnnnnnnnnnnnnnnnnnnnnnnnnnnnnnnnnnnnnnnnnnnnnnnnnnnnnnnnnnnnnnnnnnnnnnnnnnnnnnnnnnnnnnnnnnnnnnnnnnnnnnnnnnnnnnnnnnnnnnnnnnnnnnnnnnnnnnnnnnnnnnnnnnnnnnnnnnnnnnnnnnnnnnnnnnnnnnnnnnnnnnnnnnnnnnnnnnnnnnnnnnnnnnnnnnnnnnnnnnnnnnnnnnnnnnnnnnnnnnnnnnnnnnnnnnnnnnnnnnnnnnnnnnnnnnnnnnnnnnnnnnnnnnnnnnnnnnnnnnnnnnnnnnnnnnnnnnnnnnnnnnnnnnnnnnnnnnnnnnnnnnnnnnnnnnnnnnnnnnnnnnnnnnnnnnnnnnnnnnnnnnnnnnnnnnnnnnnnnnnnnnnnnnnnnnnnnnnnnnnnnnnnnnnnnnnnnnnnnnnnnnnnnnnnnnnnnnnngtttcccttgttcatggctgtgtacaaggtgtgctacgagggccagccagtgggaaattcatccgctgcctgcagaa

SEQ ID NO: 31353 - DNA, 189 bp, Macaca Mulatta
cagtcgaattgttaactaatcatgaaagcaaagcacagagcgttctgagagcccatatcaggtagctcaagcctgaaggccactctgaccaggccacgtcaaaactgaaactggaggctatggttttgtagtcacctctgtcttccctaagggaaagttgaggctcagagaggtggaactatgggtgaa

SEQ ID NO: 31354 - DNA, 883 bp, Macaca Mulatta
ctacaccacatgtacagtcccacaaatgctagtaaatttatgcatcatcagaaaagtaatcagttatggcggctgtgtagctcagcttttcatatttctggccttgggggctactgaatgtcttctcctggctgtcaggtcccttgataggtttgtagctatttttcagcctctccattactcagttatcatgcactagagactctgtctccagttggcagctgcatcctggattactggttttggtaactcagtgtggttgtctaccctgactctccagctgccactctgtgacccttatgtgatagatcactttctctgtgaagcccctgcaatgctcaagttatcctgtgttgagacaacagcaaatgaggctgaactattccttgtcagtgtgctcttccatctaatacccctaacactcatccttatatcatacgcttttattgtgcgagcagtgttgaggatacagtctgttgaaggtcgacaaaaagcatttgggacatgtggttcccatctaattgtggtgtcacttttttatggtacagctatctccgtgtacgtgcaaccaccttcaccccgctccaaggaccgaggaaagatggtttctctcttctatggaatcattgcacccatgctgaatccccttatatatacacttaggaacaaagaggtaaaggaagcctttaaaaggttggttgcaagagtcttctaatcaagaaataagaaacatgcaaatgataagctttgctaaagacaaaatgtttacttagcttactaatttctctgcaagttgtcctacttttgtcatgactgtagagaacaattgtaatctccctcaaataaaattaccgggacgaagaactatatttgcttctgttgc

SEQ ID NO: 31355 - DNA, 576 bp, Macaca Mulatta
  misc_feature (1)...(576): n = A,T,C or G
agctccagaaactaaaacgatcactttctttcaagaccaagagtttacggagcaaaagtgctgacaacttcttccagcgaaccaacagtgaagacacgaaactgcgagcacacatggtggctgagatcagccccagctccagcccactccctgctccaggaagcctgacgtccacacccgccagggctggcctgcatccaggcggcaaggctcatgcctttcaggatcacatcttcaagaagcccactttctgtgatgtctgcaaccacatgatagtggnnnnnnnnnnnnnnnnnnnnnnnnnnnnnnnnnnnnnnnnnnnnnnnnnnnnnnnnnnnnnnnnnnnnnnnnnnnnnnnnnnnnnnnnnnnnnnnnnnnnnnnnnnnnnnnnnnnnnnnnnnnnnnnnnnnnnnnnnnnnnnnnnnnnnnnnnnnnnnnnnnnnnnnnnnnnnnnnnnnnngcctgtggcaataaggtggaccctgtctacgagaccctccgcttcggcacctccctggcccagaggacaaagaagggcagctccggcagtggctctgactcacctcacagaacctc

SEQ ID NO: 31356 - DNA, 2494 bp, Macaca Mulatta
  misc_feature (1)...(2494): n = A,T,C or G
agtggttcctgtgtgcaggccaaacccctgccagaatagtggtacctgctcccggcataagcggagatccaagttcacctgtgcctgtcctgaccagttcaaggggaaattctgtgaaataggnnnnnnnnnnnnnnnnnnnnnnnnnnnnnnnnnnnnnnnnnnnnnnnnnnnnnnnnnnnnnnnnnnnnnnnnnnnnnnnnnnnnnnnnnnnnnnnnnnnnnnnnnnnnnnnnnnnnnnnnnnnnnnnnnnnnnnnnnnnnnnnnnnnnnnnnnnnnnnnnnnnnnnnnnnnnnnnnnnnnnnnnnnnnnnnnnnnnnnnnnnnnnnnnnnnnnnnnnnnnnnnnnnnnnnnnnnnnnnnnnnnnnnnnnnnnnnnnnnnnnnnnnnnnnnntgcctacccagaggaaatccccactgagccatcaaccaagcttctggggtttgactcctgcggaaagactgagatagcagagaggaagatcaagagaatctatggaggctttaagagcacggcgggcaagcacccttggtaggcgtccctccagtcctcgctgcctctgaccgtgtccatgccccatggccacttctgtggaggggcgctgatccacccctgctgggtgctcactgctgcccactgcaccgannnnnnnnnnnnnnnnnnnnnnnnnnnnnnnnnnnnnnnnnnnnnnnnnnnnnnnnnnnnnnnnnnnnnnnnnnnnnnnnnnnnnnnnnnnnncaagtacacccactacaatgaaagagacgagattccccacaatgatattggcaagttcctctttcatggctctcttgagnnnnnnnnnnnnnnnnnnnnnnnnnnnnnnnnnnnnnnnnnnnnnnnnnnnnnnnnnnnnnnnnnnnnnnnnnnnnnnnnnnnnnnnnnnnnnnnnnnnnnnnnnnnnnnnnnnnnnnnnnnnnnnnnnnnnnnnnnnnnnnnnnnnnnnnnnnnnnnnnnnnnnnnnnnnnnnnnnnnnnnnnnnnnnnnnnnnnnnnnnnnnnnnnnnnnnnnnnnnnnnnnnnnnnnnnnnnnnnnnnnnnnnnnnnnnnnnnnnnnnnnnnnnnnnnnnnnnnnngggtgactctggaggccccctgacttgtgagaaggatggcacctactacgtctatgggatagtgagctggggcctggagtgtgggacgaggccaggggtctacacccaagttaccaaattcctgaattggatcaaagccaccatcaaaagtgaaagtggcttctaaggtactgtcttctggacctcagagcccactctccttggcaccctgannnnnnnnnnnnnnnnnnnnnnnnnnnnnnnnnnnnnnnnnnnnnnnnnnnnnnnnnnnnnnnnnnnnnnnnnnnnnnnnnnnnnnnnnnnnnnnnnnnnnnnnnnnnnnnnnnnnnnnnnnnnnnnnnnnnnnnnnnnnnnnnnnnnnnnnnnnnnnnnnnnnnnnnnnnnnnnnnnnnnnnnnnnnnnnnnnnnnnnnnnnnnnnnnnnnnnnnnnnnnnnnnnnnnnnnnnnnnnnnnnnnnnnnnnnnnnnnnnnnnnnnnnnnnnnnnnnnnnnnnnnnnnnnnnnnnnnnnnnnnnnnnnnnnnnnnnnnnnnnnnnnnnnnnnnnnnnnnnnnnnnnnnnnnnnnnnnnnnnnnnnnnnnnnnnnnnnnnnnnnnnnnnnnnnnnnnnnnnnnnnnnnnnnnnnnnnnnnnnnnnnnnnnnnnnnnnnnnnnnnnnnnnnnnnnnnnnnnnnnnnnnnnnnnnnnnnnnnnnnnnnnnnnnnnnnnnnnnnnnnnnnnnnnnnnnnnnnnnnnnnnnnnnnnnnnnnnnnnnnnnnnnnnnnnnnnnnnnnnnnnnnnnnnnnnnnnnnnnnnnnnnnnnnnnnnnnnnnnnnnnnnnnnnnnnnnnnnnnnnnnnnnactctgatgatctccagcctccactgcttctgccctccgatgctgacatcaaacataccccaagttaaaatgaagctnnnnnnnnnnnnnnnnnnnnnnngttcccacagggcatgctaagaagccccgggagcatttaacaggctcaccctccccttccttttcccctcttctaccctccccgagaaaaagggccctcaaggcaagaatgagaaagaagcaaagccaatctctcatttagacctggcgtctttcttctgaacaaagtagggttcaaaatgcagactgtcgtatccagcgagtccctgaccctttctgcgaatgtaacgagcaagcagtcagcacagcctgggctgccctggcccgggattgatgtagccctggtaggtttgcctctgcagaactaatggctgtgacttcagagaaagccctgcaggaagtttaaccttcgtgtcatctgcctggtcatctcagacccatgaaattaggcgccttgtttgagctgcatttcacacttctttagagctagctgacctttggccaaaaataaactttgaaaa

SEQ ID NO: 31357 - DNA, 925 bp, Macaca Mulatta
  misc_feature (1)...(925): n = A,T,C or G
gccgaggctctggnttatactgagggctcctatgagtgccgagactgtgccaatggcctgcctaggctgcatgggggcagggccaggtcgctgtaagaagtgtagccctggctaccagcaggtgggctccaagtgtctcgacgtggatgagtgtgagacagaggtgtgtccgggagagaatgagcagtgtgaaaacaccgagggcggttatcgctgcatctgtgccgagggctacaagcagatggaaggcatctgtgtgaaggagcagatcccagagtcggcgggcttcttctcagagatgacagaggacgagttggtggttgctggagcagatgttctttggcgtcatcatctgtgcactggccacgctggctgctaagggcgacttggtgttcactgccattttcatcggggctgtggcagccatgactgggtactggtttgtcagagcgcagtgaccgtgtgctggagggcttcatcaaaggcagataatcttggccaccacttgtaggatctcctcccacctacgctgtccccagagcttgggctgccctcctgctggacactcacgacagcttggtttatcttcgagagtggggtaagcaaacctaactgncttacagagccagccaaggtaccaggtctgggcagacaatggccctcaggttaaaagtagccttaccgtggattccatgagtcttcactggcgggactggcagctccccactggtgaatcagaagttttcccaaggtggtgcaatgacttggcccctccgggaggggtcccgtgtgggcgccaggcctctcagtgttgcgccctcgcgcgtctgtccatcccccatgctatatatcgaaacagtgcgtacacaccccgggcggcacctaaatcaagccccgcagactatccgcgcgacccagcccctct

SEQ ID NO: 31358 - DNA, 93 bp, Macaca Mulatta
agatcctcccactgatcagggggacaaacctgctctcagtttaccacttgcatctttcgacgcatctgaccttgaatgcgctctatgtatgag

SEQ ID NO: 31359 - DNA, 98 bp, Macaca Mulatta
ggtgagccagccatgagagggtatctcgtggccatattcctgagtgctgtcttcctctattatgtactgcattgtatattatggggaacgaatgtcta

SEQ ID NO: 31360 - DNA, 569 bp, Macaca Mulatta
tcgtcactgcctttacttcacatattgatttccgttaaaataccagccagtacatgggggtgcatttgaggtctgttctttccaaagtacactgtttcaaactttactatggccctggcctagcatacatacacattttattttattatgcatgaagtaatatgcacacatttttaaaatgcacctggaatatataaccagtgttgtggatttaacagaaatgtacagcaaggggatttataactgggggagggtgaagtgaagacaatgacttactgtatatgaaaacacatttttcatagggaaggatacagaagcatgtgagactggttccatggcctcttcagatctctaacttcaccatattaccacaaacatactaaccagcaggaatgccttaccctcatgttcttaattcttagctcattctcgctgtatgttactaagtttttatggcttttgtgcattatcgagatactgtatcatgacaaagactgagtaaattgtgcatctggtggtttcagaaatgtgttatcacccagaagaaaatagtggtgtgatttggggat

SEQ ID NO: 31361 - DNA, 228 bp, Macaca Mulatta
tagtgctgtaataaaaggaactatgcagagatccactttacacggtacccacagcgttggagttatttttgtttttcctcgccttctatttgtaagttccttgaggacagtgttccctatttgtagaactctggaaagatctctcagctgcaaattcattttctcggtaaaaacaatctgagttgctgtaactgccaagttaagtgttttctttcagagtcatctact

SEQ ID NO: 31362 - DNA, 1679 bp, Macaca Mulatta
  misc_feature (1)...(1679): n = A,T,C or G
tggagcagcagggcttcatccacaccaaaggctgcgtgggccagtttgagaagtggctgcaggacaacctgattgtggtggcgggagtcttcgtgggcatcgccctcctccagncagatctttggcatctgcctggcccagaacctcgnnnnnnnnnnnnnnnnnnnnnnnnnnnnnnnnnnnnnnnnnnnnnnnnnnnnnnnnnnnnnnnnnnnnnnnnnnnnnnnnnnnnnnnnnnnnnnnnnnnnnnnnnnnnnnnnnnnnnnnnnnnnnnnnnnnnnnnnnnnnnnnnnnnnnnnnnnnnnnnnnnnnnnnnnnnnnnnnnnnnnnnnnnnnnnnnnnnnnnnnnnnnnnnnnnnnnnnnnnnnnnnnnnnnnnnnnnnnnnnnnnnnnnnnnnnnnnnnnnnnnnnnnnnnnnnnnnnnnnnnnnnnnnnnnnnnnnnnnnnnnnnnnnnnnnnnnnnnnnnnnnnnnnnnnnnnnnnnnnnnnnnnnnnnnnnnnnnnnnnnnnnnnnnnnnnnnnnnnnnnnnnnnnnnnnnnnnnnnnnnnnnnnnnnnnnnnnnnnnnnnnnnntgaagggtggggagcctggacccctctctgaagagggcgcagcctgggaagggcggctctgctggggcctgcggtgcgagtagagtgcccaggagagggtctgaggggtgggttggggtcaggacattcctgcaaaagaagcagctggaatccatgggactggggggagcctgtttgggggctctggatggttgattcctaggaatcaagttcagcatcttctccgtggctgcagagctgcctgatgggcactagagggcgcgccacccccacactccctgggtctggcttcctcctgcaacctcactgtggtagagcctgtgcctgcctactagcgccccgggcttccgagagtttgggaatttctcaagagccaactggctcaggcttgggaaggctgactcctgccctcagctccgcctcatcagctatgtgaannnnnnnnnnnnnnnnnnnnnnnnnnnnnnnnnnnnnnnnnnnnnnnnnnnnnnnnnnnnnnnnnnnnnnnnnnnnnnnnnnnnnnnnnnnnnnnnnnnnnnnnnnnnnnnnnnnnnnnnnnnnnnnnnnnnnnnnnnnnnnnnnnnnnnnnnnnnnnnnnnnnnnnnnnnnnnnnnnnnnnnnnnnnnnnnnnnnnnnnnnnnnnnnnnnnnnnnnnnnnnnnnnnnnnnnnnnnnnnnnnnnnnnnnnnnnnnnnnnnnnnnnnnnnnnnnnnnnnnnnnnnnnnnnnnnnnnnnnnnnnnnnnnnnnnnnnnnnnnnnnnnnnnnnnnnnnnnnnnnnnnnnnnnnnnnnnnnnnnnnnnnnnnnnnnnnnnnnntgattttttaagttgttggcagaaacgaattcagaaatcaaatctgcaggccaaacaaggtgcagggcccagttttggccccatgcccctgtaggtccctccaggacagtcacccctggggccctggctgctctgctattcagggatgctgggcactactgctgggtggccagggtgtggggcatgcgcccagcaatgtggctccttggccccgctggacagtgtcctgggcccctgacaggcgctggctgggagtggtttatacatatacaataaatgcagctcgcagca

SEQ ID NO: 31363 - DNA, 108 bp, Macaca Mulatta
tatctagtatatgttatctgaattttgttttatacaaataaatttatatgtgtacatactactttgtctctcttatgtccacacataaaaccaaatggtttcttttta

SEQ ID NO: 31364 - DNA, 1806 bp, Macaca Mulatta
  misc_feature (1)...(1806): n = A,T,C or G
ctgctgttagagcatttggaatgcctcgtctccaggcatgagcggtctcttaggatgaccgtggtgaagagacaagcgcagtccccagcaggcgtgtccagcgaagtggaagtgctgaaagcactgaagtccttatttgaacaccacaaagctctggatgaaaaggtgnnnnnnnnnnnnnnnnnnnnnnnnnnnnnnnnnnnnnnnnnnnnnnnnnnnnnnnnnnnnnnnnnnnnnnnnnnnnnnnnnnnnnnnnnnnnnnnnnnnnnnnnnnnnnnnnnnnnnnnnnnnnnnnnnnnnnnnnnnnnnnnnnnnnnnnnnnnnnnnnnnnnnnnnnnnnnnnnnnnnnnatcttctgatggttctttaagccatgaggaagaccttgctaaagtaattgagctccaagaaatcataagtaagcagtcaagggaacagagccaaatgaaagaacgcctggcttccctctccagtcacgtgtcagagctggaagaggatctggacactgctagaaaagatctcatcaaatctgaagaaatgaacacaaaattgcaacgagatgtccgtgaannnnnnnnnnnnnnnnnnnnnnnnnnnnnnnnnnnnnnnnnnnnnnnnnnnnnnnnnnnnnnnnnnnnnnnnnnnnnnnnnnnnnnnnnnnnnnnnnnnnnnnnnnnnnnnnnnnnnnnnnnnnnnnnnnnnnnnnnnnnnnnnnnnnnnnnnnnnnnnnnnnnnnnnnnnnnnnnnnnnnnnnnnnnnnnnnnnnnnnnnnnnnnnnnnnnnnnnnnnnnnnnnnnnnnnnnnnnnnnnnnnnnnnnnnnnnnnnnnnnnnnnnnnnnnnnnnnnnnnnnnnnnnnnnnnnnnnnnnnnnnnnnnnnnnnnnnnnnnnnnnnnnnnnnnnnnnnnnnnnnnnnnnnnnnnnnnnnnnnnnnnngcaaggcaaagagaaaaaatgaacgaagaacataataaacgtttatcagacactgttgacaagctactttcagaatctaatgagaggcttcaacttcatcttaaagagagaatggctgctttggaagataagnnnnnnnnnnnnnnnnnnnnnnnnnnnnnnnnnnnnnnnnnnnnnnnnnnnnnnnnnnnnnnnnnnnnnnnnnnnnnnnnnnnnnnnnnnnnnnnnnnnnnnnnnnnnnnnnnnnnnnnnnnnnnnnnnnnnnnnnnnnnnnnnnnnnnnnnnnnnnnnnnnnnnnnnnnnnnnnnnnnnnnnnnnnnnnnnnnnnnnnnnnnnnnnnnnnnnnnnnnnnnnnnnnnnnnnnnnnnnnnnnnnnnnnnnnnnnnnnnnnnnnnnnnnnnnnnnnnnnnnnnnnnnnnnnnnnnnnnnnnnnnnnnnnnnnnnnnnnnnnnnnnnnnnnnnnnnnnnnnnnnnnnnnnnnnnnnnnnnnnnnnnnnnnnnnnnnnnnnnnnnnnnnnnnnnnnnnnnnnnnnnnnnnnnnnnnnnnnnnnnnnnnnnnnnnnnnnnnnnnnnnnnnnnnnnnnnnnnnnnnnnnnnnnnnnnnnnnnnnnnnnnnnnnnnnnnnnnnnnnnnnnnnnnaggttgattcaggaagaaaaagaaaacacagagcagcgggcagaggagattgaaagtcgagttggcagcggaagtctagacaatcttggtcgttttagatcaatgagctccattcccccctaccctgcttcctcacttgctagctcctcccctccgggcagtgggcgctccaccccacgaaggatccctcacagcccagcccgggaagtggacagactgggcgtcatgaccct

SEQ ID NO: 31365 - DNA, 260 bp, Macaca Mulatta
  misc_feature (1)...(260): n = A,T,C or G
taagtacaaggtggactgtgcatgcctcaaagaaaacccagagtgccctgttctaaaacgtagttctgaatccatggaaaatatcagtagtggttatgagaccagacgnnnnnnnnnnnnnnnnnnnnnnnnnnnnnnnnnnnnntacacaaaatcagaatattactttggattgtgaaggaacaaccaacaaaatgaagagcccagaaactaaacaaagaaagctttctccattgagactatcagtatcaaataatcag

SEQ ID NO: 31366 - DNA, 2973 bp, Macaca Mulatta
  misc_feature (1)...(2973): n = A,T,C or G
agacgccgaggataactacccttttggaacatgtcaacagaggaaactttttcctcacttccatcccccaaatttgattgggaacaagtttgtccctcttaggggatcaccccacagagggcctgggtgttacttatcagatnnnnnnnnnnnnnnnnnnnnnnnnnnnnnnnnnnnnnnnnnnnnnnnnnnnnnnnnnnnnnnnnnnnnnnnnnnnnnnnnnnnnnnnnnnnnnnnnggaagtgacacctgctgcaggcatgtaccagaaagtaagtcctcagcaggagaaacacaaacaaaattttgctccatttaatgtcttggtgcctcgatttaagagctacccaaannnnnnnnnnnnnnnnnnnnnnnnnnnnnnnnnnnnnnnnnnnnnnnnnnnnnnnnnnnnnnnnnnnnnnnnnnnnnnnnnnnnnnnnnnnnnnnnnnnnnnnnnnnnnnnnnnnnnnnnnnnnnnnnnnagctgtccacggacaaagactttagaaagcatcggaaccgtgtggcctacctaagcctgtattataattgagcagctgtgactaccttcacatgctcctattatacacagactctccaggactgaggacagagctgctcttcttcttctgcattactgtgcccccttgtctggcagcctggagcccagggagggacaaggggcttatagctgctgtatgagaacataaagactagtgcacagtgctatctccatctactggcttgtggcatacacatgcgcgtctgggtctgtgggttcctgttgggtgctgagttgggtgatttcattttagtgacatatttgtgggcccctgctctctagttctaattgctaggtgccaattttatatattctaccgctagccctggtcataggagactgttagcctgtacatatcaagggtttggatgggatttgggcttacgagatacagaaaacacttaaggcagattaaaacatgtcttggagctcttctaattctgttcctcagtatggagtgggaaggtcttgatttgattggctttcccagattgacatnnnnnnnnnnnnnnnnnnnngccctggcgcatacaacccagagaagaagccacctccaaaaattgcctggccaatgaaatttggatctccagactgggctcaggttccatgtctacagaaaaggaccctaaaagctgagnagctgtccacggacaaagactttagaaagcatcggaaccgtgtggcctacctaagcctgtattataattgagcagctgtgactaccttcacatgctcctattatacacagactctccaggactgaggacagagctgctcttcttcttctgcattactgtgcccccttgtctggcagcctggagcccagggagggacaaggggcttatagctgctgtatgagaacataaagactagtgcacagtgctatctccatctactggcttgtggcatacacatgcgcgtctgggtctgtgggttcctgttgggtgctgagttgggtgatttcattttagtgacatatttgtgggcccctgctctctagttctaattgctaggtgccaattttatatattctaccgctagccctggtcataggagactgttagcctgtacatatcaagggtttggatgggatttgggcttacgagatacagaaaacacttaaggcagattaaaacatgtcttggagctcttctaattctgttcctcagtatggagtgggaaggtcttgatttgattggctttcccagattgacataaaactccaaaactaaaaaattgcccctttcctatgacatcatccatttagtctgtgagtcaacatatatactgaggtcctactatgtgttgagcagagcagtaagcactggggatatggcaggaatcaaaataaacttatctactaagtccttgggcctggcctgaagtcagaggaggactccccagagcagctagtggattgggtctgccctccaatccaaatgaccccctagaaccttacaagtcattctggggttacaaaggtcataactttatagccccagactgacttgtaagcagctacgtttaaagtactttcccagactctcgggcctgagaggtagacccctttccttccagcactagctgaaatcatcaagtataggtttgtccaggattggcgctaaatatgatctaatcttttaagaagagggtcctttagtacccacttaggcttcttcgtaattaccagaaaggtggtaagcctgcatgtgtctggacaccaaaaatcgagaagctgccagtggctgcaggacagcctactgtaaccctcatggccaccccctgatgagcattagctggggaaagggctagcaagaggtgaagcctcctggccatatgatgccgtggggggcctaattccttaaaggccaaggtcttctgaaacaataatggtgaaggacagaaaagtctttatgagaaatcacataggacatattaagataacgataaagataacctcagcaaaaacatacctaatatatacacttcttttaatctgatgatttaatgatttctgttttcttgtcaagaagtattcatgacttgagataagtcaggattaactctcacctctcctgcacacctccctcctttttctcctttgtacccacatgtgcagattttttcagaggtgataatttagcattcaatgttttctctttttctgcttcagtgtcttaggtccctttggaggatattgatgagggtgggggtggggacagaacatctttcacactgtttagtatataccgctcaaagcttttcccagggaagggaactctctaacatagtaatctgatttgatgaaagataaaattttaatatagcttcagttaaccttcagggtccttgaaagcactacattgtatataaaagtaataaagtacaaatgaacccaaggacgaaaacat

SEQ ID NO: 31367 - DNA, 789 bp, Macaca Mulatta
  misc_feature (1)...(789): n = A,T,C or G
aggtatgtgacaatcagctctctagtgttcagtatggactcacaattcctctgcgcctccagtaacaccgagacggtacacatcttcaagctggagcaggtcaccaacannnnnnnnnnnnnnnnnnnnnnnnnnnnnnnnnnnnnnnnnnnnnnnnnnnnnnnnnnnnnnnnnnnnnnnnnnnnnnnnnnnnnnnnnnnnnnnnnnnnnnnnnnnnnnnnnnnnnnnnnnnnnnnnnnnnnnnnnnnnnnnnnnnnnnnnnnnnnnnnnnnnnnnnnnnnnnnnnnnnnnnnnnnnnnnnnnnnnnnnnnnnnnnnnnnnnnnnnnnnnnnnnnnnnnnnnnnnnnnnnnnnnnnnnnnnnnnnnnnnnnnnnnnnnnnnnnnnnnnnnnnnnnnnnnnnnnnnnnnnnnnnnnnnnnnnnnnnnnnnnnnnnnnnnnnnnnnnnnnnnnnnnnnnnnnnnnnnnnnnnnnnnnnnnnnnnnnnnnnnnnnnnnnnnnnnnnnnnnnnnnnnnnnnnnnnnnnnnnnnnnnnnnnnnnnnnnnnnnnnnnnnnnnnnnnnnnnnnnnnnnnnnnnnnnnnnnnnnnnnnnnnnnnnnnnnntaatcttgtgccgtggaaatcagaagggcaaaacgaagcagtcatgatgagaagcacacctcagaaatcaggacatccccctatcaggtggttttggagaaaacaaggaaggtggaagaatggagtgcaattgtgtgagcagaaaggggggcaggaatcccgggtgctgcactgcttaaccacagga

SEQ ID NO: 31368 - DNA, 607 bp, Macaca Mulatta
gagctagagagtatgccctcagacagtgtggggccaggaagggaaaagtcactgataaaagaacctctgtagatatgtcatttaaaactatgagaaaacagcatgaaaagatgcctgaactatccgtcttgaggaaagattagcacttctgatgaaaatcacagtctgtcaaaggtattaaaagaaaaatttttttaaaaacccgttagaaacattgaactaatatacactgagaaaaaccatataacttacttatagacatataattacatgatcctctcttactacaaatgaggctaacacatggtaaaatggttctcaagtcagttatgtcattaaatacttctctttcagaattatttaattattctctttaagttcattttatataatctacagtttagatgcttggacatatatcctgcccaaggcactaagtgtaatatagaaaaaggatagaagccattttctctatcttcaaaataatgtgccatctccattaaaattaagactttaaagttctataattttttctttgtattcaaccttttaatacctccaaattacaaatatctattttttcactacatagatatataattacact

SEQ ID NO: 31369 - DNA, 707 bp, Macaca Mulatta
ggatatcactgtcacagtggtatagatgaactgaatgaggagctcattcagcgaagaaagctctgaagatgaaggagaatatgaagaggtgagaaaagatcaggatcctgttggtgaaatgaaggatgaaggggaagagacattaaattatcctgatactaccattgacttgtcccaccttcaaccccaaaggtccctccagaaattggcttcaaaagaggaatcttctaattctagtgacagtaaatcacagagccggagacatttgtcagccaaggaaagaagggaaatgaaaaagaaaaagcttccaagtgactcaggagatttagaagtgatagagggaaaggataaagaaaaagaaagtactgtacacattgaaactcatcagaacacaagcaaaaatgttgcggctgtacagccaatgaaacgaggacaaaagagtaaaatgaaaaaaatgaaagaaaaatacaaagaccaggatgaagaagaccgtgaacttatcatgaaattgctggggtctgccggttcaaacagagaagaaaaagggaagaaggggaagaaaggaaaaacaaaggatgaaccggtgaagaaacagccccagaaacccagaggtggacaaaggatctctgacaacattaagaagaaactccgttccttgaggttataactcatgagttacaagactttgctgtagatgatccacatga

SEQ ID NO: 31370 - DNA, 455 bp, Macaca Mulatta
  misc_feature (1)...(455): n = A,T,C or G
tgtcccataagcaagcctcatccttagaaattctgtattttcattctaccttttgtccagactccctgccttccaaatgaattcattgacaatctcctaataaattgacaaattgccctccaacatccccctacctctttgacttcaggacatttattcatcgtgcctaaggaatttgaagactgcctccatcatttgtagggccacagatcttaatgcctccgaccttgaagtccagtgaagtctctctcttaaagtctttcgcaaacctttttgcaccttgttatttccatataccaaaataaacctctattttattggcatcgaaaactgaatatggctgttattctctttttaaaaagngggtttatatttgggttaggggtgattacatttaactactcctgtagggcagacagcaaaggttagtcaaacttccaacagaggtcaactga

SEQ ID NO: 31371 - DNA, 267 bp, Macaca Mulatta
atgaagggccttgcagctgccctccttgtcctctgcaccgtggccctctgctcctgtgcacaagtgggtaccaagaaagagttctgctgcctcgtctatacctcccgacagattccacaaaagtttatagttgactattctgaaaccagcccccagtgcaccaaaccaggtgtcatcctcctctccaagaaaagacggcagatctgtgctgaccccaacaaaaagtgggtccagaaatacatcagtgacctgaagctgaatgcctga

SEQ ID NO: 31372 - DNA, 1847 bp, Macaca Mulatta
  misc_feature (1)...(1847): n = A,T,C or G
caggccattcaacagaggaagaaattaaatcatcctttctagaaacgttaaaagttgcctgcagcaagtctgatgaagtttcatatggtgaatttgaagattactatgaaggtttaagtatagaaataatagatgatgaagattttgttaccatcttgcgtactccatgggggatttagtctttaataataacatatgtcatcagcactaagcattttattggagagatgatttcagtgtaaaggatgatcaaacactggaatatattttcctaggacttcctttattctgnnnnnnnnnnnnnnnnnnnnnnnnnnnnnnnnnnnnnnnnnnnnnnnnnnnnnnnnnnnagaactatccagaaggatagatgtaggggcatgtgagtgtttgtgcatgtatatgcctgctcacatgttcatacatttgtaaaggtgtctttttggtttattacttatcttgcatatattttagaggtcattttttattaacttcaatagaaaagttatgtctgcatcaaacaatatggcagcatgtatttattaaccaagtttcctgtcctttcacattgtttttagctatctcttcctcagaatatatttgccaccattgtcaatttgataaattagaattgggcctaaagccagtgaaataattcaacatgtttttaacatatgaatatattaaaggatatgcaagagaaatgtttcaagcagtgtgattatagatgttttctgtatatagaatatttagaatgatggaggtttacccctatgatgctcatttaaatactgacttgtctttgtaatctttgtcttctaaattatgtactgttgttggttaaatagagcacaatgtagttttttctatgaccagttgtatttgttcttttattctgttttaaaacagcatccctttttaccagcatacaattgttattnnnnnnnnnnnnnnnnnnnnnnnnnnnnnnnnnnnnnnnnnnnnnnnnnnnnnnnnnnnnnnnnnnnnnnnnnnnnnnnnnnnnnnnnnnnnnnnnnnnnnnnnnnnnnnnnnnnnnnnnnnnnnnnnnnnnnnnnnnnnnnnnnnnnnnnnnnnnnnnnnnnnnnnnnnnnnnnnnnnnnnnnnnnnnnnnnnnnnnnnnnnnnnnnnnnnnnnnnnnnnnnnnnnnnnnnnnnnnnnnnnnnnnnnnnnnnnnnnnnnnnnnnnnnnnnnnnnnnnnnnnnnnnnnnnnnnnnnnnnnnnnnnnnnnnnnnnnnnnnnnnnnnnnnnnnnnnnnnnnnnnnnnnnnnnnnnnnnnnnnnnnnnnnnnnnnnnnnnnnnnnnnnnnnnnnnnnnnnnnnnnnnnnnnnnnnnnnnnnnnnnnnnnnnnnnnnnnnnnnnnnnnnnnnnnnnnnnnnnnnnnnnnnnnnnnnnnnnnnnnnnnnnnnnnnnnnnnnnnnnnnnnnnnnnnnnnnnnnnnnnnnnnnnnnnnnnnnnnnnnnnnnnnnngggaaaatatgtgtaaacctcttagtgctattttcactggctaaattctttatttcttgactttttaaaaaatttgggtattaaaattaaaacaatatgctagaagacattttggcagaaataagtctataacactatttttgtcacatatctttttcttggaaaaatttatccaactatagaaatcttaaaccatacaaattgttcttgttaaaaatgactaatactggaggtgctcaatatgcatatagtgcgtttttcattgataatttttatttagttcttaagaaacctattcttaatgttggcatgtcatatttttctgtttctataatcagaaactgtgtagtccgttatac

SEQ ID NO: 31373 - DNA, 731 bp, Macaca Mulatta
aaaagggaagaaaaaggacattatttatgttatctttctcaattacaaaatgcctgtttttaactctccttcacacaaaccctgatacacatgcttctttatcgattagcactgttgggcttatactttttgtacaggacgccagtggaacatcagatgctgaataccagcacatgctctaattttgcaatccctgctcacaccacacacttgatattatttgtgggaggtcatgtgggtcggcctacacactggcaagtaaactcactgatttggacaatgagtcagtgaaaacgaggatgttattttattttagcacatttgtgccaacgtcattgcagaggcaagaagaagaagggatataaatgatacactgacagatatcaacaaataaacagcttgccaatcttgaaaaaaaaaggaacatgcacttacaccttgcaaagactttaagtactttacatattctaccaagcatgttattaattacacatagccaaagcctgtaatctctttctggcattaatctccttttttcaaaaaattctgttttgttatattaaaatgatagcctctggaattcattatcagttcctctccacttaaaccaagagaatactgctggttgcaaaaggatactagaaatcaccccccattgtgctgttttctctaataacttgaagaggggtgtcatttgctatgtttatacactgtctcaaaaatacattaaa

SEQ ID NO: 31374 - DNA, 791 bp, Macaca Mulatta
  misc_feature (1)...(791): n = A,T,C or G
agggtaggggcgggaaagcctgagtgcaaaggtcatttctcttntacttcnctttttcntgcttctcnccanccctgcccacatccacggaggggagaaaggtcatagctaaatgcaaccaagtctgtatctngtcccaacctgcttatctgttctgttagcctgtcataaagtaagcctntctggtgaaggaaggttgctatgaaacttgttttcttggtggaaatggccaagtttggggactgtgctttttgccttacactaatgcttagaaagctgtcttttcagtggtgttgcagcccccagatgtgtggccaacctctgctacaaaggaatctctcactgagtccaggccaccaatcatgcagatagcccatacatttgatcgctgtaaactatgaagtcttgtcttacgagaggtttttcttctgctgtggtatcttgcccttaaaaattagttttcattaaaaggaaatttgattgaaaatagaaacatctacagctcagatactaatctctttctgatgggctttgtaaaccacgtgactttgttaatggctgttctccaatttgttccaataagctaaaggcttttaacacacaggacaactccatgtggttgattttactggcgtatcttggtgctgaagagttggccaagtgaatgtgatacatcttttacttggagctctccagcctttgtcatagttcccagaccttgtttccttgtggtcctccaggaggtaatcagttacatgtgcacagtgctagggcgggaggcagagccggct

SEQ ID NO: 31375 - DNA, 253 bp, Macaca Mulatta
  misc_feature (1)...(253): n = A,T,C or G
agatcctacaagcaatggggaagtcctatcacccaggctgtttccgatgcattgtttgcaacaagtgcctggatggcatccccttcacagtggacttctccaaccaagtatactgtgtcaccgactatcacannnnnnnnnnnnnnnnnnnnnnnnnnnnnnnnnnnnnnnnnnnnnnnnnnagggctgtgaggacatcgtgagagtgatatccatggaccgagattatcactttgagtgctaccactgtgag

SEQ ID NO: 31376 - DNA, 1147 bp, Macaca Mulatta
  misc_feature (1)...(1147): n = A,T,C or G
tgctcggggccggcgccttcaccatggcctcggcagagctggactacaccatcgagatcccagatcaaccctgctggagccagannnnnnnnnnnnnnnnnnnnnnnnnnnnnnnnnnnnnnnnnnnnnnnnnnnnnnnnnnnnnnnnnnnnnnnnnnnnnnnnnnnnnnnnnnnnnnnnnnnnnnnnnnnnnnnnnnnnnnnnnnnnnnnnnnnnnnnnnnnnnnnnnnnnnnnnnnnnnnnnnnnnnnnnnnnnnnnnnnnnnnnnnnnnnnnnnnnnnnnnnnnnnnnnnnnnnnnnnnnnnnnnnnnnnnnnnnnnnnnngattgagaaggagcccctgctcctcttgtcttcagcaacggtggcgtcatgctgtaccgctacctgtctggagctcctgcagacccgtcgcttctgtcacctgcgtgtggtgggcaccatctttgacagcgctcctggcgacagcaacctggtaggggctctgcgggccctggcagccatcctggagcgccgggctgccgtgctgcgcctgttgctgctggtggcctttgccctggtggttgtcctgttccacgtcctgcttgctcccatcacagccctcttccacacccacttctatgacaggctacaggacgcgggctctcgctggcctgaactttacctctactcaagggctgacgaagtagtcccggccagagacgtagaacgcatggtggaggcacgcctggcacgtcgggtcctggcacgttctgtggactttgtgtcatctgcacacgtcagccacctccgtgactaccctacttactacacaagcctctgtgtcgacttcatgcgcaactgtgtccactgctgaggtcattgctccacctcacctctgctccagaaataaatgtctgacgcctccccacaacctgcatctgtggggcactcttctggttcaactctctgtagccctttgggactttgcagtcccctaagtagaaaattcctatgggcctgtctcctgggggcctccgtctgctggtggtctgcttaccacagaatcctagagggcaggagtgcctgggcatgtgtctgtggaagccttgtagtcatttgtctttggacaagcgcaacagtcaggctgctgattcctgtggcatgc

SEQ ID NO: 31377 - DNA, 1193 bp, Macaca Mulatta
  misc_feature (1)...(1193): n = A,T,C or G
tgacggttcacagcgggcagaccaacaagtcagctcttctctacgactcccttcaaactgagagtgtcccttttgagggcctgctgagcgagggcgacaccatccgtatcgagttcacgtccgaccaggcccgagcagcctccaccttcaacatccgatttgannnnnnnnnnnnnnnnnnnnnnnnnnnnnnnnnnnnnnnnnnnnnnnnnnnnnnnnnnnnnnnnnnnnnnnnnnnnnnnnnnnnnnnnnnnnnnnnnnnnnnnnnnnnnnnnnnnnnnnnnnnnnnnnnnnnnnnnnnnnnnnnnnnnnnnnnnnnnnnnnnnnnnnnnnnnnnnnnnnnnnnnnnnnnnnnnnnnnnnnnnnnnnnnnnnnnnnnnnnnnnnnnnnnnnnnnnnnnnnnnnnnnnnnnnnnnnnnnnnnnnnnnnnnnnnnnnnnnnnnnnnnnnnnnnnnnnnnnnnnnnnnnnnnnnnnnnnnnnnnnnnnnnnnnnnnnnnnctgaatctgagcaacagtgacatcttgaccatctacgatggcgacgaggtcatgccccacatcttggggcagtaccttgggaacagtggcccccagaagctgtactcctccacgccagacttaaccatccagttccattcggaccctgctgttctcatctttggaaagggccagggatttatcatgaactatatagnnnnnnnnnnnnnnnnnnnnnnnnnnnnnnnnnnnnnnnnnnnnnnnnnnnnnnnnnnnnnnnnnnnnnnnnnnnnnnnnnnnnnnnnnnnnnnnnnnnnnnnnnnnnnnnnnnnnnnnnnnnnnnnnnnnnnnnnnnnnnnnnnnnnnnnnnnnnnnnnnnnnnnnnnnnnnnnnnnnnnnnnnnnnnnnnnnnnnnnnnnnnnnnnnnnnnnnnnnnnnnnnnnnnnnnnnnnnnnnnnnnnnnnnnnnnnnnnnnnnnnnnnnnnnnnnnnnnnnnnnnnnnnnnnnnnnnnnnnnnnnnnnnnnnnnnnnnnnnnnnnnnnnnnnnnnnnnnnnnnnnnnnnnnnnnnnnnnnnnnnnnnnnnnnnnnnnnnnnnnnnnnnnnagaagcggcagcagagacgtcgctggaaggggggaacatggccctggctatcttcatcccggtcctcatcatctccttactgctgggaggagcctacatttacatcacaag

SEQ ID NO: 31378 - DNA, 3320 bp, Macaca Mulatta
  misc_feature (1)...(3320): n = A,T,C or G
ttataagcagcaaaaattcaatttgttaagagaagagaatgaaggttatgccaagctgattgccgaattggggcaagatttatctggaagtattactagtgacttaatcttagaaaatatcaaatctttaatagnnnnnnnnnnnnnnnnnnnnnnnnnnnnnnnnnnnnnnnnnnnnnnnnnnnnnnnnnnnnnnnnnnnnnnnnnnnnnnnnnnnnnnnnnnnnnnnnnnnnnnnnnnnnnnnnnnnnnnnnnnnnnnnnnnnnnnnnnnnnnnnnnnnnnnnnnnnnnnnnnnnnnnnnnnnnnnnnnnnnnnnnnnnnnnnnnnnnnnnnnnnnnnnnnnnnnnnnnnnnnnnnnnnnnnnnnnnnnnnnnnnnnnnnnnnnnnnnnnnnnnnnnnnnnnnnnnnnnnnnnnnnnnnnnnnnnnnnnnnnnnnnnnnnnnnnnnnnnnnnnnnnnnnnnnnnnnnnnnnnnnnnnnnnnnnnnnnnnnnnnnnnnnnnnnnnnnnnnnnnnnnnnnnnnnnnnnnnnnnnnnnnnnnnnnnnnnnnnnnnnnnnnnnnnnnnnnnnnnnnnnnnnnnnnnnnnnnnnnnnnnnnnnnnnnnnnnnnnnnnnnnnnnnnnnnnnnnnnnnnnnnnnnnnnnnnnnnnnnnnnnnnnnnnnnnnnnnnnnnnnnnnnnnnnnnnnnnnnnnnnnnnnnnnnnnnnnnnnnnnnnnnnnnnnnnnnnnnnnnnnnnnnnnnnnnnnnnnnnnnnnnnnnnnnnnnnnnnnnnnnnnnnnnnnnnnnnnnnnnnnnnnnnnnnnnnnnnnnnnnnnnnnnnnnnnnnnnnnnnnnnnnnnnnnnnnnnnnnnnnnnnnnnnnnnnnnnnnnnnnnnnnnnnnnnnnnnnnnnnnnnnnnnnnnnnnnnnnnnnnnnnnnnnnnnnnnnnnnnnnnnnnnnnnnnnnnnnnnnnnnnnnnnnnnnnnnnnnnnnnnnnnnnnnnnnnnnnnnnnnnnnnnnnnnnnnnnnnnnnnnnnnnnnnnnnnnnnnnnnnnnnnnnnnnnnnnnnnnnnnnnnnnnnnnnnnnnnnnnnnnnnnnnnnnnnnnnnnnnnnnnnnnnnnnnnnnnnnnnnnnnnnnnnnnnnnnnnnnnnnnnnnnnnnnnnnnnnnnnnnnnnnnnnnnnnnnnnnnnnnnnnnnnnnnnnnnnnnnnnnnnnnnnnnnnnnnnnnnnnnnnnnnnnnnnnnnnnnnnnnnnnnnnnnnnnnnnnnnnnnnnnnnnnnnnnnnnnnnnnnnnnnnnnnnnnnnnnnnnnnnnnnnnnnnnnnnnnnnnnnnnnnnnnnnnnnnnnnnnnnnnnnnnnnnnnnnnnnnnnnnnnnnnnnnnnnnnnnnnnnnnnnnnnnnnnnnnnnnnnnnnnnnnnnnnnnnnnnnnnnnnnnnnnnnnnnnnnnnnnnnnnnnnnnnnnnnnnnnnnnnnnnnnnnnnnnnnnnnnnnnnnnnnnnnnnnnnnnnnnnnnnnnnnnnnnnnnnnnnnnnnnnnnnnnnnnnnnnnnnnnnnnnnnnnnnnnnnnnnnnnnnnnnnnnnnnnnnnnnnnnnnnnnnnnnnnnnnnnnnnnnnnnnnnnnnnnnnnnnnnnnnnnnnnnnnnnnnnnnnnnnnnnnnnnnnnnnnnnnnnnnnnnnnnnnnnnnnnnnnnnnnnnnnnnnnnnnnnnnnnnnnnnnnnnnnnnnnnnnnnnnnnnnnnnnnnnnnnnnnnnnnnnnnnnnnnnnnnnnnnnnnnnnnnnnnnnnnnnnnnnnnnnnnnnnnnnnnnnnnnnnnnnnnnnnnnnnnnnnnnnnnnnnnnnnnnnnnnnnnnnnnnnnnnnnnnnnnnnnnnatgataccctggtgcagtttggtgggtttttagcatctaatctgagcacagaagattatataaagcgagtgccttcaattgatgtactctgtaatgaatttcatacaccccatgatgcagcatttttnnnnnnnnnnnnnnnnnnnnnnnnnnnnnnnnnnnnnnnnnnnnnnnnnnnnnnnnnnnnnnnnnnnnnnnnnnnnnnnnnnnnnnnnnnnnnnnnnnnnnnnnnnnnnnnnnnnnnnnnnnnnnnnnnnnnnnnnnnnnnnnnnnnnnnnnnnnnnnnnnnnnnnnnnnnnnnnnnnnnnnnnnnnnnnnnnnnnnnnnnnnnnnnnnnnnnnnnnnnnnnnnnnnnnnnnnnnnnnnnnnnnnnnnnnnnnnnnnnnnnnnnnnnnnnnnnnnnnnnnnnnnnnnnnnnnnnnnnnnnnnnnnnnnnnnnnnnnnnnnnnnnnnnnnnnnnnnnnnnnnnnnnnnnnnnnnnnnnnnnnnnnnnnnnnnnnnnnnnnnnnnnnnnnnnnnnnnnnnnnnnnnnnnnnnnnnnnnnnnnnnnnnnnnnnnnnnnnnnnnnnnnnnnnnnnnatctaccaaaaatgagaccatcacaaaatttctacagctgtgtatatttcctcgatgtattttttcagcaattgatgccgtttactgtgctcgttttgttgaattggtacatcaacagaaaactccaaatttttccacacttctttgctatgatcgagtngttttctctgacataatttacacagttgcaagctgtactgaaaatgaagccagtcgatatggaaggtttctgtgctgcatgttagagactgtgaccaggtggcatagtgatagagccacatatgaaaaggnnnnnnnnnnnnnnnnnnnnnnnnnnnnnnnnnnnnnnnnnnnnnnnnnnnnnnnnnnnnnnnnnnnnnnnnnnnnnnnnnnnnnnnnnnnnnnnnnnnnnnnnnnnnnnnnnnnnnnnnnnnnnnnnnnnnnnnnnnnnnnnnnnnnnnnnnnnnnnnnnnnnnnnnnnnnnnnnnnnnnnnnnnnnnnnnnnnnnnnnnnnnnnnnnnnnnnnnnnnnnnnnnnnnnnnnnnnnnnnnnnnnnnnnnnnnnnnnnnnnnnnnnnnnnnnnnnnnnnnnnnnnnnnnnnnnnnnnnnnnnnnnnnnnnnnnnnnnnnnnnnnnnnnnnnnnnnnnnnnnnnnnnnnnnnnnnnnnnnnnnnnnnnnnnnnnnnnnnnnnnnnnnnnnnnnnnnnnnnnnnnnnnnnnnnnnnnnnnnnnnnnnnnnnnnnnnnnnnnnnnnnnnnnnnnnnnnnnnnnnnnnnnnnnnnnnnnnnnnnnnnnnnnnnnnnnnngataaatcaagggagagatctcagtgtggtgtgaaagctgttaataaagcttctagcaccacacctaaagggaattcaagcaatggaaatagtggctctaaca

SEQ ID NO: 31379 - DNA, 755 bp, Macaca Mulatta
tggtaaattgaggaaaaagggtaacatgaagataaatgagacaagagaggacatggatgcacagttgttagaacaacaaagcacgaactcaagtgaatttgaggctccatccctcagtgacagtatgccttctgtagcagattcccactctagtcatttttctgaatttagttgttctgacctagaaagcatgaaaacttcttgtagtcatggttccagtgattatcacacccgctttgctactgttaacattcttcctgaggtagaaaatgaccgtctggaaaattccccacatcagtgtagcatttctgtggttacccaaactgcttcctgttcagaagttccacagttgaatcatattgctgaagaacatagtaaaaatggaataaaatctaatgttgatttatattttggtgatacactaaaagaaacaaataacaaccactcacatcagacaatggaattaaaagttgcaattcagactgaaatttaggcccataaatgctgcaaaataattaccactgtacaaccgtgtttggagctggttgaactacatgtgacttcttaagtttcaggttacagcaaaagccaggtttcattatcataatgcagatacattttctgtgttcagcaaggcattgtgtgtcatgtggatcttagttaccaaactatgaaatgaaggctttaaaagtgcattattttaaggataataattttgaagagcaaagcacgttttgtgtgtttgccacaaaaca

SEQ ID NO: 31380 - DNA, 469 bp, Macaca Mulatta
  misc_feature (1)...(469): n = A,T,C or G
gaaagtatcaggaaagatggctgtcattgaagaaatggggacagatatgaaagaaactggaagagaaaattttagagagagaggatctgaagagatctgtgttantgaggaaaaggtggcagaattgaaaaaaactggaaaaacacacatttctccaagggaaaatgaactagaggagaccagtacctcaagacaaactgagacacatttaatgcagagcggtagcaatgactgcagtgctatgccttcgctagatattaaagtatgtatttttctgtcctttaaaagtttttttgaatgcttttttccagaggaaagttaccaaaataattccatgattattttgtccttaagtccaacagcacttaaaaatctctaaaagtctaaagtcttttgtagccctaagtttctgtgtttcagtgccttgaagaaactgtatgttcttttttaaaaagataacttaggctgg

SEQ ID NO: 31381 - DNA, 783 bp, Macaca Mulatta
  misc_feature (1)...(783): n = A,T,C or G
gggaagtaattgtgaccacaaaacatcttttttacatgaaggagctgtacatcatttcaaattactcaaatgatgtcttgctctgaggcataaaccccaggtacttagtgtttttaataatatggtgccactgcaggatttgggggtggtggggaagaacaaggataatggtagggggaggcttggcctgaaactaaccactacgtgaattgcactgcaggttttacttatgggaattccttatttgggatgtcaggagggcagctgcaaactgaaaaacaatctagtaaatgtactttgttttatatattgtagcaggcaattaaccactaaataatagctttgacatttgcaattgttgcatagagtatttttgttagaagatgattagctcttgcctttattttacagtgcttagtgtgataaacttctagtcatgttttctatcaaagagaccagttaatatatgtacataaaccacagaaatagtataacaaactatttttaaattatccgttttcctacttaaacattggttagcttaagactttcttaagacatttgcaaaaaccacggctaaatcaataacggtttccggaatggtttttttggaaccaaaagaagttctttacaancgaaaataacctttccgntaaataaagatatcccctaaactaattggaaaccttgacgaaaaatcctggctttgcgcaaacttccgggcaaactagcccccggcttcccgaaaaaggcgggatgtccccgacggggtgcgaaggttct

SEQ ID NO: 31382 - DNA, 116 bp, Macaca Mulatta
gtggacagtggagtccggggcaccattgctgtggggctggtccctcagtactacagcttggatcaccagcctggctggttgcctgactctgtagcctaccatgctgatgatggcaa

SEQ ID NO: 31383 - DNA, 2610 bp, Macaca Mulatta
  misc_feature (1)...(2610): n = A,T,C or G
gtcctggaacaccctcctcaggagctaatcgcgctgctggctcctgagcccctccttgtcgggctcttgtacacagttgtcattcattatgctggcaatctttcggagactttccacggattttacaaaagcacttacataaccaaggaaggggaactgaggnnggatacttgcatcaacgcaatttgaacccactgcagctagaatggcctttccctgctttgatgaacctgccttcaaagcaagtttctcaatcaaaattagaagagagccaaggcacctagccatctccaatatgccactggtgannnnnnnnnnnnnnnnnnnnnnnnnnnnnnnnnnnnnnnnnnnnnnnnnnnnnnnnnnnnnnnnnnnnnnnnnnnnnnnnnnnnnnnnnnnnnnnnnnnnnnnnnnnnnnnnnnnnnnnnnnnnnnnnnnnnnnnnnnnnnnnnnnnnnnnnnnnnnnnnnnnnnnnnnnnnnnnnnnnnnnnnnnnnnnnnnnnnnnnnnnnnnnnnnnnnnnnnnnnnnnnnnnnnnnnnnnnnnnnnnnnnnnnncaagatcttgctgctattcccgactttcagtctggtgctatggaaaactggggactaacaacatacagagaatctgctctattgtttgatgcggaaaagtcttctgcatcaagtaagcttggcatcacaatgattgtggcccatgaactggcccaccannnnnnnnnnnnnnnnnnnnnnnnnnnnnnnnnnnnnnnnnnnnnnnnnnnnnnnnnnnnnnnnnnnnnnnnnnnnnnnnnnnnnnnnnnnnnnnnnnnnnnnnnnnnnnnnnnnnnnnnnnnnnnnnnnnnnnnnnnnnnnnnnnnnnnnnnnnnnnnnnnnnnnnnnnnnnnnnnnnnnnnnnnnnnnnnnnnnnnnnnnnnnnnnnnnnnnnnnnnnnnnnnnnnnnnnnnnnnnnnnnnnagggagcttgtattctgaatatgctaagggagtatcttagtgctgatgcatttaaaagctggtattgtacagtatctccagaagcatagctataaaaatacaaaaaacgaggacccctgtgggatagtannnnnnnnnnnnnnnnnnnnnnnnnnnnnnnnnnnnnnnnnnnnnnnnnnnnnnnnnnnnnnnnnnnnnnnnnnnnnnnnnnnnnnnnnnnnnnnnnnnnnnnnnnnnnnnnnnnnnnnnnnnnnnnnnnnnnnnnnnnnnnnnnnnnnnnnnnnnnnnnnnnnnnnnnnnnnnnnnnnnnnnnnnnnnnnnnnnnnnnnnnnnnnnnnnnnnnnnnnnnnnnnnnnnnnnnnnnnnnnnnnnnnnnnnnnnnnnnnnnnnnnnnnnnnnnnnnnnnnnnnnnnnnnnnnnnnnnnnnnnnnnnnnnnnnnngatgtgctcatcctcccagaagaggtggaatggatcaaatttaatgtgggcatgaatggctattacattgtgcattacgaggatgatggatgggactctttgactggccttttaaaaggaacacacacagcagtcagcagtaacgatcgggcgagtctcattaacaatgcatttcagctcgtcagnnnnnnnnnnnnnnnnnnnnnnnnnnnnnnnnnnnnnnnnnnnnnnnnnnnnnnnnnnnnnnnnnnnnnnnnnnnnnnnnnnnnnnnnnnnnnnnnnnnnnnnnnnnnnnnnnnnnnnnnnnnnnnnnnnnnnnnnnnnnnnnnnnnnnnnnnnnnnnnnnnnnnnnnnnnnnnnnnnnnnnnnnnnnnnnnnnnnnnnnnnnnnnnnnnnnnnnnnnnnnnnnnnnnnnnnnnnnnnnnnnnnnnnnnnnnnnnnnnnnnnnnnnnnnnnnnnnnnnnnnnnnnnnnnnnnnnnnnnnnnnnnnnnnnnnnnnnnnnnnnnnnnnnnnnnnnnnnnnnnngcctgcctatcgatgtgaccttggcagtgtttgctgtgggggcccagagcacagaaggctgggattttctttatagtaaatatcagtcttctttgtccagtactgagaaaaaacaaattgaatttgccctctgcacaacccaaaataaggaaaagcttcaatggnggctactagatgaaagctttaagggagataaaataaaaactcaggagtttccaggaattcttgtactcatcggcaggaacccagtaggatacccactggcctggaaatttctgaggaaaaactggaacaaacttgtacagaagtnnnnnnnnnnnnnnnnnnnnnnnnnnnnnnnnnnnnnnnnnnnnnnnnnnnnnnnnnnnnnnnnnnnnnnnnnnnnnnnnnnnnnnnnnnnnnnnnnnnnnnnnnnnnnnnnnnnnnnnnnnnnnnnnnnnnnnnnnnnnnnnnnnnnnnnnnnnnnnnnnnnnnnnnnnnnnnnnnnnnnnnnnnnnnnnnnnnnnnnnnnnnnnnnnnnnnnnnnnnnnnnnnnnnatgatcctgaagctgacccaacaggatgaaaatccatcagaatctcagactgcagcactaaatatgctttgatgctacatcaaaaggaatggaagcatagctgacttcactaaagttacttcatctccagctagcaaatgaggcactg

SEQ ID NO: 31384 - DNA, 740 bp, Macaca Mulatta
ggggacatctcgctgttgtcaccgcggcttgcgcgcccttgtagacagcccgggccttcgtgagaccggtgcaggcctggggtagtctcctgtctggacagagaagagaagaatgccggacaccggctcagtagtgcctttgcattggtttggctttggctatgcagcactggttgcttctggtgggattattggctatgtaaaagcaggcagcgtgccgtccctcgctgcggggctgctcttcggcagcctagccggcttgggtgcttgccagctgtctcaggatccaaggaacgtttgggttttcctagctacatctggtaccttggctggcattatgggaatgagattctacaactctggaaaattcatgcctgcaggtttaattgcaggtgccagtttgctgatggctgccaaagttggagttagtatgttcaacagaccccattagcagaagtcatgttccagcttgcactgatgaagaattaaaaatctgcatcttccactattttcaatgtgttaaccgaaataagtgcagcatttttgcatccgatattttacctaaaaaaaaaagacatcaaaacttggccggaaggggtggaaaaatccgtttgtcacccatttataaacccctaccagaaggttataaactggagggaatataaactttggaagccttcaattggaaaaaaccccttcccatagaaagaattgggacgttccactgggaaaataattgg

SEQ ID NO: 31385 - DNA, 650 bp, Macaca Mulatta
  misc_feature (1)...(650): n = A,T,C or G
tcaggaaggtgtctctggaggggaacccactgccggagcagtcctatcataagctcatggccttggacagcacgnnnnnnnnnnnnnnnnnnnnnnnnnnnnnnnnnnnnnnnnnnnnnnnnnnnnnnnnnnnnnnnnnnnnnnnnnnnnnnnnnnnnnnnnnnnnnnnnnnnnnnnnnnnnnnnnnnnnnnnnnnnnnnnnnnnnnnnnnnnnnnnnnnnnnnnnnnnnnnnnnnnnnnnnnnnnnnnnnnnnnnnnnnnnnnnnnnnnnnnnnnnnnnnnnnnnnnnnnnnnnnnnnnnnnnnnnnnnnnnnnnnnnnnnnnnnnnnnnnnnnnnnnnnnnnnnnnnnnnnnnnnnnnnnnnnnnnnnnnnnnnnnnnnnnnnnnnnnnnnnnnnnnnnnnnnnnnnnnnnnnnnnnnnnnnnnnnnnnnnnnnnnnnnnnnnnnnnnnnnnnnnnnnnnnnnnnnnnnnnnnnnnnnnnnnnnnnnnnnnnnnnnnnnnnnnnnnnnnnnnnnnnnnnnnnnnnnnnnnnnnnnnnnnnnnnnnnnnnnnnnngaattggccaagaaagaggagaagacggggtctgggcagtcacccacacaaggaacccctaagaaagaagatgccacaaaggcaggcaagggga

SEQ ID NO: 31386 - DNA, 786 bp, Macaca Mulatta
  misc_feature (1)...(786): n = A,T,C or G
ggggaggtaacaattgaagtcatgctgccaccagccaaaaaagtcccacgattgccaacaaccaccagaagctagggagaagccaagaaagcttctgaccagtctcaggaatgctgccctgaggaacaccctgaccctggacttcaccctccagaatggtgcgcctgaatacatcttgcctagatagacaaacaatgatgaaactcaaatggagcttcctactcacgttgatttatgtctcacaatcctgggtattgttaatccaacatagagtgaaactatttctgataaagaactttttgaaaaactttttacactctaaagtgatactcagaacaaaagaaagtcatgaaactcctgaatttaatttccccacctaagttgagactgtattatcaaaacacatgtgcacacagattactttttggccccaaaactggattacaaaagaaagaggagaagaatattttgtgtgttactggtattcttttataagtaaagtttacccagcatggaccagcttcaaccagggacaaaatcccctccaaaaccactctccacagctttttaaaaatactgctactcttaacaattacctaaaccttcctcaactgctccaaatctcttaatagcgtctagtgctactacgatctaaggttaccagagggaagaagacatggcattaaaagaatcacatcttcagaaagaaagacactaaatattactacccatatacatgattttcngaagattgacataagattccctcttataaggagaaaatgt

SEQ ID NO: 31387 - DNA, 117 bp, Macaca Mulatta
ggaacaagagttgaatgctcgagcccgggccctacaagctgcatctgcttcatgttcatttcggcccaatggatttgatgacaatgacccaccaggaagctgtggaccaactggtgg

SEQ ID NO: 31388 - DNA, 241 bp, Macaca Mulatta
tttgttgttaatttttgtaaagcagacgctactctcaagcagttgacaaaactgtttatttttgcaattaaaattattgtgctaaaagcttaccgaatctgccatgtaagctcctgacccttcccctcagcttctcccccaggaccataagtgccagaagataaaggacatccccacactcatggggtacaggccctgaacatattacacacccactgccaggtacacctgccaggaactg

SEQ ID NO: 31389 - DNA, 270 bp, Macaca Mulatta
aaatcacctgttttggatacaaagcccaaggagacaggtggaatcctgggggaaggcacactgaaagaaagcagtactgaaagcagccagtctgccaagcctgtctctggccaagacacatcggggaatacagaaggttcacctgcagtggaaaaggcccagctcaagtctgaagctgtgggcagcccagaccaaggcagcacatacagccccacaagtggtgtggctggaccatgtggacaggatccagtcagcagcccctgtggctag

SEQ ID NO: 31390 - DNA, 2607 bp, Macaca Mulatta
  misc_feature (1)...(2607): n = A,T,C or G
ggtctgctcatgtctgctctcacagttttcatcctgattctatacttcgtgattgacaactttgtgataaatcgcagaccatggctccctgagtgtactcccatctacatccagtactttgtcaagttcttcatcatcggcgtcactgtactggtggtggctgtgccagaggggctgcctctggctgtcaccatctcactggcctactctgtgaannnnnnnnnnnnnnnnnnnnnnnnnnnnnnnnnnnnnnnnnnnnnnnnnnnnnnnnnnnnnnnnnnnnnnnnnnnnnnnnnnnnnnnnnnnnnnnnnnnnnnnnnnnnnnnnnnnnnnnnnnnnnnnnnnnnnnnnnnnnnnnnnnnnnnnnnnnnnnnnnnnnnnnnnnnnnnnnnnnnnnnnnnnnnnnnnnnnnnnnnnnnnnnnnnnnnnnnnnnnnnnnnnnnnnnnnnnnnnnnnnnnnnnnnnnnnnnnnnnnnnnnnnnnnnnnnnnnnnnnnnnnnnnnnnnnnnnnnnnnnnnnnnnnnnnnnnnnnnnnnnnnnnnnnnnnnnnnnnnnnnnnnnnnnnnnnnnnnnnnnnnnnnnnnnnnnnnnnnnnnnnnnnnnnnnnnnnnnnnnnnnnnnnnnnnnnnnnnnnnnnnnnnnnnnnnnnnnnnnnnnnnnnnnnnnnnnnnnnnnnnnnnnnnnnnnnnnnnnnnnnnnntgtaatcgaatcctggaccggaaaggggaagcagtgccattcaggaataaagacagagatgatatgatacgcactgtcatcgagcccatggcctgtgatggnnnnnnnnnnnnnnnnnnnnnnnnnnnnnnnnnnnnnnnnnnnnnnnnnnnnnnnnnnnnnnnnnnnnnnnnnnnnnnnnnnnnnnnnnnnnnnnnnnnnnnnnnnnnnnnnnnnnnnnnnnnnnnnnnnnnnnnnnnnnnnnnnnnnnnnnnnnnnnnnnnnnnnnnnnnnnnnnnnnnnnnnnnnnnnnnnnnnnnnnnnnnnnnnnnnnnnnnnnnnnnnnnnnnnnnnnnnnnnnnnnnnnnnnnnnnnnnnnnnnnnnnnnnnnnnnnnnnnnnnnnnnnnnnnnnnnnnnnnnnnnnnnnnnnnnnnnnnnnnnnnnnnnnnnnnnnnnnnnnnnnnnnnnnnnnnnnnnnnnnnnnnnnnnnnnnnnnnnnnnnnnnnnnnnnnnnnnnnnnnnnnnnnnnnnnnnnnnnnnnnnnnnnnnnnnnnnnnnnnnnnnnnnnnnnnnnnnnnnnnnnnnnnnnnnnnnnnnnnnnnnnnnnnnnnnnnnnnnnnnnnnnnnnnnnnnnnnnnnnnnnnnnnnnnnnnnnnnnnnnnnnnnnnnnnnnnnnnnnnnnnnnnnnnnnnnnnnnnnnnnnnnnnnnnnnnnnnnnnnnnnnnnnnnnnnnnnnnnnnnnnnnnnnnnnnnnnnnnnnnnnnnnnnnnnnnnnnnnnnnnnnnnnnnnnnnnnnnnnnnnnnnnnnnnnnnnnnnnnnnnnnnnnnnnnnnnnnnnnnnnnnnnnnnnnnnnnnnnnnnnnnnnnnnnnnnnnnnnnnnnnnnnnnnnnnnnnnnnnnnnnnnnnnnnnnnnnnnnnnnnnnnnnnnnnnnnnnnnnnnnnnnnnnnnnnnnnnnnnnnnnnnnnnnnnnnnnnnnnnnnnnnnnnnnnnnnnnnnnnnnnnnnnnnnnnnnnnnnnnnnnnnnnnnnnnnnnnnnnnnnnnnnnnnnnnnnnnnnnnnnnnnnnnnnnnnnnnnnnnnnnnnnnnnnnnnnnnnnnnnnnnnnnnnnnnnnnnnnnnnnnnnnnnnnnnnnnnnnnnnnnnnnnnnnnnnnnnnnnnnnnnnnnnnnnnnnnnnnnnnnnnnnnnnnnnnnnnnnnnnnnnnnnnnnnnnnnnnnnnnnnnnnnnnnnnnnnnnnnnnnnnnnnnnnnnnnnnnnnnnnnnnnnnnnnnnnnnnnnnnnnnnnnnnnnnnnnnnnnnnnnnnnnnnnnnnnnnnnnnnnnnnnnnnnnnnnnnnnnnnnnnnnnnnagttcatctccgccatacctacccgctccctgaagttcctgaaggaggctgggcatggcaccaccaaagaggagatcaccaaggatgctgaggggctggatgagattgaccatgctgagatggagctgcgccgaggccagatcctctggttccggggcctgaaccgtatccagactcagnnnnnnnnnnnnnnnnnnnnnnnnnnnnnnnnnnnnnnnnnnnnnnnnnnnnnnnnnnnnnnnnnnnnnnnnnnnnnnnnnnnnnnnnnnnnnnnnnnnnnnnnnnnnatcaaagtggtcaaagcgttccatagttccctccacgaaaccattcagaaaccctacaaccaaaactccatccacaacttcatgacccaccctgaattcgccatagatgaggagttgccgcgaacaccactcctggataaggaagaggaggaaaatcctgacaaggcttctaagtttgggactggggtgctcctgttggatggtgtggtcggtcaaaacgccaatacaaacaacaatgcagtggactgcaaccaagcgcagctcccagcgacggacagctctctacagagc

SEQ ID NO: 31391 - DNA, 625 bp, Macaca Mulatta
gagcaggtcccaaaagctttccttcgcccttttgcagagttaatcctcagcactgcccgggtaatggctccataagagacaaggatgaggctgagaggcacaaccaagatgaagacactggcaacagccatctggatctcattgtaggaggtgtccccacaggagagtcgaattagagctgggacctcacagacaaaatcatccacttgccgatgggggcagaagggcaggcgcagggtggatggtgtctggaccactgactccaccagcccaatgacccaggccacagatgccagctgccagcacaggcgggggtggatgatggtggcataatggagaggctggcagacagccacgtagcgatcaaaagccatcactgtcaagaggatgcactcagtggtccccagggacaggaagatgaagagctggacagagcagcccaggaagctgatggtcttctttgggccccagaggttaaccagcatctgggggacacaagtcgtggtgaagcagaggtccaagaacgagaggttggagaggaaaaagtacattggagagtggagcctggggtccagcacagacagcaggatgatgagtgtgttggccaccatggttaggaggtagg

SEQ ID NO: 31392 - DNA, 759 bp, Macaca Mulatta
  misc_feature (1)...(759): n = A,T,C or G
gggacttacggccggaggtgttggtgctgggagttggtggcgcggtgcagggttcataagaacgaacggcttgggcgcggactggtatccggggactgtgacttgcagggtccgccatggagccggagcagatgctggagggacaaacgcaggttgcagaaaatcctcactctgagtatggtctcacggacaacgttgagaggatagtagaaaatgagaagattaatgcagaaaagtcatcaaagcagaaggtagatctccagtctttgccaactcgtgcctacctggatcagacagttgtgcctatcttattacagggacttgctgtgcttgcaaaggaaagaccaccaaatcctattgaatttctagcatcttatcttttaaaaaacaaggcacagtttgaagatcgaaactgacttaatgggaagaacagaaaaatttagttgctactgtagatttacatgattaagaggcagctttaattgccatgattatcccccctttttggatgtataagaaccttccggacaacagaacctatttctgggattgcagaagagaacatatttcccttattttgatttaatcaccataaaccatacctatttaatgagtgtattctgtgcaatttttttctcagattgtcctttaacttttgtttttaaaatgaaccttcaaaataaaactgctcaaaacaccnnnnttacannnanaaacnnnnatcattgtacggccgcacacaaaccaaaagaaaaacct

SEQ ID NO: 31393 - DNA, 786 bp, Macaca Mulatta
  misc_feature (1)...(786): n = A,T,C or G
ggtagcctttccagtaaatatatgactcagggaaaagcctcagcgaagaggacccagcaggaatcatgagggaaggaaaatgcagcactctaaatggccactcaggcgttcctattgactcggnnnnnnnnnnnnnnnnnnnnnnnnnnnnnnnnnnnnnnnnnnnnnnnnnnnnnnnnnnnnnnnnnnnnnnnnnnnnnnnnnnnnnnnnnnnnnnnnnnnnnnnnnnnnnnnnnnnnnnnnnnnnnnnnnnnnnnnnnnnnnnnnnnnnnnnnnnnnnnnnnnnnnnnnnnnnnnnnnnnnnnnnnnnnnnnnnnnnnnnnnnnnnnnnnnnnnnnnnnnnnnnnnnnnnnnnnnnnnnnnnnnnnnnnnnnnnnnnnnnnnnnnnnnnnnnnnnnnnnnnnnnnnnnnnnnnnnnnnnnnnnnnnnnnnnnnnnnnnnnnnnnnnnnnnnnnnnnnnnnnnnnnnnnnnnnnnnnnnnnnnnnnnnnnnnnnnnnnnnnnnnnnnnnnnnnnnnnnnnnnnnnnnnnnnnnnnnnnnnnnnnnnnnnnnnnnnnnnnnnnnnnnnnnttgctatttgtagacgcgataacatgaacatgagtacgtatttatgtgggccttcagtggatgagaagtgccactcaggtctctggggtctccctctctaattttaagtaaattgacatataactgctatgcttatcaaaatgaagtaaggaaaacaagtagtcctgtttgccactaaaaacattttcaaaggaaaaataaaatgaaagtactttt

SEQ ID NO: 31394 - DNA, 6474 bp, Macaca Mulatta
  misc_feature (1)...(6474): n = A,T,C or G
gacttcatcgcctgattcttccaatgaaaattccccggcaactcccccagatgagcaaggtcaaggtgatgccccaccacagcttgaagatgaggaacctgcatttccacatactgacttggccaagttggatgacatgatcaacaggnnnnnnnnnnnnnnnnnnnnnnnnnnnnnnnnnnnnnnnnnnnnnnnnnnnnnnnnnnnnnnnnnnnnnnnnnnnnnnnnnnnnnnnnnnnnnnnnnnnnnnnnnnnnnnnnnnnnnnnnnnnnnnnnnnnnnnnnnnnnnnnnnnnnnnnnnnnnnnnnnnnnnnnnnnnnnnnnnnnnnnnnnnnnnnnnnnnnnnnnnnnnnnnnnnnnnnnnnnnnnnnnnnnnnnnnnnnnnnnnnnnnnnnnnnnnnnnnnnnnnnnnnnnnnnnnnnnnnnnnnnnnnnnnnnnnnnnnnnnnnnnnnnnnnnnnnnnnnnnnnnnnnnnnnnnnnnnnnnnnnnnnnnnnnnnnnnnnnnnnnnnnnnnnnnnnnnnnnnnnnnnnnnnnnnnnnnnnnnnnnnnnnnnnngggttggctagtggatcttctcaacaaatttggcactttaaatgggttccagattttgcatgatcgttttattaatggatcagcattaaacgttcaaataattgcagcccttattaanaccatttgggcaatgctatgagtttctcactcttcatacagtgaaaaagtactttcttccaataatagaaatggttccacagtttttagaaaacttaactgatgaagaactgaaaaaggaagcaaagaatgaagccaaaaatgatgctnnnnnnnnnnnnnnnnnnnnnnnnnnnnnnnnnnnnnnnnnnnnnnnnnnnnnnnnnnnnnnnnnnnnnnnnnnnnnnnnnnnnnnnnnnnnnnnnnnnnnnnnnnnnnnnnnnnnnnnnnnnnnnnnnnnnnnnnnnnnnnnnnnnnnnnnnnnnnnnnnnnnnnnnnnnnnnnnnnnnnnnnnnnnnnnnnnnnnnnnnnnnnnnnnnnnnnnnnnnnnnnnnnnnnnnnnnnnnnnnnnnaatggatacagcagaacaatatcttatccatagtgttgcgagatagtcttcatcagccacaatatgtagaaaagttggagaagattcttcgttttgtcatcaaagaaaaagctctgaccttacaggaccttgataatatctgggcagcacaggnnnnnnnnnnnnnnnnnnnnnnnnnnnnnnnnnnnnnnnnnnnnnnnnnnnnnnnnnnnnnnnnnnnnnnnnnnnnnnnnnnnnnnnnnnnnnnnnnnnnnnnnnnnnnnnnnnnnnnnnnnnnnnnnnnnnnnnnnnnnnnnnnnnnnnnnnnnnnnnnnnnnnnnnnnnnnnnnnnnnnnnnnnnnnnnnnnnnnnnnnnnnnnnnnnnnnnnnnnnnnnnnnnnnnnnnnnnnnnnnnnnnnnnnnnnnnnnnnnnnnnnnnnnnnnnnnnnnnnnnnnnnnnnnnnnnnnnnnnnnnnnnnnnnnnnnnnnnnnnnnnnnnnnnnnnnnnnnnnnnnnnnnnnnnnnnnnnnnnnnnnnnnnnnnnnnnnnnnnnnnnnnnnnnnnnnnnnnnnnnnnnnnnnnnnnnnnnnnnnnnnnnnnnnnnnnnnnnnnnnnnnnnnnnnnnnnnnnnnnnnnnnnnnnnnnnnnnnnnnnnnnnnnnnnnnnnnnnnnnnnnnnnnnnnnnnnnnnnnnnnnnnnnnnnnnnnnnnnnnnnnnnnnnnnnnnnnnnnnnnnnnnnnnnnnnnnnnnnnnnnnnnnnnnnnnnnnnnnnnnnnnnnnnnnnnnnnnnnnnnnnnnnnnnnnnnnnnnnnnnnnnnnnnnnnnnnnnnnnnnnnnnnnnnnnnnnnnnnnnnnnnnnnnnnnnnnnnnnnnnnnnnnnnnnnnnnnnnnnnnnnnnnnnnnnnnnnnnnnnnnnnnnnnnnnnnnnnnnnnnnnnnnnnnnnnnnnnnnnnnnnnnnnnnnnnnnnnnnnnnnnnnnnnnnnnnnnnnnnnnnnnnnnnnnnnnnnnnnnnnnnnnnnnnnnnnnnnnnnnnnnnnnnnnnnnnnnnnnnnnnnnnnnnnnnnnnnnnnnnnnnnnnnnnnnnnnnnnnnnnnnnnnnnnnnnnnnnnnnnnnnnnnnnnnnnnnnnnnnnnnnnnnnnnnnnnnnnnnnnnnnnnnnnnnnnnnnnnnnnnnnnnnnnnnnnnggtcgtgattcagagtaatgatgatatggccagcagagctatagatctcctcaaagagatatacacaaaccttggtccaagactacaagtcaatcaggtnnnnnnnnnnnnnnnnnnnnnnnnnnnnnnnnnnnnnnnnnnnnnnnnnnnnnnnnnnnnnnnnnnnnnnnnnnnnnnnnnnnnnnnnnnnnnnnnnnnnnnnnnnnnnnnnnnnnnnnnnnnnnnnnnnnnnnnnnnnnnnnnnnnnnnnnnnnnnnnnnnnnnnnnnnnnnnnnnnnnnnnnnnnnnnnnnnnnnnnnnnnnnnnnnnnnnnnnnnnnnnnnnnnnnnnnnnnnnnnnnnnnnnnnnnnnnnnnnnnnnnnnnnnnnnnnnnnnnnnnnnnnnnnnnnnnnnnnnnnnnnnnnnnnnnnnnnnnnnnnnnnnnnnnnnnnnnnnnnnnnnnnnnnnnnnnnnnnnnnnnnnnnnnnnnnnnnnnnnnnnnnnnnnnnnnnnnnnnnnnnnnnnnnnnnnnnnnnnnnnnnnnnnnnnnnnnnnnnnnnnnnnnnnnnnnnnnnnnnnnnnnnnnnnnnnnnnnnnnnnnnnnnnnnnnnnnnnnnnnnnnnnnnnnnnnnnnnnnnnnnnnnnnnnnnnnnnnnnnnnnnnnnnnnnnnnnnnnnnnnnnnnnnnnnnnnnnnnnnnnnnnnnnnnnnnnnnnnnnnnnnnnnnnnnnnnnnnnnnnnnnnnnnnnnnnnnnnnnnnnnnnnnnnnnnnnnnnnnnnnnnnnnnnnnnnnnnnnnnnnnnnnnnnnnnnnnnnnnnnnnnnnnnnnnnnnnnnnncagatagcacaacgatagaaaaattaagagctatttgtttagaccatgccaaacttggggaaagcagccttagtccatctcttgactcgcttttctttggtccttcagcctcacaagtgctatatctaacagagnaggtagtctatgccttgttaatgcctgctggtgcacctctggctgatgattcctctgattttcagtttcacttcttgaaaagtggtggcctaccccttgtactgagtatgctaaccagaaataacttcctaccaaatgcagatatggannnnnnnnnnnnnnnnnnnnnnnnnnnnnnnnnnnnnnnnnnnnnnnnnnnnnnnnnnnnnnnnnnnnnnnnnnnnnnnnnnnnnnnnnnnnnnnnnnnnnnnnnnnnnnnnnnnnnnnnnnnnnnnnnnagatcaaccaagttacccatgatcaagcagtggtgctacaaagtgcccttcagagcattcctaatccatcatccgagtgcatgcttagaaatgtgtcagttcgtcttgctcagcagatatctgatgaggnnnnnnnnnnnnnnnnnnnnnnnnnnnnnnnnnnnnnnnnnnnnnnnnnnnnnnnnnnnnnnnnnnnnnnnnnnnnnnnnnnnnnnnnnnnnnnnnnnnnnnnnnnnnnnnnnnnnnnnnnnnngaccaatgcaggcaatgagccggacttggaagacgaacaggtttgctgtgaagcattggaagtgatgaccttatgttttgccttgattccaacagccttagatgctcttagtaaagaaaaggcttggcagacattcatcattgacttactattgcactgtcacagcaannnnnnnnnnnnnnnnnnnnnnnnnnnnnnnnnnnnnnnnnnnnnnnnnnnnnnnnnnnnnnnnnnnnnnnnnnnnnnnnnnnnnnnnnnnnnnnnnnnnnnnnnnnnnnnnnnnnnnnnnnnnnnnnnnnnnnnnnnnnnnnnnnnnnnnnnnnnnnnaagacaccttcttaattatgcttacaatagtaatattaatgtacccaatgctgaagttcttctcaataatgaaattgattggcttaaaagaattaggnnnnnnnnnnnnnnnnnnnnnnnnnnnnnnnnnnnnnnnnnnnnnnnnnnnnnnnnnnnnnnnnnnnnnnnnnnnnnnnnnnnnnnnnnnnnnnnnnnnnnnnnnnnnnnnnnnnnnnnnnnnnnnnnnnnnnnnnnnnnnnnnnnnnnnnnnnnnnnnnnnnnnnnnnnnnnnnnnnnnnnnnnnnnnnnnnnnnnnnnnnnnnnnnnnnnnnnnnnnnnnnnnnnnnnnnnnnnnnnnnnnnnnnnnnnnnnnnnnnnnnnnnnnnnnnnnnnnnnnnnnnnnnnnnnnnnnnnnnnnnnnnnnnnnnnnnnnnnnnnnnnnnnnnnnnnnnnnnnnnnnnnnnnnnnnnnnnnnnnnnnnnnnnnnnnnnnnnnnnnnnnnnnnnnnnnnnnnnnnnnnnnnnnnnnnnnnnnnnnnnnnnnnnnnnnnnnnnnnnnnnnnnnnnnnnnnnnnnnnnnnnnnnnnnnnnnnnnnnnnnnnnnnnnnnnnnnnnnnnnnnnnnnnnnnnnnnnnnnnnnnnnnnnnnnnnnnnnnnnnnnnnnnnnnnnnnnnnnnnnnnnnnnnnnnnnnnnnnnnnnnnnnnnnnnnnnnnnnnnnnnnnnnnnnnnnnnnnnnnnnnnnnnnnnnnnnnnnnnnnnnnnnnnnnnnnnnnnnnnnnnnnnnnnnnnnnnnnnnnnnnnnnnnnnnnnnnnnnnnnnnnnnnnnnnnnnnnnnnnnnnnnnnnnnnnnnnnnnnnnnnnnnnnnnnnnnnnnnnnnnnnnnnnnnnnnnnnnnnnnnnnnnnnnnnnnnnnnnnnnnnnnnnnnnnnnnnnnnnnnnnnnnnnnnnnnnnnnnnnnnnnnnnnnnnnnnnnnnnnnnnnnnnnnnnnnnnnnnnnnnnnnnnnnnnnnnnnnnnnnnnnnnnnnnnnnnnnnnnnnnnnnnnnnnnnnnnnnnnnnnnnnnnnnnnnnaggtacgaatgtgaagaatcttttacgaccctaaacgtagacattagaaatcaccaaaatcttcttgattctttggaacaatatgtcaaaggagatttactagaaggtgcaaatgcatatcattgtgaaaaatgcaataaaaaggtnnnnnnnnnnnnnnnnnnnnnnnnnnnnnnnnnnnnnnnnnnnnnnnnnnnnnnnnnnnnnnnnnnnnnnnnnnnnnnnnnnnnnnnnnnnnnnnnnnnnnnnnnnnnnnnnnnnnnnnnnnnnnnnnnnnnnnnnnnnnnnnnnnnnnnnnnnnnnnnnnnnnnnnnnnnnnnnnnnnnnnnnnnnnnnnnnnnnnnnnnnnnnnnnnnnnnnnnnnnnnnnnnnnnnnnnnnnnnnnnnnnnnnnnnnnnnnnnnnnnnnnnnnnnnnnnnnnnnnnnnnnnnnnnnnnnnnnnnnnnnnnnnnnnnnnnnnnnnnnnnnnnnnnnnnnnnnnnnnnnnnnnnnnnnnnnnnnnnnnnnnnnnnnnnnnnnnnnnnnnnnnnnnnnnnnnnnnnnnnnnnnnnnnnnnnnnnnnnnnnnnnnnnnnnnnnnnnnnnnnnnnnnnnnnnnnnnnnnnnnnnnnnnnnnnnnnnnnnnnnnnnnnnnnnnnnnnnnnnnnnnnnnnnnnnnnnnnnnnnnnnnnnnnnnnnnnnnnnnnnnnnnnnnnnnnnnnnnnnnnnnnnnnnnnnnnnnnnnnnnnnnnnnnnnnnnnnnnnnnnnnnnnnnnnnnnnnnnnnnnnnnnnnnnnnnnnnnnnnnnnnnnnnnnnnnnnnnnnnnnnnnnnnnnnnnnnnnnnnnnnnnnnnnnnnnnnnnnnnnnnnnnnnnnnnnnnnnnnnnnnnnnnnnnnnnnnnnnnnnnnnnnnnnnnnnnnnnnnnnnnnnnnnnnnnnnnnnnnnnnnnnnnnnnnnnnnnnnnnnnnnnnnnnnnnnnnnnnnnnnnnnnnnnnnnnnnnnnnnnnnnnnnnnnnnnnnnnnnnnnnnnnnnnnnnnnnnnggtatgatgcattgtgtatcctccttcgtcacagcaagaatgtacgtttttggtttgctcataatgtcctttttaatgtttcaaatcgcttctccgaataccttctggagtgccctagtgcagaagtgaggggtgcgtttgcaaaacttatagtctttattgcacatttttccttgcaagatgggccatgtccttcaccttttgcctctcctggaccttctagtcaggncaggcttatgacaacttaagcttgagtgatcacttactaagagcagtactaaatctcttgagaagggaagtttcagagcatgggcgtcatttacagcagtatttcaacctgtttgtaatgtatgccaatttaggt

SEQ ID NO: 31395 - DNA, 525 bp, Macaca Mulatta
  misc_feature (1)...(525): n = A,T,C or G
attcacacccctgggcagggctccccatcccttggacagaattggagttggggtaacaggaaagaaaagggtgttacacagcgacaaatgcccaccacaggtacccacagcctcttcccttgctccttggaaggccacaaggagaaaccccatcattttagagagctttggtgtcattacatttcaataatcaaaggtcatttccccttttgccaacctcctcattggcaacaaaatgtgcctgggggctttctttctgaaagtttacagatccatctcccacctgccaacccagcacctgggcagttgtattcactcacaggtgtcgggctggcagatgggtctaacagaatgggggaaggggattaagaagtgtcacccagccccatcccctgaatgggaacaaatctatgttaccaagtttacccttgccctgnggcctcagacaatgtgcctgcacctggctgtcaaatgcagtgaggggagaaggaaaggactttcaccttttactttatgtattctgct

SEQ ID NO: 31396 - DNA, 675 bp, Macaca Mulatta
  misc_feature (1)...(675): n = A,T,C or G
gggggttcgctacgcggggctaccggatcggtcggaaatggcagaggtggaggagacactgaagcgactgcatagccagaagggagtgcagggaatcatcgtcgtgaacacagaaggcattcccatcaagagcaccatggacaaccccactaccacccagtacgccagcctcatgcacagcttcatcctgaaggcacggagcaccgtgcgtgaaatcgaccctcagaacgatctcaccttccttcgaattcgctccaagaaaaatgaaattatggttgcaccagataaagactatttcctgattgtgattcagaatccaaccgaataagccactctcggctccctgtgtcattccttaatttaatgtcccccaagaatgttagtcgatcatgtcagtggactggcacgtggcagtcgccttggaacccactcagaccaatccagtgaccatgtgtgggctggcagctcttcctccccaccaaaggaaccctgtgtgcccaatcttccccagactccggagggcctctctcctcacttcaggtttagacaagagcttgcagagccccaccagcttcttcgacttcatttattgtcgccctggaaaactgtttctttactaaataccaaannnnnnnnnnnnnnnnnnnnnnnnnnnnnccctcgcctagaatttag

SEQ ID NO: 31397 - DNA, 840 bp, Macaca Mulatta
  misc_feature (1)...(840): n = A,T,C or G
ataccttttctgtttttcccccgccccgagggggatttttttattatatgggggggagagagttcccaaagccctcatattttctcgttgactccaggttttttttcttggggagaaaccagggattttgacaccaagggttcaatgtaacccctaaatggggggcctcggggggccctcaaaccgaannnnnnnnnnnnnnnnnnnnnnnnnnnnnnnnnnnccccgaaggtggcccataaacaagggnnnnnnnnnnnnnnnnnnnnnnnnntttgttgcgcatcagacatttatnnnntntnntnnnnnnnnttcagattggcagtttttacatttatttaaacagaaaacgtgcacatgagctgtctactcattttcttcactgcgcagcctggcgttggggttggtgactctgatggccagctgggcagctctttccacgatggctttgcggttcttggaagaaacattgtgagcaatctcggcacagtaagatttgttgcacatcagcagcacttccaactccttgacgttgtggaccaggaacttccggaagccactgggcagcatgtgctttgtttttttgttgctcccataaccaatgttgggcatcaagatctggcccttgaatcttctacgaaccctgttgtcaatgcctctgggtttccgccagttacgcttaattttgacatatcggtctgactggtgccggatgaacttcttggttctttttttgacgatcttgggcttcacaaggggtctgagggcggccatgatgccttcgaggaggagatggctgccacctccgtaggcagcgccgaggaagagagcccgccc

SEQ ID NO: 31398 - DNA, 528 bp, Macaca Mulatta
  misc_feature (1)...(528): n = A,T,C or G
aggacacaccatgctgaccggggtgaccgacggtatcttctgttgcctgctgggcacgccccccaacgccgtggggccattggagagcgtcgagtccagcgatggctacacctttgtagaggtcaagcccggacgcgtgctgcgagtgaagcatgcaggacccgccccggccgctgccgcacctccgccattatccgcatcctcggatgcagcccagggggacctttctggcttggtccgctgtcagcgccggatcaccgtgtaccgcaatgggcggttgctggtggaaaacctgggccgagcccctcgagccgacctcctgcacgggcagaatggctctggggagccgccggccgccctggaggtggagctggccgatccagcgggcagcgatggccgctcggcccnnnnnnnnnnnnnnnnnnnnnnnnnnnnnnnnnnnnnnnnnnnnnnnnngagcccggcgccccaagaggaccatccatattgactgtgagaagcgcatcactagctgcaaaggcgcccagg

SEQ ID NO: 31399 - DNA, 2434 bp, Macaca Mulatta
  misc_feature (1)...(2434): n = A,T,C or G
gaccatagaccaaatggtcggcagtcacacagacctggtggacacgtgtgttgggacctccgtggaaactaacagtgtatgcatctcctgccagcctgaatgtaagaacaaagtcatacggcctgagctgcccatgaattgctggattgttaatgagagtgtttatatgcacgaccgctgcgctgggaggtctgtggaaatgtgtgacaagagtgtgagtgtggaagtcagcatctgtgaaacaggcagctacacataagagtctgtgaatgacctcacactcctcgagacaaacttgaatctcaaagaagtgcggtctatcggttgtggagattgttctgttgacgtgactgtctgctctnnnnnnnnnnnnnnnnnnnnnnnnnnnnnnnnnnnnnnnnnnnnnnnnnnnnnnnnnnnnnnnnnnnnnnnnnnnnnnnnnnnnnnnnnnnnnnnnnnnnnnnnnnnnnnnnnnnnnnnnnnnnnnnnnnnnnnnnnnnnnnnnnnnnnnnnnnnnnnnnnnnnnnnnnnnnnnnnnnnnnnnnnnnnnnnnnnnnnnnnnnnnnnnnnnnnnnnnnnnnnnnnnnnnnnnnnnnnnnnnnnnnnnnnnnnnnnnnnnnnnnnnnnnnnnnnnnnnnnnnnnnnnnnnnnnnnnnnnnnnnnnnnnnnnnnnnnnnnnnnnnnnnnnnnnnnnnnnnnnnnnnnnnnnnnnnnnnnnnnnnnnnnnnnnnnnnnnnnnnnnnnnnnnnnnnnnnnnnnnnnnnnnnnnnnnnnnnnnnnnnnnnnnnnnnnnnnnnnnnnnnnnnnnnnnnnnnnnnnnnnnnnnnnnnnnnnnnnnnnnnnnnnnnnnnnnnnnnnnnnnnnnnnnnnnnnnnnnnnnnnnnnnnnnnnnnnnnnnnnnnnnnnnnnnnnnnnnnnnnnnnnnnnnnnnnnnnnnnnnnnnnnnnnnnnnnnnnnnnnnnnnnnnnnnnnnnnnnnnnnnnnnnnnnnnnnnnnnnnnnnnnnnnnnnnnnnnnnnnnnnnnnnnnnnnnnnnnnnnnnnnnnnnnnnnnnnnnnnnnnnnnnnnnnnnnnnnnnnnnnnnnnnnnnnnnnnnnnnnnnnnnnnnnnnnnnnnnnnnnnnnnnnnnnnnnnnnnnnnnnnnnnnnnnnnnnnnnnnnnnnnnnnnnnnnnnnnnnnnnnnnnnnnnnnnnnnnnnnnnnnnnnnnnnnnnnnnnnnnnnnnnnnnnnnnnnnnnnnnnnnnnnnnnnnnnnnnnnnnnnnnnnnnnnnnnnnnnnnnnnnnnnnnnnnnnnnnnnnnnnnnnnnnnnnnnnnnnnnnnnnnnnnnnnnnnnnnnnnnnnnnnnnnnnnnnnnnnnnnnnnnnnnnnnnnnnnnnnnnnnnnnnnnnnnnnnnnnnnnnnnnnnnnnnnnnnnnnnnnnnnnnnnnnnnnnnnnnnnnnnnnnnnnnnnnnnnnnnnnnnnnnnnnnnnnnnnnnnnnnnnnnnnnnnnnnnnnnnnnnnnnnnnnnnnnnnnnnnnnnnnnnnnnnnnnnnnnnnnnnnnnnnnnnnnnnnnnnnnnnnnnnnnnnnnnnnnnnnnnnnnnnnnnnnnnnnnnnnnnnnnnnnnnnnnnnnnnnnnnnnnnnnnnnnnnnnnnnnnnnnnnnnnnnnnnnnnnnnnnnnnnnnnnnnnnnnnnnnnnnnnnnnnnnnnnnnnnnnnnnnnnnnnnnnnnnnnnnnnnnnnnnnnnnnnnnnnnnnnnnnnnnnnnnnnnnnnnnnnnnnnnnnnnnnnnnnnnnnnnnnnnnnnnnnnnnnnnnnnnnnnnnnnnnnnnnnnnnnnnnnnnnnnnnnnnnnnnnnnnnnnnnnnnnnnnnnnnnnnnnnnnnnnnnnnnnnnnnnnnnnnnnnnnnnnnnnnnnnnnnnnnnnnnnnnnnnnnnnnnnnnnnnnnnnnnnnnnnnnnnnnnnnnnnnnnnnnnnnnnnnnnnnnnnnnnnnnnnnnnnnnnnnnnnnnnnnnnnnnnnnnnnnnnnnnnnnnnnnnnnnnnnnnnnnnnnnnnnnnnnnnnnnnnnnnnnnnnnnnnnnnnnnnnnnnnnnnnnnnnnnnnnnnnnnnnnnnnnnnnnnnnnnnnnnnnnnnnnnnnnnnnnnnnnnnnnnnnnnnnnnnnnnnnnnnnnnnnnnnnnnnnnnnnnnnnnnnnnnnnnnnnnnnnnnnnnnnnnnnnnnnnnnnnnnnnnnnnnnnnnnnnnnnnnnnnnnnnnnnnnnnnnnnnnnnnnnnnnnnnnnnnnnnnnnnnnnnnnnnnnnnnnnnnnnnnnnnnnnnnnnnnnnnnnnnnnnnnnnnnnnnnnnnnnnnnnnnnatggcagcactgcgctctcgatcgccctggaagcaggacacaaggacatcgctgttcttctgtatgcccatgtcaactttgcaaaagcccagtctccgg

SEQ ID NO: 31400 - DNA, 337 bp, Macaca Mulatta
ccaacttcatataaaatgtatgttaatttgctgaaatgtttgaccttacctgttcaataaagcctgtgtccctcacacccagggtgcagtctgcagtttgagttcacaggtccctgtgaatgaggaagcggcacaagaaaggctctgcgagcactgctagacttagtaggttaaaataatttacctcaactatttccccttaaggatcaatggctcacactggcttcaacaataaggaaatgcattagctcatgttggaggaggtccaggagtgcctagaattccaacttcacattagatccttatcttagaacttaacccagccacccaggaccaa

SEQ ID NO: 31401 - DNA, 764 bp, Macaca Mulatta
gggcctggagccgcccctgatgtgagtggtgctctctctgcagtgtaaagctgaacgagcacttcctgaacaccacggacttcctcgacaccatcaagagcaacctggacagagccctgggcaggcagtagagggaggcgccacccatggctgcagtggatgggccagggccgagccggcgggtcctcctgagcacggcagagggtgagcctcacagcccctctctggaggcctttctgggggattttttgtaagtgagatgtttttaaaagcatatgtgtgtttcccctcctggtgacgtgaggcaggagcagtgtgttttacctcagccagtcagtatgttttgcatactgtaatttatattgcccttggaacacatggtgccatatttagctactaaaaagctcttcacaaaactgtctgctgtgtttgtccctgaggggaggaggtagtgggaccctgaggcagaggccctgctagagctggcaggttcccctggggcagaccagagcacctcaggaaggggctgccaccgcggggaggggaccaggcagccctgggatcccgcattccgcaggggccccctgcggagctctcggacactcagggcacagacctgtgggttccctggaaatttctagcatgatccagtttctgtgtccagttctgcattctgagagtcaatcagtccctgataggttgtcattgattgttttcttagttggttttaaccttctaaacatctccagaccactttcttagcc

SEQ ID NO: 31402 - DNA, 647 bp, Macaca Mulatta
tggattcaaattgtatttacatatcagggaatcatacaaaggcaaaatctgtcaatatggtgaatgtggaaaatatattgtcttggaaatttgttctactaaaagccatatttctaatgtaaaatcaggtgtttataggaaagatctcagaggctataagctctgaataaatctttgttgtataaaatgaagtttttaaattatcaggagttgatcatgaggacagtagcattaaataagtgtatggccattttttatcatgtctttaaaatgctatctaatggtaattctatgcaagtttggaattgggcaacttgtgaagaggcagttttcttatttgaatattaggatggcaaatgtactaagacaggatatattgttggtcagataatatttagtaggtataaaatggtaaaatacctagttttctatttagaggaatttacaaatgggtttttaacaaatgcctcattagtagaagaggcagtgtttttgtaaagttttcaactgcatctgagcaagataagattttctaaaagactattttgataaactatacataacataatttggaattaagtctgtttcagtgaaagagaacaagcatggtgccaatactctaaaatatccccagctctcacaccacc

SEQ ID NO: 31403 - DNA, 892 bp, Macaca Mulatta
aagcaaccaagataccacgtgccaatgtcgccgatttccataaaccttttgagaaacgcctgctcctcacggcgacagtgagggtttctggcttctgcagggaccaccccactgtccttagcgtgggctcctctaattcttcccatcccacagcggagaaagctgaggccccgggacctctcgtgtctcctgatggcagtgctcgcgtcctccctgcgcctctcctggccgccccaccggagctgccgagctcacgtccgtctctgttgcgttgcaggagcaaggagcccctgcaggacaacgtcatcgccacctacgaggagcacgaggacagcgtctacgctgtggactggtcctcggccgacccgtggctgtttgcctccctgagctatgacgggaggctcgtgatcaacagggtgcccagggccctgaagtaccacatcctgctgtgactcccgggcctgagttatccaggttccactgggtggttatgctcttggcaggttcccaaacagtcacagctctttggcggtgactcatttccaggtgctccctctctgggagagccgctgtccccttcctctagcagcagcgtttatgaatggggtgaatggagctgttgtcgacggcacagctgacgcctgaacccagccgctgtcggcagagacggagccccacattgttatgtgaataacaacattttctgttttaagggtgttaggagtttcactttttaaaaaaatgttcctgcaatagtaactcttctttctcttcagagtaaacaatgaaataaaataaatccacgctgcacagatgctcggctcattcttgcaggagctctgccctgtgactgcatctcctgggtctttgtccattttctctttcctgaccc

SEQ ID NO: 31404 - DNA, 804 bp, Macaca Mulatta
  misc_feature (1)...(804): n = A,T,C or G
atttaatcaagtctgggatatttatggaaatcagagccactgtattaggtgttgataaaaacgattttaacttgcagacgtgagcccctgggcaccatgagccactaaacgggagctcaaatgacaggtatcaccaagtcttcaaggaggactgagttctcaggagagaactgggaatggggccagggtgcaaaagtntctttgcccgtctgtaggtagacacacagatcgctcagggcactgcgagatcccaaaaggtaacattaatgttttcagtcattgtgtgtccttcgttgctgccaatgtctttggatggtaatcagtgcatccatacctcccggaatccagtgctcccactcagctcagtctcccgtccctccctgtcctgcatttcatcccaactcctcagcgtggcctcagtgggcgcgcccatgcctcctgcagtccaggtgagcaggggaacaactgagcaggaacaggatggatcaacaagggtcatggggaataggggacccacagggtgagacctgcttgctggagaactgcaaacacgtggctctggatagagtcacagctgtcacagattgacttccagagagtgagtgagggacagaatatttccttcataatcatcatgggtgaatgctttctgctgtaagtgtattttagagtgggaatcaccgtagtggaacgcccagcaggcacaaaccatgggtccagggagtctcagtgaggaacttttatcaacaggaggacataaccatcggaaggagaaatgaatcatgtggaaaaaattctcagatc

SEQ ID NO: 31405 - DNA, 773 bp, Macaca Mulatta
  misc_feature (1)...(773): n = A,T,C or G
ggggtcctctgtgccacaagtgaagatgtttgttttgtttctctacagggaggaggatgtgcgagttgctgatttgaaaccaagaatctcctttaatttctatgtcactgcacctaaaaatgtgtctgacatcattcctagaactgaagttgaagaggccatcaggatctccaggagccgtatcaatgatgctttccgtctgaatgacaacagcctggagtttctggggatacagacaacacttgcacctccttaccagtcccccgttaccacatggctaattgtttttggagttgtgatgggagtgatagtggctggcattgtcgtcctgatcttcactgggatcagagatcgaaagaagaaaaatcaagcaagaagtgaagaaaatccttatgcctccatcgatattaacaaaggagaaaataatccaggattccaaaacactgatgatgttcagacctccttttagaaaaatctatgttttttctcttgaggtgattttgttgtangtaaatgttaatttcatggtatcgaacatatgagatgataaatatatcattaaatgtcaaaactatgaatctgttcagaaaaaaattgtccaaagacaacatggtcaaagagagagcatcttcattgacattgctttcagtatttatttctgtctctgggatttgacttctgttccgtttccaataagggattttgtattagaatgtatttagggaaaatgtgtattttgggctcacgggcctgttcaggggataatcctaatg

SEQ ID NO: 31406 - DNA, 567 bp, Macaca Mulatta
  misc_feature (1)...(567): n = A,T,C or G
cggagtccggcgtgtggcgcctgggagcgcggcaacggcgccatgtccctaatctgctccctctaatgaagtgccggagcacccatgtgtgtcccctgtctctaatcatgtttatgagcggcggctcattgagaagtacattgcagagaatggtaccgaccccatcaacaaccagcctctctccgaggagcagctcatcgacatcaaagnagttgctcacccaatccggcccaagcctccctcagccaccagcatcccggccattctgaaagccttgcaggatgagtgggnnnnnnnnnnnnnnnnnnnnnnnnnnnnnnnnnnnnnnnnnnnnnnnnnnnnnnnnnnnnnnnnnnnnnnnnnnnnnnnnnnnnnnnnnnnnnnnnnnnnnnnnnnnnnnnnnnnnnnnnnnnnnnnnnnnnnnnnnnnnnnnnnnnnnnnnnnnnnnnnnnnnnnnnnnnnnnnnnnnnnnnnnnnnnnnnnnnnnnnnnnnnnnnnnnnnnngggtgcgggcgagccaatggatttgggtgagctggtgggaatgaccccagagattattcagaa

SEQ ID NO: 31407 - DNA, 641 bp, Macaca Mulatta
gccttagtcctccgccagccaccttcctcagctcatcctaggcttcagcagtcagcgtttcctggacattcggggtcatgtcacctgtcttgcataggctaacagggtaaactaagtccccttgtaaaacccacagtgggaaaaagagtgcagctcccagcctgctgtgggagcctgactcactggccatccgcttctcctctgtctgcagctgtggcgacggggtggcagaaccctcctacccagtggtgccagaatctacaggaccagagaagcatcaggagcccaactgatctgcagtggctgacagcagcgaaaccatgtgttcggcctggccacgatgctgttttcatctgctccgtggctcctgtggcctgcccttgtctcacagccaggcggggctgtatgtgggtgtggggctgccaggttgaacccagctgctgctgccctgactttggcatatgccagcctgttcctgccacggggcagtcactgccgcccaccctgaaataaaccctcgagtgacccccagcagcctttccacctcgagatgtgtgcccatgtcagtgatgaccagggtttcatgtggcctctcacccctgctagcacaggttttggagatggcttgctgtccacttcac

SEQ ID NO: 31408 - DNA, 510 bp, Macaca Mulatta
caaagtgagtaacttttacagataaaatttatctaagatgatttctgagtgaaatattttttggttacagaatttctacaagtgtgaaagaattagaaaacttcaggaacttgttacaaagtattcattaaagaaaacaagctgatatgtgcctgtttctggacagtggaggccaaagagtggaatttcattcaaaggcataatagcaatgacagtcttaagccaaacattttatataaagttgcttttgtaaaggagaattatattgttttaagtaaacacattttaaaaaattgtgttaagtctatgtataatactactgtgaggaaaagtaatactttaataatgtggtacaaattttaaagtttaatattgaataaaaggaggattatcaaattcatatatgataaaagtgaatattctaagtgtctgaaactagcattttgtgtaataagatgtaatataaataaaactatggtaaatatggcaagcatttaataggaaaatgct

SEQ ID NO: 31409 - DNA, 2067 bp, Macaca Mulatta
  misc_feature (1)...(2067): n = A,T,C or G
caatatgaataattccctggagaacaccatctcctttgaagagtacatccgagtaaaggcacggtctgtcccgcaacacaggatgaaggaatttctggactcactggcctctaaggggccagaagcccttcaggagttccagcagacagccaccactaccatggtgtaccaacagggtgggaactgcatatacacagacagcactgaagtggctgggtctttgcttgaacttgcctgtccagtcaccaccagtgttcagccacaaacccagcaagaacagcagatccaggttcagcagccacagcaggttcaggtatatgggaaaaggtgaggnnnnnnnnnnnnnnnnnnnnnnnnnnnnnnnnnnnnnnnnnnnnnnnnnnnnnnnnnnnnnnnnnnnnnnnnnnnnnnnnnnnnnnnnnnnnnnnnnnnnnnnnnnnnnnnnnnnnnnnnnnnnnnnnnnnnnnnnnnnnnnnnnnnnnnnnnnnnnnnnnnnnnnnnnnnnnnnnnnnnnnnnnnnnnnnnnnnnnnnnnnnnnnnnnnnnnnnnnnnnnnnnnnnnnnnnnnnnnnnnnnnnnnnnnnnnnnnnnnnnnnnnnnnnnnnnnnnnnnnnnnnnnnnnnnnnnnnnnnnnnnnnnnnnnnnnnnnnnnnnnnnnnnnnnnnnnnnnnnnnnnnnnnnnnnnnnnnnnnnnnnnnnnnnnnnnnnnnnnnnnnnnnnnnnnnnnnnnnnnnnnnnnnnnnnnnnnnnnnnnnnnnnnnnnnnnnnnnnnnnnnnnnnnnnnnnnnnnnnnnnnnnnnnnnnnnnnnnnnnnnnnnnnnnnnnnnnnnnnnnnnnnnnnnnnnnnnnnnnnnnnnnnnnnnnnnnnnnnnnnnnnnnnnnnnnnnnnnnnnnnnnnnnnnnnnnnnnnnnnnnnnnnnnnnnnnnnnnnnnnnnnnnnnnnnnnnnnnnnnnnnnnnnnnnnnnnnnnnnnnnnnnnnnnnnnnnnnnnnnnnnnnnnnnnnnnnnnnnnnnnnnnnnnnnnnnnnnnnnnnnnnnnnnnnnnnnnnnnnnnnnnnnnnnnnnnnnnnnnnnnnnnnnnnnnnnnnnnnnnnnnnnnnnnnnnnnnnnnnnnnnnnnnnnnnnnnnnnnnnnnnnnnnnnnnnnnnnnnnnnnnnnnnnnnnnnnnnnnnnnnnnnnnnnnnnnnnnnnnnnnnnnnnnnnnnnnnnnnnnnnnnnnnnnnnnnnnnnnnnnnnnnnnnnnnnnnnnnnnnnnnnnnnnnnnnnnnnnnnnnnnnnnnnnnnnnnnnnnnnnnnnnnnnnnnnnnnnnnnnnnnnnnnnnnnnnnnnnnnnnnnnnnnnnnnnnnnnnnnnnnnnnnnnnnnnnnnnnnnnnnnnnnnnnnnnnnnnnnnnnnnnnnnnnnnnnnnnnnnnnnnnnnnnnnnnnnnnnnnnnnnnnnnnnnnnnnnnnnnnnnnnnnnnnnnnnnnnnnnnnnnnnnnnnnnnnnnnnnnnnnnnnnnnnnnnnnnnnnnnnnnnnnnnnnnnnnnnnnnnnnnnnnggcgccaactgctgcgattccaggaagatctcatatcctctgctgtggcagagttgaattatgggctctgtctaatgacacgggaagctcgaaatggagaaggtgaaccctatgacccagatgtgctctactatattttcctgtgtattcaaaannnnnnnnnnnnnnnnnnnnnnnnnnnnnnnnnnnnnnnnnnnnnnnnnnnnnnnnnnnnnnnnnnnnnnnnnnnnnnnnnnnnnnnnnnnnnnnnnnnnnnnnnnnnnnnnnnnnnnnnnnnnnnnnnnnnnnnnnnnnnnnnnnnnnnnnnnnnnnnnnnnnnnnnnnnnnnnnnnnnnnnnnnnnnnnnnnnnnnnnnnnnnnnnnnnnnnnnnnnnnnnngtacttcctattgaagacagtggaccagcacatgaagctggccttctccaaggtcttgcgacagacaaagaagaacccctctaatcccaaggataaaagcacgagtatccggtacttgaaggcccttggaatacaccagactggccagaaa

SEQ ID NO: 31410 - DNA, 168 bp, Macaca Mulatta
gagaactttacctcagtttcatgcaagcctccttctcctcctccaaaaatagaaaggaaatttccaccttacaacggttttggttctgaagaggattctctccgtacctgcataggcctcaagcccacacctcatcggaggaacttcaagaagttgtggaaaaagaca

SEQ ID NO: 31411 - DNA, 342 bp, Macaca Mulatta
gggcggcagcctggggtcgccctacccggggggcgccttggtgcccgccccgccgagccgcttccttggcgcctacacctacccgccgcggccccaggcggccggcttccccggcgcgggcgagtccttcccgccgcccgcgggcgccgagggctaccagccgggcgagggctacgccgccccggacccgcgcgccgggctttacccggggccgcgtgaggactacgcgctacccgcggggctggaggtgtcggggaaactgagagtcgcgctcaacaaccacctgttgtggtccaagtttaatcagcaccagacagagatgatcatcaccaagcagggacg

SEQ ID NO: 31412 - DNA, 482 bp, Macaca Mulatta
gataagtctaggaaaagaaagataggaaaacgggattccttttcagaagtacctgtgtgtatctgttaataaccacaggggttaatacgatgtgggattctttactatcaatttcaaccatttgattttgtatgattgaaacttgcaccgagctttgactgtttgttaaagagtcatttttaatgaaagaataattctttattgctggtttttcatttacactgataaatacacagatcttataaagtctttaacattcatttgtattcagatgtgagtagatgaactaaaaaaagaaagttacatatcactatgactgaaggtacttcagattaatctgaaatataatttaacttgtgaactctttggatatgatattatttggaataaatagaatttatcattgaacccaaagtaggaaatagtagcttacgttgtctaaaaatccttacaaggttaagatgattcaatatcaggaagat

SEQ ID NO: 31413 - DNA, 810 bp, Macaca Mulatta
  misc_feature (1)...(810): n = A,T,C or G
gggctcttttccgtggcgcctcggaggcgttcagctgcttcgagatgaagctgaacatctccttcccagccactggctgccagaaactcattgaagtggacgatgaacgcaaacttcgtactttttatgagaagcgtatggccacagaagttgctgctgacgctctgggtgaagaatggaagggttatgtggtccgaatcagtggtgggaacgacaaacaaggtttccccatgaagcagggtgtcttgacccatggcccggtccgcctgctactgagtaaggggcattcctgttacagaccaaggataacgggagaaagaagganaaaatcacttcgtggttgcattgtggatgcccctctgaccgctcccacctcggctcttcgcagcggacgagacaaggatttccctggactgacggatgctgccagttcgtcgcccgcctgggcgtcgcgatagcctagcccactccggcgggctgttcgatctgtgcggcgcaagatgacggtcggcccgcgggatggcaggagggcccttgagcctggcacaggtaggcccccctgggcacggggccgcccaggcatcccgccgcggtccggcctttccctcctcttctcttcccgtaacgagatgncacgcgtgtgtgggccgcggcaggaggggcgtcggtccgtcgcgggggtcatcctccgctcggcggtgcgggtcctgagtgtaagggtctggcttctgctggccctctagttgcgtggcgggtcgcgccgattcatgcggccaccgagcgggtgaggcggcgctggcgtttggcgcg

SEQ ID NO: 31414 - DNA, 5981 bp, Macaca Mulatta
  misc_feature (1)...(5981): n = A,T,C or G
tctcaaaccatgaattatgtgggacagctggctgggcaggtgattgtcactgtaaaggaactctacaagggcattaaccaggccatcctctctgggtgcatcgatgtcatcgtggtacagcagcaggatggcagctatcagtgttcaccttttcacgttcggtttgggaagctgggagtcctgagatccaaagagaaagtggattgatatagaaatcaatggcaatgcagtggatcttcacatgaagttgggtgacaatggagaagctttctttgttgaggagactgaagaagaatatnnnnnnnnnnnnnnnnnnnnnnnnnnnnnnnnnnnnnnnnnnnnnnnnnnnnnnnnnnnnnnnnnnnnnnnnnnnnnnnnnnnnnnnnnnnnnnnnnnnnnnnnnnnnnnnnnnnnnnnnnnnnnnnnnnnnnnnnnnnnnnnnnnnnnnnnnnnnnnnnnnnnnnnnnnnnnnnnnnnnnnnnnnnnnnnnnnnnnnnnnnnnnnnnnnnnnnnnnnnnnnnnnnnnnnnnnnnnnnnnnnnnnnnnnnnnnnnnnnnnnnnnnnnnnnnnnnnnnnnnnnnnnnnnnnnnnnnnnnnnnnnnnnnnnnnnnnnnnnnnnnnnnnnnnnnnnnnnnnnnnnnnnnnnnnnnnnnnnnnnnnnnnnnnnnnnnnnnnnnnnnnnnnnnnnnnnnnnnnnnnnnnnnnnnnnnnnnnnnnnnnnnnnnnnnnnnnnnnnnnnnnnnnnnnnnnnnnnnnnnnnnnnnnnnnnnnnnnnnnnnnnnnnnnnnnnnnnnnnnnnnnnnnnnnnnnnnnnnnnnnnnnnnnnnnnnnnnnnnnnnnnnnnnnnnnnnnnnnnnnnnnnnnnnnnnnnnnnnnnnnnnnnnnnnnnnnnnnnnnnnnnnnnnnnnnnnnnnnnnnnnnnnnnnnnnnnnnnnnnnnnnnnnnnnnnnnnnnnnnnnnnnnnnnnnnnnnnnnnnnnnnnnnnnnnnnnnnnnnnnnnnnnnnnnnnnnnnnnnnnnnnnnnnnnnnnnnnnnnnnnnnnnnnnnnnnnnnnnnnnnnnnnnnnnnnnnnnnnnnnnnnnnnnnnnnnnnnnnnnnnnnnnnnnnnnnnnnnnnnnnnnnnnnnnnnnnnnnnnnnnnnnnnnnnnnnnnnnnnnnnnnnnnnnnnnnnnnnnggtgttcacaaaagaagccagcaccaaggacctgatgatatttaccttgatgacttaaagggtctagaacctgaagttgcagctctttatttccctaaaagnnnnnnnnnnnnnnnnnnnnnnnnnnnnnnnnnnnnnnnnnnnnnnnnnnnnnnnnnnnnnnnnnnnnnnnnnnnnnnnnnnnnnnnnnnnnnnnnnnnnnnnnnnnnnnnnnnnnnnnnnnnnnnnnnnnnnnnnnnnnnnnnnnnnnnnnnnnnnnnnnnnnnnnnnnnnnnnnnnnnnnnnnnnnnnnnnnnnnnnnnnnnnnnnnnnnnnnnnnnnnnnnnnnnnnnnnnnnnnnnnnnnnnnnnnnnnnnnnnnnnnnnnnnnnnnnnnnnnnnnnnnnnnnnnnnnnnnnnnnnnnnnnnnnnnnnnnnnnnnnnnnnnnnnnnnnnnnnnnnnnnnnnnnnnnnnnnnnnnnnnnnnnnnnnnnnnnnnnnnnnnnnnnnnnnnnnnnnnnnnnnnnnnnnnnnnnnnnnnnnnnnnnnnnnnnnnnnnnnacagctgccagaatccaaggagggaaaatctgaggcaccgccagccagtgacctgccatccagctccaaggagccggccagcgccagnnnnnnnnnnnnnnnnnnnnnnnnnnnnnnnnnnnnnnnnnnnnnnnnnnnnnnnnnnnnnnnnnnnnnnnnnnnnnnnnnnnnnnnnnnnnnnnnnnnnnnnnnnnnnnnnnnnnnnnnnnnnnnnnnnnnnnnnnnnnnnnnnnnnnnnnnnnnnnnnnnnnnnnnnnnnnnnnnnnnnnnnnnnnnnnnnnnnnnnnnnnnnnnnnnnnnnnnnnnnnnnnnnnnnnnnnnnnnnnnnnnnnnnnnnnnnnnnnnnnnnnnnnnnnnnnnnnnnnnnnnnnnnnnnnnnnnnnnnnnnnnnnnnnnnnnnnnnnnnnnnnnnnnnnnnnnnnnnnnnnnnnnnnnnnnnnnnnnnnnnnnnnnnnnnnnnnnnnnnnnnnnnnnnnnnnnnnnnnnnnnnnnnnnnnnnnnnnnnnnnnnnnnnnnnnnnnnnnnnnnnnnnnnnnnnnnnnnnnnnnnnnnnnnnnnnnnnnnnnnnnnnnnnnnnnnnnnnnnnnnnnnnnnnnnnnnnnnnnnnnnnnnnnnnnnnnnnnnnnnnnnnnnnnnnnnnnnnnnnnnnnnnnnnnnnnnnnnnnnnnnnnnnnnnnnnnnnnnnnnnnnnnnnnnnnnnnnnnnnnnnnnnnnnnnnnnnnnnnnnnnnnnnnnnnnnnnnnnnnnnnnnnnnnnnnnnnnnnnnnnnnnnnnnnnnnnnnnnnnnnnnnnnnnnnnnnnnnnnnnnnnnnnnnnnnnnnnnnnnnnnnnnnnnnnnnnnnnnnnnnnnnnnnnnnnnnnnnnnnnnnnnnnnnnnnnnnnnnnnnnnnnnnnnnnnnnnnnnnnnnnnnnnnnnnnnnnnnnnnnnnnnnnnnnnnnnnnnnnnnnnnnnnnnnnnnnnnnnnnnnnnnnnnnnnnnnnnnnnnnnnnnnnnnnnnnnnnnnnnnnnnnnnnnnnnnnnnnnnnnnnnnnnnnnnnnnnnnnnnnnnnnnnnnnnnnnnnnnnnnnnnnnnnnnnnnnnnnnnnnnnnnnnnnnnnnnnnnnnnnnnnnnnnnnnnnnnnnnnnnnnnnnnnnnnnnnnnnnnnnnnnnnnnnnnnnnnnnnnnnnnnnnnnnnnnnnnnnnnnnnnnnnnnnnnnnnnnnnnnnnnnnnnnnnnnnnnnnnnnnnnnnnnnnnnnnnnnnnnnnnnnnnnnnnnnnnnnnnnnnnnnnnnnnnnnnnnnnnnnnnnnnnnnnnnnnnnnnnnnnnnnnnnnnnnnnnnnnnnnnnnnnnnnnnnnnnnnnnnnnnnnnnnnnnnnnnnnnnnnnnnnnnnnnnnnnnnnnnnnnnnnnnnnnnnnnnnnnnnnnnnnnnnnnnnnnnnnnnnnnnnnnnnnnnnnnnnnnnnnnnnnnnnnnnnnnnnnnnnnnnnnnnnnnnnnnnnnnnnnnnnnnnnnnnnnnnnnnnnnnnnnnnnnnnnnnnnnnnnnnnnnnnnnnnnnnnnnnnnnnnnnnnnnnnnnnnnnnnnnnnnnnnnnnnnnnnnnnnnnnnnnnnnnnnnnnnnnnnnnnnnnnnnnnnnnnnnnnnnnnnnnnnnnnnnnnnnnnnnnnnnnnnnnnnnnnnnnnnnnnnnnnnnnnnnnnnnnnnnnnnnnnnnnnnnnnnnnnnnnnnnnnnnnnnnnnnnnnnnnnnnnnnnnnnnnnnnnnnnnnnnnnnnnnnnnnnnnnnnnnnnnnnnnnnnnnnnnnnnnnnnnnnnnnnnnnnnnnnnnnnnnnnnnnnnnnnnnnnnnnnnnnnnnnnnnnnnnnnnnnnnnnnnnnnnnnnnnnnnnnnnnnnnnnnnnnnnnnnnnnnnnnnnnnnnnnnnnnnnnnnnnnnnnnnnnnnnnnnnnnnnnnnnnnnnnnnnnnnnnnnnnnnnnnnnnnnnnnnnnnnnnnnnnnnnnnnnnnnnnnnnnnnnnnnnnnnnnnnnnnnnnnnnnnnnnnnnnnnnnnnnnnnnnnnnnnnnnnnnnnnnnnnnnnnnnnnnnnnnnnnnnnnnnnnnnnnnnnnnnnnnnnnnnnnnnnnnnnnnnnnnnnnnnnnnnnnnnnnnnnnnnnnnnnnnnnnnnnnnnnnnnnnnnnnnnnnnnnnnnnnnnnnnnnnnnnnnnnnnnnnnnnnnnnnnnnnnnnnnnnnnnnnnnnnnnnnnnnnnnnnnnnnnnnnnnnnnnnnnnnnnnnnnnnnnnnnnnnnnnnnnnnnnnnnnnnnnnnnnnnnnnnnnnnnnnnnnnnnnnnnnnnnnnnnnnnnnnnnnnnnnnnnnnnnnnnnnnnnnnnnnnnnnnnnnnnnnnnnnnnnnnnnnnnnnnnnnnnnnnnnnnnnnnnnnnnnnnnnnnnnnnnnnnnnnnnnnnnnnnnnnnnnnnnnnnnnnnnnnnnnnnnnnnnnnnnnnnnnnnnnnnnnnnnnnnnnnnnnnnnnnnnnnnnnnnnnnnnnnnnnnnnnnnnnnnnnnnnnnnnnnnnnnnnnnnnnnnnnnnnnnnnnnnnnnnnnnnnnnnnnnnnnnnnnnnnnnnnnnnnnnnnnnnnnnnnnnnnnnnnnnnnnnnnnnnnnnnnnnnnnnnnnnnnnnnnnnnnnnnnnnnnnnnnnnnnnnnnnnnnnnnnnnnnnnnnnnnnnnnnnnnnnnnnnnnnnnnnnnnnnnnnnnnnnnnnnnnnnnnnnnnnnnnnnnnnnnnnnnnnnnnnnnnnnnnnnnnnnnnnnnnnnnnnnnnnnnnnnnnnnnnnnnnnnnnnnnnnnnnnnnnnnnnnnnnnnnnnnnnnnnnnnnnnnnnnnnnnnnnnnnnnnnnnnnnnnnnnnnnnnnnnnnnnnnnnnnnnnnnnnnnnnnnnnnnnnnnnnnnnnnnnnnnnnnnnnnnnnnnnnnnnnnnnnnnnnnnnnnnnnnnnnnnnnnnnnnnnnnnnnnnnnnnnnnnnnnnnnnnnnnnnnnnnnnnnnnnnnnnnnnnnnnnnnnnnnnnnnnnnnnnnnnnnnnnnnnnnnnnnnnnnnnnnnnnnnnnnnnnnnnnnnnnnnnnnnnnnnnnnnnnnnnnnnnnnnnnnnnnnnnnnnnnnnnnnnnnnnnnnnnnnnnnnnnnnnnnnnnnnnnnnnnnnnnnnnnnnnnnnnnnnnnnnnnnnnnnnnnnnnnnnnnnnnnnnnnnnnnnnnnnnnnnnnnnnnnnnnnnnnnnnnnnnnnnnnnnnnnnnnnnnnnnnnnnnnnnnnnnnnnnnnnnnnnnnnnnnnnnnnnnnnnnnnnnnnnnnnnnnnnnnnnnnnnnnnnnnnnnnnnnnnnnnnnnnnnnnnnnnnnnnnnnnnnnnnnnnnnnnnnnnnnnnnnnnnnnnnnnnnnnnnnnnnnnnnnnnnnnnnnnnnnnnnnnnnnnnnnnnnnnnnnnnnnnnnnnnnnnnnnnnnnnnnnnnnnnnnnnnnnnnnnnnnnnnnnnnnnnnnnnnnnnnnnnnnnnnnnnnnnnnnnnnnnnnnnnnnnnnnnnnnnnnnnnnnnnnnnnnnnnnnnnnnnnnnnnnnnnnnnnnnnnnnnnnnnnnnnnnnnnnnnnnnnnnnnnnnnnnnnnnnnnnnnnnnnnnnnnnnnnnnnnnnnnnnnnnnnnnnnnnnnnnnnnnnnnnnnnnnnnnnnnnnnnnnnnnnnnnnnnnnnnnnnnnnnnnnnnnnnnnnnnnnnnnnnnnnnnnnnnnnnnnnnnnnnnnnnnnnnnnnnnnnnnnnnnnnnnnnnnnnnnnnnnnnnnnnnnnnnnnnnnnnnnnnnnnnnnnnnnnnnnnnnnnnnnnnnnnnnnnnnnnnnnnnnnnnnnnnnnnnnnnnnnnnnnnnnnnnnnnnnnnnnnnnnnnnnnnnnnnnnnnnnnnnnnnnnnnnnnnnnnnnnnnnnnnnnnnnnnnnnnnnnnnnnnnnnnnnnnnnnnnnnnnnnnnnnnnnnnnnnnnnnnnnnnnnnnnnnnnnnnnnnnnnnnnnnnnnnnnnnnnnnnnnnnnnnnnnnnnnnnnnnnnnnnnnnnnnnnnnnnnnnnnctcttttaataattatgttcagcctatgatgaagtatttgattattagacagcaacatcactaataagttntaagttgtccaaagttaattgtaaacatcagtacagtactcttagttacagtaaagcaattgtcgcaagatgaatggctcatattttggtgcagtgtttgatgttcaaaacaaaatgttacaacaataaacgaacat

SEQ ID NO: 31415 - DNA, 419 bp, Macaca Mulatta
  misc_feature (1)...(419): n = A,T,C or G
gctgactatgaacaaacggtacaatgtctcccaacaagctcttgatctccagaatctccgctttgacccagnnnnnnnnnnnnnnnnnnnnnnnnnnnnnnnnnnnnnnnnnnnnnnnnnnnnnnnnnnnnnnnnnnnnnnnnnnnnnnnnnnnnnnnnnnnnnnnnnnnnnnnnnnnnnnnnnnnnnnnnnnnnnnnnnnnnnnnnnnnnnnnnnnnnnnnnnnnnnnnnnnnnnnnnnnnnnnnnnnnnnnnnnnnnnnnnnnngctggagtcggcatgggagttgggcaaggtgaaagggctgaagctcgaagagctatggctagaagggaaccccttgtgcagcaccttctcggaccagtccgcctatgtaagnagtgccatccgggactgtttccccaagttgttacgcctggn

SEQ ID NO: 31416 - DNA, 133 bp, Macaca Mulatta
attgatttttccacagtgaaaaatgtgattccagataaatatatactgtctactttgcaaaggtggcgtttaaatgtgctgcgtttgaattttcatggttgtcttctccgacccaaaactttcagatctgtca

SEQ ID NO: 31417 - DNA, 105 bp, Macaca Mulatta
gctcaaagttgtaaatgctttagaagcacagaatcgtatcttctttgtttctgcaaaggaagttcttagtgctagaaagcaaaaagcacaggggatgccagaaag

SEQ ID NO: 31418 - DNA, 491 bp, Macaca Mulatta
  misc_feature (1)...(491): n = A,T,C or G
tcctctatgctgccactgtgaaaaactacctggggacggagccgattatcacccgagcagtgggtcgtgctgaggactggattcggacagacaccttaccgtcctggctgaannnnnnnnnnnnnnnnnnnnnnnnnnnnnnnnnnnnnnnnnnnnnnnnnnnnnnnnnnnnnnnnnnnnnnnnnnnnnnnnnnnnnnnnnnnnnnnnnnnnnnnnnnnnnnnnnnnnnnnnnnnnnnnnnnnnnnnnnnnnnnnnnnnnnnnnnnggggaccttgggggccggaagactctccagcagagatggacgacgtttttgaaagctgacctgctctgtccagggcctgagcatggccgggcctccagtgtcctgcaggatgttgctgtgcttcgacctgagcttggggcagggactcccatcttttatggcatcttttcttcccagtggngggagggggctgccatttctgctgtctgtgccttccgaccacaa

SEQ ID NO: 31419 - DNA, 707 bp, Macaca Mulatta
ggccggacggcactagagtatacaattccttcctatcggtgactactgtataattttcacttctgcattatgtacataaaagagaccactaccactggggtagaaattcctgcctcgttcaatgcggcaagtttttgtatataagataaatacggtcttcatgtttatagtccaaatttgcagaccctacaactctgggtgtcataggtctattttaaggggagagagagaaaaacacccttactatcttggaaggcaatattaacaaacagagcttttttcaaatagcaattgtacttttctacctgtacccttttacataaagtgtttaaatttcagaaagatcttttattaagcatactttcacagaataatttgtttaaactatattcatattaaaaagttaaacacgctttttttcctgcctaaaaacacaaatacaactgccagtatgtatttttaatggaaccctattttataatgttacgttactgaatgtgtttcatatgcgtgaccattaagatattatttaggtgaaggtttcaactcaaaaccacccaacctggtggttaacgattttatacacataaccaaaccgagcagcagttagagcttgggatatacatttaaaccttttccctggttaaggttcccaaaaacagtgtaaagggtttttagctaagaagcaaaaatatcattgcagccta

SEQ ID NO: 31420 - DNA, 1149 bp, Macaca Mulatta
  misc_feature (1)...(1149): n = A,T,C or G
aggattccattactggttgaactatggcacaaggataaaatgagtaaagatttacttctgggaattgcgagagatccagctttctannnnnnnnnnnnnnnnnnnnnnnnnnnnnnnnnnnnnnnnnnnnnnnnnnnnnnnnnnnnnnnnnnnnnnnnnnnnnnnnnnnnnnnnnnnnnnnnnnnnnnnnnnnnnnnnnnnnnnnnnnnnnnnnnnnnnnnnnnnnnnnnnnnnnnnnnnnnnnnnnnnnnnnnnnnnnnnnnnnnnnnnnnnnnnnnnnnnnnnnnnnnnnnnnnnnnnnnnnnnnnnnnnnnnnnnnnnnnnnnnnnnnnnnnnnnnnnnnnnnnnnnnnnnnnnnnnnnnnnnnnnnnnnnnnnnnnnnnnnnnnnnnnnnnnnnnnnnnnnnnnnnnnnnnnnnnnnnnnnnnnnnnnnnnnnnnnnnnnnnnnnnnnnnnnnnnnnnnnnnnnnnnnnnnnnnnnnnnnnnnnnnnnnnnnnnnnnnnnnnnnnnnnnnnnnnnnnnnnnnnnnnnnnnnnnnnnnnnnnnnnnnnnnnnnnnnnnnnnnnnnnnnnnnnnnnnnnnnnnnnnnnnnnnnnnnnnnnnnnnnnnnnnnnnnnnnnnnnnnnnnnnnnnnnnnnnnnnnnnnnnnnnnnnnnnnnnnnnnnnnnnnnnnnnnnnnnnnnnnnnnnnnnnnnnnnnnnnnnnnnnnnnnnnnnnnnnnnnnnnnnnnnnnnnnnnnnnnnnnnnnnnnnnnnnnnnnnnnnnnnnnnnnnnnnnnnnnnnnnnnnnnnnnnnnnnnnnnnnnnnnnnnnnnnnnnnnnnnnnnnnnnnnnnnnnnnnnnnnnnnnnnnnnnnnnnnnnnnnnnnnnnnnnnnnnnnnnnnnnnnnnnnnnnnnnnnnnnnnnnnnnnnnnnnnnnnnnnnnnnnnnnnnnnnnnnnnnnnnnnnnnnnnnnnnnnnnnnnnnnnnnnnnnnnnnnnnnnnnnnnnnnnnnnnnnnnngagggaacaagaaagtcaaatggctcgtcttaaaaaacagcaggaagaattggaacagatgagactacgttacctggctgctgaggaaaaagatacagtaaaaaccgagcgacaagaattgttggatataagaaatgaattgaacaggt

SEQ ID NO: 31421 - DNA, 1695 bp, Macaca Mulatta
  misc_feature (1)...(1695): n = A,T,C or G
ggtgggatggatagcagggcctcaggcacagccagtaatggagagacaaagccagtgtatccagtcatggaaaaggaggaggaagaaggcaccctggagcgggggcactggaacaacaagatggagtttgtgctgtcagtggccggggagatcatcgggctgggcaacgtctggaggtttccctatctctgctacaaaaatgggggaggtgnnnnnnnnnnnnnnnnnnnnnnnnnnnnnnnnnnnnnnnnnnnnnnnnnnnnnnnnnnnnnnnnnnnnnnnnnnnnnnnnnnnnnnnnnnnnnnnnnnnnnnnnnnnnnnnnnnnnnnnnnnnnnnnnnnnnnnnnnnnnnnnnnnnnnnnnnnnnnnnnnnnnnnnnnnnnnnnnnnnnnnnnnnnnnnnnnnnnnnnnnnnnnnnnnnnnnnnnnnnnnnnnnnnnnnnnnnnnnnnnnnnnnnnnnnnnnnnnnnnnnnnnnnnnnnnnnnnnnnnnnnnnnnnnnnnnnnnnnnnnnnnnnnnnnnnnnnnnnnnnnnnnnnnnnnnnnnnnnnnnnnnnnnnnnnnnnnnnnngcggcgggtcttgaagatctctgatgggatccagcacctgggggccctgcgctgggagctggctctgtgcctcctgctggcctgggtcatctgctacttctgcatctggaagggggtcaagtccacaggcaaggnnnaggtggtgtacttcacggccacatttccttacctcatgctggtggtcctgttaattcgaggggtgacgttgcctgggacagcccaaggaattcagttttacctgtacccaaacctcaagagtatgtgggatccccaggnnnnnnnnnnnnnnnnnnnnnnnnnnnnnnnnnnnnnnnnnnnnnnnnnnnnnnnnnnnnnnnnnnnnnnnnnnnnnnnnnnnnnnnnnnnnnnnnnnnnnnnnnnnnnnnnnnnnnnnnnnnnnnnnnnnnnnnnnnnnnnnnnnnnnnnnnnnnnnnnnnnnnnnnnnnnnnnnnnnnnnnnnnnnnnnnnnnnnnnnnnnnnnnnnnnnnnnnnnnnnnnnnnnnnnnnnnnnnnnnnnnnnnnnnnnnnnnnnnnnnnnnnnnnnnnnnnnnnnnnnnnnnnnnnnnnnnnnnnnnnnnnnnnnnnnnnnnnnnnnnnnnnnnnnnnnnnnnnnnnnnnnnnnnngtagaaagcctggtgacagcgctggtggacatgtaccctcgcgtgttccgcaagaagaaccggcgggaagtccttatccttggagtatccgtcgtctccttccttgtagggctggtcatgctcacggagnnnnnnnnnnnnnnnnnnnnnnnnnnnnnnnnnnnnnnnnnnnnnnnnnnnnnnnnnnnnnnnnnnnnnnnnnnnnnnnnnnnnnnnnnnnnnnnnnnnnnnnnnnnnnnnnnnnnnnnnnnnnnnnnnnnnnnnnnnnnnnnnnnnnnnnnnnnnnnnnnnnnnnnnnnnnnnnnnnnnnnnnnnnnnnnnnnnnnnnnnnngccaccttcctcttctccctgatcaagtacactccgctgacctacaacaagaaatacacgtacccgtggtggggcgatgccctgggctggctcctggctctctcctccatggtctgcaaacatgcctggagcctctacagacttggcaccctcaagggccccttcagaga

SEQ ID NO: 31422 - DNA, 1070 bp, Macaca Mulatta
  misc_feature (1)...(1070): n = A,T,C or G
acacagaatagagcaatcaatagtgcgctgataaaattctgctaaaacaagaatttaggttaatgattaaaccatgaaccaggttaccaaggaagattgtgaaattgctcttcctaaggtggagtagacaatacctggatgtcatccacgtaggcgtccctcccagagggggctgtacaaacactgaattggatcacctaaccagatggcctgaactcttgaccctggtagccctgtttccctgatactctggccaagtttgctaggtagttgggaaagcaatatggaatagtagttaacatcttgtgtttgagtatagctctatcatttaccatcttggtgaccttgggcaaatgcttcatttctctaagcctcagttttctcatcagtaaaatagagcaccattctttatgagaatgataagtacctcctagagtattcagagaattgaatgagttcaaagctattagcacagtatgtagtgcatataaatctaaattactattatttgtaatcattttnnnnnnnnnnnnnnnactgaccctgccctattcagtcacataatgagcatggttgagggattggagaattgatactggtggttgaggatcctcaacacagggacagggaaggaatggaggagaagattttgtacctcccaaacccaaagggaaaggggtgtgggagggcctcctgctaaatgttgatactatctaaacacagatcagcccttgaaacaggacctatcaggatagaaactaatgcagccaccaaaggcaaaggggtctctggcttgaccagtgggaaaatgtatttctagcagttacctgctttcactcgggagaggtgaggcatggacagcttgtgtttattttggtttcccctcccttaggtaatctcagggggaaaaggaggggttactagtgtctgttaatgtgtatgagagttggagagcgtcatggccagacctgcagttgtctgaaactgggatgtgtgcctatgaatcactggcactggcagtattcctaacaagcagactgacctctctagataaggtgtggttattttcc

SEQ ID NO: 31423 - DNA, 5390 bp, Macaca Mulatta
  misc_feature (1)...(5390): n = A,T,C or G
gactgacaatgtcaaccagctgctgctnnnnnnnnnnnnnnnnnnnnnnnnnnnnnnnnnnnnnnnnnnnnnnnnnnnnnnnnnnnnnnnnnnnnnnnnnnnnnnnnnnnnnnnnnnnnnnnnnnnnnnnnnnnnnnnnnnnnnnnnnnnnnnnnnnnnnnnnnnnnnnnnnnnnnnnnnnnnnnnnnnnnnnnnnnnnnnnnnnnnnnnnnnnnnnnnnnnnnnnnnnnnnnnnnnnnnnnnnnnnnnnnnnnnnnnnnnnnnnnnnnnnnnnnnnnnnnnnnnnnnnnnnnnnnnnnnnnnnnnnnnnnnnnnnnnnnnnnnnnnnnnnnnnnnnnnnnnnnnnnnnnnnnnnnnnnnnnnnnnnnnnnnnnnnnnnnnnnnnnnnnnnnnnnnnnnnnnnnnnnnnnnnnnnnnnnnnnnnnnnnnnnnnnnnnnnnnnnnnnnnnnnnnnnnnnnnnnnnnnnnnnnnnnnnnnnnnnnnnnnnnnnnnnnnnnnnnnnnnnnnnnnnnnnnnnnnnnnnnnnnnnnnnnnnnnnnnnnnnnnnnnnnnnnnnnnnnnnnnnnnnnnnnnnnnnnnnnnnnnnnnnnnnnnnnnnnnnnnnnnnnnnnnnnnnnnnnnnnnnnnnnnnnnnnnnnnnnnnnnnnnnnnnnnnnnnnnnnnnnnnnnnnnnnnnnnnnnnnnnnnnnnnnnnnnnnnnnnnnnnnnnnnnnnnnnnnnnnnnnnnnnnnnnnnnnnnnnnnnnnnnnnnntcccccgagtcgtacccctgcggcgacgaacacacccccagccccattgccggccgccagcccctggaggcccagcctctgctgaagctcgggcagccggtcagcgccgtggcagccctccaggcagacgggcacatgatagccttcctaggggacacccagggccagctgcacaaggnnnnnnnnnnnnnnnnnnnnnnnnnnnnnnnnnnnnnnnnnnnnnnnnnnnnnnnnnnnnnnnnnnnnnnnnnnnnnnnnnnnnnnnnnnnnnnnnnnnnnnnnnnnnnnnnnnnnnnnnnnnnnnnnnnnnnnnnnnnnnnnnnnnnnnnnnnnnnnnnnnnnnnnnnnnnnnnnnnnnnnnnnnnnnnnnnnnnnnnnnnnnnnnnnnnnnnnnnnnnnnnnnnnnnnnnnnnnnnnnnnnnnnnnnnnnnnnnnnnnnnnnnnnnnnnnnnnnnnnnnnnnnnnnnnnnnnnnnnnnnnnnnnnnnnnnnnnnnnnnnnnnnnnnnnnnnnnnnnnnnnnnnnnnnnnnnnnnnnnnnnnnnnnnnnnnnnnnnnnnnnnnnnnnnnnnnnnnnnnnnnnnnnnnnnnnnnnnnnnnnnnnnnnnnnnnnnnnnnnnnnnnnnnnnnnnnnnnnnnnnnnnnnnnnnnnnnnnnnnnnnnnnnnnnnnnnnnnnnnnnnnnnnnnnnnnnnnnnnnnnnnnnnnnnnnnnnnnnnnnnnnnnnnnnnnnnnnnnnnnnnnnnnnnnnnnnnnnnnnnnnnnnnnnnnnnnnnnnnnnnnnnnnnnnnnnnnnnnnnnnnnnnnnnnnnnnnnnnnnnnnnnnnnnnnnnnnnnnnnnnnnnnnnnnnnnnnnnnnnnnnnnnnnnnnnnnnnnnnnnnnnnnnnnnnnnnnnnnnnnnnnnnnnnnnnnnnnnnnnnnnnnnnnnnnnnnnnnnnnnnnnnnnnnnnnnnnnnnnnnnnnnnnnnnnnnnnnnnnnnnnnnnnnnnnnnnnnnnnnnnnnnnnnnnnnnnnnnnnnnnnnnnnnnnnnnnnnnnnnnnnnnnnnnnnnnnnnnnnnnnnnnnnnnnnnnnnnnnnnnnnnnnnnnnnnnnnnnnnnnnnnnnnnnnnnnnnnnnnnnnnnnnnnnnnnnnnnnnnnnnnnnnnnnnnnnnnnnnnnnnnnnnnnnnnnnnnnnnnnnnnnnnnnnnnnnnnnnnnnnnnnnnnnnnnnnnnnnnnnnnnnnnnnnnnnnnnnnnnnnnnnnnnnnnnnnnnnnnnnnnnnnnnnnnnnnnnnnnnnnnnnnnnnnnnnnnnnnnnnnnnnnnnnnnnnnnnnnnnnnnnnnnnnnnnnnnnnnnnnnnnnnnnnnnnnnnnnnnnnnnnnnnnnnnnnnnnnnnnnnnnnnnnnnnnnnnnnnnnnnnnnnnnnnnnnnnnnnnnnnnnnnnnnnnnnnnnnnnnnnnnnnnnnnnnnnnnnnnnnnnnnnnnnnnnnnnnnnnnnnnnnnnnnnnnnnnnnnnnnnnnnnnnnnnnnnnnnnnnnnnnnnnnnnnnnnnnnnnnnnnnnnnnnnnnnnnnnnnnnnnnnnnnnnnnnnnnnnnnnnnnnnnnnnnnnnnnnnnnnnnnnnnnnnnnnnnnnnnnnnnnnnnnnnnnnnnnnnnnnnnnnnnnnnnnnnnnnnnnnnnnnnnnnnnnnnnnnnnnnnnnnnnnnnnnnnnnnnnnnnnnnnnnnnnnnnnnnnnnnnnnnnnnnnnnnnnnnnnnnnnnnnnnnnnnnnnnnnnnnnnnnnnnnnnnnnnnnnnnnnnnnnnnnnnnnnnnnnnnnnnnnnnnnnnnnnnnnnnnnnnnnnnnnnnnnnnnnnnnnnnnnnnnnnnnnnnnnnnnnnnnnnnnnnnnnnnnnnnnnnnnnnnnnnnnnnnnnnnnnnnnnnnnnnnnnnnnnnnnnnnnnnnnnnnnnnnnnnnnnnnnnnnnnnnnnnnnnnnnnnnnnnnnnnnnnnnnnnnnnnnnnnnnnnnnnnnnnnnnnnnnnnnnnnnnnnnnnnnnnnnnnnnnnnnnnnnnnnnnnnnnnnnnnnnnnnnnnnnnnnnnnnnnnnnnnnnnnnnnnnnnnnnnnnnnnnnnnnnnnnnnnnnnnnnnnnnnnnnnnnnnnnnnnnnnnnnnnnnnnnnnnnnnnnnnnnnnnnnnnnnnnnnnnnnnnnnnnnnnnnnnnnnnnnnnnnnnnnnnnnnnnnnnnnnnnnnnnnnnnnnnnnnnnnnnnnnnnnnnnnnnnnnnnnnnnnnnnnnnnnnnnnnnnnnnnnnnnnnnnnnnnnnnnnnnnnnnnnnnnnnnnnnnnnnnnnnnnnnnnnnnnnnnnnnnnnnnnnnnnnnnnnnnnnnnnnnnnnnnnnnnnnnnnnnnnnnnnnnnnnnnnnnnnnnnnnnnnnnnnnnnnnnnnnnnnnnnnnnnnnnnnnnnnnnnnnnnnnnnnnnnnnnnnnnnnnnnnnnnnnnnnnnnnnnnnnnnnnnnnnnnnnnnnnnnnnnnnnnnnnnnnnnnnnnnnnnnnnnnnnnnnnnnnnnnnnnnnnnnnnnnnnnnnnnnnnnnnnnnnnnnnnnnnnnnnnnnnnnnnnnnnnnnnnnnnnnnnnnnnnnnnnnnnnnnnnnnnnnnnnnnnnnnnnnnnnnnnnnnnnnnnnnnnnnnnnnnnnnnnnnnnnnnnnnnnnnnnnnnnnnnnnnnnnnnnnnnnnnnnnnnnnnnnnnnnnnnnnnnnnnnnnnnnnnnnnnnnnnnnnnnnnnnnnnnnnnnnnnnnnnnnnnnnnnnnnnnnnnnnnnnnnnnnnnnnnnnnnnnnnnnnnnnnnnnnnnnnnnnnnnnnnnnnnnnnnnnnnnnnncagacctcatgacggagatgaccgacctcagcagcgacctggaggccagcgggatccccttcctggactaccgcacctacgccgagcgcgccttcttccctggccatggcggttgcccactgcagcccaagcctgaggggccaggggaggacggccgctgcaccactgtgcaccagggcctcacgcagctctccaacctgctcaacagcaagctcttcctcctcacnnnnnnnnnnnnnnnnnnnnnnnnnnnnnnnnnnnnnnnnnnnnnnnnnnnnnnnnnnnnnnnnnnnnnnnnnnnnnnnnnnnnnnnnnnnnnnnnnnnnnnnnnnnnnnnnnnnnnnnnnnnnnnnnnnnnnnnnnnnnnnnnnnnnnnnnnnnnnnnnnnnnnnnnnnnnnnnnnnnnnnnnnnnnnnnnnnnnnnnnnnnnnnnnnnnnnnnnnnnnnnnnnnnnnnnnnnnnnnnnnnnnnnnnnnnnnnnnnnnnnnnnnnnnnnnnnntcttacgggccaaacagtaccaagtgggcaaaggactccgtggtctacgtgacagtcaagcccaaccgggccccgaatgatagccccgtgctccgggaggacgtggagttgcagaacctgacactgatggtgctggtgggacctggggctggcggggccgcatgcagcagtgaggtgcagcgcgtaccggcccgggtgctcgacacaaacaccatcacccaggtcaaggagaaggtgttggaccaagtatacaagggcacccccttctcccagaggccctcagtgcatgccctagaccttnnnnnnnnnnnnnnnnnnnnnnnnnnnnnnnnnnnnnnnnnnnnnnnnnnnnnnnnnnnnnnnnnnnnnnnnnnnnnnnnnnnnnnnnnnnnnnnnnnnnnnnnnnnnnnnnnnnnnnnnnnnnnnnnnnnnnnnnnnnnnnnnnnnnnnnnnnnnnnnnnnnnnnnnnnnnnnnnnnnnnnnnnnnnnnnnnnnnnnnnnnnnnnnnnnnnnnnnnnnnnnnnnnnnnnnnnnnnnnnnnnnnnnnnnnnnnnnnnnnnnnnnnnnnnnnnnnnnnnnnnnnnnnnnnnnnnnnnnnnnnnnnnnnnnnnnnnnnnnnnnnnnnnnnnnnnnnnnnnnnnnnnnnnnnnnnnnnnnnnnnnnnnnnnngggcacgctgcagaagtttgaggacgacaccttccaggccattctcagtgtgaaccggcccatccccattgctgtcaagtacctgtttgaccttctggatgaactcgcagagaagcacggcatcgaggacccagggaccctgcacatctggaagactaacagnnnnnnnnnnnnnnnnnnnnnnnnnnnnnnnnnnnnnnnnnnnnnnnnnnnnnnnnnnnnnnnnnnnnnnnnnnnnnnnnnnnnnnnnnnnnnnnnnnnnnnnnnnnnnnnnnnnnnnnnnnnnnnnnnnnnnnnnnnnnnnnnnnnnnnnnnnnnnnnnnnnnnnnnnnnnnnnnnnnnnnnnnnnnnnnnnnnnnnnnnnnnnnnnnnnnnnnnnnnnnnnnnnnnnnnnnnnnnnnnnnnnnnnnnnnnnnnnnnnnnnnnnnnnnnnnnnnnnnnnnnnnnnnnnnnnnnnnnnnnnnnnnnnnnnnnnnnnnnnnnnnnnnnnnnnnnnnnnnnnnnnnnnnnnnnnnnnnnnnnncagattatcagtgccctggaggaggaccctgtgggccagaagctgcagctggcctgccgcttgcagcaggttgccgccctggtggagaacaaagtgactgacctgtg

SEQ ID NO: 31424 - DNA, 135 bp, Macaca Mulatta
ggggatttggtgtcgtggaacctcttactgctttcaatacacgattagtaatcaactgttttgtatacttgttttcagttttcatttcgacaaacaagcactgtaattatagctattagaataaaatctcttaac

SEQ ID NO: 31425 - DNA, 208 bp, Macaca Mulatta
aggatcaagactggaaaccactgcatcctggggatcccatgtttttaactgtcgatgggaagacgatgccattgggcggagactgtaccgtgtaccccgtgtttgtgaacgaggccgcatattacgaaaagaaagaagcctttgcaaagacaactaaactaatgctcaatgcaaaaagtattcgctgctctgtacattagaaatcact

SEQ ID NO: 31426 - DNA, 1656 bp, Macaca Mulatta
  misc_feature (1)...(1656): n = A,T,C or G
aggcacttcaggtggcaagacagctcctccttcagcagcaacagcagcagcaagttagtggattaaaatctcccaagaggaatgacaaacaaccagctcttcaggtnnnnnnnnnnnnnnnnnnnnnnnnnnnnnnnnnnnnnnnnnnnnnnnnnnnnnnnnnnnnnnnnnnnnnnnnnnnnnnnnnnnnnnnnnnnnnnnnnnnnnnnnnnnnnnnnnnnnnnnnnnnnnnnnnnnnnnnnnnnnnnnnnnnnnnnnnnnnnnnnnnnnnnnnnnnnnnnnnnnnnnnnnnnnnnnnnnnnnnnnnnnnnnnnnnnnnnnnnnnnnnnnnnnnnnnnnnnnnnnnnnnnnnnnnnnnnnnnnnnnnnnnnnnnnnnnnnnnnnnnnnnnnnnnnnnnnnnnnnnnnnnnnnnnnnnnnnnnnnnnnnnnnnnnnnnnnnnnnnnnnnnnnnnnnnnnnnnnnnnnnnnnnnnnnnnnnnnnnnnnnnnnnnnnnnnnnnnnnnnnnnnnnnnnnnnnnnnnnnnnnnnnnnnnnnnnnnnnnnnnnnnnnnnnnnnnnnnnnnnnnnnnnnnnnnnnnnnnnnnnnnnnnnnnnnnnnnnnaggcatgattccaacagaactgcagcagctctggaaagaagtgacaagtgctcatactgcagaagaaaccacaggcaacaatcacagcagtttggatctgaccacgacatgtgtctcctcctctgcaccttccaagacctccttaataatgaacccacatgcctctactaatggacagctctcagtccacactcccaaaagggaaannnnnnnnnnnnnnnnnnnnnnnnnnnnnnnnnnnnnnnnnnnnnnnnnnnnnnnnnnnnnnnnnnnnnnnnnnnnnnnnnnnnnnnnnnnnnnnnnnnnnnnnnnnnnnnnnnnnnnnnnnnnnnnnnnnnnnnnnnnnnnnnnnnnnnnnnnnnnnnnnnnnnnnnnnnnnnnnnnnnnnnnnnnnnncagcttgcgaaagacaaagagcgcctgcaagccatgatgacccacctgcatgtgaagtctacagaacccaaagccgcccctcagccnnnnnnnnnnnnnnnnnnnnnnnnnnnnnnnnnnnnnnnnnnnnnnnnnnnnnnnnnnnnnnnnnnnnnnnnnnnnnnnnnnnnnnnnnnnnnnnnnnnnnnnnnnnnnnnnnnnnnnnnnnnnnnnnnnnnnnnnnnnnnnnnnnnnnnnnnnnnnnnnnnnnnnnnnnnnnnnnnnnnnnnnnnnnnnnnnnnnnnnnnnnnnnnnnnnnnnnnnnnnnnnnnnnnnnnnnnnnnnnnnnnnnnnnnnnnnnnnnnnnnnnnnnnnnnnnnnnnaggccattctcgaatctccagaaaagcagctaacactaaatgaaatctataactggttcacacgaatgtttgcttacttccggcgcaacgcggccacgtggaagnnnnnnnnnnnnnnnnnnnnnnnnnnnnnnnnnnnnnnnnnnnnnnnnnnnnnnnnnnnnnnnnnnnnnnnnnnnnnnnnnnnnnnnnnnnnnnnnnnnnnnnnnnnnnnnnnnnnnnnnngtaacccttcccttattaaaaacatgcagagcagccacgcctactgcacacctctcaatgcagctttacag

SEQ ID NO: 31427 - DNA, 6444 bp, Macaca Mulatta
  misc_feature (1)...(6444): n = A,T,C or G
agctcgacatggattatagagtcttggaaaagtcggtatttcacggcgtatgcctccacctgctaacctcccgagtcttaaagcagaaaacaaaggcaatgatcctaatgtaaatattgtacctaaagatggcacagggtgggcatcaaaacaagagcaacatgaagaagaaaannnnnnnnnnnnnnnnnnnnnnnnnnnnnnnnnnnnnnnnnnnnnnnnnnnnnnnnnnnnnnnnnnnnnnnnnnnnnnnnnnnnnnnnnnnnnnnnnnnnnnnnnnnnnnnnnnnnnnnnnnnnnnnnnnnnnnnnnnnnnnnnnnnnnnnnnnnnnnnnnnnnnnnnnnnnnnnnnnnnnnnnnnnnnnnnnnnnnnnnnnnnnnnnnnnnnnnnnnnnnnnnnnnnnnnnnnnnnatgttgcttgttggagagatggtggtaaggctgctggctcaccttcgtcatctgatcaagatgaaaagctccctggccaggatgaaagcatagctggaacatcagagcaaaatgatatcctcaaagtggtggaaaagaggatagcttgtggtcctccacaggctaaactgaatggacagcaggctgctctcgcttcccagtatagagctatgatgcctccttatnnnnnnnnnnnnnnnnnnnnnnnnnnnnnnnnnnnnnnnnnnnnnnnnnnnnnnnnnnnnnnnnnnnnnnnnnnnnnnnnnnnnnnnnnnnnnnnnnnnnnnnnnnnnnnnnnnnnnnnnnnnnnnnnnnnnnnnnnnnnnnnnnnnnnnnnnnnnnnnnnnnnnnnnnnnnnnnnnnnnnnnnnnnnnnnnnnnnnnnnnnnnnnnnnnnnnnnnnnnnnnnnnnnnnnnnnnnnnnnnnnnnnnnnnnnnnnnnnnnnnnnnnnnnnnnnnnnnnnnnnnnnnnnnnnnnnnnnnnnnnnnnnnnnnnnnnnnnnnnnnnnnnnnnnnnnnnnnnnnnnnnnnnnnnnnnnnnnnnnnnnnnnnnnnnnnnnnnnnnnnnnnnnnnnnnnnnnnnnnnnnnnnnnnnnnnnnnnnnnnnnnnnnnnnnnnnnnnnnnnnnnnnnnnnnnnnnnnnnnnnnnnnnnnnnnnnnnnnnnnnnnnnnnnnnnnnnnnnnnnnnnnnnnnnnnnnnnnnnnnnnnnnnnnnnnnnnnnnnnnnnnnnnnnnnnnnnnnnnnnnnnnnnnnnnnnnnnnnnnnnnnnnnnnnnnnnnnnnnnnnnnnnnnnnnnnnnnnnnnnnnnnnnnnnnnnnnnnnnnnnnnnnnnnnnnnnnnnnnnnnnnnnnnnnnnnnnnnnnnnnnnnnnnnnnnnnnnnnnnnnnnnnnnnnnnnnnnnnnnnnnnnnnnnnnnnnnnnnnnnnnnnnnnnnnnnnnnnnnnnnnnnnnnnnnnnnnnnnnnnnnnnnnnnnnnnnnnnnnnnnnnnnnnnnnnnnnnnnnnnnnnnnnnnnnnnnnnnnnnnnnnnnnnnnnnnnnnnnnnnnnnnnnnnnnnnnnnnnnnnnnnnnnnnnnnnnnnnnnnnnnnnnnnnnnnnnnnnnnnnnnnnnnnnnnnnnnnnnnnnnnnnnnnnnnnnnnnnnnnnnnnnnnnnnnnnnnnnnnnnnnnnnnnnnnnnnnnnnnnnnnnnnnnnnnnnnnnnnnnnnnnnnnnnnnnnnnnnnnnnnnnnnnnnnnnnnnnnnnnnnnnnnnnnnnnnnnnnnnnnnnnnnnnnnnnnnnnnnnnnnnnnnnnnnnnnnnnnnnnnnnnnnnnnnnnnnnnnnnnnnnnnnnnnnnnnnnnnnnnnnnnnnnnnnnnnnnnnnnnnnnnnnnnnnnnnnnnnnnnnnnnnnnnnnnnnnnnnnnnnnnnnnnnnnnnnnnnnnnnnnnnnnnnnnnnnnnnnnnnnnnnnnnnnnnnnnnnnnnnnnnnnnnnnnnnnnnnnnnnnnnnnnnnnnnnnnnnnnnnnnnnnnnnnnnnnnnnnnnnnnnnnnnnnnnnnnnnnnnnnnnnnnnnnnnnnnnnnnnnnnnnnnnnnnnnnnnnnnnnnnnnnnnnnnnnnnnnnnnnnnnnnnnnnnnnnnnnnnnnnnnnnnnnnnnnnnnnnnnnnnnnnnnnnnnnnnnnnnnnnnnnnnnnnnnnnnnnnnnnnnnnnnnnnnnnnnnnnnnnnnnnnnnnnnnnnnnnnnnnnnnnnnnnnnnnnnnnnnnnnnnnnnnnnnnnnnnnnnnnnnnnnnnnnnnnnnnnnnnnnnnnnnnnnnnnnnnnnnnnnnnnnnnnnnnnnnnnnnnnnnnnnnnnnnnnnnnnnnnnnnnnnnnnnnnnnnnnnnnnnnnnnnnnnnnnnnnnnnnnnnnnnnnnnnnnnnnnnnnnnnnnnnnnnnnnnnnnnnnnnnnnnnnnnnnnnaggtctgaagctgcgttggaccaggaacagattactgctgcttattctgtagaacataatcaattagaggcccatccaaaggcagactttgtcagagaatcaagtgaggcagaagtacaaaagtttttaagcagatctgtggaagatgttagacctcaccatactgatgcgaataatcaatctgcttgttttgaagcacctgatcaaaagaccttacccactccacaagaggagcggatttcagctgtagaaagtcagccttcccggaaaaggagtgtttcccatggatctaaccatatgcaaaaaccagatgagcagagaagtgaacctatctgcaggcattcctaaagtaaccagcagatgcattgattcaaaagaaccaacagaaaggccagaggagaaaccaaaaaaggaaggctttatacgatcttccgaaggaccaaaacctgaaaaagtatataaatctaaatcagaaactcgttggggcccacgaccaagctccaacagaagggaagaaggtaatgatagacctgtgagaagatcaggtcccattaaaaaacctgtacttagagatatgaaagaggaacgggaacagaggaaggagaaagaaggagaaaagagcgaaaaggtgactgaaaaagtagttataaagcctgaaaagacggaaaagaaggatcttgctactcccccaccaccannnnnnnnnnnnnnnnnnnnnnnnnnnnnnnnnnnnnnnnnnnnnnnnnnnnnnnnnnnnnnnnnnntccttcaacagaaactgcaactttttgctcaaaaaccatctcaggatactgagaagtctctggaacctgtgagtactgttcaggtagagcctgcagttaagactgtaaaccaacagcctgtggcagcaccaatagtcaaagaagaaaaacaacctgagaaagtcatcagcaaagaccttgttatagagaggcctcgaccagattcaagaccagcaattaaaaaagaatcaactttacctcccaggaccttctggaaaggaagctaggataagagattgggtttccagatcaaggatacagaagtcgaaggcgaagtgaaatattactccagaggtcgaagctatagagtttcttatggagggcgtggcaggggtggtaggggacacactcgagattatcctcagtatagagacaataagccaagagcagagcatgtaccctcagggcctctcagacagcgagaagaaagtgaaacacggagtgagagctccgattttgaagttgtccccaaaagaagacgacagcggggttcagagactgacacagacagtgaaattcatgaaagtgcaagcgacaaggatagtttaagtaaaggcaaacttcccaaaagagaggaacggcctgaaaacaaaaagcctatgaagcctcaatcttctttcaagcctgataatcatgttcgaatagataatagactgttagaaaagccttatgtaagggatgacgataaatctaaaccaggctttcttcctaaaggagagcctacnaggagaggcagagggggaacattcangcgtgggtggaaggatccctggagnncgtcatcacgcccttccactttacgaagacagcttatcgggacatcagtggaacccaggcagtcagaagttcctaaccagagatggagagccaccagaagaacgagcagtttattctnnnnnnnnnnnnnnnnnnnnnnnnnnnnnnnnnnnnnnnnnnnnnnnnnnnnnnnnnnnnnnnnnnnnnnnnnnnnnnnnnnnnnnnnnnnnnnnnnnnnnnnnnnnnnnnnnnnnnnnnnnnnnnnnnnnnnnnnnnnnnnnnnnnnnnnnnnnnnnnnnnnnnnnnnnnnnnnnnnnnnnnnnnnnnnnnnnnnnnnnnnnnnnnnnnnnnnnnnnnnnnnnnnnnnnnnnnnnnnnnnnnnnnnnnnnnnnnnnnnnnnnnnnnnnnnnnnnnnnnnnnnnnnnnnnnnnnnnnnnnnnnnnnnnnnnnnnnnnnnnnnnnnnnnnnnnnnnnnnnnnnnnnnnnnnnnnnnnnnnnnnnnnnnnnnnnnnnnnnnnnnnnnnnnnnnnnnnnnnnnnnnnnnnnnnnnnnnnnnnnnnnnnnnnnnnnnnnnnnnnnnnnnnnnnnnnnnnnnnnnnnnnnnnnnnnnnnnnnnnnnnnnnnnnnnnnnnnnnnnnnnnnnnnnnnnnnnnnnnnnnnnnnnnnnnnnnnnnnnnnnnnnnnnnnnnnnnnnnnnnnnnnnnnnnnnnnnnnnnnnnnnnnnnnnnnnnnnnnnnnnnnnnnnnnnnnnnnnnnnnnnnnnnnnnnnnnnnnnnnnnnnnnnnnnnnnnnnnnnnnnnnnnnnnnnnnnnnnnnnnnnnnnnnnnnnnnnnnnnnnnnnnnnnnnnnnnnnnnnnnnnnnnnnnnnnnnnnnnnnnnnnnnnnnnnnnnnnnnnnnnnnnnnnnnnngtgttgttataattgatgatcatcctgaagtaacagtaattgaagatccccagtcaaatttgaatgatgatggttttactgaagtggtatccaaaaaacaacaaaaacgtttacaggatgaagaacgccgaaagaaggaagaacaagtcatacaggnnnaggtctggaacaaaaagaatgcaaatgaaaaaggaagaagccagacttctaagcttcctccaagatttgccaaaaaacaggctacaggaatccagcaagcacagtcttcagcctcagttccacctctagcttcggctccacttccaccttcaacctcagcctcggttccagcctcaacctcagctgcagttccagcaaccttaactccagttctagcctcaacctcagctccagttccggcctcaactttagttccagttctggcctcaacctcagctccagttccagcctcacccttagctccagtttcagcctcagcctcagtctcagcttcagttccagcctctggtacagctgtagctataacctnnnnnnnnnnnnnnnnnnnnnnnnnnnnnnnnnnnnnnnnnnnnnnnnnnnnnnnnnnnnnnnnnnnnnnnnnattcttgcctcagcctcaattcccattcttgcttcggccctagcaccaacttcagctccaacaccagccccagcagcctcttccccagctgccccagtcatcacagcaccaactannnnnnnnnnnnnnnnnnnnnnnnnnnnnnnnnnnnnnnnnnnnnnnnnnnnnnnnnnnnnnnnnnnnnnnnnnnnnnnnnnnnnnnnnnnnnnnnnnnncctgctccagcccagactcagacacagacccacaaaccagtccagaatccactacagactccatcacagtcttcaaaacagccgccaccgtcaattaggctgccttcagctcaaacacctaatggcacagattacgtagcctcaggaaaatccatccagaccccacagtcacatggcactctgacagctgaattatgggataacaaggtggccccaccagctgtgctgaatgatatctctaagaaannnnnnnnnnnnnnnnnnnnnnnnnnnnnnnnnnnnnnnnnnnnnnnnnnnnnnnnnnnnnnnnnnnnnnnnnnnnnnnnnnnnnnnnnnnnnnnnnnnnnnnnnnnnnnnnnnnnnnnnnnnnnnnnnnnnnnnnnnnnnnnnnnnnnnnnnnnnnnnnnnnnnnnnnnnnnnnnnnnnnnnnnnnnnnnnnnnnnnnnnnnnnnnnnnnnnnnnnnnnnnnnnnnnnnnnnnnnnnnnnnnnnnnnnnnnnnnnnnnnnnnnnnnnnnnnnnnnnnnnnnnnnnnnnnnnnnnnnnnnnnnnnnnnnnnnnnnnnnnnnnnnnnnnnnaggaacgttcattaaaaaatagaaaagtaaaagatgcccaacaggtggagccagaaggacaagagaaaccaagcccagctacagtcagaagcacagatcctgtcacgacaaaggaagctaaagcagtctcagaaatgtctgctgaaataggaacaatgatctcggtatcatctgcagaatatggtactaatgcaaag

SEQ ID NO: 31428 - DNA, 500 bp, Macaca Mulatta
taaacataaccacctccctgtgtctgtgtgcaccaggagcgcccagggctgggaaggtcaaggggagggagcacacactggggcactggcttccgggaagcccgtcttcctttcctttcacagctcttaccctcttttttaaattgcacagcagagataaaaacaaatctgcagttgaaatctgccatgtccctgcggttcttgaccttgagtttcaaggcctcaagtcactagtcctgccacttgccttgtggacttggtttcccacacaagcctggaagggagggagacctgcagggaggatgagctggatcttgctggtggagaggtccgagcatctccgtcagggttctttagttgtggtgctagaaagcctgccctcagctggcataagtcaaaaaggagatttttttattgactatggcgattgaaaagctgaggtaggactggttttgggacaaagatccactaatgaatgtgccttatagggaattcctgta

SEQ ID NO: 31429 - DNA, 116 bp, Macaca Mulatta
aggtgacaatcctgctgtacctggcagaagtgatggttcggctgacttggcaccaggccatggatcctgacaaccactgcatcccctaccttacagggctgggggacctgctcggt

SEQ ID NO: 31430 - DNA, 894 bp, Macaca Mulatta
  misc_feature (1)...(894): n = A,T,C or G
ttggaaagtatcgcctttctgaaaatcattattgttgcagccattattgctgtcattgcctttcctaatccatacactagagtaaacaccagtgaactgatcaaagagttttttttacagactgttgtcccctggaatcctcttctctttgtgactactgaaatggcatgaatgccagtaaaattgtcgatgacattcctgatagtccagcaggcgttggagtatattcagcccagtgaagttatgcctggctctcctatttaaaatcataatgacagtattcacttttggtaccaaggtnaggttccatcaggcttgttcatccccagcatggccattggagcgatcgcaggaaggattgtggggattgcggtggagcagcttgcctactatcaccatgactggtttatctttaaggagtggtgtgaggttggggccgattgcattacacctggcctttatgccatggttggtgctgctgcatgcttaggtnaggtggtgtgacaagaatgactgtctccctggtggttattgtttttgagctcactggaggcttggaatatattgttccccttatggctgcagtcatgaccagtaaatgggttggagatgcctttggcagggaaggcatttatgaagcgcacatccgattaaatggataccctttcttggatgcaaaagaagaattcactcacaccaccctggctgctgacgtcatgagacctcgaaggaacgatcctcccttagctgtcctgacacaggacaatatgacagtggatgatatagaaaacatgattaatgaaaccagctacaatggatttcctgtcataatgtcaaaagaatctcagagattagtgggatttgccctcagaagagacctgacaattgcaatag

SEQ ID NO: 31431 - DNA, 906 bp, Macaca Mulatta
  misc_feature (1)...(906): n = A,T,C or G
caggtaattaatgtggacctgattcatattgaaaatagaattggtgacattattaaatcagaaaaacatgttcagttagtgttgggacaactgatagatgannnnnnnnnnnnnnnnnnnnnnnnnnnnnnnnnnnnnnnnnnnnnnnnnnnnnnnnnnnnnnnnnnnnnnnnnnnnnnnnnnnnnnnnnnnnnnnnnnnnnnnnnnnnnacaggcactaactcagcgacttggtagaattatcagtggacatattgatcttgataatagaggagtaatttttacagaagcttttgtagctcgacataaagcacgtatccgtggactattcagtgccattacccggnnnnnnnnnnnnnnnnnnnnnnnnnnnnnnnnnnnnnnnnnnnnnnnnnnnnnnnnnnnnnnnnnnnnnnnnnnnnnnnnnnnnnnnnnnnnnnnnnnnnnnnnnnnnnnnnnnnnnnnnnnnnnnnnnnnnnnnnnnnnnnnnnnnnnnnnnnnnnnnnnnnnnnnnnnnnnnnnnnnnnnnnnnnnnnnnnnnnnnnnnnagaatttgatgctttatccagacttggaatcccatattctgtaagctacataaagaaaagatacaagactacacaactcttgtttttgaaagcagcttgtgttggtcagggacttgtggatcaagtggaagcatcagtagaagaagccatcagctctggaacatgggttgatattgcnnnnnnnnnnnnnnnnnnnnnnnnnnnnnnnnnnnnnnnnnnnnnnnnnnnnnnnnnnnnnnnnnnnnnnnnnnnnnnnnnnnnnnnnnnnnnnnnnnnnnnnnnnnnngtagtcagtgaaaaatttataaatgactgtacagaactgttccgtgagctgatgcaccagaaggctgaaaag

SEQ ID NO: 31432 - DNA, 260 bp, Macaca Mulatta
aggtgtggacagttctgtgtttgaggctctgcccaaggcctcagagcaggcggagctgcctcgctgtgggcaggtgggagatcgcgcgaagccctgtgtctgccgctatggcctgagcctggcctggtacccctgcatgctcaagtactgccacagccgtgaccggcccacaccctacaagtgtggcatccgcagctgccagaagagctacagcttcgacttctacgtgccccagaggcagctgtgtctctgggatgagg

SEQ ID NO: 31433 - DNA, 800 bp, Macaca Mulatta
tggttcccaaagatgtcaatgctgccattgccaccatcaagaccaagcgtaccatccagtttgtggattggtgccccactggcttcaaggttggcatcaactaccagcctcccactgtggtgcctggtggagacctggccaaggttcagagagctgtgtgcatgctgagcaacaccacagccattgctgaggcctgggctcgcctggaccacaagtttgacctgatgtatgccaagcgtgcctttgttcactggtatgtgggtgaggggatggaggaaggcgagttttcagaggcccgtgaagacatggctgcccttgagaaggattatgaggaggttggtgtggattctgttgaaggagagggtgaggaagaaggagaggaatactaaagttaaaatatcacaaaggtgctgcttttacagggaagcttattctgttttaaacgttgaaaagttgtggtctgctcagttaatttgtatgtagcagtgtatgctcttatatacaattactgacctatgctctaaaacatgaatgctttgttacagacccaagctgtccatttctgtgatgggttttgaataaagtattccctgtcttaaatgaattcagtcctgtgttttctatctgggtgtctgaaattttatttagtgcattgagaataaagaataagtgttgcctgtggtttatacatatcctatgacgtgacgtttgtgttttaaagtatcttaggaatttaaaacttttatttgtgaaacacaaaatgtatatctaaagattaccatcacagagcatcacgtact

SEQ ID NO: 31434 - DNA, 413 bp, Macaca Mulatta
ctcacagacaccagcgaagcaaggcgctcctgaccaagtagattttttaaaaattagagtgaattacttttaatcaaaaatttatgttacgtttcaagaatatagtactaagattatactcaatacactcagaaaagtttcaaacctactaatccagtgacaatttgaattggttttatacctagaggaataaaatgaaatactaaatcttttcttatattttttccctgtgtgattgtatcatgaattgcaagtgtttccataaacactagcaaatgtgtagatgtctttccttgttagtggacctgtagcggggcaaaggtcacacgacatccctctggagccagaaaactcagctaaacctcacaggagaggaacctaaatgcagaccccaccctcactcgcagagcccc

SEQ ID NO: 31435 - DNA, 242 bp, Macaca Mulatta
gtcttccaggaatctgttgcgcgacgtgaggaagatgctaatgcagtaagatccgtgctgggccgagagcagctttgaagctccagagagccaccccgtcaggtttcttgtggaagctccagtcatccgtgctgcagcaggttgagcactgcacgtttgccacgtgctgcccgtgacagcacatcaagccacagcgtttgtagacaggacagaggggtgcccgccccctgcccctgctggca

SEQ ID NO: 31436 - DNA, 829 bp, Macaca Mulatta
  misc_feature (1)...(829): n = A,T,C or G
ggggaacatttttatcattttttcttcaaatatccaccacctcccctccattgattcttgttgcctgtatattaggccacttgaaattttcccacaacagactgttgctctttatttgcttttaattgtttgttctgtttcattttatgtaacttctgttgctatctttatattcactaatgtcttttttccacgatgctgttaatcttgtccagtttaattttcatctcagatattctagtttctatctgtagaaggttcacatggggtcttttttacatcttgcctgtctcaatttttttgaacatttggaatacaatgatgaactctctcagtgctctgtgccagttgtaaactctgtgtcaattctgggccagttttgatggactgaatcttttcctcccttaagggttgccaattcctgccccttttcccatccttgcaactctttctcctcacaactgcctctgttcctcatccctgctccgtggcctggtaatgctcaaggccacaaattgattgggttcaccttggtttatttcccatccgctccatacaaaaaatcttcctgccctgaatataaatgcccctggaaaaaccttttgcttctaaccccaccaggtggtgggcctccataccgtgtaaaccaccaaaaccttttgtggagggcttaaaggcaaggtgtgaattcccacagggttaagggaattttcaacaacacaccctgtagacaacaatggaaaaaaacccctcggctctcctccttcgaagaggaccaaaaaacttaagcctagaggcgtggctcaaattgccaacaacccaaataagn

SEQ ID NO: 31437 - DNA, 188 bp, Macaca Mulatta
gaaattcaagcaacttgttaataatttctcttctattcagtattttgatagcagattattatttaaagggctcaatttatcccctaaaattgcaaaggttaaaagaaacagtctatatgttccattactgggttttgaaaaaccatgacactgtttatattttggtgattatggagcctatccacatg

SEQ ID NO: 31438 - DNA, 826 bp, Macaca Mulatta
gttctcttgtggtcccgttcaggctttaactgcctgctttgtgcagagatgctgggacggaaagaggacctcctccgccactggaagcaccagcataattgtgaggacccttccaaactgtgggctgttttaaatacggtctccaaccagggagtgattgaactttccagtgaagctgagaaatgagaccccaaggcaggccggggttaaggagagagctctgccgccgccttccttcagagcttcgtgctttatggtggtgcttagtcacaaagatcaaacaacaggattggcgtgagtgaacagaaatgatttttgtacatggttttattttcttatgaaataaaatatatgttctcgaaacatatttttctaactatatgcagtcttattttaaaatcatatgtactgattcttaatgtcttagactttcagaataaataaaaagatcaaaatttggagattgaaatttagagggatataggctgttcttcaaatatagctctcagtgaaaacgtgtgtgtgtccttccttttgttcagatgttttctgcttatgtagattgacaaatgtcaaaaatgtccaggcagcaaaacccttttagtctcaaccatagtatcaagttagatggtaagtgctgatatttattaaattatctggtttatttgaatatgatatagagcagtattttaataagattgtcgtctacaataatttaaaatccatgttttcaggactcagatttttgtttctcgtaattaaggtattttcttaaatgcacatttccttgaagattagttaaaggaagtctgatagctgtagtgtt

SEQ ID NO: 31439 - DNA, 232 bp, Macaca Mulatta
ttcctcggagccggtgccgccagggccctcaccactgagtcgggtaggtccctgacgcaagcgggaagacagcacaccacaacgacccgagcctcctaacgcgcgagtgagggggggcgccccggcgcccggcattatatacaccgccgccgggccccgccccctgcacctcccggaccaatcagaggccgctcctgcgtctcatattcatgagctgggggccgggtctatc

SEQ ID NO: 31440 - DNA, 248 bp, Macaca Mulatta
gatattttcccccgaatcctccccagacacagaggcaggagaggagctgtctggggacgggctggttttgcccagggccagcaaacttgacgagttcctcagcccagaggaggagatagattctacttctgactccactgggagcttttaccagaccttgcaggtactgaagcagaaaggcagagcgtgtctgttggagtctgtctttcagtctgacccggagagtgatgaaagcctctctgaagatg

SEQ ID NO: 31441 - DNA, 671 bp, Macaca Mulatta
caagaaccatcaagttccaaccattaaggtccacaccatctccctcagtgaaaacggggaggaagtctaggacaggaaagatgcagaggaaaggggaataatcttaggtacccaccccacttccttctcagaaggccagctcttcttggaggacaagacaggaccaatcaaagaggggaccttctgggaatggggtggggggtaaacccaactcattaggcagtggatagggcacagggaagagggagggtttctcacaaccaaccagttcagaacgatacggaacagcatttccctgcagctaatgctttctcggtcactctgtgcccgcttcaacgaaaaccaccatgggaaacagaatttcatgcacaatccaaaagactataaatacaggattatgatttcatcatgaatattttgagcacacactctaagtttggagctatttcttgatggaagtgaggggattttattttcaggctaaacctactgacagccacatttgacatttatggggagagggcctagagaggaagagcattaagatggtggccaagatccagacacattatttttagagcaagttctgaaactccaccctttctgacacatccaatttctcagcttgagggaaacttgacagtcaagtttatctttggctgcactttgaa

SEQ ID NO: 31442 - DNA, 2413 bp, Macaca Mulatta
  misc_feature (1)...(2413): n = A,T,C or G
ggcattctatttctaaaccaaatgtgatctcctacttggagcaagggaaggagccctggttggttgacagagagctaacaagaggccagtggccagnnnnnnnnnnnnnnnnnnnnnnnnnnnnnnnnnnnnnnnnnnnnnnnnnnnnnnnnnnnnnnnnnnnnnnnnnnnnnnnnnnnnnnnnnnnnnnnnnnnnnnnnnnnnnnnnnnnnnnnnnnnnnnnnnnnnnnnnnnnnnnnnnnnnnnnnnnnnnnnnnnnnnnnnnnnnnnnnnnnnnnnnnnnnnnnnnnnnnnnnnnnnnnnnnnnnnnnnnnnnnnnnnnnnnnnnnnnnnnnnnnnnnnnnnnnnnnnnnnnnnnnnnnnnnnnnnnnnnnnnnnnnnnnnnnnnnnnnnnnnnnnnnnnnnnnnnnnnnnnnnnnnnnnnnnnnnnnnnnnnnnnnnnnnnnnnnnnnnnnnnnnnnnnnnnnnnnnnnnnnnnnnnnnnnnnnnnnnnnnnnnnnnnnnnnnnnnnnnnnnnnnnnnnnnnnnnnnnnnnnnnnnnnnnnnnnnnnnnnnnnnnnnnnnnnnnnnnnnnnnnnnnnnnnnnnnnnnnnnnnnnnnnnnnnnnnnnnnnnnnnnnnnnnnnnnnnnnnnnnnnnnnnnnnnnnnnnnnnnnnnnnnnnnnnnnnnnnnnnnnnnnnnnnnnnnnnnnnnnnnnnnnnnnnnnnnnnnnnnnnnnnnnnnnnnnnnnnnnnnnnnnnnnnnnnnnnnnnnnnnnnnnnnnnnnnnnnnnnnnnnnnnnnnnnnnnnnnnnnnnnnnnnnnnnnnnnnnnnnnnnnnnnnnnnnnnnnnnnnnnnnnnnnnnnnnnnnnnnnnnnnnnnnnnnnnnnnnnnnnnnnnnnnnnnnnnnnnnnnnnnnnnnnnnnnnnnnnnnnnnnnnnnnnnnnnnnnnnnnnnnnnnnnnnnnnnnnnnnnnnnnnnnnnnnnnnnnnnnnnnnnnnnnnnnnnnnnnnnnnnnnnnnnnnnnnnnnnnnnnnnnnnnnnnnnnnnnnnnnnnnnnnnnnnnnnnnnnnnnnnnnnnnnnnnnnnnnnnnnnnnnnnnnnnnnnnnnnnnnnnnnnnnnnnnnnnnnnnnnnnnnnnnnnnnnnnnnnnnnnnnnnnnnnnnnnnnnnnnnnnnnnnnnnnnnnnnnnnnnnnnnnnnnnnnnnnnnnnnnnnnnnnnnnnnnnnnnnnnnnnnnnnnnnnnnnnnnnnnnnnnnnnnnnnnnnnnnnnnnnnnnnnnnnnnnnnnnnnnnnnnnnnnnnnnnnnnnnnnnnnnnnnnnnnnnnnnnnnnnnnnnnnnnnnnnnnnnnnnnnnnnnnnnnnnnnnnnnnnnnnnnnnnnnnnnnnnnnnnnnnnnnnnnnnnnnnnnnnnnnnnnnnnnnnnnnnnnnnnnnnnnnnnnnnnnnnnnnnnnnnnnnnnnnnnnnnnnnnnnnnnnnnnnnnnnnnnnnnnnnnnnnnnnnnnnnnnnnnnnnnnnnnnnnnnnnnnnnnnnnnnnnnnnnnnnnnnnnnnnnnnnnnnnnnnnnnnnnnnnnnnnnnnnnnnnnnnnnnnnnnnnnnnnnnnnnnnnnnnnnnnnnnnnnnnnnnnnnnnnnnnnnnnnnnnnnnnnnnnnnnnnnnnnnnnnnnnnnnnnnnnnnnnnnnnnnnnnnnnnnnnnnnnnnnnnnnnnnnnnnnnnnnnnnnnnnnnnnnnnnnnnnnnnnnnnnnnnnnnnnnnnnnnnnnnnnnnnnnnnnnnnnnnnnnnnnnnnnnnnnnnnnnnnnnnnnnnnnnnnnnnnnnnnnnnnnnnnnnnnnnnnnnnnnnnnnnnnnnnnnnnnnnnnnnnnnnnnnnnnnnnnnnnnnnnnnnnnnnnnnnnnnnnnnnnnnnnnnnnnnnnnnnnnnnnnnnnnnnnnnnnnnnnnnnnnnnnnnnnnnnnnnnnnnnnnnnnnnnnnnnnnnnnnnnnnnnnnnnnnnnnnnnnnnnnnnnnnnnnnnnnnnnnnnnnnnnnnnnnnnnnnnnnnnnnnnnnnnnnnnnnnnnnnnnnnnnnnnnnnnnnnnnnnnnnnnnnnnnnnnnnnnnnnnnnnnnnnnnnnnnnnnnnnnnnnnnnnnnnnnnnnnnnnnnnnnnnnnnnnnnnnnnnnnnnnnnnnnnnnnnnnnnnnnnnnnnnnnnnnnnnnnnnnnnnnnnnnnnnnnnnnnnnnnnnnnnnnnnnnnnnnnnnnnnnnnnnnnnnnnnnnnnnnnnnnnnnnnnnnnnnnnnnnnnnnnnnnnnnnnnnnnnnnnaaatttcccatcatcatgtacttcctattgaacatggaataatcctagctattggtggggaaagtactgtgaataatgtgtgtgaaggactttattccagaatactctttttgccacattatatacccag

SEQ ID NO: 31443 - DNA, 945 bp, Macaca Mulatta
  misc_feature (1)...(945): n = A,T,C or G
atgaactgtcgctcggaggtgctggaggtgtcggtggaggggcgacaggtggaggaagccatgctggctgtgctgcacacggtgctcctgcaccgcagcacgggcaagttccactacaagaaggagggcacctactccattggcaccgtgggcacccaggatgttgactgtgacttcatcgacttcacttacgtgcgcgtctcttctgaggaactggatcgtgccctgcgcaaggttgtcggggagttcaagnnnnnnnnnnnnnnnnnnnnnnnnnnnnnnnnnnnnnnnnnnnnnnnnnnnnnnnnnnnnnnnnnnnnnnnnnnnnnnnnnnnnnnnnnnnnnnnnnnnnnnnnnnnnnnnnnnnnnnnnnnnnnnnnnnnnnnnnnnnnnnnnnnnnnnnnnnnnnnnnnnnnnnnnnnnnnnnnnnnnnnnnnnnnnnnnnnnnnnnnnnnnnnnnnnnnnnnnnnnnnnnnnnnnnnnnnnnnnnnnnnnnnnnnnnnnnnnnnnnnnnnnnnnnnnnnnnnnnnnnnnnnnnnnnnnnnnnnnnnnnnnnnnnnnnnnnnnnnnnnnnnnnnnnnnnnnnnnnnnnnnnnnnnnnnnnnnnnnnnnnnnnnnnnnnnnnnnnnnnnnnnnnnnnnnnnnnnnnnnnnnnnnnnnnnnnnnnnnnnnnnnnnnnnnnnnnnnnnnnnnnnnnnnnnnnnnnnnnnnnnnnnnnnnnnnnnnnnnnnnnnnnnnnnnnnnnnnnnnnnnnnnnnnnnnnnnnnnnnnnnggcagcccccgctggcttcttggttttgtggttgccagcctctggtcatccttttaatctttgctgacagttcagtcctgtctgtactgtgtctccatagccctggtgtggtcccccttctttctccactgtacagaagagccaccactgggatggggaataaagttgagaa

SEQ ID NO: 31444 - DNA, 443 bp, Macaca Mulatta
  misc_feature (1)...(443): n = A,T,C or G
ggtgctccaggaaccaggtggtgacaaactggatgtgaggcacacatcctaaagtcagcacagcagaggagacccaggcagtgccaggagtcaaggnaggcctgttggatctcatcatccatatccctgttgatacctttacctgctgcgcctgaagaagtcgttatgcctcccattccgggcgttccattccacaacgttgacgacgactctccggcctcagttgagtcagaggactgggtagatgcacaggatcccacagatgaggaagaggaggaagcctcctccatttcctcttccactttctacttagtattttccccctcttccttctcctcatcctcttctctgattcttggtggtcctgaggaggaggtgccgtctgatgtgataccaagtcttcccgagagcactcccagtatcctccacagatcctccacagg

SEQ ID NO: 31445 - DNA, 212 bp, Macaca Mulatta
aggtttcaactggattatttaaatattggtaaatattgtgcattacggtttgtttgtttttccttttaagaagtatgtcctttgactgtatctctcagttacatgacctgtatcttttcctctttaatagtagttttatgttaacctttaagagatttgtttttcctccaaggagaatttaaaggtatttttaaaaattctaataagaggat

SEQ ID NO: 31446 - DNA, 2219 bp, Macaca Mulatta
  misc_feature (1)...(2219): n = A,T,C or G
ctgacatccaggtagcccagtgcgtctcaccaaagggacctcttgcttgttcaagaacatacttttttggagctactcatgttccttactnnnnnnnnnnnnnnnnnnnnnnnnnnnnnnnnnnnnnnnnnnnnnnnnnnnnnnnnnnnnnnnnnnnnnnnnnnnnnnnnnnnnnnnnnnnnnnnnnnnnnnnnnnnnnnnnnnnnnnnnnnnnnggccaaggaggtagcagagcagactctgggatctgggttagattcctttgagttgattccgtttaaggcagccctgcgnnnnnnnnnnnnnnnnnnnnnnnnnnnnnnnnnnnnnnnnnnnnnnnnnnnnnnnnnnnnnnnnnnnnnnnnnnnnnnnnnnnnnnnnnnggcttgtatgaccgtctatgacattcctgacttgctgggaggaaatggttgcttaggatctgtggttttctctgaatcatttttgacttctcaaatcttagttaaagaaangatggcactgttaccacagaaacccgctccatagtcctgactgctgctgtacccagattctgctcctggctggnaagataatgaagtaaaattgtctgagaaaacccagcaagcagtgagggnnnnnnnnnnnnnnnnnnnnnnnnnnnnnnnnnnnnnnnnnnnnnnnnnnnnnnnnnnnnnnnnnnnnnnnnnnnnnnnnnnnnnnnnnnnnnnnnnnnnnnnnnnnnnnnnnnnnnnnnnnnnnnnnnnnnnnnnnnnnnnnnnnnnnnnnnnnnnnnnnnnnnnnnnnnnnnnnnnnnnnnnnnnnnnnnnnnnnnnnnnnnnnnnnnnnnnnnnnnnnnnnnnnnnnnnnnnnnnnnnnnnnnnnnnnnnnnnnnnnnnnnnnnnnnnnnnnnnnnnnnnnnnnnnnnnnnnnnnnnnnnnnnnnnnnnnnnnnnnnnnnnnnnnnnnnnnnnnnnnnnnnnnnnnnnnnnnnnnnnnnnnnnnnnnnnnnnnnnnnnnnnnnnnnnnnnnnnnnnnnnnnnnnnnnnnnnnnnnnnnnnnnnnnnnnnnnnnnnnnnnnnnnnnnnnnnnnnnnnnnnnnnnnnnnnnnnnnnnnnnnnnnnnnnnnnnnnnnnnnnnnnnnnnnnnnnnnnnnnnnnnnnnnnnggtttcgccagcatttcgccatcagcagcattagccaggagcctgtgatgaggacccatcttcctgtcctgctgcagcaagctgaaatcaaccctactcacagagtagaaaatgacaaggtnnnnnnnnnnnnnnnnnnnnnnnnnnnnnnnnnnnnnnnnnnnnnnnnnnnnnnnnnnnnnnnnnnnnnnnnnnnnnnnnnnnnnnnnnnnnnnnnnnnnnnnnnnnnnnnnnnnnnnnnnnnnnnnnnnnnnnnnnnnnnnnnnnnnnnnnnnnnnnnnnnnnnnnnnnnnnnnnnnnnnnnnnnnnnnnnnnnnnnnnnnnnnnnnnnnnnnnnnnnnnnnnnnnnnnnnnnnnnnnnnnnnctacacagatgttattgatgttgtccaggccctgcagacccacccagactcaaatgtcaaggcctccttcaccattggtgccatcacagcatgtgtggagcccatgagttgctacatggagcacagnnnnnnnnnnnnnnnnnnnnnnnnnnnnnnnnnnnnnnnnnnnnnnnnnnnnnnnnnnnnnnnnnnnnnnnnnnnnnnnnnnnnnnnnnnnnnnnnnnnnnnnnnnnnnnnnnnnnnnnnnnnnnnnnnnnnnnnnnnnnnnnnnnnnnnnnnnnnnnnnnnnnnnnnnnnnnnnnnnnnnnnnnnnnnnnnnnnnnnnnnnnnnnnnnnnnnnnnnnnnnnnnnnnnnnnnnnnnnnnnnnnnnnnnnnnnnnnnnnnnnnnnnnnnnnnnnnnnnnnnnnnnnnnnnnnnnnnnnnnnnnnnnnnnnnnnnnnnnnnnnnnnnnnnnnnnnnnnnnnnnnnnnnnnnnnnnnnnnnnnnnnnnnnnnnnnnnnnnnnnnnnnnnnnnnnnnnnnnnnnnnnnnnnnnnnnnnnnnnnnnnnnnnnnnnnnnnnnnnnnnnnagactctgagaggaccatggaggtctgctataacacactggccaactccttgagcatcatgccagttttggaaggacccacaccaccaccggactccaaaagcatatctcaagacagcagcgggcagcaggagtgctacc

SEQ ID NO: 31447 - DNA, 155 bp, Macaca Mulatta
ctggtgaccggctacaaccgtgtgattcttgccgagtttgactacaaagcggagccgctagaaaccttcccctttgatcaaagcaaagagcgcctttccatgtatgtcatgaaagctgacctgatgcccttcctgtattggaatatgatgctaag

SEQ ID NO: 31448 - DNA, 618 bp, Macaca Mulatta
  misc_feature (1)...(618): n = A,T,C or G
tttttttttttttcagagtcaataactttattagaaaaagataatactaaaacctttcaatgacagagacaatcaactttgtaacagaaagtcagatatactttatttttacttctaaatccaaaggctaagtagagcagagttgtaaaaatgaaatcccacttagtctgattcacacgaatactaacgtttaatcctgttttcaaagtccaagaatgaaaacttgcaattaaacactgagcaagccacatgtttaagtaatatttcttaaaaagtcttaaagaaaaaagtatgatacaggacctaagttttcagtggcatatatactattaacacatgttctgaaatctggtaggtcacatcagtcctgaattaactttnnnnnnnnnnnnnnnnnnnnnnaaaactaactgagctttatactttttctatgccactatagctttctttcacctcattttttaaatgtcgatcttcactttatgccgttctcagtattcttccaaaaatcttcgaacagtagtcctacaacgcaaaatttggggaaaaatgattattagacaacatgtaaaaggccaatttttatgagaaagtgttggcccagtcactaactgctaa

SEQ ID NO: 31449 - DNA, 1622 bp, Macaca Mulatta
  misc_feature (1)...(1622): n = A,T,C or G
tattactcacgtgcagatgccgaaaatgccatgcggtacataaatggaacacgtctggatgaccgaatcattcgcacagactgggacgcaggctttaaggagggcaggcagtacggccgtgggcgatctgggggccaggtnnnnnnnnnnnnnnnnnnnnnnnnnnnnnnnnnnnnnnnnnnnnnnnnnnnnnnnnnnnnnnnnnnnnnnnnnnnnnnnnnnnnnnnnnnnnnnnnnnnnnnnnnnnnnnnnnnnnnnnnnnnnnnnnnnnnnnnnnnnnnnnnnnnnnnnnnnnnnnnnnnnnnnnnnnnnnnnnnnnnnnnnnnnnnnnnnnnnnnnnnnnnnnnnnnnnnnnnnnnnnnnnnnnnnnnnnnnnnnnnnnnnnnnnnnnnnnnnnnnnnnnnnnnnnnnnnnnnnnnnnnnnnnnnnnnnnnnnnnnnnnnnnnnnnnnnnnnnnnnnnnnnnnnnnnnnnnnnnnnnnnnnnnnnnnnnnnnnnnnnnnnnnnnnnnnnnnnnnnnnnnnnnnnnnnnnnnnnnnnnnnnnnnnnnnnnnnnnnnnnnnnnnnnnnnnnnnnnnnnnnnnnnnnnnnnnnnnnnnnnnnnnnnnnnnnnnnnnnnnnnnnnnnnnnnnnnnnnnnnnnnnnnnnnnnnnnnnnnnnnnnnnnnnnnnnnnnnnnnnnnnnnnnnnnnnnnnnnnnnnnnnnnnnnnnnnnnnnnnnnnnnnnnnnnnnnnnnnnnnnnnnnnnnnnnnnnnnnnnnnnnnnnnnnnnnnnnnnnnnnnnnnnnnnnnnnnnnnnnnnnnnnnnnnnnnnnnnnnnnnnnnnnnnnnnnnnnnnnnnnnnnnnnnnnnnnnnnnnnnnnnnnnnnnnnnnnnnnnnnnnnnnnnnnnnnnnnnnnnnnnnnnnnnnnnnntggtgcaaaagcagtcgccacaggacagtactgcttccatgcttcacacatcaggaaatgacgcccaagcttgagtatttactgacacgtttttcaaaagatgtgttatacctaaagctaaaaaaagggcaagggtttgccatagagggaacctgtaaatagtttcaggggtaggggagatgttgccagtaagaaatggggtaaactctcaagagacagtgaaaacactgccttgacatgaggatcaccgagtttcttcttttcattttcagtgatgttgagaacggactgggtttaaaaagggagcttgaagatggaatgtttaacagtcacagaaggttcctgcaggagattcctgttttagccgtttctcatttttttcctcaaattgtacttctgaggctcaagccttcacagtgagctcatggttctacagagaaggggagtctagggaatttctttggtatttataaggcaagaggtgatttctctctaatatatgtgagttattgctcatttaaaactgttaagtctagtataattttccctgataggaaaannnnnnnnnnnnnncacttagcaacaaagtaccttctaacttccaacagtctgtgaaagttggggctcacgtaccttagtgcgaatgtctttcatgttaaaccaagtgtagaaatctgaatttttaaaagagcaatataactagttgtaag

SEQ ID NO: 31450 - DNA, 493 bp, Macaca Mulatta
  misc_feature (1)...(493): n = A,T,C or G
gctgacttctntgaattaggtactgagaatccacaaataaagcagtgtgggtaactttcaagaagccattggaaagtctccacattctggaattacttgtaaatgtctacagagtaatggaaggaaaggcttccttatctgctcattgctgccatctgggttgggaaaataagtgaagatgtttcatcaagtccttcaagaatctcttattaatgttcaaaatagtttaagagcattgttgagttaaaccgatagctgattgattattttctgagatttagatctaaacaaactcagcatgatcaggaagcacccctcacagctccagggtgcaatactgatgtcaacttgtcttgtgaggatacatttttcgctcatatatgtaaaattgctataagttcatttgcacagccagttccaatcatgtatgtggtcaccagattaaaagcttcatccagaaagacaagactcttcagaacaaatagcggacaag

SEQ ID NO: 31451 - DNA, 744 bp, Macaca Mulatta
aggtggctgagagcattctgatactcactggcttttgtcctggtcagatcctcgcgctgctggatgctctgagtacggtgcacagtcagaagatgaagaaggccaaggagcagcggcacctgcacaataaggagcacttcagagccaagcagaaggaggaggaggagaagctgaagcggcagaaggacctcaggaagaagctcttccgaattcaggggcagaaggaaagaagaaaccagaagtccagtttgaagggggctgagggccagttgcagtaagcctttggactggagggactgtccctggatctgcggaggtggacagtttcaaacatcacagtttgaatgcctgtgaatgacaagtcagtgggcaagagcccaagagatgtctctacccaaactgtgcctgcaagaggaggaacggagaagcctggactgctgggactgggttcgttctcaccacctggggctgtcgagatttaaagtgatgtaagctgtggttatgtggattctcttactttcctctgcctgcctcagtttaattattttgtcctacaaaaatatcattaaaatattttttgttagttttggcttagtagttttcattagggatgaatgcctgacaatcctttgtggataattatttatgctaccaccttcgtgaggagccttccaaaatagaaatattcacttgaatcctcagctcccatggaaaattttagagaagggtgtgtagtgttcttgt

SEQ ID NO: 31452 - DNA, 2786 bp, Macaca Mulatta
  misc_feature (1)...(2786): n = A,T,C or G
tctagactttgggattccagaagacagaggtttgagagtaaaaaacaaaataacaagaccacaacaaaaacaactctgtattctcgtccccaccattaccatctcccctttgtgatgtcaaagagaccagaggaagtggacagactaggagaagcatagnnnnnnnnnnnnnnnnnnnnnnnnnnnnnnnnnnnnnnnnnnnnnnnnnnnnnnnnnnnnnnnnnnnnnnnnnnnnnnnnnnnnnnnnnnnnnnnnnnnnnnnnnnnnnnnnnnnnnnnnnnnnnnnnnnnnnnnnnnnnnnnnnnnnnnnnnnnnnaggcagttttgttaccaagagactcctggtccccgagaagctctgagccggctccgagaactttgtcgtcagtggctaaagccagaaatccacaccaaagagcaaatcttggagctgctggtgctggagcagttcctgactatcctgcctgaggagctccaggcctgggtgcgggagcatcatccagagagtggggaggaggctgtggctgtagtcgaagatctggaacaagagcttagtgagccagggaaccagnnnnnnnnnnnnnnnnnnnnnnnnnnnnnnnnnnnnnnnnnnnnnnnnnnnnnnnnnnnnnnnnnnnnnnnnnnnnnnnnnnnnnnnnnnnnnnnnnnnnnnnnnnnnnnnnnnnnnnnnnnnnnnnnnnnnnnnnnnnnnnnnnnnngatggtgaaagtatacctgagannnnnnnnnnnnnnnnnnnnnnnnnnnnnnnnnnnnnnnnnnnnnnnnnnnnnnnnnnnnnnnnnnnnnnnnnnnnnnnnnnnnnnnnnnnnnnnnnnnnnnnnnnnnnnnnnnnnnnnnnnnnnnnnnnnnnnnnnnnnnnnnnnnnnnnnnnnnnnnnnnnnnnnnnnnnnnnnnnnnnnnnnnnnnnnnnnnnnnnnnnnnnnnnnnnnnnnnnnnnnnnnnnnnnnnnnnnnnnnnnnnnnnnnnnnnnnnnnnnnnnnnnnnnnnnnnnnnnnnnnnnnnnnnnnnnnnnnnnnnnnnnnnnnnnnnnnnnnnnnnnnnnnnnnnnnnnnnnnnnnnnnnnnnnnnnnnnnnnnnnnnnnnnnnnnnnnnnnnnnnnnnnnnnnnnnnnnnnnnnnnnnnnnnnnnnnnnnnnnnnnnnnnnnnnnnnnnnnnnnnnnnnnnnnnnnnnnnnnnnnnnnnnnnnnnnnnnnnnnnnnnnnnnnnnnnnnnnnnnnnnnnnnnnnnnnnnnnnnnnnnnnnnnnnnnnnnnnnnnnnnnnnnnnnnnnnnnnnnnnnnnnnnnnnnnnnnnnnnnnnnnnnnnnnnnnnnnnnnnnnnnnnnnnnnnnnnnnnnnnnnnnnnnnnnnnnnnnnnnnnnnnnnnnnnnnnnnnnnnnnnnnnnnnnnnnnnnnnnnnnnnnnnnnnnnnnnnnnnnnnnnnnnnnnnnnnnnnnnnnnnnnnnnnnnnnnnnnnnnnnnnnnnnnnnnnnnnnnnnnnnnnnnnnnnnnnnnnnnnnnnnnnnnnnnnnnnnnnnnnnnnnnnnnnnagtggcttattctgttcatataaaacttattttgcattgcagtgaaccacttgtctacaaaccaggtgttggtgcctcctgtgtggatgactgtgattgtagggggttgctgggtggccttcttatttcctatcctttggtccatttctaatgatttcctttaaagggaccaaatcttatctggaaataaattgttatggaggggctgtttttgagcaatactgagcattgaataattctaaaagaccagtatctatgtatacttttttaaaaaagattggctaagatcaaaggatattcagaggtgcatctttttctgtaagagtgacgttttaaacaaacataaggtttttgggaataagaattgtccacattcccacaggaaatcattgctatggtctcccctaggaatgtgatagatagcttctataagcagcattatccatggtataaaacctgtagttttaatggtttagaaatctatgtctnnnnnnnnnnnnnnnnnnnnnnnnnnnnnnnnnnnnnnnnnnnnnnnnnnnnnnnnnnnnnnnnnnnnnnnnnnnnnnnnnnnnnnnnnnnnnnnnnnnnnnnnnnnnnnnnnnnnnnnnnnnnnnnnnnnnnnnnnnnnnnnnnnnnnnnnnnnnnnnnnnnnnnnnnnnnnnnnnnnnnnnnnnnnnnnnnnnnnnnnnnnnnnnnnnnnnnnnnnnnnnnnnnnntaattcatagccttttatgtccgcattattcttttttgggggttggtcagcaactttgagtgccattgcaggcagcatcattgaagtagttttataaagaaaagaagtctgatatcttgggcagcttgctgcttactagggagaccagcatgctcagacatttattgttaaggttaaatgtatgctctggcaccaagttcaaatctttcctccccatttgtgagctgtgggactttaagcaacttatctaaatgctcctatgctataatctccccatctgtacaacagaggatgacatcactaccttcctcatagggtacataagattaaataaatacaaacttgtacttaaaatgtagctctcaataaatgtacattatgatttacataagaaataataccatttaacaaatataggcagaattttaagtatcatgttaaaattaggatatgaaatgcctctgctgacattgttactcttttctccatagtcaaaacctaaatcagaatatttcaaaa

SEQ ID NO: 31453 - DNA, 774 bp, Macaca Mulatta
atgaaacacctgtggttcttcctcctcctggtggcagctcccagatgtgagtgtctcggggatgcagatatgacgatatgggaggctgtctctgatcccagggctcactgtgggtctctctgttcacaggggtcctgtcccagctgcagctgcaggagtcgggcccaggactggtgaagccttcggagaccctgtccctcacctgcgctgtctctggtggctccatcagcggtggtaattgctggagctggatccgccagcccccagggaagggactggagtggattgggtatatctgtggtagtagtgggagcacctactacaacccctccctcaagagtcgagtcaccatttcaacagacacgtccaagaaccagttctccctgaagctgagctctgtgaccgccgcggacacggccgtgtattactgtgcgagaagaacacagtgagacgatggttacaatttctgtcagaagtgtgagaacctaatgcaatagacgtgctgtctttatcagaagaggaagagacaccagagacctctcacttttcacgtgcacgcagagcagaggccatgtggagacgcagtgtattagaaggtgccccagtgcatgccaggaagaagccgcaccaagaaccaaccctggcagcaccttgatcttcaccattcagactttagatttgtgaaaaaatcaatatttgtcgtataaggccaaccactcagagtagtctccttatgacgacccagacagactaataccacgtaactcataactc

SEQ ID NO: 31454 - DNA, 2184 bp, Macaca Mulatta
  misc_feature (1)...(2184): n = A,T,C or G
cgatggcgggttcgccgggtgtgaggcttcacagcggtccggtgaccaagtcgagnnnnnnnnnnnnnnnnnnnnnnnnnnnnnnnnnnnnnnnnnnnnnnnnnnnnnnnnnnnnnnnnnnnnnnnnnnnnnnnnnnnnnnnnnnnnnnnnnnnnnnnnnnnnnnnnnnnnnnnnnnnnnnnnnnnnnnnnnnnnnnnnnnnnnnnnnnnnnnnnnnnnnnnnnnnnnnnnnnnnnnnnnnnnnnnnnnnnnnnnnnnnnnnnnnnnnnnnnnnnnnnnnnnnnnnnnnnnnnnnnnnnnnnnnnnnnnnnnnnnnnnnnnnnnnnnnnnnnnnnnnnnnnnnnnnnnnnnnnnnnnnnnnnnnnnnnnnnnnnnnnnnnnnnnnnnnnnnnnnnnnnnnnnnnnnnnnnnnnnnnnnnnnnnnnnnnnnnnnnnnnnnnnnnnnnnnnnnnnnnnnnnnnnnnnnnnnnnnnnnnnnnnnnnnnnnnnnnnnnnnnnnnnnnnnnnnnnnnnnnnnnnnnnnnnnnnnnnnnnnnnnnnnnnnnnnnnnnnnnnnnnnnnnnnnnnnnnnnnnnnnnnnnnnnnnnnnnnnnnnnnnnnnnnnnnnnnnnnnnnnnnnnnnnnnnnnnnnnnnnnnnnnnnnnnnnnnnnnnnnnnnnnnnnnnnnnnnnnnnnnnnnnnnnnnnnnnnnnnnnnnnnnnnnnnnnnnnnnnnnnnnnnnnnnnnnnnnnnnnnnnnnnnnnnnnnnnnnnnnnnnnnnnnnnnnnnnnnnnnnnnnnnnnnnnnnnnnnnnnnnnnnnnnnnnnnnnnnnnnnnnnnnnnnnnnnnnnnnnnnnnnnnnnnnnnnnnnnnnnnnnnnnnnnnnnnnnnnnnnnnnnnnnnnnnnnnnnnnnnnnnnnnnnnnnnnnnnnnnnnnnnnnnnnnnnnnnnnnnnnnnnnnnnnnnnnnnnnnnnnnnnnnnnnnnnnnnnnnnnnnnnnnnnnnnnnnnnnnnnnnnnnnnnnnnnnnnnnnnnnnnnnnnnnnnnnnnnnnnnnnnnnnnnnnnnnnnnnnnnnnnnnnnnnnnnnnnnnnnnnnnnnnnnnnnnnnnnnnnnnnnnnnnnnnnnnnnnnnnnnnnnatgtgatgaatgtgagaaaacctttagtnnnnnnnnnnnnnnnnnnnnnnnnnnnnnnnnnnnnnnnnnnnnnnnnnnnnnnnnnnnnnnnnnnnnnnnnnnnnnnnnnnnnnnnnnnnnnnnnnnnnnnnnnnnnnnnnnnnnnnnnnnnnnnnnnnnnnnnnnnnnnnnnnnnnnnnnnnnnnnnnnnnnnnnnnnnnnnnnnnnnnnnnnnnnnnnnnnnnnnnnnnnnnnnnnnnnnnnnnnnnnnnnnnnnnnnnnnnnnnnnnnnnnnnnnnnnnnnnnnnnnnnnnnnnnnnnnnnnnnnnnnnnnnnnnnnnnnnnnnnnnnnnnnnnnnnnnnnnnnnnnnnnnnnnnnnnnnnnnnnnnnnnnnnnnnnnnnnnnnnnnnnnnnnnnnnnnnnnnnnnnnnnnnnnnnnnnnnnnnnnnnnnnnnnnnnnnnnnnnnnnnnnnnnnnnnnnnnnnnnnnnnnnnnnnnnnnnnnnnnnnnnnnnnnnnnnnnnnnnnnnnnnnnnnnnnnnnnnnnnnnnnnnnnnnnnnnnnnnnnnnnnnnnnnnnnnnnnnnnnnnnnnnnnnnnnnnnnnnnnnnnnnnnnnnnnnnnnnnnnnnnnnnnnnnnnnnnnnnnnnnnnnnnnnnnnnnnnnnnnnnnnnnnnnnngagaaaccttaccagtgtgttcagtgcagcagaagttttagccaactctctgaacttactattcatgaggaagtccattgtggggaagacagttaaaatgtgatgaatgtgagaaaacctttagtatatacttcaactctattcagtaccagagacaccataccaggaaaaaatctaatgaatgctgttcattattgatgagtatgaaaaagttttttaatcagtggtaagctcttatgctgcattaaaaccacactggagccaggcgtggtggctcacggctgtaatcccaacactttgggaggcagaggtggaagcatcacttgagcccaggagtttgaggctacagtgagctatgatcccaccattgcactccagcctgggcaacagagcaagaccctgtctatt

SEQ ID NO: 31455 - DNA, 82 bp, Macaca Mulatta
aagtgctgacagcaatgaaccagacctggcacccagaacacttcttctgctctcactgtggagaggtgtttggtgcagaagg

SEQ ID NO: 31456 - DNA, 663 bp, Macaca Mulatta
aataagcagatgtatgtatgcatggttatactattttgttaacatgtacaatttcctgattttcttcaaaaatgctgttataaagtatttgtctatttatgataacagtacctgtgttctgcttgaatttactaaattctactactgggttatcattaaaccatgtgatattccacgtttggatatgctcatttaatttctacagaaaaaatgttaaaattatttcacatagccatttgttaaagcacagcatcataactcagcaggcttgatttaatctgtatcatcttatatatatcacaatcttatttttaagcacatttaagagtccttcagttgctttatcaaaaactatctattgcttttacatgatttaatagaatataaacctcttgataaaaaatgcacaaaaaaatcactttgtatatgtgagtttcactgcattgtatattttttcatttggtacacaaagaatgtattcttcataggtttattcttttaatatgtgaactattattaaagtttactctggttcctaagattaaaaaaaaatgcttactgaatttgaaaatgagaggtgctgatatagaatgatgaaggtttatctctttttttagactcaagatgcattttatttaatattgacatcagtacaaacttaag

SEQ ID NO: 31457 - DNA, 484 bp, Macaca Mulatta
aatgagagatgagagcttctggggagcctgctggtgatgtctgtgggactccagtcccctgagaccccatgtcatgtagagaagttaacggcccaagtgatgggcaggctggtgggacctggggaacatcaggagaggagtccagaacccacgtctactgcagaaaagtcgggggaaactgcctaacaaagaaaataccccaaaggcatatatgttttagggcctttggtccaaatggcccaggtggccactcttccagatagaccaggcaactctcactccaccgggcacagatgaggggctgctggtcaatgcctgggcctacaccaaggattacatttcttttaaatcttggcctttcagatacatgaaaaataatggcattaaattgctttaatttgcattattcttgttatccagtttgcacatttctgataggcctcttaggcattgatgggtagtttgtaactgggccaagcccatt

SEQ ID NO: 31458 - DNA, 703 bp, Macaca Mulatta
cagactcctgtttacctttgggcatgtctcaagaggataatcagctcaagctagtacccgtcactcctgggcgagatatggtgcaccacctactgagtgttagcactgccgagggcacagaggagaacctgtctgagacgagcgtagctggcttcattgtggtgaccagtgtggacctggagcatcaggtgtttactgttctgtctccagccccccgcccactgcctaagaacttccttctcatcatggacatccggttcatggatctgaagtagagatcagcaggaagccttgctgcctgggacatagagatcttctggccacccctagaggcagatgggctgagataagagactctgttggggccacctaaccagtaaactgtggactagtagaagttcatattctacctctaaaaacaggtagtggtaacctgactcttctaatctggaaccaaaaggaaaaccatgagactctaattggttgcttagactacctaagatgccactttgaattctctaagaccctggagaattgcatttctttcactgtgctactttgtggtttttaaaaatcaatgctttatattccatatagggttcttacccatttatctaggatgaaagtgtgaattagagggactctttccaataaagttcaaacttaaaaataattttaataaatatttttgccatgtcataga

SEQ ID NO: 31459 - DNA, 425 bp, Macaca Mulatta
  misc_feature (1)...(425): n = A,T,C or G
tgtttggaatgatgtgtgcatgaatttggagatgtataaaacaaaactagcagaatgttttaaaactttttgccatgtatgaggagtgctagaaaatnaaagtgcatattttccctaacctcaaaatgtggagcttgatcgatgtgaagaataatttcatcatagtgaaaatgtgnttcanaataaatttctacacttgccatttgcatgtttgtgcttttctaattaaagaaattggttgttttaagataccctgaatttgactttttatntaatgccttgctactttgacccacaattttccagtctcttgtagcatatgacaactatttttctgtattttctagatttaacaacgttttccttttttacttatgtgggatggaatcacatagaaggacttccatcatttgtctttccaaggt

SEQ ID NO: 31460 - DNA, 1183 bp, Macaca Mulatta
  misc_feature (1)...(1183): n = A,T,C or G
agggagcttctaggtgaccctcaggcctggcctctgctgctggccagctgcctggtgcccggggtgctgcagctcgcctccctgcctctggtccccgagagcccacgctacctcctcattgactgtggagacaccgaggcctgcctggcannnnnnnnnnnnnnnnnnnnnnnnnnnnnnnnnnnnnnnnnnnnnnnnnnnnnnnnnnnnnnnnnnnnnnnnnnnnnnnnnnnnnnnnnnnnnnnnnnnnnnnnnnnnnnnnnnnnnnnnnnnnnnnnnnnnnnnnnnnnnnnnnnnnnnnnnnnnnnnnnnnnnnnnnnnnnnnnnnnnnnnnnnnnnnnnnnnnnnnnnnnnnnnnnnnnnnnnnnnnnnnnnnnnnnnnnnnnnnnnnnnnnnnnnnnnnnnnnnnnnnnnnnnnnnnnnnnnnnnnnnnnnnnnnnnnnnnnnnnnnnnnnnnnnnnnnnnnnnnnnnnnnnnnnnnnnnnnnnnnnnnnnnnnnnnnnnnnnnnnnnnnnnnnnnnnnnnnnnnnnnnnnnnnnnnnnnnnnnnnnnnnnnnnnnnnnnnnnnnnnnnnnnnnnnnnnnnnnnnnnnnnnnnnnnnnnnnnnnnnnnnnnnnnnnnnnnnnnnnnnnnnnnnnnnnnnnnnnnnnnnnnnnnnnnnnnnnnnnnnnnnnnnnnnnnnnnnnnnnnnnnnnnnnnnnnnnnnnnnnnnnnnnnnnnnnnnnnnnnnnnnnnnnnnnnnnnnnnnnnnnnnnnnnnnnnnnnnnnnnnnnnnnnnnnnnnnnnnnnnnnnnnnnnnnnnnnnnnnnnnnnnnnnnnntggcgtgttccttcctgagaccaaaggcaagaccctccaagagatctctgaagaattacacagactcaacttacagaggcgggcccagggccccacgtggaggagcccggagataatccagtcgacagaactctaatcccaaaggggtgaccaggggccaaagccagctgctgtcctgtcctctgcttcctgccagggccctggtcctcactccctcctgcattcctttgtttaaggagtgtttattgagcacccgttgtgtgcagacatggctccaggtgcttagcaatcagtggtgagagtggtgttcggggcaaaaggtaattaactgacagaaaatcagtaacaacataattacaggct

SEQ ID NO: 31461 - DNA, 643 bp, Macaca Mulatta
atgccttttttactgtgtgtattttagaattcactacataaattgtaagtaattgtggatctcaaaaacactaggaacttttaagtgtcttagcacttcctggatgtgcctgccctgagggagtgagtcacatttgagacaactgcactccactgtgggcgtgcctttgtcttcaggccacgccgaagggtgtttaaagtagccttgcaggtcgcttctttcccaggggtggataaaaactgaagccaggaatctaataaggaatgctgatttcctcaattctattttgaggaatggggaaggctattgtttttttctgggcagatctgcaaggctggctttaagagcacaaggagggaaagtaacgaaagggctggactactataaaagttacaaatacgtagttagaccaatagatttctatagtcaggtttttgtcatgtaatttattaactattacagaaacacaacgaagaatatcaagtatttctctggctcttgacagaaaaaaaatcagttgacttaaccctttgctgtcaaaagagttggcgtttcctggtctgggtgctactgccaaacgttctggtacttagagtcgggatgcacaacttccaccagcgacttatcaatgcagccgcctgtg

SEQ ID NO: 31462 - DNA, 1086 bp, Macaca Mulatta
  misc_feature (1)...(1086): n = A,T,C or G
caggtaacatctaaaggaactggtttaaatcctaatgccaaagtatggcaagaaattgctcctggaaatactgatgccaccccagtaactcatggaactgaaagctcttggcatgaaacagcagctacatcaggtgctcatcctgagggtannnnnnnnnnnnnnnnnnnnnnnnnnnnnnnnnnnnnnnnnnnnnnnnnnnnnnnnnnnnnnnnnnnnnnnnnnnnnnnnnnnnnnnnnnnnnnnnnnnnnnnnnnnnnnnnnnnnnnnnnnnnnnnnnnnnnnnnnnnnnnnnnnnnnnnnnnnnnnnnnnnnnnnnnnnnnnnnnnnnnnnnnnnnnnnnnnnnnnnnnnnnnnnnnnnnnnnnnnnnnnnnnnnnnnnnnnnnnnnnnnnnnnnnnnnnnnnnnnnnnnnnnnnnnnnnnnnnnnnnnnnnnnnnnnnnnnnnnnnnnnnnnnnnnnnnnnnnnnnnnnnnnnnnnnnnnnnnnnnnnnnnnnnnnnnnnnnnnnnnnnnnnnnnnnnnnnnnnnnnnnnnnnnnnnnnnnnnnnnnnnnnnnnnnnnnnnnnnnnnnnnnnnnnnnnnnnnnnnnnnnnnnnnnnnnnnnnnnnnnnnnnnnnnnnnnnnnnnnnnnnnnnnnnnnnnnnnnnnnnnnnnnnnnnnnnnnnnnnnnnnnnnnnnnnnnnnnnnnnnnnnnnnnnnnnnnnnnnnnnnnnnnnnnnngctccctttcccaatggtagttttgtgaatggctttaattcgccaggatcttataaaacaaatgctgctgctatgaatatgggtcgaccattccnnnnnnnnnnnnnnnnnnnnnnnnnnnnnnnnnnnnnnnnnnnnnnnnnnnnnnnnnnnnnnnnnnnnnnnnnnnnnnnnnnnnnnnnnnnnnnnnnnnnnnnnnnnnnnnnnnnnnnnnnnnnnnnnnnnnnnnnnnnnnnnnnnnnnnnnnnnnnnnnnnnnnnnnnnnnnnnnnnnnnnnnnnnnnnnnnnnnnnnnnnnnnnnnnnnnnnnnnnnnnaggagaactctcttcagaggtcgaagacgacgagaagatgacaggatctc

SEQ ID NO: 31463 - DNA, 887 bp, Macaca Mulatta
  misc_feature (1)...(887): n = A,T,C or G
ggggtgcctgcgaagctctgggaaagaatcctgggaaaggaaaaatggtgggtttgggggaagggaggtaaggggagaaagctggagggaggggctctaattggaggccccctagaggacgcacggaacttccaacttgggaaaaaatgaaatgaaaaaatcctttgatatcagggttctgaatcctgctggtcagtgcaccaagcattcagtctctctccttacctttgtcttacttgtgttcaaagaaaaacaacccagaaaaaaaatctcatcatggcaaatattcaccaggaaaacgaagagatgggacagcctatgcagaatggagaggaagaccgccctttgggaggaggtgaaagcccccagcctgcaggaaatcgaccgggacgggcgcgccgacttgcccctaaattttcgatggggccataccccatagggcaaatcaatgatgggaagggttggaaattggaaaatgataagggaaaaatagtccatggggaatnnnnnnnnnnnnnnnntnnnnnnnnnnnnnnnnnaagggaagcctgccagctttgaaaggaaattggtccgggcgtaatacctttatgggggggaagctgcttcctaaatcacccatgggagcccttccaaggaatgaaaattttatgccacttatgacgccgggaactacccgggccctttgtgtgcatggaagaattaagacactgtgggaattccccggcaggagtttctacttttatcccctgagacatatttccgcaaaaaagaaccagtttacaggagatccagtttgcccgcgggaaccccggatatatatcccggtgtgatcacaagggggcctagtgcgattgccgccctacatatttgaaaaaatacgccgg

SEQ ID NO: 31464 - DNA, 576 bp, Macaca Mulatta
gatggagttggctgcccctaggaacttcagcatgttaaagctccagcccctttaggagcctgaccattagagcactctctgtgctccattcttgcagactgcttcctgcatatgagaacaagtttcattattggagacagtctgcaaaacaattcagatttaacaatcttaaatccaactattagattcgtaataaatctggagttcagtaacaggaagatctgtaaaaaaacatgttttgcttttcaggactttgcaccccgtgtaattgtgatgtatatgattgctcttcttgctttcctattctacatttccaaagtcccagagcggtactttccaggtaggtgtctcttttatagcagttttgtattgttatcctaaatatatgcccaaggtgtatgcatcacagcatcaaaacttagtttcattttttaatactattgattatggaaatgattcctctctttccaaacgttacctaaaactttcaaagggctttcacaacttttcctttcatcctgaccatgtgagttgagtccagtaggtggagttgtcactgttttgtggttatgaact

SEQ ID NO: 31465 - DNA, 9116 bp, Macaca Mulatta
  misc_feature (1)...(9116): n = A,T,C or G
aggagcctggacgtgtggatcggcttctcgactgtgcagggggcggagacgggcctggcgccgcagggcgaggccttcagcctggagagctgccagaactggctgcccggggagccacacccagccacagctgagcactgcgtccggctcgggcctaccgggtggtgcaacaccgacctgtgctcagcgccacacagctacgtctgcgaactgcggcctggaggnnnnnnnnnnnnnnnnnnnnnnnnnnnnnnnnnnnnnnnnnnnnnnnnnnnnnnnnnnnnnnnnnnnnnnnnnnnnnnnnnnnnnnnnnnnnnnnnnnnnnnnnnnnnnnnnnnnnnnnnnnnnnnnnnnnnnnnnnnnnnnnnnnnnnnnnnnnnnnnnnnnnnnnnnnnnnnnnnnnnnnnnnnnnnnnnnnnnnnnnnnnnnnnnnnnnnnnnnnnnnnnnnnnnnnnnnnnnnnnnnnnnnnnnnnnnnnnnnnnnnnnnnnnnnnnnnnnnnnnnnnnnnnnnnnnnnnnnnnnnnnnnnnnnnnnnnnnnnnnnnnnnnnnnnnnnnnnnnnnnnnnnnnnnnnnnnnnnnnnnnnnnnnnnnnnnnnnnnnnnnnnnnnnnnnnnnnnnnnnnnnnnnnnnnnnnnnnnnnnnnnnnnnnnnnnnnnnnnnnnnnnnnnnnnnnnnnnnnnnnnnnnnnnnnnnnnnnnnnnnnnnnnnnnnnnnnnnnnnnnnnnnnnnnnnnnnnnnnnnnnnnnnnnnnnnnnnnnnnnnnnnnnnnnnnnnnnnnnnnnnnnnnnnnnnnnnnnnnnnnnnnnnnnnnnnnnnnnnnnnnnnnnnnnnnnnnnnnnnnnnnnnnnnnnnnnnnnnnnnnnnnnnnnnnnnnnnnnnnnnnnnnnnnnnnnnnnnnnnnnnnnnnnnnnnnnnnnnnnnnnnnnnnnnnnnnnnnnnnnnnnnnnnnnnnnnnnnnnnnnnnnnnnnnnnnnnnnnnnnnnnnnnnnnnnnnnnnnnnnnnnnnnnnnnnnnnnnnnnnnnnnnnnnnnnnnnnnnnnnnnnnnnnnnnnnnnnnnnnnnnnnnnnnnnnnnnnnnnnnnnnnnnnnnnnnnnnnnnnnnnnnnnnnnnnnnnnnnnnnnnnnnnnnnnnnnnnnnnnnnnnnnnnnnnnnnnnnnnnnnnnnnnnnnnnnnnnnnnnnnnnnnnnnnnnnnnnnnnnnnnnnnnnnnnnnnnnnnnnnnnnnnnnnnnnnnnnnnnnnnnnnnnnnnnnnnnnnnnnnnnnnnnnnnnnnnnnnnnnnnnnnnnnnnnnnnnnnnnnnnnnnnnnnnnnnnnnnnnnnnnnnnnnnnnnnnnnnnnnnnnnnnnnnnnnnnnnnnnnnnnnnnnnnnnnnnnnnnnnnnnnnnnnnnnnnnnnnnnnnnnnnnnnnnnnnnnnnnnnnnnnnnnnnnnnnnnnnnnnnnnnnnnnnnnnnnnnnnnnnnnnnnnnnnnnnnnnnnnnnnnnnnnnnnnnnnnnnnnnnnnnnnnnnnnnnnnnnnnnnnnnnnnnnnnnnnnnnnnnnnnnnnnnnnnnnnnnnnnnnnnnnnnnnnnnnnnnnnnnnnnnnnnnnnnnnnnnnnnnnnnnnnnnnnnnnnnnnnnnnnnnnnnnnnnnnnnnnnnnnnnnnnnnnnnnnnnnnnnnnnnnnnnnnnnnnnnnnnnnnnnnnnnnnnnnnnnnnnnnnnnnnnnnnnnnnnnnnnnnnnnnnnnnnnnnnnnnnnnnnnnnnnnnnnnnnnnnnnnnnnnnnnnnnnnnnnnnnnnnnnnnnnnnnnnnnnnnnnnnnnnnnnnnnnnnnnnnnnnnnnnnnnnnnnnnnnnnnnnnnnnnnnnnnnnnnnnnnnnnnnnnnnnnnnnnnnnnnnnnnnnnnnnnnnnnnnnnnnnnnnnnnnnnnnnnnnnnnnnnnnnnnnnnnnnnnnnnnnnnnnnnnnnnnnnnnnnnnnnnnnnnnnnnnnnnnnnnnnnnnnnnnnnnnnnnnnnnnnnnnnnnnnnnnnnnnnnnnnnnnnnnnnnnnnnnnnnnnnnnnnnnnnnnnnnnnnnnnnnnnnnnnnnnnnnnnnnnnnnnnnnnnnnnnnnnnnnnnnnnnnnnnnnnnnnnnnnnnnnnnnnnnnnnnnnnnnnnnnnnnnnnnnnnnnnnnnnnnnnnnnnnnnnnnnnnnnnnnnnnnnnnnnnnnnnnnnnnnnnnnnnnnnnnnnnnnnnnnnnnnnnnnnnnnnnnnnnnnnnnnnnnnnnnnnnnnnnnnnnnnnnnnnnnnnnnnnnnnnnnnnnnnnnnnnnnnnnnnnnnnnnnnnnnnnnnnnnnnnnnnnnnnnnnnnnnnnnnnnnnnnnnnnnnnnnnnnnnnnnnnnnnnnnnnnnnnnnnnnnnnnnnnnnnnnnnnnnnnnnnnnnnnnnnnnnnnnnnnnnnnnnnnnnnnnnnnnnnnnnnnnnnnnnnnnnnnnnnnnnnnnnnnnnnnnnnnnnnnnnnnnnnnnnnnnnnnnnnnnnnnnnnnnnnnnnnnnnnnnnnnnnnnnnnnnnnnnnnnnnnnnnnnnnnnnnnnnnnnnnnnnnnnnnnnnnnnnnnnnnnnnnnnnnnnnnnnnnnnnnnnnnnnnnnnnnnnnnnnnnnnnnnnnnnnnnnnnnnnnnnnnnnnnnnnnnnnnnnnnnnnnnnnnnnnnnnnnnnnnnnnnnnnnnnnnnnnnnnnnnnnnnnnnnnnnnnnnnnnnnnnnnnnnnnnnnnnnnnnnnnnnnnnnnnnnnnnnnnnnnnnnnnnnnnnnnnnnnnnnnnnnnnnnnnnnnnnnnnnnnnnnnnnnnnnnnnnnnnnnnnnnnnnnnnnnnnnnnnnnnnnnnnnnnnnnnnnnnnnnnnnnnnnnnnnnnnnnnnnnnnnnnnnnnnnnnnnnnnnnnnnnnnnnnnnnnnnnnnnnnnnnnnnnnnnnnnnnnnnnnnnnnnnnnnnnnnnnnnnnnnnnnnnnnnnnnnnnnnnnnnnnnnnnnnnnnnnnnnnnnnnnnnnnnnnnnnnnnnnnnnnnnnnnnnnnnnnnnnnnnnnnnnnnnnnnnnnnnnnnnnnnnnnnnnnnnnnnnnnnnnnnnnnnnnnnnnnnnnnnnnnnnnnnnnnnnnnnnnnnnnnnnnnnnnnnnnnnnnnnnnnnnnnnnnnnnnnnnnnnnnnnnnnnnnnnnnnnnnnnnnnnnnnnnnnnnnnnnnnnnnnnnnnnnnnnnnnnnnnnnnnnnnnnnnnnnnnnnnnnnnnnnnnnnnnnnnnnnnnnnnnnnnnnnnnnnnnnnnnnnnnnnnnnnnnnnnnnnnnnnnnnnnnnnnnnnnnnnnnnnnnnnnnnnnnnnnnnnnnnnnnnnnnnnnnnnnnnnnnnnnnnnnnnnnnnnnnnnnnnnnnnnnnnnnnnnnnnnnnnnnnnnnnnnnnnnnnnnnnnnnnnnnnnnnnnnnnnnnnnnnnnnnnnnnnnnnnnnnnnnnnnnnnnnnnnnnnnnnnnnnnnnnnnnnnnnnnnnnnnnnnnnnnnnnnnnnnnnnnnnnnnnnnnnnnnnnnnnnnnnnnnnnnnnnnnnnnnnnnnnnnnnnnnnnnnnnnnnnnnnnnnnnnnnnnnnnnnnnnnnnnnnnnnnnnnnnnnnnnnnnnnnnnnnnnnnnnnnnnnnnnnnnnnnnnnnnnnnnnnnnnnnnnnnnnnnnnnnnnnnnnnnnnnnnnnnnnnnnnnnnnnnnnnnnnnnnnnnnnnnnnnnnnnnnnnnnnnnnnnnnnnnnnnnnnnnnnnnnnnnnnnnnnnnnnnnnnnnnnnnnnnnnnnnnnnnnnnnnnnnnnnnnnnnnnnnnnnnnnnnnnnnnnnnnnnnnnnnnnnnnnnnnnnnnnnnnnnnnnnnnnnnnnnnnnnnnnnnnnnnnnnnnnnnnnnnnnnnnnnnnnnnnnnnnnnnnnnnnnnnnnnnnnnnnnnnnnnnnnnnnnnnnnnnnnnnnnnnnnnnnnnnnnnnnnnnnnnnnnnnnnnnnnnnnnnnnnnnnnnnnnnnnnnnnnnnnnnnnnnnnnnnnnnnnnnnnnnnnnnnnnnnnnnnnnnnnnnnnnnnnnnnnnnnnnnnnnnnnnnnnnnnnnnnnnnnnnnnnnnnnnnnnnnnnnnnnnnnnnnnnnnnnnnnnnnnnnnnnnnnnnnnnnnnnnnnnnnnnnnnnnnnnnnnnnnnnnnnnnnnnnnnnnnnnnnnnnnnnnnnnnnnnnnnnnnnnnnnnnnnnnnnnnnnnnnnnnnnnnnnnnnnnnnnnnnnnnnnnnnnnnnnnnnnnnnnnnnnnnnnnnnnnnnnnnnnnnnnnnnnnnnnnnnnnnnnnnnnnnnnnnnnnnnnnnnnnnnnnnnnnnnnnnnnnnnnnnnnnnnnnnnnnnnnnnnnnnnnnnnnnnnnnnnnnnnnnnnnnnnnnnnnnnnnnnnnnnnnnnnnnnnnnnnnnnnnnnnnnnnnnnnnnnnnnnnnnnnnnnnnnnnnnnnnnnnnnnnnnnnnnnnnnnnnnnnnnnnnnnnnnnnnnnnnnnnnnnnnnnnnnnnnnnnnnnnnnnnnnnnnnnnnnnnnnnnnnnnnnnnnnnnnnnnnnnnnnnnnnnnnnnnnnnnnnnnnnnnnnnnnnnnnnnnnnnnnnnnnnnnnnnnnnnnnnnnnnnnnnnnnnnnnnnnnnnnnnnnnnnnnnnnnnnnnnnnnnnnnnnnnnnnnnnnnnnnnnnnnnnnnnnnnnnnnnnnnnnnnnnnnnnnnnnnnnnnnnnnnnnnnnnnnnnnnnnnnnnnnnnnnnnnnnnnnnnnnnnnnnnnnnnnnnnnnnnnnnnnnnnnnnnnnnnnnnnnnnnnnnnnnnnnnnnnnnnnnnnnnnnnnnnnnnnnnnnnnnnnnnnnnnnnnnnnnnnnnnnnnnnnnnnnnnnnnnnnnnnnnnnnnnnnnnnnnnnnnnnnnnnnnnnnnnnnnnnnnnnnnnnnnnnnnnnnnnnnnnnnnnnnnnnnnnnnnnnnnnnnnnnnnnnnnnnnnnnnnnnnnnnnnnnnnnnnnnnnnnnnnnnnnnnnnnnnnnnnnnnnnnnnnnnnnnnnnnnnnnnnnnnnnnnnnnnnnnnnnnnnnnnnnnnnnnnnnnnnnnnnnnnnnnnnnnnnnnnnnnnnnnnnnnnnnnnnnnnnnnnnnnnnnnnnnnnnnnnnnnnnnnnnnnnnnnnnnnnnnnnnnnnnnnnnnnnnnnnnnnnnnnnnnnnnnnnnnnnnnnnnnnnnnnnnnnnnnnnnnnnnnnnnnnnnnnnnnnnnnnnnnnnnnnnnnnnnnnnnnnnnnnnnnnnnnnnnnnnnnnnnnnnnnnnnnnnnnnnnnnnnnnnnnnnnnnnnnnnnnnnnnnnnnnnnnnnnnnnnnnnnnnnnnnnnnnnnnnnnnnnnnnnnnnnnnnnnnnnnnnnnnnnnnnnnnnnnnnnnnnnnnnnnnnnnnnnnnnnnnnnnnnnnnnnnnnnnnnnnnnnnnnnnnnnnnnnnnnnnnnnnnnnnnnnnnnnnnnnnnnnnnnnnnnnnnnnnnnnnnnnnnnnnnnnnnnnnnnnnnnnnnnnnnnnnnnnnnnnnnnnnnnnnnnnnnnnnnnnnnnnnnnnnnnnnnnnnnnnnnnnnnnnnnnnnnnnnnnnnnnnnnnnnnnnnnnnnnnnnnnnnnnnnnnnnnnnnnnnnnnnnnnnnnnnnnnnnnnnnnnnnnnnnnnnnnnnnnnnnnnnnnnnnnnnnnnnnnnnnnnnnnnnnnnnnnnnnnnnnnnnnnnnnnnnnnnnnnnnnnnnnnnnnnnnnnnnnnnnnnnnnnnnnnnnnnnnnnnnnnnnnnnnnnnnnnnnnnnnnnnnnnnnnnnnnnnnnnnnnnnnnnnnnnnnnnnnnnnnnnnnnnnnnnnnnnnnnnnnnnnnnnnnnnnnnnnnnnnnnnnnnnnnnnnnnnnnnnnnnnnnnnnnnnnnnnnnnnnnnnnnnnnnnnnnnnnnnnnnnnnnnnnnnnnnnnnnnnnnnnnnnnnnnnnnnnnnnnnnnnnnnnnnnnnnnnnnnnnnnnnnnnnnnnnnnnnnnnnnnnnnnnnnnnnnnnnnnnnnnnnnnnnnnnnnnnnnnnnnnnnnnnnnnnnnnnnnnnnnnnnnnnnnnnnnnnnnnnnnnnnnnnnnnnnnnnnnnnnnnnnnnnnnnnnnnnnnnnnnnnnnnnnnnnnnnnnnnnnnnnnnnnnnnnnnnnnnnnnnnnnnnnnnnnnnnnnnnnnnnnnnnnnnnnnnnnnnnnnnnnnnnnnnnnnnnnnnnnnnnnnnnnnnnnnnnnnnnnnnnnnnnnnnnnnnnnnnnnnnnnnnnnnnnnnnnnnnnnnnnnnnnnnnnnnnnnnnnnnnnnnnnnnnnnnnnnnnnnnnnnnnnnnnnnnnnnnnnnnnnnnnnnnnnnnnnnnnnnnnnnnnnnnnnnnnnnnnnnnnnnnnnnnnnnnnnnnnnnnnnnnnnnnnnnnnnnnnnnnnnnnnnnnnnnnnnnnnnnnnnnnnnnnnnnnnnnnnnnnnnnnnnnnnnnnnnnnnnnnnnnnnnnnnnnnnnnnnnnnnnnnnnnnnnnnnnnnnnnnnnnnnnnnnnnnnnnnnnnnnnnnnnnnnnnnnnnnnnnnnnnnnnnnnnnnnnnnnnnnnnnnnnnnnnnnnnnnnnnnnnnnnnnnnnnnnnnnnnnnnnnnnnnnnnnnnnnnnnnnnnnnnnnnnnnnnnnnnnnnnnnnnnnnnnnnnnnnnnnnnnnnnnnnnnnnnnnnnnnnnnnnnnnnnnnnnnnnnnnnnnnnnnnnnnnnnnnnnnnnnnnnnnnnnnnnnnnnnnnnnnnnnnnnnnnnnnnnnnnnnnnnnnnnnnnnnnnnnnnnnnnnnnnnnnnnnnnnnnnnnnnnnnnnnnnnnnnnnnnnnnnnnnnnnnnnnnnnnnnnnnnnnnnnnnnnnnnnnnnnnnnnnnnnnnnnnnnnnnnnnnnnnnnnnnnnnnnnnnnnnnnnnnnnnnnnnnnnnnnnnnnnnnnnnnnnnnnnnnnnnnnnnnnnnnnnnnnnnnnnnnnnnnnnnnnnnnnnnnnnnnnnnnnnnnnnnnnnnnnnnnnnnnnnnnnnnnnnnnnnnnnnnnnnnnnnnnnnnnnnnnnnnnnnnnnnnnnnnnnnnnnnnnnnnnnnnnnnnnnnnnnnnnnnnnnnnnnnnnnnnnnnnnnnnnnnnnnnnnnnnnnnnnnnnnnnnnnnnnnnnnnnnnnnnnnnnnnnnnnnnnnnnnnnnnnnnnnnnnnnnnnnnnnnnnnnnnnnnnnnnnnnnnnnnnnnnnnnnnnnnnnnnnnnnnnnnnnnnnnnnnnnnnnnnnnnnnnnnnnnnnnnnnnnnnnnnnnnnnnnnnnnnnnnnnnnnnnnnnnnnnnnnnnnnnnnnnnnnnnnnnnnnnnnnnnnnnnnnnnnnnnnnnnnnnnnnnnnnnnnnnnnnnnnnnnnnnnnnnnnnnnnnnnnnnnnnnnnnnnnnnnnnnnnnnnnnnnnnnnnnnnnnnnnnnnnnnnnnnnnnnnnnnnnnnnnnnnnnnnnnnnnnnnnnnnnnnnnnnnnnnnnnnnnnnnnnnnnnnnnnnnnnnnnnnnnnnnnnnnnnnnnnnnnnnnnnnnnnnnnnnnnnnnnnnnnnnnnnnnnnnnnnnnnnnnnnnnnnnnnnnnnnnnnnnnnnnnnnnnnnnnnnnnnnnnnnnnnnnnnnnnnnnnnnnnnnnnnnnnnnnnnnnnnnnnnnnnnnnnnnnnnnnnnnnnnnnnnnnnnnnnnnnnnnnnnnnnnnnnnnnnnnnnnnnnnnnnnnnnnnnnnnnnnnnnnnnnnnnnnnnnnnnnnnnnnnnnnnnnnnnnnnnnnnnnnnnnnnnnnnnnnnnnnnnnnnnnnnnnnnnnnnnnnnnnnnnnnnnnnnnnnnnnnnnnnnnnnnnnnnnnnnnnnnnnnnnnnnnnnnnnnnnnnnnnnnnnnnnnnnnnnnnnnnnnnnnnnnnnnnnnnnnnnnnnnnnnnnnnnnnnnnnnnnnnnnnnnnnnnnnnnnnnnnnnnnnnnnnnnnnnnnnnnnnnnnnnnnnnnnnnnnnnnnnnnnnnnnnnnnnnnnnnnnnnnnnnnnnnnnnnnnnnnnnnnnnnnnnnnnnnnnnnnnnnnnnnnnnnnnnnnnnnnnnnnnnnnnnnnnnnnnnnnnnnnnnnnnnnnnnnnnnnnnnnnnnnnnnnnnnnnnnnnnnnnnnnnnnnnnnnnnnnnnnnnnnnnnnnnnnnnnnnnnnnnnnnnnnnnnnnnnnnnnnnnnnnnnnnnnnnnnnnnnnnnnnnnnnnnnnnnnnnnnnnnnnnnnnnnnnnnnnnnnnnnnnnnnnnnnnnnnnnnnnnnnnnnnnnnnnnnnnnnnnnnnnnnnnnnnnnnnnnnnnnnnnnnnnnnnnnnnnnnnnnnnnnnnnnnnnnnnnnnnnnnnnnnnnnnnnnnnnnnnnnnnnnnnnnnnnnnnnnnnnnnnnnnnnnnnnnnnnnnnnnnnnnnnnnnnnnnnnnnnnnnnnnnnnnnnnnnnnnnnnnnnnnnnnnnnnnnnnnnnnnnnnnnnnnnnnnnnnnnnnnnnnnnnnnnnnnnnnnnnnnnnnnnnnnnnnnnnnnnnnnnnnnnnnnnnnnnnnnnnnnnnnnnnnnnnnnnnnnnnnnnnnnnnnnnnnnnnnnnnnnnnnnnnnnnnnnnnnnnnnnnnnnnnnnnnnnnnnnnnnnnnnnnnnnnnnnnnnnnnnnnnnnnnnnnnnnnnnnnnnnnnnnnnnnnnnnnnnnnnnnnnnnnnnnnnnnnnnnnnnnnnnnnnnnnnnnnnnnnnnnnnnnnnnnnnnnnnnnnnnnnnnnnnnnnnnnnnnnnnnnnnnnnnnnnnnnnnnnnnnnnnnnnnnnnnnnnnnnnnnnnnnaacgctcagttggccggacctgctcagcgacccgtccatgtggggcagcaacccgcggcagctggcacggggccaggcgggccatgggctgggcccagaggaggacagcttctccctggccagcccctactcgcctgcgaaatccnnnnnnnnnnagatgaagacctgatccagcaggtccttgccaaaggggtcagcagcccggcccccacccaagacacccacatggaaacggacctgctcaccagcctg

SEQ ID NO: 31466 - DNA, 133 bp, Macaca Mulatta
gatgacattccagactctccatctagcccgaaagttgcccttcttccacctgtcctgaaaaaagttccttcagacaaggagagagatggccagagtagcccccagcccagccccaggacattttcacaggaag

SEQ ID NO: 31467 - DNA, 780 bp, Macaca Mulatta
  misc_feature (1)...(780): n = A,T,C or G
ggcaagtcgaaataatcttgccttagtgatcatgattacacaaaagaggtgcactgccaataagtatctctaattcaatagttgaaaacaacctgcatgctaatcgtggtttcggggtgagaataaaacacccccacataacatgcatttgcatgggtccgaacctgtgaaatgttacgtttgtgcttcatttttgccaacgtaaaaatgttccatcatttctagctaaaactccatttggtgaaactaacatatccatttcttttcctagttatggatgatttggggatgcttttgcagaaatgtgttcatagatgatgctgaatgcgggggaggggggcagcacgtcagagaatttactattaatcccagagttttctctgcattctcagaagatgttaatagtttgttactagccagagagtatgactatgttagattatttttaaagatgaaacatgtatgataggatggattctttctgtattctgagagtgtacagtatagattataatgaaagtttatatcaacagggtttcgttggctctgccatatattataagcaaaagagattggtaaagtgccacagtattccagataacttttcagttgcggcctttcttctcgttctttaatttgaaacctagatacatgcagtaaaaactaggagaatgacttttacccttgggggacggccaagnttttgttgataaaacctattttcctagcatgccctttcaggaagttgcgccagaacccctaggattgtgaagggagccc

SEQ ID NO: 31468 - DNA, 812 bp, Macaca Mulatta
  misc_feature (1)...(812): n = A,T,C or G
gattgatgtgcagctatatattttgtcctttctttcacctcatgatctgtgtcagttgggaagtacaaatcattattggaatgaaactgtaagagatccaattctgtggagatactttttgttaagggatcttccttcttggtcttctgttgactggaagtctcttccagatctannnnnnnnnnnnnnnnnnnnnnnnnnnnnnnnnnnnnnnnnnnnnnnnnnnnnnnnnnnnnnnnnnnnnnnnnnnnnnnnnnnnnnnnnnnnnnnnnnnnnnnnnnnnnnnnnnnnnnnnnnnnnnnnnnnnnnnnnnnnnnnnnnnnnnnnnnnnnnnnnnnnnnnnnnnnnnnnnnnnnnnnnnnnnnnnnnnnnnnnnnnnnnnnnnnnnnnnnnnnnnnnnnnnnnnnnnnnnnnnnnnnnnnnnnnnnnnnnnnnnnnnnnnnnnnnnnnnnnnnnnnnnnnnnnnnnnnnnnnnnnnnnnnnnnnnnnnnnnnnnnnnnnnnnnnnnnnnnnnnnnnnnnnnnnnnnnnnagaaaggaaagagatagagcaagggaagagcatacaagtgcagttaacaagatattcagtcgacagaatgaaggtgatgatcaacaaggaagccggtacagtgtgattccacaaattcaaaaagtgtgtgaagttgtagatgggttcatctatgttgcaaatgctgaagctcataaaagtaagcactcatatatatatttttaagcacattgttcttttcaaagcaaatagaaattacctttttagtctttacggtgacttcttaagaatatgatggctta

SEQ ID NO: 31469 - DNA, 457 bp, Macaca Mulatta
ttttcatctttgccaacctggggagggaggagagtgttattccatcttgtgggtggctggtgaggctggggtcttccctcgagtttggatgagtgccgtcaccttggtctgcggattgcccctctgaccccgttttggtctctctcttacccgccacgccctgcggcttagatatctctgcgactttacgtactacacctctctgtaccagagtcacggtcgatcagccttcgtccacgtgccccctctggggaagccatacaacgcagaccagctgggcagggcactgagagccatcattgaggagatgctggacctcctggagcagtcagagggcaaaatcaactattgccacaaacactgaggaacgctcaggtctcctaagacctcatcctgctggggaccccacgaggggacatccaccctctggggtgtggccaggaaaggacaagctctt

SEQ ID NO: 31470 - DNA, 861 bp, Macaca Mulatta
  misc_feature (1)...(861): n = A,T,C or G
ctgctctcgtcatctcctctgatggacataatgggcttggaaagggttttggagatcatattcattggaggacattggaagatgggaagaaagaagcagctgccagtggactgcccctgatggtgattattcataaatcctggtgtggagcttgcaaagctctaaagcccaaatttgcagaatctacagaaatttcagaactctcccataattttgttatggtaaatcttgagcgatgaagaggaacccaaagatgaagatttcagcccagacgggggttatattccacgaatcctttttctggatcccagtggcaaggtgcatcctgaaatcatcaatgagaatggaaaccccagctacaagtatttctacatcagtgccgagcaagttgttcaggggatgaaggaagctcaggaaaggctgacgggtgatgccttccgaaagaaacatcttgaagatgaattgtaacatgaatgtgccccttctttcatcagagttagtgttctggaaggaatgcagcaggggagggaatattgaggaatcatctagaacaattaagccgaccaggaaacctcattcctacctacactggaaggagcgctctcactgtggaagagttctgctaacacaagctgatctgcatgtttgtggatccagcagagagcggcagactttcttctctttttccctctcacctaaatgtcaatttgtcattgaatgtaaaaatgaaaccttctgacacaaaacttgagccacttggaggttactcctcgcactntagtatttgagtcttttccatttcctcccatttactcaccttagtggtgaaagagactagtagcatctttctacaatgtaaaa

SEQ ID NO: 31471 - DNA, 2160 bp, Macaca Mulatta
  misc_feature (1)...(2160): n = A,T,C or G
gtgactcaagaccctcttaggaacttcttcactgaactcaaggaggagatcaggcaagatctgtgctgggcagattctttggattgaggctgctgtgcacaggaatnnatggtgaaactgggactgaggcggagttaattccaaagcatcattcctgaaaagtacatactttcaagagaattccacagagacgttgcccaggaagtcaaaatttagaaagctcctctgaagggaaagagaagactagagaggacactggtatgttccaagcaggannnnnnnnnnnnnnnnnnnnnnnnnnnnnnnnnnnnnnnnnnnnnnnnnnnnnnnnnnnnnnnnnnnnnnnnnnnnnnnnnnnnnnnnnnnnnnnnnnnnnnnnnnnnnnnnnnnnnnnnnnnnnnnnnnnnnnnnnnnnnnnnnnnnnnnnnnnntgtactgagtgtgggaaagcctttagtcagagtgcaaacctcacagtacatgagcgaatctacaaaggagagaaaccctataagtgaaaggagtgaggaaaagccttcagccatagctctaaccttgttgttcatcggagaatccacactggactgaagccctatacatgcagtgaatgtgggaaatctttcagtggaaagtcacatcttattcggcaccagggaatccacagtggggagaaaacgtatgaatgtaaagagtgtgggaaagcctttagtctgagttcgggccttatatcacatcacagagttcacacgggagagaagccctatacttgcattgagtgtgggaaagcctttagccgtagatcaaaccttacacaacatcggcaaatgcacagaggaaaaaaagtttacaaatgtaaggagtgtgggaaaacatgtggttcaaatacaaagattatggaccatcagagaattcacactggggagaagccttatgaatgtgatgagtgtggaaaagctttcatcttaaggaaaacccttaatgaacaccccattatttcatcgtagagagaaaccttacaaatgtaatgagtgtgggaaggcttttacttctaatcgaaacctttttgatcatcagagagttcacactggagagaaaccctataaatgtaacgaatgtgggaaaaccttcaggcagacttctcaagttattctacacttgagaactcacactaaggagaaaccctataaatgtagtgagtgtgggaaagcctatcggtatagctcacagcttattcaacaccagagaaaacatagtgaggagaaagaaaccttgtaggtaacaaatattgtgggtagtagggctgactgctgcttttctaaaaagtggttctttagtatcaactttttaagtctacttctaagaatcatacnnnnnnnnnnngaaaataattagaagtaggcaaagattaatgaaaggggtgttcatggcagcatcatatatgactgaaagaagaaaaccagattttcagcattacagggttgaaatgaatgatgagctatccatgtgatggttctgcagccattataaacatttttaaagacaatttaatgccatggagaaatgatttggataagatggaagataaaacaatgacatacaatccaaaatttaaaaaaatatttatgcataggaaaaattgggaaggaagtaaatcaaaatgttaacagtgatcatctctgggtgataggattataggtgacttctattttcttctgtatacttttctatgctttctagattttctacatgagaatatactaattttatattcaagaaaaaaagcacagtattttttaaatgcaatgaagacatgctcattttcactcagcagtgttatgaaaggcacatagtatatagagcgccgaagccctgggattacgccctgacattggcatttagcagcagtggaaccgcaagcaagtcccttccttttagagcatgtttcctgtttagtaaaatcataaacaccaatcctttgtcttttttagttgtaagacaagctgactttagagttgtcaacaaaatatataacaacactgttaggttaaaagaacacagcaaaagttcactgaaacctcctttcccacagttgtggaaggatctgcagatgatggaaaacaacctaggcttcatcttttcaataaaggtctagacaaccag

SEQ ID NO: 31472 - DNA, 212 bp, Macaca Mulatta
tcctgttttggaggcccaggctctcccctgccccatcgtcacttccccaatcctagggtcatgcccacccaccctttcctgcctcctccgtgtgaagacatccaacatccacgtgacttttccagctccattttggaacagagactgagattctagaaaaactggctgctaactggcctgagccaggcaacactgattccaatccctcctcg

SEQ ID NO: 31473 - DNA, 5605 bp, Macaca Mulatta
  misc_feature (1)...(5605): n = A,T,C or G
tgccgtgagtccggagatgccccccgacctactggccttccccgggccccgaccctcgttcagggactcccgcgggcgaggggcggccttcggcttccccggggcctccccacgggcgtcgcggaggcgagcctggtcaccactggcctcgccccagccctcgctgaagagcctgccgggccccggctaccgctcacccttggcgcccccgtcgcctcagctgtccttgcgcgcgggacccttccagccgcccttcccgcccccggcccgccagccccgctcgctgcaggagtccccagccccacgcagagccgcggggcgcctgggcccaccccgctcgccgctgccgggctcacccaggccaccctcgccgcccccggggctgggccacagcccgcggcgccgctccctgaatctgccctcgcacctcccgcacacgtggcggcgcctcagcgagccacccactcgggctgtgaagccacgagtgcgcccgcccttccaccgaccgcccggggccggagccggggcctggcgggcgcccctggagcaccgggaaagcccgcgagaagccgaggactcagaggtgccctggaccgtgcccccgctggcccccatctgggacgtggacatgcctcccacccaacgcccaccctccccctggccaggaggtgcaggcagccgccgaggcttttccaggccaccccctggccggaaaacccctttctccagnnnnnnnnnnnnnnnnnnnnnnnnnnnnnnnnnnnnnnnnnnnnnnnnnnnnnnnnnnnnnnnnnnnnnnnnnnnnnnnnnnnnnnnnnnnnnnnnnnnnnnnnnnnnnnnnnnnnnnnnnnnnnnnnnnnnnnnnnnnnnnnnnnnnnnnnnnnnnnnnnnnnnnnnnnnnnnnnnnnnnnnnnnnnnnnnnnnnnnnnnnnnnnnnnnnnnnnnnnnnnnnnnnnnnnnnnnnnnnnnnnnnnnnnnnnnnnnnnnnnnnnnnnnnnnnnnnnnnnnnnnnnnnnnnnnnnnnnnnnnnnnnnnnnnnnnnnnnnnnnnnnnnnnnnnnnnnnnnnnnnnnnnnnnnnnnnnnnnnnnnnnnnnnnnnnnnnnnnnnnnnnnnnnnnnnnnnnnnnnnnnnnnnnnnnnnnnnnnnnnnnnnnnnnnnnnnnnnnnnnnnnnnnnnnnnnnnnnnnnnnnnnnnnnnnnnnnnnnnnnnnnnnnnnnnnnnnnnnnnnnnnnnnnnnnnnnnnnnnnnnnnnnnnnnnnnnnnnnnnnnnnnnnnnnnnnnnnnnnnnnnnnnnnnnnnnnnnnnnnnnnnnnnnnnnnnnnnnnnnnnnnnnnnnnnnnnnnnnnnnnnnnnnnnnnnnnnnnnnnnnnnnnnnnnnnnnnnnnnnnnnnnnnnnnnnnnnnnnnnnnnnnnnnnnnnnnnnnnnnnnnnnnnnnnnnnnnnnnnnnnnnnnnnnnnnnnnnnnnnnnnnnnnnnnnnnnnnnnnnnnnnnnnnnnnnnnnnnnnnnnnnnnnnnnnnnnnnnnnnnnnnnnnnnnnnnnnnnnnnnnnnnnnnnnnnnnnnnnnnnnnnnnnnnnnnnnnnnnnnnnnnnnnnnnnnnnnnnnnnnnnnnnnnnnnnnnnnnnnnnnnnnnnnnnnnnnnnnnnnnnnnnnnnnnnnnnnnnnnnnnnnnnnnnnnnnnnnnnnnnnnnnnnnnnnnnnnnnnnnnnnnnnnnnnnnnnnnnnnnnnnnnnnnnnnnnnnnnnnnnnnnnnnnnnnnnnnnnnnnnnnnnnnnnnnnnnnnnnnnnnnnnnnnnnnnnnnnnnnnnnnnnnnnnnnnnnnnnnnnnnnnnnnnnnnnnnnnnnnnnnnnnnnnnnnncagatcctggaggcaacacccctcttggagtccttcggtaatgccaaaaccgtcaggaacgacaactccagccgctttgggaagttcatggaaatctttctggaaggnnnnnnnnnnnnnnnnnnnnnnnnnnnnnnnnnnnnnnnnnnnnnnnnnnnnnnnnnnnnnnnnnnnnnnnnnnnnnnnnnnnnnnnnnnnnnnnnnnnnnnnnnnnnnnnnnnnnnnnnnnnnnnnnnnnnnnnnnnnnnnnnnnnnnnnnnnnnnnnnnnnnnnnnnnnnnnnnnnnnnnnnnnnnnnnnnnnnnnnnnnnnnnnnnnnnnnnnnnnnnnnnnnnnnnnnnnnnnnnnnnnnnnnnnnnnnnnnnnnnnnnnnnnnnnnnnnnnnnnnnnnnnnnnnnnnnnnnnnnnnnnnnnnnnnnnnnnnnnnnnnnnnnnnnnnnnnnnnnnnnnnnnnnnnnnnnnnnnnnnnnnnnnnnnnnnnnnnnnnnnnnnnnnnnnnnnnnnnnnnnnnnnnnnnnnnnnnnnnnnnnnnnnnnnnnnnnnnnnnnnnnnnnnnnnnnnnnnnnnnnnnnnnnnnnnnnnnnnnnnnnnnnnnnnnnnnnnnnnnnnnnnnnnnnnnnnnnnnnnnnnnnnnnnnnnnnnnnnnnnnnnnnnnnnnnnnnnnnnnnnnnnnnnnnnnnnnnnnnnnnnnnnnnnnnnnnnnnnnnnnnnnnnnnnnnnnnnnnnnnnnnnnnnnnnnnnnnnnnnnnnnnnnnnnnnnnnnnnnnnnnnnnnnnnnnnnnnnnnnnnnnnnnnnnnnnnnnnnnnnnnnnnnnnnnnnnnnnnnnnnnnnnnnnnnnnnnnnnnnnnnnnnnnnnnnnnnnnnnnnnnnnnnnnnnnnnnnnnnnnnnnnnnnnnnnnnnnnnnnnnnnnnnnnnnnnnnnnnnnnnnnnnnnnnnnnnnnnnnnnnnnnnnnnnnnnnnnnnnnnnnnnnnnnnnnnnnnnnnnnnnnnnnnnnnnnnnnnnnnnnnnnnnnnnnnnnnnnnnnnnnnnnnnnnnnnnnnnnnnnnnnnnnnnnnnnnnnnnnnnnnnnnnnnnnnnnnnnnnnnnnnnnnnnnnnnnnnnnnnnnnnnnnnnnnnnnnnnnnnnnnnnnnnnnnnnnnnnnnnnnnnnnnnnnnnnnnnnnnnnnnnnnnnnnnnnnnnnnnnnnnnnnnnnnnnnnnnnnnnnnnnnnnnnnnnnnnnnnnnnnnnnnnnnnnnnnnnnnnnnnnnnnnnnnnnnnnnnnnnnnnnnnnnnnnnnnnnnnnnnnnnnnnnnnnnnnnnnnnnnnnnnnnnnnnnnnnnnnnnnnnnnnnnnnnnnnnnnnnnnnnnnnnnnnnnnnnnnnnnnnnnnnnnnnnnnnnnnnnnnnnnnnnnnnnnnnnnnnnnnnnnnnnnnnnnnnnnnnnnnnnnnnnnnnnnnnnnnnnnnnnnnnnnnnnnnnnnnnnnnnnnnnnnnnnnnnnnnnnnnnnnnnnnnnnnnnnnnnnnnnnnnnnnnnnnnnnnnnnnnnnnnnnnnnnnnnnnnnnnnnnnnnnnnnnnnnnnnnnnnnnnnnnnnnnnnnnnnnnnnnnnnnnnnnnnnnnnnnnnnnnnnnnnnnnnnnnnnnnnnnnnnnnnnnnnnnnnnnnnnnnnnnnnnnnnnnnnnnnnnnnnnnnnnnnnnnnnnnnnnnnnnnnnnnnnnnnnnnnnnnnnnnnnnnnnnnnnnnnnnnnnnnnnnnnnnnnnnnnnnnnnnnnnnnnnnnnnnnnnnnnnnnnnnnnnnnnnnnnnnnnnnnnnnnnnnnnnnnnnnnnnnnnnnnnnnnnnnnnnnnnnnnnnnnnnnnnnnnagctgagggcagagtggaggtgccaggtggagggggcgtggctgcgggagcaggaggnaggagctgagcaagcgggaggtagtggctgtggggcacctggaggtaccggctgagctggctgggctcttgcaagcagtggcaggncaggcctcaggctggcccaggtgcctcaggtggcccctgtgcggactcctcggctccaggctgagccccgtgtcacactgcccctggacatcaacaactatcctatggccaagtttgtccggtgccacttcaaggnnnnnnnnnnnnnnnnnnnnnnnnnnnnnnnnnnnnnnnnnnnnnnnnnnnnnnnnnnnnnnnnnnnnnnnnnnnnnnnnnnnnnnnnnnnnnnnnnnnnnnnnnnnnnnnnnnnnnnnnnnnnnnnnnnnnnnnnnnnnnnnnnnnnnnnnnnnnnnnnnnnnnnnnnnnnnnnnnnnnnnnnnnnnnnnnnnnnnnnnnnnnnnnnnnnnnnnnnnnnnnnnnnnnnnnnnnnnnnnnnnnnnnnnnnnnnnnnnnnnnnnnnnnnnnnnnnnnnnnnnnnnnnnnnnnnnnnnnnnnnnnnnnnnnnnnnnnnnnnnnnnnnnnnnnnnnnnnnnnnnnnnnnnnnnnnnnnnnnnnnnnnnnnnnnnnnnnnnnnnnnnnnnnnnnnnnnnnnnnnnnnnnnnnnnnnnnnnnnnnnnnnnnnnnnnnnnnnnnnnnnnnnnnnnnnnnnnnnnnnnnnnnnnnnnnnnnnnnnnnnnnnnnnnnnnnnnnnnnnnnnnnnnnnnnnnnnnnnnnnnnnnnnnnnnnnnnnnnnnnnnnnnnnnnnnnnnnnnnnnnnnnnnnnnnnnnnnnnnnnnnnnnnnnnnnnnnnnnnnnnnnnnnnnnnnnnnnnnnnnnnnnnnnnnnnnnnnnnnnnnnnnnnnnnnnnnnnnnnnnnnnnnnnnnnnnnnnnnnnnnnnnnnnnnnnnnnnnnnnnnnnnnnnnnnnnnnnnnnnnnnnnnnnnnnnnnnnnnnnnnnnnnnnnnnnnnnnnnnnnnnnnnnnnnnnnnnnnnnnnnnnnnnnnnnnnnnnnnnnnnnnnnnnnnnnnnnnnnnnnnnnnnnnnnnnnnnnnnnnnnnnnnnnnnnnnnnnnnnnnnnnnnnnnnnnnnnnnnnnnnnnnnnnnnnnnnnnnnnnnnnnnnnnnnnnnnnnnnnnnnnnnnnnnnnnnnnnnnnnnnnnnnnnnnnnnnnnnnnnnnnnnnnnnnnnnnnnnnnnnnnnnnnnnnnnnnnnnnnnnnnnnnnnnnnnnnnnnnnnnnnnnnnnnnnnnnnnnnnnnnnnnnnnnnnnnnnnnnnnnnnnnnnnnnnnnnnnnnnnnnnnnnnnnnnnnnnnnnnnnnnnnnnnnnnnnnnnnnnnnnnnnnnnnnnnnnnnnnnnnnnnnnnnnnnnnnnnnnnnnnnnnnnnnnnnnnnnnnnnnnnnnnnnnnnnnnnnnnnnnnnnnnnnnnnnnnnnnnnnnnnnnnnnnnnnnnnnnnnnnnnnnnnnnnnnnnnnnnnnnnnnnnnnnnnnnnnnnnnnnnnnnnnnnnnnnnnnnnnnnnnnnnnnngaaacccccagcaccagaggcacagccgaagtctgtaggcaccggtccccctgccaaacctgtgcttcttcgtgtcactccaaagcccttggctccagcccctctgaaggctccaaggctcaccactaagcctgtggctgcccctgttctagctcaggatcaggcttctccagaaaccancttcaccctccccagagttggtccggtactcaacgctcaactcggagcacttcccacagcccacacagcagatcaagaatattgtcaggcagtaccagcagccattccggggaggccggcccgaggccctcagg

SEQ ID NO: 31474 - DNA, 1058 bp, Macaca Mulatta
  misc_feature (1)...(1058): n = A,T,C or G
tgactggtctctatggaaagcctttctggcttgtctcttagcctgtgtgataacaacagcaattggagtacnnnnnnnnnnnnnnnnnnnnnnnnnnnnnnnnnnnnnnnnnnnnnnnnnnnnnnnnnnnnnnnnnnnnnnnnnnnnnnnnnnnnnnnnnnnnnnnnnnnnnnnnnnnnnnnnnnnnnnnnnnnnnnnnnnnnnnnnnnnnnnnnnnnnnnnnnnnnnnnnnnnnnnnnnnnnnnnnnnnnnnnnnnnnnnnnnnnnnnnnnnnnnnnnnnnnnnnnnnnnnnnnnnnnnnnnnnnnnnnnnnnnnnnnnnnnnnnnnnnnnnnnnnnnnnnnnnnnnnnnnnnnnnnnnnnnnnnnnnnnnnnnnnnnnnnnnnnnnnnnnnnnnnnnnnnnnnnnnnnnnnnnnnnnnnnnnnnnnnnnnnnnnnnnnnnnnnnnnnnnnnnnnnnnnnnnnnnnnnnnnnnnnnnnnnnnnnnnnnnnnnnnnnnnnnnnnnnnnnnnnnnnnnnnnnnnnnnnnnnnnnnnnnnnnnnnnnnnnnnnnnnnnnnnnnnnnnnnnnnnnnnnnnnnnnnnnnnnnnnnnnnnnnnnnnnnnnnnnnnnnnnnnnnnnnnnnnnnnnnnnnnnnnnnnnnnnnnnnnnnnnnnnnnnnnnnnnnnnnnnnnnnnnnnnnnnnnnnnnnnnnnnnnnnnnnnnnnnnnnnnnnnnnnnnnnnnnngagtcattccctacacatcataaattctcatcagatgggttttatttaaccctgtatattgtgacttactttctgatctgactctggcataacaagggaaaaaatcaaaatgttttatctcaaaatatatttccttgccataccttgaaattgccctgcaaagtctcttgtggaaaaaatcaacattctacagagaatccccttccccctttgttttccttcctttctttctagatccaggaggcagtcaactaaaagtcaggtacctttttaggtctgataagaaacattttacaacctgctctctctctgaagtctgctactgagagatt

SEQ ID NO: 31475 - DNA, 2169 bp, Macaca Mulatta
gagctccacagtcttcgttacaatgtcacggtgctgtcccgggatggatctgtgcagtcagagtttctcgctgagggacatctggatggtcagctcttcgtgcgctatgacagggagacgcgcagggcaaggccccagggacagtgggcagaagcagtcctgggagctaagacctgggacacagagactggggacttgacagagaacgggaaggacctcaggaggactctgactcatattgagggccagaaaggaggtgagtgcgggcaggggcaagagtaatgggaggccttctccaggagagttggaggcagagagcaggacccgtctcttcctgctggttctggctgggggtgggggtgaggagtaggtcagtggggctcagcagggaggtgagtcggcactcagcccacacagggaggcatggaggagggccagggaggtgtccctgctgggctgagttcctcacctgagtggaaaggtgacggtttcgggaatggagaagtcactgctgggtgggggcaggcttgcattccctccaggagattaagatctgtgagatctatgaagatggcagcaccgggggcttccggcatttctactacgatggtgagctcttcctctccctaaacctggagactcaggaatggacagtggcccagtcctccagagctcagaccttggctatgaatttctggaaggaagataccatgaagaccaacacacactatcgcgctatgcaggcagactgcctgaagaaactacggcgatatcagaaatccagggtggccgtcaggagaacaggtaccaaccctggccaggggctctcctctccctccaattctgctagagttgcctccgcctcccaactctgtccagggaaaccctccctgtgctatggatgcaagcatttcctgttggcatattgtgtctgatttgcctctatcgttagagccactggataaagacagtgagtcagggactgaaccttccagtgttgtaatctgggaaagcggcgggccctgcgacagaagcctgagcctggggtgggtgtcaggcaggagaggaagccttcagggccagggctgccccctctgcctcccagcctgcccatcccagagagttccctcctggccccacgacccaggagtccaccccaacatccccctcctcagcatcaatgtggggatcccagagcctgaggccacagtcccaaggcccatcctcctgctagcctggaggaactgggccccagggtgaggacagacttgcaggtcaggggtcctggagggctttagccagagtgagaacagtggagaggagcagccccgttccctgcatctcccttagaggggagcagggcttcactggctctgccctttcttctccagcgccccccatggtgaacgtcacccacagcgaggcctcagagggcaacatcaccgtgacatgcagggcttccggcttctatccccggaatatcgcactgacctggcgtcaggatggggtgtctttgaaccacgacgcccagcagtggggggggatcctgcctgatcagaatggaacctaccagacctgggtggccaccagaattcgccaaggcgaggagcagaggttcgcctgctacatggaacacagcgggaatcacagcactcaccctgtgccctctggtgagcctggggtgaccctggagagggtcaggccagggtagggacagcagggacggctgtggctctctgctcagtgtataacaagttataactttttttcagggaaagtgctggtgtttcagagtcaatggctagacattccatatgttcttggtgtgctgttgctgttgctgttgttacagcttttgttattattctgtgttcatcgttgcaagaagaagaaaacatcagcggcagagggtccaggtgagaaaaggaggcagtttctggagatgacaaggctcctgtctggcagcagggtcccctcattgctcctgataggatgtaggtgacaaggcttggaataggggatggaagttgaggtatttgggaggggaatggagccacattcccatctcacccgtaagtccttcccaagccaggactggggaaaggccctcgaacgtccagctgtgcctctctctgaggtgagtggcagcaggaggctcagcgcctgttt

SEQ ID NO: 31476 - DNA, 293 bp, Macaca Mulatta
  misc_feature (1)...(293): n = A,T,C or G
ggtggcacttcgggtccggcccatcagcgtggcagagctggaggaaggaaggaccctcatcgcccataaagtggatgagcaggtatgcaaggccctgcagcaggagcnnnnnnnnnnnnnnnnnnnnnnnnnnnnnnnnnnnnngcttccttcctcacaggagatggtgtatcaggccaccaccaagagcctcatcgaaggcgtcatctcaggctacaatgccactgtctttgcctatggccccacaggtgaggggaacgtccagactgtgggcgaggaccgcaatgctcctg

SEQ ID NO: 31477 - DNA, 822 bp, Macaca Mulatta
cccggtgtgttagagccctctaagcaatatcttcacccacccctctttttttaaccagaaaagactgggcgagggagtctctatatatttatatacaaatctccccacccgggcggggggggaaaggggataaatcttgtaaaagggccccctccgtggaaaggtttttttggcccttctgttgaaagcggttctcccaaaccagtataagattctcaatgaatcaagattcctcccagggcagatggatgcccatatttaccaaagaaatggagcaatcaaaagcgttatctgtcaaagcaattcgcttctattgaagtttgccataaccacgcttgtagataagctcatttactgacttcagattggggtacccccatgcaatatatggctgtacaatcctcagcatgttaatcgaagccttgttgagtttcacaaaggttccattgaagatttgacgaaggcgcaaaagctgcaatacctttcggacctttgggctcacgccattgatacctctgatcctgatgacaaacgccaatttgggttcagcaggtacatagaagttgccagcttttcttgccatcctcgccattcgaatttcagttctgtatatctgcctatattccttgtgatagtgcttcgctttttcatagataagcttcctccttgcctttcgaagcatcttttgggcaaacttctttctcaggcgctttatcttcagctctgcgaaattccttcgctttttcttaagggtttctggcacagcaggaaccttcttcttctcttccgcaccctccatggttccagccgggaaaagagccc

SEQ ID NO: 31478 - DNA, 808 bp, Macaca Mulatta
gcccttgaaaatgtaattgtgcttttcctgtgccagaggggctttaaatgtcacatttgtaacggtgaaggcggacaggatttggaagtttagttacctctgagccacccatcactgccaaagtgtgggggaaggatatttgcagattgacaggcgaggctcagaaactcctggcttagattgaagtgtgtgtggtgggggtgcagcttagaggaccccctctgaaaggggtggagaccctgctgagaacaacactaccgcttgaaggtgaacattccctgtccagttggactgagtcgagggtctgcggtgcagcatcttcagcttaagaaaatgaggttgtcagtttccagtgacgctgacatccaccagactgatttctctgatgttgcacttggctggcttatgcctctgagatccatgcacggctgtatttatttcagctgtcaccgctcctccctcctgctatgaaacgacacttgccagtgccagcagtgtccttgggaaaggcgatatttatgaagggcagaagaggcagccccaagaacctgaagactgcaggctgctaattgcaggaaatgactttggaaggacagactcttgttgagtttcagggctgaaatgcctggcgaactcctttcagccatcatgtattgactgagtggctgcttagcatgggccacggagcgaggctcgggtcagctggtcactcaggccatctttcatgctggcaagtcagcaaacattacattctcagtcatgtgcatatttttgccttcattcttaccaccttgcctgcaaagtttgc

SEQ ID NO: 31479 - DNA, 684 bp, Macaca Mulatta
  misc_feature (1)...(684): n = A,T,C or G
ctcgccatgggggaggtggagatctcggccctggcctacgtgaagatgtgcctgcatgctgcccggtacccacacgccgcagtcaacgggctgtttctggcgccagcgccgcggtccggagaatgcctgtgcctcaccgactgtgtgcccctcttccacagccacctggccctgtccgtcatgttggaggtcgccctcaaccaggtgncaggtggatgtgtggggagcacaggccggtctggtggtggctggttactaccatgccaatgcagctgtggacgaccagagnnnnnnnnnnnnnnnnnnnnnnnnnnnnnnnnnnnnnnnnnnnnnnnnnnnnnnnnnnnnnnnnnnnnnnnnnnnnnnnnnnnnnnnnnnnnnnnnnnnnnnnnnnnnnnnnnnnnnnnnnnnnnnnnnnnnnnnnnnnnnnnnnnnnnnnnnnnnnnnnnnnnnagtgatgtggagggactgggaagagtcacggcagatggtgggagctctactggaagatcgggcccaccagcaccttgtggactttgactgccaccttgacgacatccggcaggactggaccaaccagtggctcaacactcaaatcacccagtgggttggtcccactaatggaaatggaaatgcctgagccagggccagcagggtccagatccaataaagagacttgggctg

SEQ ID NO: 31480 - DNA, 143 bp, Macaca Mulatta
agatggtggccgtaggaatctgtcgttcagatgaccacgtggttagtggtaccctagtgacccctcttcctgcgattttaggccacgaggcagctggcatcgtggagagtgttggagaaggggtgactacagtcaaaccaggt

SEQ ID NO: 31481 - DNA, 1985 bp, Macaca Mulatta
  misc_feature (1)...(1985): n = A,T,C or G
cctccaagctctctcactatgaacagacaagtctgcaagaaatccttcagtggcaggagccagggtttctccggccgctctgccatggtctccggcagcagcaggatgagctgtgtggcccgctctggggtagctggtggaggggcctgtggcttccggagtggagcaggcggctttggcagtcgcagcctctacaacatgggtggcaacaagagcatctccatcagcgtggcagctggtggctcccgggctggaggctttgtgggagggcagagcagctgtggctttgcaggtggctatggaggtggctttgggggcagctatggtggtggctttggtggtggcagaggaataggtagtggttttggaggggctggtggctttggtggagctggtgggtttggtggtcctagtgtctttggtgggcttggcacctttggcagtcctggtggctttgtccctgggggcttttccgtgggaattcaggaagtgactatcaaccagagtctcctgcagcccctcaatgtggagatcgacccccagattggacaagtaaaggcccaggagcgggagcagatcaagaccctcaacaacaagtttgcctccttcattgacaaggtnnnnnnnnnnnnnnnnnnnnnnnnnnnnnnnnnnnnnnnnnnnnnnnnnnnnnnnnnnnnnnnnnnnnnnnnnnnnnnnnnnnnnnnnnnnnnnnnnnnnnnnnnnnnnnnnnnnnnnnnnnnnnnnnnnnnnnnnnnnnnnnnnnnnnnnnnnnnnnnnnnnnnnnnnnnnnnnnnnnnnnnnnnnnnnnnnnnnnnnnnnnnnnnnnnnnnnnnnnnnnnnnnnnnnnnnnnnnnnnnnnnnnnnnnnnnnnnnnnnnnnnnnnnnnnnnnnnnnnnnnnnnnnnnnnnnnnnnnnnnnnnnnnnnnnnnnnnnnnnnnnnnnnnnnnnnnnnnnnnnnnnnnnnnnnnnnnnnnnnnnnnnnnnnnnnnnnnnnnnnnnnnnnnnnnnnnnnnnnnnnnnnnnnnnnnnnnnnnnnnnnnnnnnnnnnnnnnnnnnnnnnnnnnnnnnnnnnnnnnnnnnnnnnnnnnnnnnnnnnnnnnnnnnnnnnnnnnnnnnnnnnnnnnnnnnnnnnnnnnnnnnnnnnnnnnnnnnnnnnnnnnnnnnnnnnnnnnnnnnnnnnnnnnnnnnnnnnnnnnnnnnnnnnnnnnnnnnnnnnnnnnnnnnnnnnnnnnnnnnnnnnnnnnnnnnnnnnnnnnnnnnnnnnnnnnnnnnnnagaatgccaacctgcagacggcaatttcagaggctgagcagcgtggagagatggccctcaaggacgccaatgccaagctccaagacttgcaggctgccctacagaaggccaaggatgacctggctcggctcctgcgtgactaccaggagctgatgaacgtcaagctggccctggatgtggagattgccacctaccgcaagctgctggaggtagaggagtgcaggnnnnnnnnnnnnnnnnnnnnnnnnnnnnnnnnnnnnnnnnnnnnnnnnnnnnnnnnnnnnnnnnnnnnnnnnnnnnnnnnnnnnnnnnnnnnnnnnnnnnnnnnnnnnnnnnnnnnnnnnnnnnnnnnnnnnnnnnnnnnnnnnnnnnnnnnnnnnnnnnnnnnnnnnnnnnnnnnnnnnnnnnnnnnnnnnnnnnnnnnnnnnnnnnnnnnnnnnnnnnnnnnnnnnnnnnnnnnnnngctaccagagcagcagtagtgggagcaggctcggtggtgcaggtagcatgtccatgagccacagtggaatgggctccagctctggcagtgtccagacttctggaggcagtggctataagtctggtggtggaggcagcaccagtatccgcttttcccagaccacgagctcaagccagcataactcctatcagtagtattctgtgccaaatctctataaccacctgcttcccactcagcctgcaata

SEQ ID NO: 31482 - DNA, 781 bp, Macaca Mulatta
  misc_feature (1)...(781): n = A,T,C or G
agaacaacacatctcctataattcatagtatcttgctgttgatagataaagaatctgcatttaggcctgacaaggatgcaataattcagnnnnnnnnnnnnnnnnnnnnnnnnnnnnnnnnnnnnnnnnnnnnnnnnnnnnnnnnnnnnnnnnnnnnnnnnnnnnnnnnnnnnnnnnnnnnnnnnnnnnnnnnnnnnnnnnnnnnnnnnnnnnnnnnnnnnnnnnnnnnnnnnnnnnnnnnnnnnnnnnnnnnnnnnnnnnnnnnnnnnnnnnnnnnnnnnnnnnnnnnnnnnnnnnnnnnnnnnnnnnnnnnnnnnnnnnnnnnnnnnnnnnnnnnnnnnnnnnnnnnnnnnnnnnnnnnnnnnnnnnnnnnnnnnnnnnnnnnnnnnnnnnnnnnnnnnnnnnnnnnnnnnnnnnnnnnnnnnnnnnnnnnnnnnnnnnnnngggacaccctggaggctgccaccagcctgtacgaccgagtggatgaggaggtgcacaggctggtccttgcctcgaacggtcgtctccggcagctggagcgcctccgggagctggcatcgctccaggacgggaatgaccaggtcagagctgcaggaagaaggcggcctggtcagcgtcccctccaggccaggctggccaaggcgaccctcccaccttcacgctgcgtctttagggccttgacctgatttccatctggaacgaaatacgtcaggatagggcataccttgctgcttgtgtaaaaagaaataaattttattttttacctgagagatactgg

SEQ ID NO: 31483 - DNA, 696 bp, Macaca Mulatta
tcctgtgaccttgacaggtcagccctctgtagccccttgacacccggctatagaaggggctggtaacttaggtttcctccctccacctctaaacacatacacacctatccccccagagaatcccagagaaggtaggagctttgtactccccaagtccatggggaaacagtttatctttctggacttagttttattacatccagctctatattagcatattagcataggtgagaaatatggccagactagacagagatcgggggtcaggggagcttccgaacttcaccaaagcccacaggcaggtctgcgaactccgaatgctaccttaccttccctgcaagagttcgtgtctggacccctggtggcactatttagtgtttaccccatctccaatgccccttccaaggctgtgcagtgtcttggggctctcagggccaacatcgaagagatgggggccacctcttaacacctggcaactgtttcccctcaccctgattcctgaaaacagacaaaatacatacctggttttctagggtttatctgtttgctttttgagttgtgcgttcctcagggccttggcattgctaacgatggtcccgtctgctgtgtgagaacccccctcaaccccttcctcctccctctgggggtgaagtgggagtctttggctcccttttttaacaaaagggctcagtgcag

SEQ ID NO: 31484 - DNA, 223 bp, Macaca Mulatta
ttgacctggcatccttctgccgggctccctgctgtggcctggtctgcggtcctgatgccctccttccatagcgggtgtcaggcagggggtggagagtagggggattcgcctgaaatcttccctcagtcacttcccccacctcctctccgggcaggcagaggccttcacagacgtgggggcctccccacaaaatgttccatccagagccggcccttctgcttgt

SEQ ID NO: 31485 - DNA, 1078 bp, Macaca Mulatta
  misc_feature (1)...(1078): n = A,T,C or G
tgattgcggcccaggccaagcttgtctaccatctgaataaatactacaacgaaaaatgccaagccaggaaagctgccattgccaaaactatccgggaagtctgcaaagtagtttccgacgtactgaaggaagtggaagtgcaggagccgcggttcatcagctctctcaacgagatggacaatcgctacgagggccttgaggtcatctcccccacggaatttgaagtggtgctttatctcaaccaaatgggggtgttcaacttcgtggacgatggctcactgcccggctgcgcggtgctgaagttgagcgacgggcgcaagagaagcatgtccctctgggtggaattcattaccgcctccggctacctctcggcgcgcaaaatccggtccaggtttcagacgctggtggctcaagcggtagacaaatgtagctacagggatgtggtannnnnnnnnnnnnnnnnnnnnnnnnnnnnnnnnnnnnnnnnnnnnnnnnnnnnnnnnnnnnnnnnnnnnnnnnnnnnnnnnnnnnnnnnnnnnnnnnnnnnnnnnnnnnnnnnnnnnnnnnnnnnnnnnnnnnnnnnnnnnnnnnnnnnnnnnnnnnnnnnnnnnnnnnnnnnnnnnnnnnnnnnnnnnnnnnnnnnnnnnnnnnnnnnnnnnnnnnnnnnnnnnnnnnnnnnnnnnnnnnnnnnnnnnnnnnnnnnnnnnnnnnnnnnnnnnnnnnnnnnnnnnnnnnnnnnnnnnnnnnnnnnnnnnnnnnnnnnnnnnnnnnnnnnnnnnnnnnnnnnnnnnnnnnnnnnnnnnnnnnnnnnnnnnnnnnnnnnnnnnnnnnnnnnnnnnnnnnnnnnnnnnnnnnnnnnnnnnnnnnnnnnnnnnnnnnnnnnnnnnnnnnnnnnnnnnnnnnnnnnnnnnnnnnncttatctcctgcctgcagtgccggcggtgtccccactactttctaccgaacttagatctgtttcaaggcaaacctcactcagctctggaaaacgctgccaaacaaacgtggcgactggcaagagagatcctgaccaacccgaaaagtttggaaaaactttag

SEQ ID NO: 31486 - DNA, 148 bp, Macaca Mulatta
aggatggatttattgactttttggagtttattgctgctgtaaatctaatcgtgcaagaaaaaatggagcaaaaattaaaatggtattttaagctgtatgatgttgatggaaatggttctattgacaaaaatgaactactggacatgtt

SEQ ID NO: 31487 - DNA, 650 bp, Macaca Mulatta
ggcttcacctcacaggtaggaggctgggctacagaagggatacagggaggaatgctggtgcttgcagcctgctccacttctcctggaagaagcagcaaatcctcactcatttggggtttaatctcttcatccatgtccaaatcttctaaatctaggaaattgtttacctgttcttccaaacactgtgatgaagtacgaagaaagatggttttatttctaagatggcagttatttgcttcatttttatgagtaacttttgctgaggtaaaaatgttttctgaagaatcagttccaaacactcccctttcggacacaagatcctcttgtgaacgatgagcaaaagtgttcagaaattcttcatcatttgtttgctcatgacaattaaggaatttatccaagacttctttgattaactgatcttcattcattatttccaatcctgacacatgggcagacatttctattcacgaggccacagtatatgaggttacctgccactctggagcaatcaggaaaacatggccagcacggatcagcaagatttaatgtttcagagtacagtatctttctccgaggtcctcaggggtgtaattttgagtcgcgctcctaagcatccagacaggcaggacacagtaacgacatctctcccc

SEQ ID NO: 31488 - DNA, 592 bp, Macaca Mulatta
  misc_feature (1)...(592): n = A,T,C or G
gaaacaatccctggaagcctcatggcagaaacagaaggtcgctactgtgtgcagctctcacagattcaggcccagatctccgctctggaagaacagctgcaacagattcgagctgaaaccgagtgccagaatactgaataccagcaactcctggatattaagatccgactggagaatgaaattcaaacctaccgcagcctgctagaaggagagggaannnnnnnnnnnnnnnnnnnnnnnnnnnnnnnnnnnnnnnnnnnnnnnnnnnnnnnnnnnnnnnnnnnnnnnnnnnnnnnnnnnnnnnnnnnnnnnnnnnnnnnnnnnnnnnnnnnnnnnnnnnnnnnnnnnnnnnnnnnnnnnnnnnnnnnnnnnnnnnnnnnnnnnnnnnnnnnnnnnnnnnnnnnnnnnnnnnnnnnnnnnnnnnnnnnnnnnnnnnnnnnnnnnnnnnnnnnnnnnnnnnnnnnnnnnnnnnnnnnnnnnnnnnnnnnnnnnnnnnnnnnnnnnnnnnnnnnnnnnnnnnnnnnnnnnnnnnnnnaggccacaagtcctcctcttctgggtccgtgggcgagtcttcatctaagggaccaag

SEQ ID NO: 31489 - DNA, 768 bp, Macaca Mulatta
  misc_feature (1)...(768): n = A,T,C or G
ggtatctaattttcctactcatattttcatctttagcgtttaatgttgaaacaccattcacttcacaataaggacccactgaaaatgtattgttttaatgcataacctgacatctaattaaacatacacacaaatttaattattttttctctttaacctgatcacgacacagctcttaaccattgtcactttcagtatagcatagtagttagtagtaaatttccttgatggcagtaattctgtagtaatttctattcaatcaaacctaagagagctttggtcttactgtaaaggtacaagaaatttttttatataattcctagctttttgtttatgattctgatcaactataagacacaatgtaaagatttctggcttataatttctctaaaacttattagctttgtttagtttgggcaggagttataaacttaataggaattgtcattttacttacagtttctttcctgattagnnnnnnnnnnnnnnnnnnagttatctttattcagtcatattggtcaaaacaaacaaatagtccatcaactaaaataagctgtaatgaatttagaagacgaatgcccatattagatttccatttaaatcacttgtgttacaaatcgtacaaagaacttacnnnnnnnnnnnnnnnnnnnnnnnnnnnnnnnnacaatttttttgtccgtttcaagaaaaagttaaatactttggcccacattttgtttctcactgaaattttaacagtaggaaaaaaaaggttattaatggaac

SEQ ID NO: 31490 - DNA, 509 bp, Macaca Mulatta
  misc_feature (1)...(509): n = A,T,C or G
tgagccggggtccagccgccgccgctatggacatcccgccgctggccggcaagatcgcggcgctgtcgctgagnnnnnnnnnnnnnnnnnnnnnnnnnnnnnnnnnnnnnnnnnnnnnnnncccctgtgggtggcattgatgagcgccctaatcctgggtctgctcttcgtggcagtctacagcttgtcccatggcgaaatctcctatgacccactctatgctgnnnnnnnnnnnnnnnnnnnnnnnnnnnnnnnnnnnnnnnnnnnnnnnnnnnnnnnnnnnnnnnnnnnnnnnnnnnnnnnnnnnnnnnnnnnnnnnnnnnnnnnnnnnnnnnnnnnnnnnnnnnnnnnnnnnnnnnnnnnnnnnnnnnnnnnnnnnnnnnnnnnnnnnnnnnnnnnnnnnnnnnnnnnnnnnnnnnnnnnnaggaagagataccggaactttggactgtactggctgggttccttcgccatgagcatcctggtgttccttacaggaaacattcttg

SEQ ID NO: 31491 - DNA, 4136 bp, Macaca Mulatta
  misc_feature (1)...(4136): n = A,T,C or G
ggagaggaatcaaatgagtctgcagaatctagcagtaattgggaaaagcaggaaaatattgtattgaaattgcaaaaggaatttcccaattttgataaacagnnnnnnnnnnnnnnnnnnnnnnnnnnnnnnnnnnnnnnnnnnnnnnnnnnnnnnnnnnnnnnnnnnnnnnnnnnnnnnnnnnnnnnnnnnnnnnnnnnnnnnnnnnnnnnnnnnnnnnnnnnnnnnnnnnnnnnnnnnnnnnnnnnnnnnnnnnnnnnnnnnnnnnnnnnnnnnnnnnnnnnnnnnnnnnnnnnnnnnnnnnnnnnnnnnnnnnnnnnnnnnnnnnnnnnnnnnnnnnnnnnnnnnnnnnnnnnnnnnnnnnnnnnnnnnnnnnnnnnnnnnnnnnnnnnnnnnnnnnnnnnnnnnnnnnnnnnnnnnnnnnnnnnnnnnnnnnnnnnnnnnnnnnnnnnnnnnnnnnnnnnnnnnnnnnnnnnnnnnnnnnnnnnnnnnnnnnnnnnnnnnnnnnnnnnnnnnnnnnnnnnnnnnnnnnnnnnnnnnnnnnnnnnnnnnnnnnnnnnnnnnnnnnnnnnnnnnnnnnnnnnnnnnnnnnnnnnnnnnnnnnnnnnnnnnnnnnnnnnnnnnnnnnnnnnnnnnnnnnnnnnnnnnnnnnnnnnnnnnnnnnnnnnnnnnnnnnnnnnnnnnnnnnnnnnnnnnnnnnnnnnnnnnnnnnnnnnnnnnnnnnnnnnnnnnnnnnnnnnnnnnnnnnnnnnnnnnnnnnnnnnnnnnnnnnnnnnnnnnnnnnnnnnnnnnnnnnnnnnnnnnnnnnnnnnnnnnnnnnnnnnnnnnnnnnnnnnnnnnnnnnnnnnnnnnnnnnnnnnnnnnngggcctaggaaaaactattcaagccattgcatttctggcatacctctatcaggagggttataagggtcctcatttgatcgttgttccagcttcaactatagnnnnnnnnnnnnnnnnnnnnnnnnnnnnnnnnnnnnnnnnnnnnnnnnnnnnnnnnnnnnnnnnnnnnnnnnnnnnnnnnnnnnnnnnnnnnnnnnnnnnnnnnnnnnnnnnnnnnnnnnnnnnnnnnnnnnnnnnnnnnnnnnnnnnnnnnnnnnnnnnnnnnnnnnnnnnnnnnnnnnnnnnnnnnnnnnnnnnnnnnnnnnnnnnnnnnnnnnnnnnnnnnnnnnnnnnnnnnnnnnnnnnnnnnnnnnnnnnnnnnnnnnnnnnnnnnnnnnnnnnnnnnnnnnnnnnnnnnnnnnnnnnnnnnnnnnnnnnnnnnnnnnnnnnnnnnnnnnnnnnnnnnnnnnnnnnnnnnnnnnnnnnnnnnnnnnnnnnnnnnnnnnnnnnnnnnnnnnnnnnnnnnnnnnnnnnnnnnnnnnnnnnnnnnnnnnnnnnnnnnnnnnnnnnnnnnnnnnnnnnnnnnnnnnnnnnnnnnnnnnnnnnnnnnnnnnnnnnnnnnnnnnnnnnnnnnnnnnnnnnnnnnnnnnnnnnnnnnnnnnnnnnnnnnnnnnnnnnnnnnnnnnnnnnnnnnnnnnnnnnnnnnnnnnnnnnnnnnnnnnnnnnnnnnnnnnnnnnnnnnnnnnnnnnnnnnnnnnnnnnnnnnnnnnnnnnnnnnnnnnnnnnnnnnnnnnnnnnnnnnnnnnnnnnnnnnnnnnnnnnnnnnnnnnnnnnnnnnnnnnnnnnnnnnnnnnnnnnnnnnnnnnnnnnnnnnnnnnnnnnnnnnnnnnnnnnnnnnnnnnnnnnnnnnnnnnnnnnnnnnnnnnnnnnnnnnnnnnnnnnnnnnnnnnnnnnnnnnnnnnnnnnnnnnnnnnnnnnnnnnnnnnnnnnnnnnnnnnnnnnnnnnnnnnnnnnnnnnnnnnnnnnnnnnnnnnnnnnnnnnnnnnnnnnnnnnnnnnnnnnnnnnnnnnnnnnnnnnnnnnnnnnnnnnnnnnnnnnnnnnnnnnnnnnnnnnnnnnnnnnnnnnnnnnnnnnnnnnnnnnnnnnnnnnnnnnnnnnnnnnnnnnnnnnnnnnnnnnnnnnnnnnnnnnnnnnnnnnnnnnnnnnnnnnnnnnnnnnnnnnnnnnnnnnnnnnnnnnnnnnnnnnnnnnnnnnnnnnnnnnnnnnnnnnnnnnnnnnnnnnnnnnnnnnnnnnnnnnnnnnnnnnnnnnnnnnnnnnnnnnnnnnnnnnnnnnnnnnnnnnnnnnnnnnnnnnnnnnnnnnnnnnnnnnnnnnnnnnnnnnnnnnnnnnnnnnnnnnnnnnnnnnnnnnnnnnnnnnnnnnnnnnnnnnnnnnnnnnnnnnnnnnnnnnnnnnnnnnnnnnnnnnnnnnnnnnnnnnnnnnnnnnnnnnnnnnnnnnnnnnnnnnnnnnnnnnnnnnnnnnnnnnnnnnnnnnnnnnnnnnnnnnnnnnnnnnnnnnnnnnnnnnnnnnnnnnnnnnnnnnnnnnnnnnnnnnnnnnnnnnnnnnnnnnnnnnnnnnnnnnnnnnnnnnnnnnnnnnnnnnnnnnnnnnnnnnnnnnnnnnnnnnnnnnnnnnnnnnnnnnnnnnnnnnnnnnnnnnnnnnnnnnnnnnnnnnnnnnnnnnnnnnnnnnnnnnnnnnnnnnnnnnnnnnnnnnnnnnnnnnnnnnnnnnnnnnnnnnnnnnnnnnnnnnnnnnnnnnnnnnnnnnnnnnnnnnnnnnnnnnnnnnnnnnnnnnnnnnnnnnnnnnnnnnnnnnnnnnnnnnnnnnnnnnnnnnnnnnnnnnnnnnnnnnnnnnnnnnnnnnnnnnnnnnnnnnnnnnnnnnnnnnnnnnnnnnnnnnnnnnnnnnnnnnnnnnnnnnnnnnnnnnnnnnnnnnnnnnnnnnnnnnnnnnnnnnnnnnnnnnnnnnnnnnnnnnnnnnnnnnnnnnnnnnnnnnnnnnnnnnnnnnnnnnnnnnnnnnnnnnnnnnnnnnnnnnnnnnnnnnnnnnnnnnnnnnnnnnnnnnnnnnnnnnnnnnnnnnnnnnnnnnnnnnnnnnnnnnnnnnnnnnnnnnnnnnnnnnnnnnnnnnnnnnnnnnnnnnnnnnnnnnnnnnnnnnnnnnnnnnnnnnnnnnnnnnnnnnnnnnnnnnnnnnnnnnnnnnnnnnnnnnnnnnnnnnnnnnnnnnnnnnnnnnnnnnnnnnnnnnnnnnnnnnnnnnnnnnnnnnnnnnnnnnnnnnnnnnnnnnnnnnnnnnnnnnnnnnnnnnnnnnnnnnnnnnnnnnnnnnnnnnnnnnnnnnnnnnnnnnnnnnnnnnnnnnnnnnnnnnnnnnnnnnnnnnnnnnnnnnnnnnnnnnnnnnnnnnnnnnnnnnnnnnnnnnnnnnnnnnnnnnnnnnnnnnnnnnnnnnnnnnnnnnnnnnnnnnnnnnnnnnnnnnnnnnnnnnnnnnnnnnnnnnnnnnnnnnnnnnnnnnnnnnnnnnnnnnnnnnnnnnnnnnnnnnnnnnnnnnnnnnnnnnnnnnnnnnnnnnnnnnnnnnnnnnnnnnnnnnnnnnnnnnnnnnnnnnnnnnnnnnnnnnnnnnnnnnnnnnnnnnnnnnnnnnnnnnnnnnnnnnnnnnnnnnnnnnnnnnnnnnnnnnnnnnnnnnnnnnnnnnnnnnnnnnnnnnnnnnnnnnnnnnnnnnnnnnnnnnnnnnnnnnnnnnnnnnnnnnnnnnnnnnnnnnnnnnnnnnnnnnnnnnnnnnnnnnnnnnnnnnnnnnnnnnnnnnnnnnnnnnnnnnnnnnnnnnnnnnnnnnnnnnnnnnnnnnnnnnnnnnnnntggatttggaaggcaaataaatctcttaaacagtgattatttagatattaaagactctgagaactcatggcataaccccagtcttgatgggatattgaacagactgaatatattttaccattacagggctaaaaggagtcttcatgtgttaatactacctccttgtacatcaccatacccaaatcagttattcaaattgttaggaattttaccttttaaaatctcataatggatttctcataagttttctgtattaatgtattttcaatgataggctgtttctttttnnnnnnnnnnnnnnnnnnnnnnntatccatacttttatctctaatgaaatgtagttgggttcttcctgtaatgcgctattatgtcttgggcttaataaaaatatttgtgatcataa

SEQ ID NO: 31492 - DNA, 209 bp, Macaca Mulatta
  misc_feature (1)...(209): n = A,T,C or G
ggggggcgagggtggaagcagccgcaggagcaagggcccctcccacatacacaggaggaatatttcatttctccttaatgaaggctctggccctaacccctcagcactgtctccggataggaacatgtacaaagcagttaattaggcagcctggagaaaaccagagatccagnnnnnnnnnnnnnnnnnnnnnnnnnnnnnnnnnnnnn

SEQ ID NO: 31493 - DNA, 1421 bp, Macaca Mulatta
  misc_feature (1)...(1421): n = A,T,C or G
ctctgtctcctcagggncgcacctttcgaagcgcggncagacctgcgtggtgcactacaccggtggtgactgcattctggtaaacgaatgagctaaatgcataccccagctcaccagttcaggggcaccagttccttggagcagggatgcttgaagatggaaagaaatttgattcctcccgggacagaaacaagccctttaagtttatgctaggcaagcaggaggtgatccgaggctgggaagaaggggttgcccagatgagtgtgggtcagagagccaaactgactatatctccagattatgcctatggtgccactgggcacccaggcatcatcccaccacatgccactctcgtcttcgatgtggagcttctaaaactggaatgacaggaatggcctcctcccttagctccctgttcttggatctgccatggagggatctggtgcctccagacgtgtgcacatgaatccatgtggagcttttcctggtgttccactccactctgtatagacatctgccctgactgaatgtgttctgtcactcagctttgcttctgacacctccgtttcctcttcccctttctcctcgtatgtgtgtttacctaaactatatgccataaacctcaagttattcattttattttgttttcattttggggtgaagattcagtttcagtcttttggatatagatttccagttaagtacattgtcaaatattcacagcacaagtgataggttaacgttagaataggaattggtgttgggggggttgcaagaannnnnnnnnnnnnnnnnnnggatgaaatttttatctattatatattaaacattcttgctgctgcgctgcaaagccatagcagatttgaggcgctgttgaggactgaattattctccaagttgggagatgtccttgggttaaattaaaagcccttcctaaaactgaggtgggggatgggggagagcnttttgtctccgcggtttttgntggggtttctccccttttaatccttttgctttttgtncgcctaatcgtggtcctctggtgttgctgggttactacaaggtatcnggttgtttgggggctgataggggacctgcggaagggccttctttgagggntaggntttggtttatttttgggtgnnnnnnnnnnnnnnnnngnnnnnnnnnnnnnnagttgggnntttttgnggaaattttgggaattctatggttttgtttccttgtgttttgcngggggttggtgtatcttttgantagttgttaactttttcctttgttacacgttggtaggatgttgtntttttgtgttatattttaatttgagagtggggtgagggtgtgtatttagtttctggttataagtcgctgtataagggagttttgttttgnagaagttctgctatgggagggacgaaagc

SEQ ID NO: 31494 - DNA, 1335 bp, Macaca Mulatta
  misc_feature (1)...(1335): n = A,T,C or G
tggagctgctaaagctgaatcggagcgtgcagggaaccggacccgggccgggggcttccctgtgccgcccggcggcgcctctcctcaacagcagcagtgtgggcaacctcagctgcgagccccctcgcattcgcggagccgggacacgagnagaattggagctggccattagaatcactctttacgcagtgatcttcctgatgagcgttggaggaaacgtgctcatcatcgtggtcctgggactgagccgccgcctgattaccgtcaccaatgccttcctactctcactggcagtcagcgacctcctgctggctgtggcttgcatgcccttcaccctcctgcccaatctcatgggcacattcatctttggcacagttatctgcaaggcggtttcctacttcatgnnnngtgtctgtgagcgtgtccacgctaagcctcgtggccatagcactggagcggtacagcgccatctgccgaccactgcaggcacgagtatggcagacgcgctcccacgcggctcgcgtgatcgtagccacgtggctgctgtccggactactcatggtgccctaccccgtgtacaccgtcgtgcaaccagtgggccctcgtgtgctgcagtgcgtgcatcgctggcccagtgcacgggtccgccagacctggnnnnnnnnnnnnnnnnnnnnnnnnnnnnnnnnnnnnnnnnnnnnnnnnnnnnnnnnnnnnnnnnnnnnnnnnnnnnnnnnnnnnnnnnnnnnnnnnnnnnnnnnnnnnnnnnnnnnnnnnnnnnnnnnnnnnnnnnnnnnnnnnnnnnnnnnnaggtgctattcaccagaacgggcgttgccggtctgagactggcgcggttggcgaagacagtgatggctgctatgtgcaacttccgcgttcccggcctgcactggagctgtcggcgctgacggctcctgggcccggctcccggcccacccaggccaagctgctggctaagaagcgcgtggtgcgaatgttgctggtgatcgttgtgcttttttttctgtgttggttgccagtttatagtgccaacacgtggcgcgcctttgatggcctgggtgcacacagagcactctcaggtgctcctatctccttcattcacttgctgagctatgcctcggcctgtgtcaaccccctggtctactgcttcatgcaccgtcgttttcgccaggcctgcctggaaacgtgcgctcgctgctgcccccggcctccacgagctcgccccaggcctcttcccgatgaggaccctcccactccatccattgcttcgctgtccaggcttagctacactaccatcagcacactgggccctgg

SEQ ID NO: 31495 - DNA, 269 bp, Macaca Mulatta
cacctctgagacgtccctgtaccaggtcctgctgggggcaaggcagctagtgcatccagggccgcactctgtgtatgcccgggtgaggcgggtggagagcaaccccctgtatcagggcatggcctccagtgccgacgtggccctggtggagctggaggaaccagtgtccttctccaattacatcctcctccgtgtgcctgcgccgacccctcggtgatctttgagactgggcatgaactgctgggtcactggctggggcagctccagtg

SEQ ID NO: 31496 - DNA, 2492 bp, Macaca Mulatta
  misc_feature (1)...(2492): n = A,T,C or G
gaattggtgtgcttatgtacacaccaggttatctcctacagtgatattggacaaccaggtcacttatgtaccaggtgggagaggaccttgtggctggaccggtggatcctgtcctcagagnnnnnnnnnnnnnnnnnnnnnnnnnnnnnnnnnnnnnnnnnnnnnnnnnnnnnnnnnnnnnnnnnnnnnnnnnnnnnnnnnnnnnnnnnnnnnnnnnnnnnnnnnagcccaagaacagcaacatttgatacacaccaaccaggctgaaagtcatacagctgttggcagaggagtagctgagcagcagcagcaagactgtggtgacccagnnnnnnnnnnnnnnnnnnnnnnnnnnnnnnnnnnnnnnnnnnnnnnnnnnnnnnnnnnnnnnnnnnnnnnnnnnnnnnnnnnnnnnnnnnnnnnnnnnnnnnnnnnnnnnnnnnnnnnnnnnnnnnnnnnnnnnnnnnnnnnnnnnnnnnnnnnnnnnnnnnnnnnnnnnnnnnnnnnnnnnnnnnnnnnnnnnnnnnnnnnnnnnnnnnnnnnnnnnnnnnnnnnnnnnnnnnnnnnnnnnnnnnnnnnnnnnnnnnnnnnnnnnnnnnnnnnnnnnnnnnnnnnnnnnnnnnnnnnnnnnnnnnnnnnnnnnnnnnnnnnnnnnnnnnnnnnnnnnnnnnnnnnnnnnnnnnnnnnnnnnnnnnnnnnnnnnnnnnnnnnnnnnnnnnnnnnnnnnnnnnnnnnnnnnnnnnnnnnnnnnnnnnnnnnnnnnnnnnnnnnnnnnnnnnnnnnnnnnnnnnnnnnnnnnnnnnnnnnnnnnnnnnnnnnnnnnnnnnnnnnnnnnnnnnnnnnnnnnnnnnnnnnnnnnnnnnnnnnnnnnnnnnnnnnnnnnnnnnnnnnnnnnnnnnnnnnnnnnnnnnnnnnnnnnnnnnnnnnnnnnnnnnnnnnnnnnnnnnnnnnnnnnnnnnnnnnnnnnnnnnnnnnnnnnnnnnnnnnnnnnnnnnnnnnnnnnnnnnnnnnnnnnnnnnnnnnnnnnnnnnnnnnnnnnnnnnnnnnnnnnnnnnnnnnnnnnnnnnnnnnnnnnnnnnnnnnnnnnnnnnnnnnnnnnnnnnnnnnnnnnnnnnnnnnnnnnnnnnnnnnnnnnnnnnnnnnnnnnnnnnnnnnnnnnnnnnnnnnnnnnnnnnnnnnnnnnnnnnnnnnnnnnnnnnnnnnnnnnnnnnnnnnnnnnnnnnnnnnnnnnnnnnnnnnnnnnnnnnnnnnnnnnnnnnnnnnnnnnnnnnnnnnnnnnnnnnnnnnnnnnnnnnnnnnnnnnnnnnnnnnnnnnnnnnnnnnnnnnnnnnnnnnnnnnnnnnnnnnnnnnnnnnnnnnnnnnnnnnnnnnnnnnnnnnnnnnnnnnnnnnnnnnnnnnnnnnnnnnnnnnnnnnnnnnnnnnnnnnnnnnnnnnnnnnnnnnnnnnnnnnnnnnnnnnnnnnnnnnnnnnnnnnnnnnnnnnnnnnnnnnnnnnnnnnnnnnnnnnnnnnnnnnnnnnnnnnnnnnnnnnnnnnnnnnnnnnnnnnnnnnnnnnnnnnnnnnnnnnnnnnnnnnnnnnnnnnnnnnnnnnnnnnnnnnnnnnnnnnnnnnnnnnnnnnnnnnnnnnnnnnnnnnnnnnnnnnnnnnnnnnnnnnnnnnnnnnnnnnnnnnnnnnnnnnnnnnnnnnnnnnnnnnnnnnnnnnnnnnnnnnnnnnnnnnnnnnnnnnnnnnnnnnnnnnnnnnnnnnnnnnnnnnnnnnnnnnnnnnnnnnnnnnnnnnnnnnnnnnnnnnnnnnnnnnnnnnnnnnnnnnnnnnnnnnnnnnnnnnnnnnnnnnnnnnnnnnnnnnnnnnnnnnnnnnnnnnnnnnnnnnnnnnnnnnnnnnnnnnnnnnnnnnnnnnnnnnnnnnnnnnnnnnnnnnnnnnnnnnnnnnnnnnnnnnnnnnnnnnnnnnnnnnnnnnnnnnnnnnnnnnnnnnnnnnnnnnnnnnnnnnnnnnnnnnnnnnnnnnnnnnnnnnnnnnnnnnnnnnnnnnnnnnnnnnnnnnnnnnnnnnnnnnnnnnnnnnnnnnnnnnnnnnnnnnnnnnnnnnnnnnnnnnnnnnnnnnnnnnnnnnnnnnnnnnnnnnnnnnnnnnnnnnnnnnnnnnnnnnnnnnnnnnnnnnnnnnnnnnnnnnnnnnnnnnnnnnnnnnnnnnnnnnnnnnnnnnnnnnnnnnnnnnnnnnnnnnnnnnnnnnnnnnnnnnnnnnnnnnnnnnnnnnnnnnnnnnnnngaatttgttggaccaataattcaaataaaaactcaagctgtcctctctaatttaacttgttgtatagatcaatcattgcctggtagtctggcaaatgttgtcaagtctaagaagcaagtaaaatcattgccgaagaaaattaatatgcttaagaaaccaacggtaaatcttaccactgtcctgataggccggactcaaagaaacacagacaacgtaatatatcctg

SEQ ID NO: 31497 - DNA, 467 bp, Macaca Mulatta
cgcgccagcctctgccagcgcccgttggggaaccacaagggggcctactccgagcggcccggcgggcttctgcacaggcgggtcttcgtggcggtgcgccccagcgactccgggctgccctctgagtcgggccctagcagtggggcccccaggcccggccgcctcccgctgcggaatgggcgggtggcccaccacggcttggccagggaagggcctggctgctcccacctgcccctcaccattccagcctgggatatctgaggtggtcccgggagggctggcccctgcaagaggaccccgattggacacgagatgcatgcgcgcgacagcggcctggtgaggttaggagaggatgcatggtgcctccctctccagagccaggcagtggtgggcggctgctggtgatgtcttctctgctgccttcaccctcagtagaggcaaatgcgggggacaggaaggaaccaact

SEQ ID NO: 31498 - DNA, 788 bp, Macaca Mulatta
  misc_feature (1)...(788): n = A,T,C or G
gcgcgggggagccattaggaggcgaggagagaggagggcgcagctcccgcccagcccagccctgcccagccctgcccggaggcagacgcgccggaaccgggacgcgataaatatgcagagcggaggcttagcgcagcagagcccgcgcgccgcccgctccgggtgctgaatccaggcgcggggacacgagccaggcgccgccgccggagcccgcggagccggggccagagccggagcgcgtccgcgtccacgcagccgccggccggccagcacccagggccctgcatgccaggtcgttggaggtggcagccagacatgcacccggcccggaagctcctcagcctcctcttcctcatcctgatgggcactgaactcactcaannnnnnnnnnnnnnnnnnnnnnnnnnnnnnnnnnnnnnnnnnnnnnnnnnnnnnnnnnnnnnnnnnnnnnnnnnnnnnnnnnnnnnnnnnnnnnnnnnnnnnnnnnnnnnnnnnnnnnnnnnnntgcccagaacgtgcggtccaaatcccaatccagcagcggggttacgtcgtcccgtttaccctcagagtccctctcctggtgctgcccagacgatcggccggtccccccggagagaggttcggtgtggcctctaggagagaagttttcttggccacaggaaggcctggtggaggggtggtggttgtccactgtggctggacagatgcattcattcnnnnnnnnnnnnnnnnnnnnnnnnnnnnnnnnnggggagcagatacctgcagagaagagcaaccaggtc

SEQ ID NO: 31499 - DNA, 781 bp, Macaca Mulatta
  misc_feature (1)...(781): n = A,T,C or G
ataagaaacattaacgtaaaggtacagaaaatcttggagttgctgcagacaaagccacnagtccccacctcaataaatgggagaacattgtggcagccaaagctaaagcttggaagacggggctgcatctgctaatgaagacgggaaatgacccccctccagcctagtgtgaacctgcccctcgtcccacatatagaaaacctcgagtcatggtgaatgagtgtgtcggagctgctcnnnnnnnnnnnnnnnnnnnnnnnnnnnnnnnnnnnnnnnnnnnnnnnnnnnnnnnnnnnnnnnnnnnnnnnnnnnnnnnnnnnattttgcaaagggtggacatttcagtgtatcccccagaaaggtgatgaatgaatagaactgagagtcacagtgagtgtggcgtgcacatctgtgtcacatgacatacgtgagtctcagcatgtcacggtgggtggctgtgtctgaggacctccaggtgtcactctgagtgtgggtgttggtgacatgcattgcacgggcctgtctccctgtttgtgtaaacgtacccgagtgtactgtggcgtgttttgtgtctacacatgtcatgatgggggagatgtatctctgcacatgtgggtgtcaccgtgtgtgccctgtcactgtgcctgggtgaacggctgtgtcattataagtgtgccaagttatgtcaccctgtgtgctcagggcacatgcacacagacagtcatttatctctgcactcacattttgtgactcatgaagataaataaagtcaagggaaaac

SEQ ID NO: 31500 - DNA, 800 bp, Macaca Mulatta
  misc_feature (1)...(800): n = A,T,C or G
aggaagcctcgaggcattcactgggacttgaccacaactccccaccctcccaaaccggggggtatggcctggagtatcagcagccattttttgaggacccgacaggggccggtgacctcctggatgaggaggaggatgaggacactggatggagtggggcctacctgccgtccgccatcgagcagactcaccccgagcgggtccgtgccggcacatcgccctgcagcacatacctttcctttttctccaccccgtcggagctggcagggcctgagtctctgcccccatgggcattgagtgacactgattctcgcgtgtctccggcctctccggcagggagtcctagcgcagactttgcggctcatggagagtctctgggagacaggcacctgcggacgctgcagataagttacgnnnnnnnnnnnnnnnnnnnnnnnnnnnnnnnnnnnnnnnnnnnnnnnnnnnnnnnnnnnnnnnnnnnnnnnnnnnnnnnnnnnnnnnnnnnnnnnnnnnnnnnnnnnnnnnnnnnnnnnnnnnnnnnnnnnnnnnnnnnnnnnnnnnnnnnnnnnnnnnnnnnnnnnnnnnnnnnnnnnnnnnnnnnnnnnnnnnnnnnnnnnnnnnnnnnnnnnnnnnnnnnnnnnnnnnnnnnnnnnnnnnnnnnnnccaggcgcaggtctccaacttccagcgagagaatgaagccctgcggtgcggccagggcgccagcctgactgtggtgaagcagaacgccgacgtggccttgcagaacctccgggtggtcatgaacggcgcacaggctt

SEQ ID NO: 31501 - DNA, 949 bp, Macaca Mulatta
  misc_feature (1)...(949): n = A,T,C or G
cagcctgttcccaccacctggccagactgcatgcttcccctgctcccattaaagctgctacaactggattccttggctcttctggcaaaccgaagacactaccgggagctgccctggtctgagcagcagnnnnnnnnnnnnnnnnnnnnnnnnnnnnnnnnnnnnnnnnnnnnnnnnnnnnnnnnnnnnnnnnnnnnnnnnnnnnnnnnnnnnnnnnnnnnnnnnnnnnnnnnnnnnnnnnnnnnnnnnnnnnnnnnnnnnnnnnnnnnnnnnnnnnnnnnnnnnnnnnnnnnnnnnnnnnnnnnnnnnnnnnnnnnnnnnnnnnnnnnnnnnnnnnnnnnnnnnnnnnnnnnnnnnnnnnnnnnnnnnnnnnnnnnnnnnnnnnnnnnnnnnnnnnnnnnnnnnnnnnnnnnnnnnnnnnnnnnnnnnnnnnnnnnnnnnnnnnnnnnnnnnnnnnnnnnnnnnnnnnnnnnnnnnnnnnnnnnnnnnnnnnnnnnnnnnnnnnnnnnnnnnnnnnnnnnnnnnnnnnnnnnnnnnnnnnnnnnnnnnnnnnnnnnnnnnnnnnnnnnnnnnnnnnnnctcaggggaagtgctggagaccttagaccctttggttggattcctggggatagagagcacacgacagatccccctacagatcctgctgtcccatctcagtcatctgcaaggtttctgcctaggagagacatttgccacagagctgggatggctgctattgcaggagtctgttcttgggnnnnnnnnnnnnnnnnnnnnnnnnnnnnnnnnnnnnnnnnnnnnnnnnnnnnnnnnnnnnnnnnnnnnnnnnnnnnnnnnnnnnnnnnnggaggccttgggtccagagaccctggagcggcttctagaaaagcagcagagctgggagcagagcagagttggacagctgtttagggggccatagctggctgcc

SEQ ID NO: 31502 - DNA, 198 bp, Macaca Mulatta
ggtcacctgggaagagtctgcagagcctttgcccgccagcgccttggctctttgggttcctgagttactccgcttgtttgcgatcgcggcggccgggaaagagaacccaaggcgctcagcgcctcctaggtctctacctcatccgtaggtgtggccctgatggtgcggcaggctctggactcctaaagctctggagcg

SEQ ID NO: 31503 - DNA, 3031 bp, Macaca Mulatta
  misc_feature (1)...(3031): n = A,T,C or G
gattctcttattagtaacttgctgcgtctcatacaaaccatgcggcctccagtgaagccttccactagcaaagnnaagatccagttgttaaacctaaaacagaaaaagaaaaactgaaggaactcttcccagtcctttgccaaccggacaacccttctgttcgnnnnnnnnnnnnnnnnnnnnnnnnnnnnnnnnnnnnnnnnnnnnnnnnnnnnnnnnnnnnnnnnnnnnnnnnnnnnnnnnnnnnnnnnnnnnnnnnnnnnnnnnnnnnnnnnnnnnnnnnnnnnnnnnnnnnnnnnnnnnnnnnnnnnnnnnnnnnnnnnnnnnnnnnnnnnnnnagggaacgaaaccgagagagagaccacaagcggagacaccgatcccgctctcgatcacgttccaggacccgggagaggaataaagcaaagtctagatatcggtccaggagcaggagtcagagtccccccaaagaccggaaggaccgggacaaatatggagagcggaatctggatagatggcgggataagcatgtggaccgccctcctccagaagagcccaccattggtgacatttataatggcaaagttaccagcatcatgcagtttggttgctttgtgcagctggaaggacnnnnnnnnnnnnnnnnnnnnnnnnnnnnnnnnnnnnnnnnnnnnnnnnnnnnnnnnnnnnnnnnnnnnnnnnnnnnnnnnnnnnnnnnnnnnnnnnnnnnnnnnnnnnnnnnnnnnnnnnnnnnnnnnnnnnnnnnnnnnnnnnnnnnnnnnnnnnnnnnnnnnnnnnnnnnnnnnnnnnnnnnnnnnnnnnnnnnnnnnnnnnnnnnnnnnnnnnnnnnnnnnnnnnnnnnnnnnnnnnnnnnnnnnnnnnnnnnnnnnnnnnnnnnnnnnnnnnnnnnnnnnnnnnnnnnnnnnnnnnnnnnnnnnnnnnnnnnnnnnnnnnnnnnnnnnnnnnnnnnnnnnnnnnnnnnnnnnnnnnnnnnnnnnnnnnnnnnnnnnnnnnnnnnnnnnnnnnnnnnnnnnnnnnnnnnnnnnnnnnnnnnnnnnnnnnnnnnnnnnnnnnnnnnnnnnnnnnnnnnnnnnnnnnnnnnnnnnnnnnnnnnnnnnnnnnnnnnnnnnnnnnnnnnnnnnnnnnnnnnnnnnnnnnnnnnnnnnnnnnnnnnnnnnnnnnnnnnnnnnnnnnnnnnnnnnnnnnnnnnnnnnnnnnnnnnnnnnnnnnnnnnnnnnnnnnnnnnnnnnnnnnnnnnnnnnnnnnnnnnnnnnnnnnnnnnnnnnnnnnnnnnnnnnnnnnnnnnnnnnnnnnnnnnnnnnnnnnnnnnnnnnnnnnnnnnnnnnnnnnnnnnnnnnnnnnnnnnnnnnnnnnnnnnnnnnnnnnnnnnnnnnnnnnnnnnnnnnnnnnnnnnnnnnnnnnnnnnnnnnnnnnnnnnnnnnnnnnnnnnnnnnnnnnnnnnnnnnnnnnnnnnnnnnnnnnnnnnnnnnnnnnncaggccgtccatgacaatcagatcctgattgttattggtgagacaggatctggaaagacaacgcagatcacccagtacctggcagaggcaggctacacttccaggggcaagattgggtgtacccagcccagaagagtggcagctatgtcagtggccaaaagagtgtcggaggagtttggttgttgcttaggccaagaggnnnnnnnnnnnnnnnnnnnnnnnnnnnnnnnnnnnnnnnnnnnnnnnnnnnnnnnnnnnnnnnnnnnnnnnnnnnnnnnnnnnnnnnnnnnnnnnnnnnnnnnnnnnnnnnnnnnnnnnnnnnnnnnnnnnnnnnnnnnnnnnnnnnnnnnnnnnnnnnnnnnnnnnnnnnnnnnnnnnnnnnnnnnnnnnnnnnnnnnnnnnnnnnnnnnnnnnnnnnnnnnnnnnnnnnnnnnnnnnnnnnnnnnnnnnnnnnnnnnnnnnnnnnnnnnnnnnnnnnnnnnnnnnnnnnnnnnnnnnnnnnnnnnnnnnnnnnnnnnnnnnnnnnnnnnnnnnnnnnnnnnnnnnnnnnnnnnnnnnnnnnnnnnnnnnnnnnnnnnnnnnnnnnnnnnnnnnnnnnnnnnnnnnnnnnnnnnnnnnnnnnnnnnnnnnnnnnnnnnnnnnnnnnnnnnnnnnnnnnnnnnnnnnnnnnnnnnnnnnnnnnnnnnnnnnnnnnnnnnnnnnnnnnnnnnnnnnnnnnnnnnnnnnnnnnnnnnnnnnnnnnnnnnnnnnnnnnnnnnnnnnnnnnnnnnnnnnnnnnnnnnnnnnnnnnnnnnnnnnnnnnnnnnnnnnnnnnnnnnnnnnnnnnnnnnnnnnnnnnnnnnnnnnnnnnnnnnnnnnnnnnnnnnnnnnnnnnnnnnnnnnnnnnnnnnnnnnnnnnnnnnnnnnnnnnnnnnnnnnnnnnnnnnnnnnnnnnnnnnnnnnnnnnnnnnnnnnnnnnnnnnnnnnnnnnnnnnnnnnnnnnnnnnnnnnnnnnnnnnnnnnnnnnnnnnnnnnnnnnnnnnnnnnnnnnnnnnnnnnnnnnnnnnnnnnnnnnnnnnnnnnnnnnnnnnnnnnnnnnnnnnnnnnnnnnnnnnnnnnnnnnnnnnnnnnnnnnnnnnnnnnnnnnnnnnnnnnnnnnnnnnnnnnnnnnnnnnnnnnnnnnnnnnnnnnnnnnnnnnnnnnnnnnnnnnnnnnnnnnnnnnnnnnnnnnnnnnnnnnnnnnnnnnnnnnnnnnnnnnnnnnnnnnnnnnnnnnnnnnnnnnnnnnnnnnnnnnnnnnnnnnnnnnnnnnnnnnnnnnnnnnnnnnnnnnnnnnnnnnnnnnnnnnnnnnnnnnnnnnggataaacaagcccttgcagatcagaagaaggccaaattccaccagactgaaggggaccacctcaccctgctagctgtgtacaactcctggaagaacaacaagttctccaacccatggtgctatgagaactttatccaggctcgttccctgcgccgggcccaggacattcgcaagcagatgttaggcataatggacag

SEQ ID NO: 31504 - DNA, 191 bp, Macaca Mulatta
aggtggataataatgtcacgaggcatttggataaagtattaaaaagaggagattgggacatgttaatcctccactacctggggctggaccacattggccacatttcagggcccaacagccccctgattgggcacaagctgagcgagatggacagcgtgctgatgaagatccacacctcgctgcagtcgaag

SEQ ID NO: 31505 - DNA, 1438 bp, Macaca Mulatta
  misc_feature (1)...(1438): n = A,T,C or G
ttatgaggctggtaaatttttcaggaaactaaataacaggttaatgaggggttttaactttaagtggtgttaactttaatggggagaaaacactttgtaaaggccaaccaacgcccactggggcagagatatatatctggggtaaggagctgcttctctgctttggggtgtctggtctcagagacctatcaattgcatctgagttgcaggggccatggcttccaaatgcctcaaggcgggcttctcttctgggtctctcaagagcccaggaggggccagtgggggctccactcgtgtgtctgcaatgtactccagcagctcttgcaagctcccgagtctgtcccgtggggccagaagtttctctgcctgctcagcgggtctgggcagaagcagctacagggctaccagttgcctccctactctctgcctccccgccggaggcttcactaccagctacagcgtgggtgggggctggtttggggagggcatcctcactggcaatgagaaggagaccatgcaatccctgaacgaccgcttggccagctacctggagaaggtgcgtcagctggagcaggacaatgccagcctggagagccgcatccgtgagtggtgtgagcagcaggtcccctacatgtgccccgactaccagtcctacttccggaccattgaggaactccagaagaagnnnnnnnnnnnnnnnnnnnnnnnnnnnnnnnnnnnnnnnnnnnnnnnnnnnnnnnnnnnnnnnnnnnnnnnnnnnnnnnnnnngtatgagacggaggtgtccctgcggcagctggtggagtcggacatcaatggcctgcgcaggatcctggatgacctgaccctgtgcaagtctgacctggaggcccaggtggagtccctgaaggaggagctgctctgcctgaaaaagaaccatgaggagnnaggaagtgaactcactgcgctgccagcttggtgaccggctcaatgttgaggtggacgctgccccacctgttgacctgaaccgagttctggatgaaatgaggtgccagtacgaaaccctcgtggagaataaccgccaagatgccgaagactggttnnnnnnnnnnnnnnnnnnnnnnnnnnnnnnnnnnnnnnnnnnnnnnnnnnnnnnnnnnnnnnnnnnnnnnnnnnnnnnnnnnnnnnnnnnnnnnnnnnnnnnnnnnnnnnnnnnnnnnnnnnnnnnnnnnnnnnagagatgctttggaatccaccctggcagagacggaggcccgctatagctcccaactggcccagatgcagtgcatgattaccaacgtggagacccagctggccgagatccgggctgacctggagcggcagaaccaggagtaccaggtgctgctgttttgtccgggcccggctagagtgtgagatcaacacataccggggcctgctggagagtgaggacagcaag

SEQ ID NO: 31506 - DNA, 702 bp, Macaca Mulatta
  misc_feature (1)...(702): n = A,T,C or G
ggtgtgtagggcagctttagagtcccctagaaagagcatcatctttgagccttatccctctgtggtggaccccactgatcccaagactctggcctttaaccctaagaagaagaattatgagcggcttcagaaagctctggatagtgtgatgtccattcgggagatgacccagggctcatatttggaaatcaagaaacagatggacaagttggatcccctggcccatcctctcctgcagtggatcatctctagcaacaggtcacacattgtcaaactacctctcagcaggtgggtcccacattgaaaactggcattcgatcctgcgcaatgggctggtcaatgcatcctacaccaaactgcaggaatgggaaaaggacagcacaggatgccctccaaggatgagctggtccagagatataacaggatgaataccatcccccagacccgatccattcagtcaaggttcctgcagagtcggaatctaaactgtatagcactttgtgaagtgattacatctaaagacctccagaagcatgggaacatctggggtgtgcccctgtatccgaccatgtctgcacaaggttctttcttttgtaaatgaggatggttcaggtggggcgatgccaacatttaatactccgggacccccaggattacgaaagaaaatcctgccntgtgaatcggaaactccaggttttacac

SEQ ID NO: 31507 - DNA, 616 bp, Macaca Mulatta
gagattaaattcgtgagccaaaactgttgtgtttttaatggggtgttaactaaatgggcttgagccaatgataatgaactttacattgaaaatttgccttctcttacagcctgctgatcttaagaagagaatagaatctttaattgaccgggactacatggaaagagataaagaaaatccaaaccagtacaactatattgcatagaatgttgcagcatttggtgtcatatgcagtagccagtggataaactaacctgttgattcaatattatttgactccttttttactaccgatgaccaaatgaagcagtgtaattaatggaaatagttgagtggactttttctcagtggttaacatgcccattttaaagagtaatacttacctttaagaagaatgttgttgaactctttgcatgttatttagtatgatgtgcagaaaacacttaagaacgtacctggtcttcatgaattcctctttggaactgggaaagagatccctgtggctattaaaaatgggggagggttcttatataccattaattatgaagcaaaaggtttatttgcttaaaatgtcatttaaagatacctaaactgcatgcaaactttatttactgta

SEQ ID NO: 31508 - DNA, 723 bp, Macaca Mulatta
ggcccatcctgaggcccctctcttgtcctcagtggtggttctggcggggctgttcgtgatggtgttgatcctcttcctgggagcctccatggtctacctgatccgggtggcacggaggaaccaggagcgtgccctgcgcactgtctggagctccggagacgacaaggagcagctggtgaagaacacatatgtcctgtgaccgccctgtcaccaagaggactggggaaggaaggggagactatgtgcgtgctttttttaaatagagcgattgacttggatttgtgcgatcattagggctgaggtctgtttctctgggaggtaggacggctgctttctggtctggcaggggtggatttgctttggatattctctaggaggctcctccttgcatggccggtggtctggcagcagccccgagttgtttcctcgctgatagatttcttccctccaggtagagttttctttgcttatattgaattccattgcctgttttctcatcacaaaagtgatgttagaaccatttcttttgtttgtctgatttatgggttttttaagtataaacgaatgttttttattagcattctgaaagaaggaaagtaaaatgtacaagtttaataaaaggggatcttcccctttaaaataaatttcagcatgtactttctttatgggagtcccaatttcagccctaccaaaacgattacaagacattatctgaggtgtccc

SEQ ID NO: 31509 - DNA, 354 bp, Macaca Mulatta
gggcagcccttacctggcaggtccgggcgcacctctggcaggtggactccgtggggctccacgagccagaagcctctggaaggcaacaaaggcagtgcggctcccacttgccctgagtccagtccccgccctcaaacccagcccaggtgccttcagctacttcggcttctcacaccctgcagtgttaaacagaggcattgagaaaggggaaaggcgggtacttttaaaagccaaagattgacgcggttacttgagggtagggaggtgggcccaatgcaggaggctgcatccctgcgctgccggcgcccaccgggggctgcgcctgtggagagccggagggaagctggctgcccc

SEQ ID NO: 31510 - DNA, 364 bp, Macaca Mulatta
atcgctcctgagccccaaggagccctgagggtgaggactgaggcactgagggtccctccctgtactcctcaggctcctgggtggcctgttatgccagcggcccctgttccctgcagtctgtgctctgtatctgggcctgtctcggagctggcctggcagcactgcacttgccatgctggaaaccagcccaggcctcccagggaaaggcccagccacttccagcttttgatctttgggccagaggccaccttacacacaccccaggtgtccatggggagcactggattgccctcctactatgagcatccttcatctgggcagaaccccaccctgcagatgcttctaataaaaagcgcttctcatc

SEQ ID NO: 31511 - DNA, 309 bp, Macaca Mulatta
ttgttgaggttttaaagttagttatatttaagtgccaattttcgaagtatagctggggaagaaagtcaagcagttgttacatgtttctggcactgtaaatccaactgctgaacacaagaccttcttatgcaacaacctttaatccgtgaaccgtaaataagtttagtttatcggttttggcccaattcttgagaaaagtgagaatttgaatccttgagtagaaatatgtagctactcagtacaacaaagaatgatcacaacaaagactaacttaccctttgttactgaacgtgggtcagagctttaccg

SEQ ID NO: 31512 - DNA, 790 bp, Macaca Mulatta
ggggggcattaagatgagttaaagaatggaatgcttgtgcatcagcaaagactgcagacaccagtgcatctgccctttgattgtttaaaggacgaaaagaggcaggttaaccatgaaactgaagcttcaagatgactttacttgccctatgcaacgcggccggtgatttattttctctggggactactgtcaaccaggaactcactctgtcacccagcctgcagtgcagtggcacaatcacagctcactgcagcctcaaccttccaggctcaagtgatcctcctgcttcagcctcccaaggagctgggacaacaggcacacgggaagttggtgcttcctcatctctaaaagtcagttacaaccatctggcttgcattgaccaatgaagtgggaacagaagcaatacgtgtcacttcaggcagaagcacggaagagctagggtgggattctccatgctgtcttcccttgccaaggtgaatcttgaagccacacattgagctgacaacaatgaaggataatagtctccagcaacttccattctaggatgacaacgaaagcaagggtgacttgcgtgagcaacaaagaaaccttggagtacttttctgagtcccagagtgacactgcacagtgaagggtgaacttcgtcgtaatcccctatgaaattaaaagacggttgacctggaaaaccaccaggtccagggaagaactgccgtttctccttcccatggcccaatgggaggtttaacccctttggatggtttcctggaacaaccctaattttccaaaaaaa

SEQ ID NO: 31513 - DNA, 614 bp, Macaca Mulatta
  misc_feature (1)...(614): n = A,T,C or G
ctgaccacacagcgtggattctggactgtgcatttgaaggctggaggctgcctctctgccagcatggtgcccccaactttctctttgtagaccgcacagtacagcaagtggggagttgtctggctataggcatgcagaatgtttcctttttttgatgctcagggtggatcccacatctatactttcaggagagtctctgctgaggagcccctgagcccttttttggctccttcagttacacctaacagtgatcagggtgtcnnnnnnnnnnnnnnnnnnnnnnnnnnnnnnnnnnnnnnnnnnnnnnnnnnnnnnnnnnnnnnnnnnnnnnnnnnnnnnnnnnnnnnnnnnnnnnnnnnnnnnnnnnnnnnnnnnnnnnnnnnnnnnnnnnnnnnnnnnnnnnnnnnnnnnnnnnnnnnnnnnnnnnnnnnnnnnnnnnnnnnnnnnnnnnnnnnnnnnnnnnnnnnnnnnnnnnnnnnnnnnnnnnnnnnnnnnnnnnnnnnnnnnnnnnnnnnnnnnnnnnnnnnnnnnnnnngtttcctatataaatgtcctatttctgggatccatttccaaatgctttcctttttatttctgtaagttcaaattaatgt

SEQ ID NO: 31514 - DNA, 2239 bp, Macaca Mulatta
  misc_feature (1)...(2239): n = A,T,C or G
acagagaaagtggagtgagcaaggacacatttccccagtacatccacagcatgctgtccacatctcgttctcgatttatcagaaataccaatgggagcggtgaagaagtcaccaccttttttgattatgattatggtgctccctgtcataaatttgacgtgaagcaaatcggggcccaactgctgcctccgctctactcgctggtgttcatctttggttttgtgggcaacatgctggtcgtcctcatcttaataaactgcaaaaagctgaagagcttgactgacatctacctgctcaacctggccatctctgatctgctttttcttattactctcccactgtgggctcactctgctgcaaatgagtgggtctttgggaatgcaatgtgcaaattattcacagggctgtatcacattggttattttggcggaatcttcttcatcatcctcctgacaatcgatagatacctggcaatcgtccatgctgtgtttgctttaaaagccaggacggtcacctttggggtggtgacaagtgtgatcacctggttggtggctgtgtttgcttctgtcccaggaatcatctttactaaatgccaggaagaagattctgtttatatctgcggcccttattttccacgaggatggaataatttccacacaataatgaggaacattttggggctggtcctgccgctgctcatcatggtcatctgctactcaggaatcctgaaaaccctgcttcggtgtcgaaacgagaagaagaggcacagggctgtgaggctcatcttcaccatcatgattgtttactttctcttctggactccctataatattgtcattgaactgaacaccttccaggaattcttcggcctgagtaactgtgaaagcaccaggcaactggaccaagccacacaggtgacggagactcttgggatgacacactgctgcatcaaccccatcatctacgcgttcgtgggtgagaagttcagaanctttatcacatagttcttggctgtaggattgccccactccaaaaaccagtgtgtggaggtccaggagcgagaccaggaaagaatgtgaaagaaactacacaaggactccttgatggtcgtggaaaaggaaagtcaaatggcagagcccctgaagccagtcttcagggcagagaaggagcctannnnnnnnnnnnnnnnnnnnnnnnnnnnnnnnnnnnnnnnnnnnnnnnnnnnnnnnnnnnnnnnnnnnnnnnnnnnnnnnnnnnnnnnnnnnnnnnnnnnnnnnnnnnnnnnnnnnnnnnnnnnnnnnnnnnnnnnnnnnnnnnnnnnnnnnnnnnnnnnnnnnnnnnnnnnnnnnnnnnnnnnnnnnnnnnnnnnnnnnnnnnnnnnnnnnnnnnnnnnnnnnnnnnnnnnnnnnnnnnnnnnnnnnnnnnnnnnnnnnnnnnnnnnnnnnnnnnnnnnnnnnnnnnnnnnnnnnnnnnnnnnnnnnnnnnnnnnnnnnnnnnnnnnnnnnnnnnnnnnnnnnnnnnnnnnnnnnnnnnnnnnnnnnnnnnnnnnnnnnnnnnnnnnnnnnnnnnnnnnnnnnnnnnnnnnnnnnnnnnnnnnnnnnnnnnnnnnnnnnnnnnnnnnnnnnnnnnnnnnnnnnnnnnnnnnnnnnnnnnnnnnnnnnnnnnnnnnnnnnnnnnnnnnnnnnnnnnnnnnnnnnnnnnnnnnnnnnnnnnnnnnnnnnnnnnnnnnnnnnnnnnnnnnnnnnnnnnnnnnnnnnnnnnnnnnnnnnnnnnnnnnnnnnnnnnnnnnnnnnnnnnnnnnnnnnnnnnnnnnnnnnnnnnnnnnnnnnnnnnnnnnnnnnnnnnnnnnnnnnnnnnnnnnnnnnnnnnnnnnnnnnnnnnnnnnnnnnnnnnnnnnnnnnnnnnnnnnnnnnnnnnnnnnnnnntagtcgagccaagttaagaatgttcttatgttgcccagtgtgtttttgatctgatgccagcaagaaacactgggcttctagaaccaggcaacttggaactcgatgcccaagctggactgtggctctactttcaggccacatggctaaagaaggtttcagaaagaagtgggaaccgagcagaactttcaccttcatatatttgtattatcctaatgaatgcataaaattttaatttgatggtgatgaaatgtaaatactgtttttaaaagctatgatttggaaaataaatcaatgctctaactatgttgataaaa

SEQ ID NO: 31515 - DNA, 350 bp, Macaca Mulatta
  misc_feature (1)...(350): n = A,T,C or G
ccacggtgtgaacacatgaatagaagaagaaaatttcttctagcctcagtacttgctctccagaattcaagttttatatatccatcatgtcagaagtgcttctctaggataatcctggtctccaaaaggnnnnnnnnnnnnnnnnnnnnnnnnnnnnnnnnnnnnnnnnnnnnnnnnnnnnnnnnnnnnnnnnnnnnnnnnnnnnnnnnnnnnnnnnnnnnnnnnnnnnnnnnnnnnnnnnnnnnnnnnnnnnnnnnnnnnnnnnnnnnnnnnnnnnnnnnnnnnnnaggtacattcaggatcctaataaaattccagaaacaatcgacaatgatacaactcagaatcta

SEQ ID NO: 31516 - DNA, 372 bp, Macaca Mulatta
  misc_feature (1)...(372): n = A,T,C or G
atgatacaagcaatacaagtcctaaggtttcatcttttggagttagaaaaggtnnnnnnnnnnnnnnnnnnnnnnnnnnnnnnnnnnnnnnnnnnnnnnnnnnnnnnnnnnnnnnnnnnnnnnnnnnnnnnnnnnnnnnnnnnnnnnnnnnnnnnnnnnnnnnnnnnnnnnnnnnnnnnnnnnnnnnnnnnnnnnnnnnnnnnnnnnnnnnnnnnnnnnnnnnnnnnnnnnnnnnnnnnnnnnnnnnnnnnnnnnnnnnnnnnnnnnnnnnnnnnnnnnnnnnnnnnnnnnnnnnnnnnnnnnnnnnnnnnnnnggggatggtttagacaacagtgtagcttcacctggtacaggtgacgatgatgatccgg

SEQ ID NO: 31517 - DNA, 808 bp, Macaca Mulatta
  misc_feature (1)...(808): n = A,T,C or G
gggggatcatgctaccatgacagaagtaaaatctctaaattttaatatgtctgttagtagtatggaatatattcctgagggagagattttggttataacttatggacgatctattgcttttcatagtgcagtaagtttggacccaattaaatcctttgaagctcctgcaaccatcaattctgcatctcttcatcctgagaaagaatttcttgttgcaggtggtgaagattttaaactttataagtatgattataatagtggagaagaattagaatcctacaagggacacttcggtcctattcattgtgtaagatttagtcctgatggagaactctatgccagtggttcagaagatggaacattgagactatggcaaactgtggtaagaaagacgtatggcctttggaaatgtgtgcttcctgaaaaagaaattgggtgagctggcaaagcccaaagattggtttttcccgaaaacaaccgaagaaggagatagaaaaaatttgctttccaaaaaattccgaaattgcattccatccccttcagcctcctggaaggttaaagggcctgaaacgttcaatcctattgcccacaagttttgttattacaaccggaatcttaaacgaagcnnnnnnnnnnnnnnnnnntccgccccttctccaaaaattattctcccggctttaaggggaaaaaaacgccctttaaaacaaggggggaaaatggaatttttttcccccggggcctgggaaaaacaccttataaaacctgtggggggttacccagggaaagtgaaaaacctctcggggttgtt

SEQ ID NO: 31518 - DNA, 120 bp, Macaca Mulatta
ccacaggcctccccaaggctgctcggatcagtcatgtgaagatcctgcaatgccagggcttctaccagctgtgcggtctccaccaggaagatgtgatctacctcgccctcccactctacc

SEQ ID NO: 31519 - DNA, 162 bp, Macaca Mulatta
taccacctcctgctggtggcacagaagaagtggccacaatccgggtgtcaggagttggaaataacatcagctttgaggagaagaaaaaggttctaattcagagacaggggagtggcaccttcgtacagactgacaaacctatctacaccccagggcagcaag

SEQ ID NO: 31520 - DNA, 2568 bp, Macaca Mulatta
  misc_feature (1)...(2568): n = A,T,C or G
atcttgtagaaaatttcagctgtaccccttggactagaagctgaaataatagaagctgtatatgatgcattagggtattgaagaaaattagcttttgaattaaatatttggaatataaggaaataaggaaaggtgactgaaaatggggcggaagaaaatacaaatcacacgcataatggatgaaaggaaccgacaggnnnnnnnnnnnnnnnnnnnnnnnnnnnnnnnnnnnnnnnnnnnnnnnnnnnnnnnnnnnnnnnnnnnnnnnnnnnnnnnnnnnnnnnnnnnnnnnnnnnnnnnnnnnnnnnnnnnnnnnnnnnnnnnnnnnnnnnnnnnnnnnnnnnnnnnnnnnnnnnnnnnnnnnnnnnnnnnnnnnnnnnnnnnnnnnnnnnnnnnnnnnnnnnnnnnnnnnnnnnnnnnnnnnnnnnnnnnnnnnnnnnnnnnnnnnnnnnnnnnnnnnnnnnnnnnnnnnnnnnnnnnnnnnnnnnnnnnnnnnnnnnnnnnnnnnnnnnnnnnnnnnnnnnnnnnnnnnnnnnnctggtttgccacctcagaacttttcaatgtctgtcacagttccagtgaccagccccaatgctttgtcctacactaacccagggagttcattggtgtccccatctttggcagccagctcaacgttaacggactcaagcatgctgtctccacctcaaaccacgttacatagaaatgtgtctcctnnnnnnnnnnnnnnnnnnnnnnnnnnnnnnnnnnnnnnnnnnnnnnnnnnnnnnnnnnnnnnnnnnnnnnnnnnnnnnnnnnnnnnnnnnnnnnnnnnnnnnnnnnnnnnnnnnnnnnnnnnnnnnnnnnnnnnnnnnnnnnnnnnnnnnnnnnnnnnnnnnnnnnnnnnnnnnnnnnnnnnnnnnnnnnnnnnnnnnnnnnnnnnnnnnnnnnnnnnnnnnnnnnnnnnnnnnnnnnnnnnnnnnnnnnnnnnnnnnnnnnnnnnnnnnnnnnnnnnnnnnnnnnnnnnnnnnnnnnnnnnnnnnnnnnnnnnnnnnnnnnnnnnnnnnnnnnnnnnnnnnnnnnnnnnnnnnnnnnnnnnnnnnnnnnnnnnnnnnnnnnnnnnnnnnnnnnnnnnnnnnnnnnnnnnnnnnnnnnnnnnnnnnnnnnnnnnnnnnnnnnnnattattcactgaccagcgctgacctgtcagctctgcaaggcttcaactcgccaggaatgttgtcactgggacaggtgtcggcctggcagcagcaccacctaggacaagcagccctcagctctcttgtnnnnnnnnnnnnnnnnnnnnnnnnnnnnnnnnnnnnnnnnnnnnnnnnnnnnnnnnnnnnnnnnnnnnnnnnnnnnnnnnnnnnnnnnnnnnnnnnnnnnnnnnnnnnnnnnnnnnnnnnnnnnnnnnnnnnnnnnnnnnnnnnnnnnnnnnnnnnnnnnnnnnnnnnnnnnnnnnnnnnnnnnnnnnnnnnnnnnnnnnnnnnaaatggggcgctcccctgtggacagtctgagcagctctagtagctcctatgatggcagtgatcgggaggatccacggggcgacttccattctccannnnnnnnnnnnnnnnnnnnnnnnnnnnnnnnnnnnnnnnnnnnnnnnnnnnnnnnnnnnnnnnnnnngcgtgggtgacctaaggcttccaggctgatgtttgtacttttgtgttactgcagtgaactgccctacatatctaaatcggtaaataaggacatgagttannnnnnnnnnnnnnnnnnnnnnnnnnnnnnnnnnnnnnnnnnnnnnnnnnnnnnnnnnnnnnnnnnnnnnnnnnnnnnnnnntacatacacagaatcaggcacttacctgcaaactccttgtaggtctgcagatgtgtgtcccatggcagacaaagcaccctgtaggcacagaccagtctggcacttcttggactacttgtttcataaagataaccagtttttgcagagaaacgtgtacccatatataattctcccacactagcttgcagaaacctagagggccccctacttgttttatttaactgtgcggtgactgtagttacttcagagaaaatgctttgtagaacagagcagtagaaaagcaggaaccaagaaagcaatactgtacataaaatgtcatttatattatccaacctggcatgggtgtctgttgcaaaggggtgcatgggaaagggctgttgatattannnnnnnnnnnnnnnnnnngccccacacataactgttttgcacgtgcaaaaatgtattgggtcaagaagtgatctttagctaataaagaaagagaatagaaaacacgcatgagatattcagaaaatactagcctagaaatatagagcattaacaaagtaaaattaatatattaagttataattggaatatgtcagaagtttctttttacattcatatcttaaaaattaaagaaactgattttagctcatgtatattttatatgaaagaaaacacccttatgaattgatgactatatataaaattatattcactactttgaacacattctgctatgaattattta

SEQ ID NO: 31521 - DNA, 727 bp, Macaca Mulatta
  misc_feature (1)...(727): n = A,T,C or G
cgccgctgagctcgccggccgcgcccgggctgggacgtcaaagcgggaagatgttttccgccctgaagaagctagtggggtcggagcaggccccgggccgggacaagaacatccccgccggcctgcagtccatgaaccaggcgttgcagaggcgcttcgccaagggggtgcagtacaacagnnnnnnnnnnnnnnnnnnnnnnnnnnnnnnnnnnnnnnnnnnnnnnnnnnnnnnnnnnnnnnnnnnnagctagtccaggaggacagtgaagatgtcgccttccttagtcccggccaccgtctggcctgtgagcaagaggaagctgcagaccacttgggccgccctcaccctgacaccttcagcagnncatacgaagacaaaggacattttgatgaagttcaaattggagtcagagtgctcatcggaaagaaggcgcagctaacacgtttaggaacagaaatggattatgttgaagacaaattatccattgtgtttgtgttcagtaacccaagcatcaaaggaacttgtggctggggagaaggcttgactatttgcaatctcaggattcctctggccggagctcccggactcctgtggaagcctgggggctcgctgaagaagtcacgtgactggaacctgcttagtgctctgctgtctggtaaggaaaataaagcggtacattttgaataaaaataaaagctcattttaaatgtgttataattgaaa

SEQ ID NO: 31522 - DNA, 1468 bp, Macaca Mulatta
  misc_feature (1)...(1468): n = A,T,C or G
aaggtgctggggatacgtcagaagtgatggatactcaggcgggctccgtggatgaagagaatggccgacagttgggtgaagtagagctgcaatgtgggatttgtacaaaatggttcacggctgacacatttggcatagatacctcnnnnnnnnnnnnnnnnnnnnnnnnnnnnnnnnnnnnnnnnnnnnnnnnnnnnnnnnnnnnnnnnnnnnnnnnnnnnnnnnnnnnnnnnnnnnnnnnnnnnnnnnnnnnnnnnnnnnnnnnnnnnnnnnnnnnnnnnnnnnnnnnnnnnnnnnnnnnnnnnnnnnnnnnnnnnnnnnnnnnnnnnnnnnnnnnnnnnnnnnnnnnnnnnnnnnnnnnnnnnnnnnnnnnnnnnnnnnnnnnnnnnnnnnnnnnnnnnnnnnnnnnnnnnnnnnnnnnnnngagtaaagaaagagatgtgttcttggtaaaggaacacccagatccagggagcaaagacccagaagaagattaccccaaatttggacttttggatcagnnnaggaccttagtaacattggtcctggttacgacaaccaaaaacagagcagtgctgggtctactagtgggaatctaaatggnnnnnnnnnnnnnnnnnnnnnnnnnnnnnnnnnnnnnnnnnnnnnnnnnnnnnnnnnnnnnnnnnnnnnnnnnnnnnnnnnnnnnnnnnnnnnnnnnnnnnnnnnnnnnnnnnnnnnnnnnnnnnnnnnnnnnnnnnnnnnnnnnnnnnnnnnnnnnnnnnnnnnnnnnnnnnnnnnnnnnnnnnnnnnnnnnnnnnnnnnnnnnnnnnnnnnnnnnnnnnnnnnnnnnnnnnnnnnnnnnnnnnnnnnnnnnnnnnnnnnnnnnnnnnnnnnnnnnnnnnnnnnnnnnnnnnnnnnnnnnnnnnnnnngctccccagttaaagatctcagatgaccggctaactgtggttggagagaaaggttactctatggtgagggcctctcatggagttcggaaaggtgcctggtactttgaaatcaccgtggatgagatgccaccagataccgctgccagactgggttggtcccagcccctaggnaaccttcaagctcctttaggttatgataaatttagctattcttggcggagcaaaaagggaaccaagttccaccagtccattggcaaacactactcttctggctatggacagggagacatcctgggattttatattaatcttcctgaagacacagagacggccaagtcattgccagatacatacaaagataaggnnnnnnnnnnnnnnnnnnnnnnnnnnnnnnnnnnnnnnnnnnnnnnnnnnnnnnnnnnnnnnnnnnnnnnnnnnnnnnnnnnnnnnnnnnagataatattttataaaaatggtgtcaatcaaggtgtggcttacaaagatatttttgagggggtttactttccagccatctcactgtacaagagctgcacgg

SEQ ID NO: 31523 - DNA, 174 bp, Macaca Mulatta
atcaaggatccattttgttggacaaagacggaaagagaaaacacacgagacccactttttccggacagcagatcttcgccctggagaagactttcgaacaaacaaaatacttggcggggcccgagagggctcgtttggcctattcgttggggatgacggagagtcaggtcaagg

SEQ ID NO: 31524 - DNA, 2052 bp, Macaca Mulatta
  misc_feature (1)...(2052): n = A,T,C or G
gctctccctatcattgtaaaatnnnnnnnnnnnnnnnnnnnnnnnnnnnnnnnnnnnnnnnnnnnnnnnnnnnnnnnnnnnnnnnnnnnnnnnnnnnnnnnnnnnnnnnnnnnnnnnnnnnnnnnnnnnnnnnnnnnnnnnnnnnnnnnnnnnnnnnnnnnnnnnnnnnnnnnnnnnnnnnnnnnnnnnnnnnnnnnnnnnnnnnnnnnnnnnnnnnnnnnnnnnnnnnnnnnnnnnnnnnnnnnnnnnnnnnnnnnnnnnnnnnnnnnnnnnnnnnnnnnnnnnnnnnnnnnnnnnnnnnnnnnnnnnnnnnnnnnnnnnnnnnnnnnnnnnnnnnnnnnnnnnnnnnnnnnnnnnnnnnnnnnnnnnnnnnnnnnnnnnnnnnnnnnnnnnnnnnnnnnnnnnnnnnnnnnnnnnnnnnnnnnnnnnnnnnnnnnnnnnnnnnnnnnnnnnnnnnnnnnnnnnnnnnnnnnnnnnnnnnnnnnnnnnnnnnnnnnnnnnnnnnnnnnnnnnnnnnnnnnnnnnnnnnnnnnnnnnnnnnnnnnnnnnnnnnnnnnnnnnnnnnnnnnnnnnnnnnnnnnnnnnnnnnnnnnnnnnnnnnnnnnnnnnnnnnnnnnnnnnnnnnnnnnnnnnnnnnnnnnnnnnnnnnnnnnnnnnnnnnnnnnnnnnnnnnnnnnnnnnnnnnnnnnnnnnnnnnnnnnnnnnnnnnnnnnnnnnnnnnnnnnnnnnnnnnnnnnnnnnnnnnnnnnnnnnnnnnnnnnnnnnnnnnnnnnnnnnnnnnnnnnnnnnnnnnnnnnnnnnnnnnnnnnnnnnnnnnnnnnnnnnnnnnnnnnnnnnnnnnnnnnnnnnnnnnnnnnnnnnnnnnnnnnnnnnnnnnnnnnnnnnnnnnnnnnnnnnnnnnnnnnnnnnnnnnnnnnnnnnnnnnnnnnnnnnnnnnnnnnnnnnnnnnnnnnnnnnnnnnnnnnnnnnnnnnnnnnnnnnnnnnnnnnnnnnnnnnnnnnnnnnnnnnnnnnnnnnnnnnnnnnnnnnnnnnnnnnnnnnnnnnnnnnnnnnnnnnnnnnnnnnnnnnnnnnnnnnnnnnnnnnnnnnnnnnnnnnnnnnnnnnnnnnnnnnnnnnnnnnnnnnnnnnnnnnnnnnnnnnnnnnnnnnnnnnnnnnnnnnnnnnnnnnnnnnnnnnnnnnnnnnnnnnnnnnnnnnnnnnnnnnnnnnnnnnnnnnnnnnnnnnnnnnnnnnnnnnnnnnnnnnnnnnnnnnnnnnnnnnnnnnnnnnnnnnnnnnnnnnnnnnnnnnnnnnnnnnnnnnnnnnnnnnnnnnnnnnnnnnnnnnnnnnnnnnnnnnnnnnnnnnnnnnnnnnnnnnnnnnnnnnnnnnnnnnnnnnnnnnnnnnnnnnnnnnnnnnnnnnnnnnnnnnnnnnnnnnnnnnnnnnnnnnnnnnnnnnnnnnnnnnnnaaagaacctagtttgttatgcttaaaattatcaagaattttttattcctttgtcatagacacaatttctcttctgtatgccactagttacatttctaaattctgagcggtctcagttaggcctgtatgtgtgtacatgtccaagtaaagctggaaaacgtcagtcttgatacagctgtgtcttagtatgagaaacagaagactgaagaataaaaactaaggaacaaaaatgagtctctttttggtggctaagtataatctgcctaaaaccattgtcataaaagcagttaaaggcaataaatttttaaaagggacatatcactgattcattcctaaaaagcatgaacaaaaaaattttgttctgttccagctatatcttgtctaagtgctaacactgtttcagtgaaaatatctagccataagattaaaaaaatatattatttgcaatgcttaagcctgcagatatgtaatgtgaccactgttttgtgttgacaatattgctttatacagttcttgtatttgaaaggaattgatccttttaaagaaacatggtgtatattgttcttacaggactaatttcagtggtgtaaataataaatatctttt

SEQ ID NO: 31525 - DNA, 2422 bp, Macaca Mulatta
  misc_feature (1)...(2422): n = A,T,C or G
gagcaagaggaagtagagaacctgaagagcatccggaagtatttgacttctaatactgcttatgggaaaactgggatccgagacgtccacctggaactgaaaaacctgaccatgtgtggacgcaaagggaacctgcacttcatccgctttcccagctgtgctatgcacaggttcattcagatgggcagcgagaaaaacttctctagccttcacaccaccctgtgtgctacaggaggtggagctttcaagtttgaagaggacttcagaatattgctgacctgcagctgcataaactggatgaactggactgtctgattcagggcctgctttatgtcgactctgttggcttcaacggcaagccagaatgttactattttgaaaatcccacaaatcctgaattgtcgtcaaaaaagccgtactgccttgataacccatatcctatgttgctggttaacnnnnnnnnnnnnnnnnnnnnnnnnnnnnnnnnnnnnnnnnnnnnnnnnnnnnnnnnnnnnnnnnnagtcttggaggtggaacattcctaggcctatgttgcttgctgactggttgtgagacctttgaagaagctctggaaatggcagctaaaggcgacagcaccaatgttgataagctggtgaaggacatttacggaggagactatgaacgatttggccttcaaggatctgctgtagcatcaagnnnnnnnnnnnnnnnnnnnnnnnnnnnnnnnnnnnnnnnnnnnnnnnnnnnnnnnnnnnnnnnnnnnnnnnnnnnnnnnnnnnnnnnnnnnnnnnnnnnnnnnnnnnnnnnnnnnnnnnnnnnnnnnnnnnnnnnnnnnnnnnnnnnnnnnnnnnnnnnnnnnnnnnnnnnnnnnnnnnnnnnnnnnnnnnnnnnnnnnnnnnnnnnnnnnnnnnnnnnnnnnnnnnnnnnnnnnnnnnnnnnnnnnnnnnnnnnnnnnnnnnnnnnnnnnnnnnnnnnnnnnnnnnnnnnnnnnnnnnnnnnnnnnnnnnnnnnnnnnnnnnnnnnnnnnnnnnnnnnnnnnnnnnnnnnnnnnnnnnnnnnnnnnnnnnnnnnnnnnnnnnnnnnnnnnnnnnnnnnnnnnnnnnnnnnnnnnnnnnnnnnnnnnnnnnnnnnnnnnnnnnnnnnnnnnnnnnnnnnnnnnnnnnnnnnnnnnnnnnnnnnnnnnnnnnnnnnnnnnnnnnnnnnnnnnnnnnnnnnnnnnnnnnnnnnnnnnnnnnnnnnnnnnnnnnnnnnnnnnnnnnnnnnnnnnnnnnnnnnnnnnnnnnnnnnnnnnnnnnnnnnnnnnnnnnnnnnnnnnnnnnnnnnnnnnnnnnnnnnnnnnnnnnnnnnnnnnnnnnnnnnnnnnnnnnnnnnnnnnnnnnnnnnnnnnnnnnnnnnnnnnnnnnnnnnnnnnnnnnnnnnnnnnnnnnnnnnnnnnnnnnnnnnnnnnnnnnnnnnnnnnnnnnnnnnnnnnnnnnnnnnnnnnnnnnnnnnnnnnnnnnnnnnnnnnnnnnnnnnnnnnnnnnnnnnnnnnnnnnnnnnnnnnnnnnnnnnnnnnnnnnnnnnnnnnnnnnnnnnnnnnnnnnnnnnnnnnnnnnnnnnnnnnnnnnnnnnnnnnnnnnnnnnnnnnnnnnnnnnnnnnnnnnnnnnnnnnnnnnnnnnnnnnnnnnnnnnnnnnnnnnnnnnnnnnnnnnnnnnnnnnnnnnnnnnnnnnnnnnnnnnnnnnnnnnnnnnnnnnnnnnnnnnnnnnnnnnnnnnnnnnnnnnnnnnnnnnnnnnnnnnnnnnnnnnnnnnnnnnnnnnnnnnnnnnnnnnnnnnnnnnnnnnnnnnnnnnnnnnnnnnnnnnnnnnnnnnnnnnnnnnnnnnnnnnnnnnnnnnnnnnnnnnnnnnnnnnnnnnnnnnnnnnnnnnnnnnnnnnnnnnnnnnnnnnnnnnnnnnnnnnnnnnnnnnnnnnnnnnnnnnnnnnnnnnnnnnnnnnnnnnnnnnnnnnnnnnnnnnnnnnnnnnnnnnnnnnnnnnnnnnnnnnnnnnnnnnnnnnnnnnnnnnnnctttaataatgttaaagtttttttcatttttaatattttaaactaaaaactgtacttcaatctcagtttctaaaattaaaaataatttatactgatctatgtattttttctttttgaaagatttcattaagattgatgggtaactttcaaatgagggtcacgtacaaatatcggaatgcgtgagatcccatgatcttgtgtattgagcttattgttgaaagggatttttgaaggacagaacaattactccatgatgaatcttcctttctctgccttctgagcaccgtctttaatttccatatcttcaagtcttgaagaagttgatgttaattgaagaactcatttgtctggttgaaataaagcctgtttctgtt

SEQ ID NO: 31526 - DNA, 97 bp, Macaca Mulatta
agatttagccggcagtgcgtggtggacaaagacaagaggaaccagtgccgctactgcaggctcaagaaatgcttccgggctggcatgaagaaggaag

SEQ ID NO: 31527 - DNA, 157 bp, Macaca Mulatta
ttgttttatctggttcttaaatgtttgttactacagaaaataaaactgagctactattccaagtctgagtttattttcagctgcagcacctcccaatattcttgtcgttgtgcttgggttgcaggggaggttccagaattcagatactcaaggagta

SEQ ID NO: 31528 - DNA, 524 bp, Macaca Mulatta
  misc_feature (1)...(524): n = A,T,C or G
agagcatcgcaacatgccccaggcagatgccatggtgctggtggccagaaattatgagcgctacaagaatgagtgccgggaaaaggaacgtgaggagattgccagacaggcagccaagatggccgatgaagccatcctgcaggaaagagagagaggaggccctgaggagggagtgcgtgggggccaccctccagccatccagagcctcattaacctgctggcagacaacaggtacctcactgctgaagagactgacaagatcatcaactacctgcgagagcggaaggagcggctaatgaggagcagcaccgactctctgcctggnggcccgatttcccgccaaccactcggggcgacctcgggtgcctcgctgaagacacagccaagctcccaaccgctccagagcggccaagtgctcccctctgctacacccactccatctgcacccccccacctccagcaagagcttcaggccaaaatcctcagcctcttcaatagtggcacggtgacggccaatagcagct

SEQ ID NO: 31529 - DNA, 218 bp, Macaca Mulatta
  misc_feature (1)...(218): n = A,T,C or G
gtcatccgagccggtgcacatgtcgcccctggagccccggggagggcacggcgacggcctcgcccnnnnnnnnnnnnnnnnnnnnnnnnnnnnnnnnnnnnnnnnnnnnnnnnnnnnnnnnnnnnnnnnnncaggctgcagcgtgagatccgcctgacccagaagactgactacaccgctgcaaagtcccctggctcacctacagcgccccggatctc

SEQ ID NO: 31530 - DNA, 196 bp, Macaca Mulatta
agctctccgtggctaacaaggcccctgggaccgaggggcagcagcaggtgcacgagaagaaggagactccagcagtgccctcagccccaccctcctatgaggaagccacatctggggaggggatgaaggcaggggtcttctccccagcccccccggcggtgcctctccacccaagctgggcttatgtggaccccag

SEQ ID NO: 31531 - DNA, 195 bp, Macaca Mulatta
acttattcctgggatatatgaaataaagacagaaaatggtgagctgtttgatgaatttgattcccaggtgcaacatttccttgtattagggaacaatcatagtaatggttctgggacagctactgatttgatgcagaagttatacctgctcttttcaactgagaaattggcaacgaaagacaaggaaaaagcaca

SEQ ID NO: 31532 - DNA, 1483 bp, Macaca Mulatta
  misc_feature (1)...(1483): n = A,T,C or G
cagttctgccttcgcaggaccctgcccttccctggaaggagcaggagaaaatgaccaagtttnnnnnnnnnnnnnnnnnnnnnnnnnnnnnnnnnnnnnnnnnnnnnnnnnnnnnnnnnnnnnnnnnnnnnnnnnnnnnnnnnnnnnnnnnnnnnnnnnnnnnnnnnnnnnnnnnnnnnnnnnnnnnnnnnnnnnnnnnnnnnnnnnnnnnnnnnnnnnnnnnnnnnnnnnnnnnnnnnnnnnnnnnnnnnnnnnnnnnnnnnnnnnnnnnnnnnnnnnnnnnnnnnnnnnnnnnnnnnnnnnnnnnnnnnnnnnnnnnnnnnnnnnnnnnnnnnnnnnnnnnnnnnnnnnnnnnnnnnnnnnnnnnnnnnnnnnnnnnnnnnnnnnnnnnnnnnnnnnnnnnnnnnnnnnnnnnnnnnnnnnnnnnnnnnnnnnnnnnnnnnnnnnnnnnnnnnnnnnnnnnnnnnnnnnnnnnnnnnnnnnnnnnnnnnnnnnnnnnnnnnnnnnnnnnnnnnnnnnnnnnnnnnnnnnnnnnnnnnnnnnnnnnnnnnnnnnnnnnnnnnnnnnnnnnnnnnnnnnnnnnnnnnnnnnnnnnnnnnnnnnnnnnnnnnnnnnnnnnnnnnnnnnnnnnnnnnnnnnnnnnnnnnnnnnnnnnnnnnnnnnnnnnnnnnnnnnnnnnnnnnnnnnnnnnnnnnnnnnnnnnnnnnnnnnnnnnnnnnnnnnnnnnnnnnnagcttcaaccagaactcctgtcttccctcttatgagcttactcacccgggagagaagttgtgtacatgtggcacgtgtgggaagggcttccatcatagcttagattttgacattcactgtgtagatagtgctggagagagagcctgtaaatgtaaatgtgatgtatatgataaaggcttcagtcagacatcacaacttcaagcccatcagagaggtcactctagagagaagacatacaaatgggaagtaagtgacaggatatctaataggaattctggtcttcatcagagagttcacactggagagaaaccatatacatgtgaggtatgtgataagggcttcagtaaggcctcaaatcttcaagcccatcagagaatccacactggagagaaaccctacaaatgtgatgtgtgtgataagaacttcagccataattcccaccttcaggcccatcagagagtccatacaggagagaaaccctacaaatgtgacacatgtgggaaggacttcagtcagatctctcaccttcaggcccatcagagagttcacacaggagagaagccatacaaatgtgagacatgtgggaagggctttagtcagagttcgcatctccaggaccatcagcaagtccatactagagagaaaccctacaaatgtgatgtgtgtgggaaaggcttcagttggagttcacatcttcaagcccatcagagagtccacacaggagagaaaccatacaaatgtgaagaatgtn

SEQ ID NO: 31533 - DNA, 2282 bp, Macaca Mulatta
  misc_feature (1)...(2282): n = A,T,C or G
ctccgtggtaactccattggaccacaaggggccaaggcgctggcagatgctctgaagatcaaccgcaccctgacctctctgagnnnnnnnnnnnnnnnnnnnnnnnnnnnnnnnnnnnnnnnnnnnnnnnnnnnnnnnnnnnnnnnnnnnnnnnnnnnnnnnnnnnnnnnnnnnnnnnnnnnnnnnnnnnnnnnnnnnnnnnnnnnnnnnnnnnnnnnnnnnnnnnnnnnnnnnnnnnnnnnnnnatgctctccagtaatagtattggtgatggaggttccaaggccctggccgaggctctgaaggtgaaccagggcctggagagcctggannnnnnnnnnnnnnnnnnnnnnnnnnnnnnnnnnnnnnnnnnnnnnnnnnnnnnnnnnnnnnnnnnnnnnnnnnnnnnnnnnnnnnnnnnnnnnnnnnnnnnnnnnnnnnnnnnnnnnnnnnnnnnnnnnnnnnnnnnnnnnnnnnnnnnnnnnnnnnnnnnnnnnnnnnnnnnnnnnnnnnnnnnnnnnnnnnnnnnnnnnnnnnnnnnnnnnnnnnnnnnnnnnnnnnnnnnnnnnnnnnnnnnnnnnnnttacaggagaacgctatcggggatgacggagcgtgtgcggtggcccatgcgctgaaggtcaacacagccctcactgctctctannnnnnnnnnnnnnnnnnnnnnnnnnnnnnnnnnnnnnnnnnnnnggaagccttggctgtgaacagaaccttggagattcnnnnnnnnnnnnnnnnnnnnnnnnnnnnnnnnnnnnnnnnnnnnnnnnnnnnnnnnnnnnnnnnnnnnnnnnnnnnnnnnnnnnnnnnnnnnnnnnnnnnnnnnnnnnnnnnnnnnnnnnnnnnnnnnnnnnnnnnnnnnnnnnnnnnnnnnnnnnnnnnnnnnnnnnnnnnnnnnnnnnnnnnnnnnnnnnnnnnnnnnnnnnnnnnnnnnnnnnnnnnnnnnnnnnnnnnnnnnnnnnnnnnnnnnnnnnnnnnnnnnnnnnnnnnnnnnnnnnnnnnnnnnnnnnnnnnnnnnnnnnnnnnnnnnnnnnnnnnnnnnnnnnnnnnnnnnnnnnnnnnnnnnnnnnnnnnnnnnnnnnnnnnnnnnnnnnnnnnnnnnnnnnnnnnnnnnnnnnnnnnnnnnnnnnnnnnnnnnnnnnnnnnnnnnnnnnnnnnnnnnnnnnnnnnnnnnnnnnnnnnnnnnnnnnnnnnnnnnnnnnnnnnnnnnnnnnnnnnnnnnnnnnnnnnnnnnnnnnnnnnnnnnnnnnnnnnnnnnnnnnnnnnnnnnnnnnnnnnnnnnnnnnnnnnnnnnnnnnnnnnnnnnnnnnnnnnnnnnnnnnnnnnnnnnnnnnnnnnnnnnnnnnnnnnnnnnnnnnnnnnnnnnnnnnnnnnnnnnnnnnnnnnnnnnnnnnnnnnnnnnnnnnnnnnnnnnnnnnnnnnnnnnnnnnnnnnnnnnnnnnnnnnnnnnnnnnnnnnnnnnnnnnnnnnnnnnnnnnnnnnnnnnnnnnnnnnnnnnnnnnnnnnnnnnnnnnnnnnnnnnnnnnnnnnnnnnnnnnnnnnnnnnnnnnnnnnnnnnnnnnnnnnnnnnnnnnnnnnnnnnnnnnnnnnnnnnnnnnnnnnnnnnnnnnnnnnnnnnnnnnnnnnnnnnnnnnnnnnnnnnnnnnnnnnnnnnnnnnnnnnnnnnnnnnnnnnnnnnnnnnnnnnnnnnnnnnnnnnnnnnnnnnnnnnnnnnnnnnnnnnnnnnnnnnnnnnnnnnnnnnnnnnnnnnnnnnnnnnnnnnnnnnnnnnnnnnnnnnnnnnnnnnnnnnnnnnnnnnnnnnnnnnnnnnnnnnnnnnnnnnnnnnnnnnnnnnnnnnnnnnnnnnnnnnnnnnnnnnnnnnnnnnnnnnnnnnnnnnnnnnnnnnnnnnnnnnnnnnnnnnnnnnnnnnnnnnnnnnnnnnnnnnnnnnnnnnnnnnnnnnnnnnnnnnnnnnnnnnnnnnnnnnnnnnnnnnnnnnnnnnnnnnnnnnnnnnnnnnnnnnnnnnnnnnnnnnnnnnnnnnnnnnacccaggctggagtatactggcgcaatctcagctaactgtaacctctgcctcgtgggttcaagtgattctcgagcctcagcctctcaagcagttgggattacaggcgtgcgccaccacacccagcctaatttttgtattatctgtagacggggtttcaccatgttggccaggctggtcttaaaatcctggcttcaggtgatctgcccacctcagcctcccaaagtgctggga

SEQ ID NO: 31534 - DNA, 656 bp, Macaca Mulatta
  misc_feature (1)...(656): n = A,T,C or G
nnnnnnnnnnnnnnnnnnnnnnnnnnnnnnnnnnnnnnnnnnnnnnnnnnnnnnnnnnnnnnnnnnnnnnnnnnnnnnnnnnnnnnnnnnnnnnnnnnnnnnnnnnnnnnnnnnnnnnnnnnnnnnnnnnnnnnnnnnnnnnnnnnnnnnnnnnnnnnnnnnnnnnnnnnnnnnnnnnnnnnnnnnnnnnnnnnnnnnnnnnnnnnnnnnnnnnnnnnnnnnnnnnnnnnnnnnnnnnnnnnnnnnnnnnnnnnnnnnnnnnnnnnnnnnnnnnnnnnnnnnnnnnnnnnnnnnnnnnnnnnnnnnnnnnnnnnnnnnnnnnnnnnnnnnnnnnnnnnnnnnnnnnnnnnnnnnnnnnnnnnnnnnnnnnnnnnnnnnnnnnnnnnnnnnnnnnnnnnnnnnnnnnnnnnnnnnnnnnnnnnnnnnnnnnnnntactttggtatttcacctcatgctctgaatactgaataaccatgaatgactgaatagtttagtccagatttttatagaggatacatctatttttatcattatttggggtttgaatttttttttatatcttctcattctttatttctcaaagcagataattctgtgtgaatatgttttcttttttaatttaaggttaatatcctttggcaaatcaaaaaaaaaa

SEQ ID NO: 31535 - DNA, 1579 bp, Macaca Mulatta
  misc_feature (1)...(1579): n = A,T,C or G
aaaagcaagtgagtcagaccaagatccgcgtcatctcaaccatcctgttcatcttggccggctgcattgtgtnnnnnnnnnnnnnnnnnnnnnnnnnnnnnnnnnnnnnnnnnnnnnnnnnnnnnnnnnnnnnnnnnnnnnnnnnnnnnnnnnnnnnnnnnnnnnnnnnnnnnnnnnnnnnnnnnnnnnnnnnnnnnnnnnnnnnnnnnnnnnnnnnnnnnnnnnnnnnnnnnnnnnnnnnnnnnnnnnnnnnnnnnnnnnnnnnnnnnnnnnnnnnnnnnnnnnnnnnnnnnnnnnnnnnnnnnnnnnnnnnnnnnnnnnnnnnnnaggtgggtgaaatcaaggcccatgcggcggagtggaaggccaacgtcacggccgagttccgggagacacggcgaaggctcagcgtggagatccacgataagctgcagcgggcagccaccatccgcagcatggagcgccggcggctgggcctggaccagcgggcccactcgctggacatgctgtcccccgagaagcgctctgtctttgccgccctggacactggtcgcttcaaggcctcatcccaggagagcatcaacaaccggcccaacaacctgcgtctgaagggaccggagcagttgaacaagcatgggcagggcgcgtctgaggacaatatcatcaacaagtacgggtccacctccagactcaccaagaggaaaaacaaggacctcaaaaagaccttgcccgaggacgttcagaaaatctacaagaccttccggaattactccctggacnnnnnnnnnnnnnnnnnnnnnnnnnnnnnnnnnnnnnnnnnnnnnnnnnnnnnnnnnnnnnnnnnnnnnnnnnnnnnnnnnnnnnnnnnnnnnnnnnnnnnnnnnnnnnnnnnnnnnnnnnnnnnnnnnnnnnnnnnnnnnnnnnnnnnnnnnnnnnnnnnnnnnnnnnnnnnnnnnnnnnnnnnnnnnnnnnnnnnnnnnnnnnnnnnnnnnnnnnnnnnnnnnnnnnnnnnnnnnnnnnnnnnnnnnnnnnnnnnnnnnnnnnnnnnnnnnnnnnnnnnnnnnnnnnnnnnnnnnnnnnnnnnnnnnnnnnnnnnnnnnnnnnnnnnnnnnnnnnnnnnnnnnnnnnnnnnnnnnnnnnnnnnnnnnnnnnnnnnnnnnnnnnnnnnnnnnnnnnnnnnnnnnnnnnnnnnnnnnnnnnnnnnnnnnnnnnnnnnnnnnnnnnnnnnnnnnnnnnnnnnnnnnnnnnnnnnnnnnnnnnnnnnnnnnnnnnnnnnnnnnnnnnnnnnnnnnnnnnnnnnnnnnnnnnnnnnnnnnnnnnnnnnnnnnnnnnnnnnnnnnnnnnnnnnnnnnnnnnnnnnnnnnnnnnnnnnnnnnnnnnnnnnnnnnnnnnnnnnnnnnnnnnnnnnnnnnnnnnnnnnnnnnnnnnnnnnnnnnnnnnnnnnnnnnnntcagtgcatcatacctagtctttctatgctccaaatgaatgtctgtggggacttgagagcacctggaatttgttgaagcagatcagagcacacgtattaaaaggtgcaattgcttttctcatgacaaaa

SEQ ID NO: 31536 - DNA, 253 bp, Macaca Mulatta
  misc_feature (1)...(253): n = A,T,C or G
gctttgacagtgagaaggctggggaccgggaggtgcagaggacaatgctggagcttctgaaccagctggatggcttccagcccaacacccaagttaaggtannnnnaggtaattgcagccacaaacagggtggacattctggaccccgccctgctccgctcggggcgcctggaccgcaagatcgagttcccaatgcccaatgaggaggcccgagccagaatcatgcagatccactcccgaaagatgaacgtca

SEQ ID NO: 31537 - DNA, 194 bp, Macaca Mulatta
  misc_feature (1)...(194): n = A,T,C or G
ggtcccctggatgtcagcatggcagccacaaacctggagaaccagctgcacagcgcacagaagaacctcctgttccttcagcgggagcatgccagcacactcaaggggctgcactccgagatcaggcggctgcagcagcactgcacagnngatttaacatatgagctgacagtcaaaagttcggaacagacagg

SEQ ID NO: 31538 - DNA, 134 bp, Macaca Mulatta
aggaatcagagatggaaacagaagaagaggttgatattttaatgagcagtgatatttactctgcaactttatcaacaaaatcaatttctttcacgcgtgcccagacaggatggctttttcgggaagataaaaca

SEQ ID NO: 31539 - DNA, 2019 bp, Macaca Mulatta
  misc_feature (1)...(2019): n = A,T,C or G
caggacaacctggagaggtaggcagtggctacctccactttacagatgaagatactgaggctcaggaggtggcctgactgctccaggtctcacgcttagtgaacggccgcagaaccctggtcggtttgnnnnnnnnnnnnnnnnnnnnnnnnnnnnnnnnnnnnnnnnnngaacctccaggacttcagcccttccaggagaatctgatctcaggtgagggaggtcacttggggtgtggcccagcaggcaggcgggactccaggctgggaacagaagtcagccctgctggggctgggagctgaaggagctgttcctttctcacaggtgttagacgaggaaaagtgatcattgngccacaccaggagctgaagccatggcctcaaagcctgagaagagggtggcatcgtctgtctttatcaccctggcacccccgcgccgcgatgtggctgtggcggaggaagtgaggcaggcggtttgtgaggcccggcgtggccgcccctgggcgcctcctgccccagtgaagacacccgaggctggcttggcgaggaggcccagcccctggacaccccctggcaaggctgcaaccacagtgccagctgcacctctgcagctttccaatggaggnnnnnnnnnnnnnnnnnnnnnnnnnnnnnnnnnnnnnnnnnnnnnnnnnnnnnnnnnnnnnnnnnnnnnnnnnnnnnnnnnnnnnnnnnnnnnnnnnnnnnnnnnnnnnnnnnnnnnnnnnnnnnnnnnnnnnnnnnnnnnnnnnnnnnnnnnnnnnnnnnnnnnnnnnnnnnnnnnnnnnnnnnnnnnnnnnnnnnnnnnnnnnnnnnnnnnnnnnnnnnnnnnnnnnnnnnnnnnnnnnnnnnnnnnnnnnnnnnnnnnnnnnnnnnnnnnnnnnnnnnnnnnnnnnnnnnnnnnnnnnnnnnnnnnnnnnnnnnnnnnnnnnnnnnnntggctgtggaggccatgaaaaggcagtaccatgcccagtgctttacatgccgcacctgccgccgccagctggctggacagagcttctaccagaaggatgggcgacccctctgcgaaccctgctaccaggnnnnccaggacacgttggagaagtgcggcaagtgtggcgaagtggtccaggaccacatcatcagggccctgggccaggccttccacccctcctgcttcacgtgtgtgacctgcgcccggtgcattggggatgagagctttgccctgggcagccagaacgaggtgtactgcctggatgacttctacagnnnnnnnnnnnnnnnnnnnnnnnnnnnnnnnnnnnnnnnnnnnnnnnnnnnnnnnnnnnnnnnnnnnnnnnnnnnnnnnnnnnnnnnnnnnnnnnnnnnnnnnnnnnnnnnnnnnnggactgcaggatcctcctgtctgttgagcccacggaccaaggctgctaccccctgaacaaccgtctcttctgcaagccgtgccacgtgaagcggagtgctgcagggtgctgctgagtacctgctgggcagtgaacggaccactagccccggctggggcccttccctgacttggtttcccttcctgacctgctcttgcacactttccttctgagcctccgtggggaccagcctgcaagtcggcctagcctgtccaggatacagtggggctgagtacccccaggccttccactcctcctctaccctctgggcatcagaaggctcctggaccatgagcgtcacccccagaattccctgctgaccccactccacttccagggaaaagctgggggaagttggacccttctcactgactagctgtctggtaggggtgctgggaccagcctggcttgcagggttgagctatttgaggaacaactccaaggttccttaaaaagggctttttataggctgggcagggtggcttacgcttgtaatcccagcactttgggaggccgagacgggtggatcacgaggtcaggagatcaagaccatcctggccaacacggtgaaaccccgtctctactaacaatac

SEQ ID NO: 31540 - DNA, 1236 bp, Macaca Mulatta
  misc_feature (1)...(1236): n = A,T,C or G
tatggttgcacctgtgaattnnnnnnnnnnnnnnnnnnnnnnnnngcgagacctcatctnnnnnnnnnnnnnnnnnnnnnnnnnnnngaatgacgttctgtagagattgcctttcacttgaggagtactcagttttcaggttcttcctagctcggggcttttaaattttgaaatctatacattcattcccaccatccttttttgactattgaccttggttttctcttctaagtttctgtccctctgcttccttactttttttcttttttgaattctatctttatctgtcttttgttcactttttaatgctatatatgggcaggggtgagagacattactgagcaccttggtgagcaagcctggctttaaagagttgagaagagcttctggcaccagagctctgtcttcctccagttctcagcatggtgttgctcttcagtgataccaggatctgaatcaaaaaagtatttttaaatatccatgattcctccctgtattgaggctggccctgatcatgctctttgtgcctgtcaccaggtctctcaagtgcactcatccagctcagcgctcagatgtgtttaaggagaccctatattcagggaagttgcgtggatactgcagtggagagaattgagaatagtcaggcctgtcagtctcacaggatcacccctctacctttaatattccacctagctgtagggagcccctcggtttgtccacccgccgaaaatgaaaaaggaaaaatttatgcactggtttgcactgattctaacccgccaaaagagtaacatgattttgccgcttgcggcgctcccacaaaacaaaaaacctctttctcttctggagaagagctttacacattgttgggtcttgtgaaaaatggccantannntggaattgnggnaaacccaaanccagtagtcctggtaatatccctggggtaagcttctttttttccttgggcnnnnnnnnnnnnnnnnnnnntacccaagttattttcctggcccttaaatggtgtttggctttccttggtggaatggggtttaaataattgggcccctaagcccaaaggcacacaacccccggttggtgttgtgttggaaaaaaattaagcttaattagcccacaaaaananaggntggaatnaaccccccagcctatttatgtaaaagacantncnccaccataggtgttcgggggcgcgccgcccctttccggggacccctcttccaagag

SEQ ID NO: 31541 - DNA, 773 bp, Macaca Mulatta
  misc_feature (1)...(773): n = A,T,C or G
gcacaccaccannnnnnnnnnnnnnnnnnnnnncagtagagacagagtttcaccatgttgaccaggctggtcgggaatcctgacctcaggtgatgcgcccgtctcggcttcccaaaatgctgggaccacatcccaatttgctttattgattgattgattgattgattgagacggagtctcattctgtcgcccaggctagagtgcagtggcgcgatctcagctcactgcagtctctggctcccacgttcaagtgacnnnnnnnnnnnnnnnnnnnnnncagctgggaccacaggcacgtgccaccacgcccagccaatttttgtaattcnnnnnnnnnnnnnnnnnnnnnnnnnnnannnnnnnnnnnnncnnnnnnnnnnnnnnnnnnnnnactcccgcccaggtctcccaaatagtgggaccacaggcttgaggcaccatgtctggtcccaatttgccttaaaattagttggatcctcaggctatttgtgaaatacaggtaggggtaagaacagtctgaaagtttttaatcttttactttggaaactttccagttgatcaggtctgcgtagcctcctgaagccctacagcagttctactcatggctacctccatttatccctaactcttgctgctttgtggtctcgtcaggcagaagcattcatgctgtgttcagacttctgcacttaacgtaaaaaattagccataatgtatggctccacttctgtgtatactcaaatctttcttcaactacggcttctgaggacaaaccc

SEQ ID NO: 31542 - DNA, 449 bp, Macaca Mulatta
tgtattaatacacctatcatcataaaagatggtcattatagtacacccattgctcctacttgttactgttattgctgcagatctgcctccaaggttggaaaggagactaagactgtataagcatcttcattgccagttctcaaaatgactgaaattgttttcatgataaaagttaatatactaaaaggttcctttttttttaacgtttacatttatgtctctgtttaccttcttaaaaatagtcacattgacctgctggctgagtacctcaaagaatccagtagagggcagcccaccaggcaggaaagattaggcactttggtttcacatctttgctgcggagtaatagggaaaatggctgtttttgctaatttttaggtaatatctagccaggagagcaagcacgttggacagacggaaagactgtaattttagacaaaacacatggt

SEQ ID NO: 31543 - DNA, 163 bp, Macaca Mulatta
ccactttggttgataagcagatacacttgggaaaggggtaataacattttagagctagatctagtgtttacagtttagtacttgatatgagtaagggtctgagcgcaagagaggaagatatgaaactgaaaggatacaaagtataataataacaatcatatcc

SEQ ID NO: 31544 - DNA, 1589 bp, Macaca Mulatta
  misc_feature (1)...(1589): n = A,T,C or G
ctgactccacagactcaaccttcttcactccgtgttcctgcagctagagacatgacctaacaccctgatgaccactctcagggcccttgagtgactggctgctgcaccatggaacttaaacgacgggtggttggagttcagaggattgctcggggagtcactgaagtcacaacttgccaggaggttgtcatagccttagctcaagcaataggtnnnnnataggtcgaactggaaggtacacccttatagagaaatggagagataccgaaagacacttagcacctcatgaaaatcctatcatatccttaaacaaatgggggcagtatgctagtgatgtgcagctcattctacgacgaaccgggccgtcactcagtgagcgacccacttcagacagtgtggctcgaattcctgaaagaactttatacaggcagagtctgccccccttagctaaactgaggcctcagatcgacaaatcaatcaaaaggagagaaccgaaaaggaaatcactgacatttacaggaggtgccaaaggattaatggacatttttggaaaaggtaaagaaactgagttgaagcaaaaggtgctgaataactgcaaaacaacagcagatgagttgaagaagttgatgggaatgcagacagagaagcttcaatnnnnnnnnnnnnnnnnnnnnnnnnnnnnnnnnnnnnnnnnnnnnnnnnnnnnnnnnnnnnnnnnnnnnnnnnnnnnnnnnnnnnnnnnnnnnnnnnnnnnnnnnnnnnnnnnnnnnnnnnnnnnnnnnnnnnnnnnnnnnnnnnnnnnnnnnnnnnnnnnnnnnnnnnnnnnnnnnnnnnnnnnnnnnnnnnnnnnnnnnnnnnnnnnnnnnnnnnnnnnnnnnnnnnnnnnnnnnnnnnnnnnnnnnnnnnnnnnnnnnnnnnnnnnnnnnnnnnnnnnnnnnnnnnnnnnnnnnnnnnnnnnnnnnnnnnnnnnnnnnnnnnnnnnnnnnnnnnnnnnnnnnnnnnnnnnnnnnnnnnnnnnnnnnnnnnnnnnnnnnnnnnnnnnnnnnnnnnnnnnnnnnnnnnnnnnnnnnnnnnnnnnnnnnnnnnnnnnnnnnnnnnnnnnnnnnnnnnaggacaaagaacaggaactggagcagttgactaaggagttgcggcaagtcaatctccagcagtttatccagcagacggggacaaaagttaccgttttgccagcggagcccattgaaatagaggcctcacatgcagacattgaaannnnnnnnnnnnnnnnnnnnnnnnnnnnnnnnnnnnnnnnnnnnnnnnnnnnnnnnnnnnnnnnnnnnnnnnnnnnnnnnnnnnnnnnnnnnnnnnnnnnnnnnnnnnnnnnnnnnnnnnnnnnnnnnnnnnnnnnnnnnnnnnnnnnnnnnnnnnnnnnnnnnnnnnnnnnnnnnnnnnnnnnnnnnnnnnnnnnnnnnnnnnnnnnnnnnnnnnnnnnnnnnnnnnnnnnnnnnnnnnnnnnnnnnnnnnnnnnnnnnnnnnnnnnnnnnggctgggcacagtggctcacggctataatcccagcactttgggaggtcgagttgggagaatca

SEQ ID NO: 31545 - DNA, 477 bp, Macaca Mulatta
  misc_feature (1)...(477): n = A,T,C or G
ttcaacgcctgggtgcagggagctacagtaacgatcagtggctgcaggtgnnnnnnnnnnnnnnnnnnnnnnnnnnnnnnnnnnnnnnnnnnnnnnnnnnnnnnnnnnnnnnnnnnnnnnnnnnnnnnnnnnnnnnnnnnnnnnnnnnnnnnnnnnnnnnnnnnnnnnnnnnnnnnnnnnnnnnnnnnnnnnnnnnnnnnnnnnnnnnnnnnnnnnnnnnnnnnnnnnnnnnnnnnnnnnnnnnnnnnnnnnnnnnnnnnnnnnnnnnnnnnnnnnnnnnnnnnnnnnnnnnnnnnnnnnnnnnnnnnnnnnnngcgccaggagctgctgggctgttagtgaccacttgccatccccaggtcctcctgttttccatgggcccaccacctcctggcttctcagcccctttaaatcaccatgggactggggactggggaaggggagggtgttcagaggcagcaccatcacacagtcacc

SEQ ID NO: 31546 - DNA, 361 bp, Macaca Mulatta
cacctcagttccaggggaccaggtccagccagtgggtgaaaagagcagctgaagcacagagaccgtgtgtgggccatgtgggctcactgggaagcactgggtcaggtgttagacgcaggatggacccctggagggccctgctgctgctgcaccccctctcccgacccagccatcatgggcctccctgatatccatacagaacagccagcaccttgcacacccaggcctgtgtgaacctatgtctgtgtcacttgagagtgaaagccagcacttcaggctgcagtgcagccctgtcccccttcccaccccacaccgctgcccactcagctgaccaagcttgagagaccctccagcacccttc

SEQ ID NO: 31547 - DNA, 277 bp, Macaca Mulatta
ataacaaaattaaccattttaaagtgaacaatttagtggtatttagtgtattcacagtgtcgtgcagccaacacctgtatctagttccaagacattttcatctcccaaaaaggaaaccccatacacgtgaagcagtctctctgccatctccctcctcccatcccctggcaactgctaatttgctttttgtctctatggatttacctattctggatatttcgcataaatggaattatacaataagtgaccatttgtttctaccttctttcactaagca

SEQ ID NO: 31548 - DNA, 313 bp, Macaca Mulatta
gaccaccctgctgcctggggacctgctcagcggggagtccctgtaggagctgccatcatcagcaccaggagagccgacccctcccgggacccctcccagatgggcggccccacagacccgctggaacccagcagcggccacccttttgagtacctctgtccaggactgaagacgaaccttggccacagtccttgcgaactgttcgcaaaacagtgcgggctgcggtgggtcagcgtcacatgctaatgacaggatgttcctcgtagctttttattttgtgtgtcttatgtttgtatagtgtgttgtcattttg

SEQ ID NO: 31549 - DNA, 660 bp, Macaca Mulatta
  misc_feature (1)...(660): n = A,T,C or G
agtgtgattgcatcaggcgccctttgaggccagggcaatacagcaccatctctgaagtagctttgcaatctggaaggggtacagtgtctcttccctcaaaggctgccgagcaggtggtgggccgatggctcctggtctgcagtggaacagtggctggagcagttattcttggtggagtaactaggnnnnnnnnnnnnnnnnnnnnnnnnnnnnnnnnnnnnnnnnnnnnnnnnnnnnnnnnnnnnnnnnnnnnnnnnnnnnnnnnnnnnnnnnnnnnnnnnnnnnnnnnnnnnnnnnnnnnnnnnnnnnnnnnnnnnnnnnnnnnnnnnnnnnnnnnnnnnnnnnnnnnnnnnnnnnnnnnnnnnnnnnnnnnnnnnnnnnnnnnnnnnnnnnnnnnnnnnnnnnnnnnnnnnnnnnnnnnnnnnnnnnnnnnnnnnnnnnnnnnnnnnnnnnnnnnnnnnnnnnnnnnnnnnnnnnnnnnnnnnnnnnnngggtctcttgggatggtatatggtgaaaagcggactagaagaaaaaccagactcccatgacatccctcgggtcagtcagtaccgcctcgctgcccacctgggatcagccctggttctttattgtgccagcttatggacctcgctctcactgctgcttcctccgcacaag

SEQ ID NO: 31550 - DNA, 135 bp, Macaca Mulatta
atgctatttctgatttttctgatcctctatggcatggctgtggtgggaaaccttggcatgattgtaaaagtctgggtagatgcacacctccacaccccaatgtatgcatgctgcaaagcctttcattgttggaca

SEQ ID NO: 31551 - DNA, 2627 bp, Macaca Mulatta
  misc_feature (1)...(2627): n = A,T,C or G
tcccgtttaatggattctgacatggattatgaaaggccaaacgtagagaccatcaagtgcgttgtggtgggggacaacgccgtgggcaagactaggctcatctgtgcccgtgcttgcaatgccaccctcacccagtaccagctgctggccacgcatgtgcccacagtgtgggccatcgaccaatatcgtgtgtgccaggaggtnnnnnnnnnnnnnnnnnnnnnnnnnnnnnnnnnnnnnnnnnnnnnnnnnnnnnnnnnnnnnnnnnnnnnnnnnnnnnnnnnnnnnnnnnnnnnnnnnnnnagatcggacgtggtggttctgtgcttctccattgccaaccccaattccctccaccatgtcaagaccatgtggtacccagaaatcaagcacttctgcccccgagcacctgtcatcttggtgggctgccagttggacctgcgctacgctgacctggaggctgtcaacagggctaggcgacccttggctagnnnnnnnnnnnnnnnnnnnnnnnnnnnnnnnnnnnnnnnnnnnnnnnnnnnnnnnnnnnnnnnnnnnnnnnnnnnnnnnnnnnnnnnnnnnnnnnnnnnnnnnnnnnnnnnnnnnnnnnnnnnnnnnnnnnnnnnnnnnnnnnnnnnnnnnnnnnnnnnnnnnnnnnnnnnnnnnnnnnnnnnnnnnnnnnnnnnnnnnnnnnnnnnnnnnnnnnnnnnnnnnnnnnnnnnnnnnnnnnnnnnnnnnnnnnnnnnnnnnnnnnnnnnnnnnnnnnnnnnnnnnnnnnnnnnnnnnnnnnnnnnnnnnnnnnnnnnnnnnnnnnnnnnnnnnnnnnnnnnnnnnnnnnnnnnnnnnnnnnnnnnnnnnnnnnnnnnnnnnnnnnnnnnnnnnnnnnnnnnnnnnnnnnnnnnnnnnnnnnnnnnnnnnnnnnnnnnnnnnnnnnnnnnnnnnnnnnnnnnnnnnnnnnnnnnnnnnnnnnnnnnnnnnnnnnnnnnnnnnnnnnnnnnnnnnnnnnnnngggcgagacttcctgctccgagcagccagctttgacgtatgcgagagcgtggatgaggctgggggctccggtcctgctggcctccgtgcttccaccagcgacgggatcttacggggcaacggaacagggtacctgccgggcaggggtcgtgtgctctcttcctggagccgagcttttgtgagcatccaggaagagatggcagaagatcctctcacctacaaatcccggctgatggtggtggtgaagatggacaactccatccagccggggcccttccgggcggtcctcaagtacctgtacacgggggagctggacgagaacgagcgtgacctcatgcacattgcccacattgctgagctgctcgaggtctttgatctccgcatgatggtggccaatattctcaacaatgaggccttcatgaaccaggagatcaccaaggccttccatgtccgtcggaccaaccgggttaaggagtgtttggcaaaaggcaccttctcagnnnnnnnnnnnnnnnnnnnnnnnnnnnnnnnnnnnnnnnnnnnnnnnnnnnnnnnnnnnnnnnnnnnnnnnnnnnnnnnnnnnnnnnnnnnnnnnnnnnnnnnnnnnnnnnnnnnnnaggtggtgtttccctacacaagcaagagctgcatgcgggccgtgctggaatacctctacacgggcatgttcacctccagccccgacctggatgacatgaagctcatcatcctagccaaccgtctctgcctgccacacctggttgccctcacannnnnnnnnnnnnnnnnnnnnnnnnnnnnnnnnnnnnnnnnnnnnnnnnnnnnnnnnnnnnnnnnnnnnnnnnnnnnnnnnnnnnnnnnnnnnnnnnnnnnnnnnnnnnnnnnnnnnnnnnnnnnnnnnnnnnnnnnnnnnnnnnnnnnnnnnnnnnnnnnnnnnnnnnnnnnnnnnnnnnnnnnnnnnnncagaaaaccaggagtatttcgagaagcatcggtggccacctgtgtggtacctgaaggaggaagatcattaccagcgggcacggaaggagcgtgagaaggaggactacctccacctcaagcggcagcccaagcggcgttggctcttctggaannnnnnnnnnnnnnnnnnnnnnnnnnnnnnnnnnnnnnnnnnnnnnnnnnnnnnnnngctgtggtctgagatgctcccaccctcttctgaccctgctgctgttgtccccatccgccctcgcccctctgctcttccgcatcaccccatccaccttacagggaccgggggcccacgtgaccaggacccacagggtgcagctcttcttaccagccaccgtggctcagccagagaggagccgggccctgtggagcagaacgggaaccacctgcagaggttcccagacccaaagcaggacaggagacaactgcttggaggagcaaagcgctctggcattttatctctgggtttgagagccctagagtcaaagggaaagcctcccagcctcgagggcttctctgtgtgtcttggttgctgctctggccagggaggcagccccccctcccagcaagcagaagtgatcctcgaggctcctggccctgttggccatgtctttccaccgatggacttg

SEQ ID NO: 31552 - DNA, 1080 bp, Macaca Mulatta
  misc_feature (1)...(1080): n = A,T,C or G
gggatattataggaatttcttttctttctatctttatgaaaacagtgcatgtaaaatatatccagaaacctttctgtttgagactcttctttaatgggcttttgattctaatgataattgtacctttatctttcaaaagctgatatttcctacctaagcatctccccagaaaaatatctcattaaaaatcccacaaataataggggagaagaaagccttaggtatcaattccaaaacagtgattgaaatttctcaaaataattatgacttctgtcatctccagatatagtctggcttggtttaccccataatctaatttcagaaaggaaagctttattttaacactcatctgaatcaacattaaagacttttctctcaaagcgcttattaagaaactcaaatgaacatactttttgaattaatgtcatcaaaagtgtacggcttcctgtgctgcttgtgtcaaatggaacctgccctctaaagcactttctttccttgcatggtttcatgtaagctgtgctgtttagaaacaacatctccgactttacaaataaatgacaaagaaggcaattgcactttttaagggatactcacaagcggtttctgtgttctaaaggacaaaatacagagtgcatgtcatttttaattagattctttcccctgctgagttggaaattccagtgcagcactgattgaccacagttgccaatctaaaagcacaaagaagtaaagctttatgctatttttattcaatatgatagaaaatttatctttggtatgtcctttttttagataactccagcagaaaactggtaactgctatgttcttcagggaaaatgtagaagaaagaaaattattattctttaattcctacgaggtacttgaaaaccttaagtggaaaagatttctatctttttatcttagtgcatttatggaaaaatattaactatcctgaatattttataattttgtaggaaaaatatgcatctattttttcttgacttctttttatatagtaataaaagttattttggaagctnnnnnnnnnnnnnnnnnnnnnnnnnnnnnncatgtcggcc

SEQ ID NO: 31553 - DNA, 412 bp, Macaca Mulatta
gggcctctatttcatgtggcacatccctacttcttggttaaaaataggtcttttttgaagggcatattgggaaaaactcgttttagaagtaaccgatttccaggggttaatctgagtttaatgaattttcaagaaatagtgatgaatactgatctttgttaaaattgaatcaaaacggttctctacatcttggttaggccttcatgtcttcagaaagtgtactgaaatacttcctgacattttgggcaagtctaaataaaagttgcttgtgattgcttgcggctatgcagaggcatatgaggcctagttcaccctctgtgaagatcccttatgaaagtccagaaaagagaatctcaagggaatagcaattttcagggttgctggcttgggcttctaaactaatgaagttagg

SEQ ID NO: 31554 - DNA, 511 bp, Macaca Mulatta
  misc_feature (1)...(511): n = A,T,C or G
aggtatattgagatctttaagagcagtagagctgaagttagaacttcattatgatccaccacgaaagcttatggccatgcagcggccaggtccctatgacagacctggggctggcagagggtataacagcattggcagaggagctggctttgagaggatgaggcgcggtgcttacggtggaggnaggctatggaggctatgacgattacaatggctataatgatggctatggatttgggtcagatagatttggaagaggnaggaatgtctgatcacagatacggggatggtggctctactttccagagcacaacaggacactgtgtacacatgcgtggattaccttacagagctactgagaatgacatttataannnnnnnncaccactcaatcctgtgagagtacacattgaaattggtcctgatggcagagtaactggtgaagcagatgtcgagtttgcaactcatgaagatgccgtggcagctatgtcaaaagacaaagcaaatatgc

SEQ ID NO: 31555 - DNA, 11155 bp, Macaca Mulatta
  misc_feature (1)...(11155): n = A,T,C or G
ctaaaccaggtggacaggtgaaatgtcagtatatttctgctgtggataaagttatatttgtggatgattatgcagtagggtgtaggaaggaccttaatggaatcttgttgttagacactgctctgcaaactccagtttcaaagcaggatgatgtggttcagcttgaattacccgttacagaggnnnnnnnnnnnnnnnnnnnnnnnnnnnnnnnnnnnnnnnnnnnnnnnnnnnnnnnnnnnnnnnnnnnnnnnnnnnnnnnnnnnnnnnnnnnnnnnnnnnnnnnnnnnnnnnnnnnnnnnnnnnnnnnnnnnnnnnnnnnnnnnnnnnnnnnnnnnnnnnnnnnnnnnnnnnnnnnnnnnnnnnnnnnnnnnnnnnnnnnnnnnnnnnnnnnnnnnnnnnnnnnnnnnnnnnnnnnnnnnnnnnnnnnnnnnnnnnnnnnnnnnnnnnnnnnnnnnnnnnnnnnnnnnnnnnnnnnnnnnnnnnnnnnnnnnnnnnnnnnnnnnnnnnnnnnnnnnnnnnnnnnnnnnnnnnnnnnnnnnnnnnnnnnnnnnnnnnnnnnnnnnnnnnnnnnnnnnnnnnnnnnnnnnnnnnnnnnnnnnnnnnnnnnnnnnnnnnnnnnnnnnnnnnnnnnnnnnnnnnnnnnnnnnnnnnnnnnnnnnnnnnnnnnnnnnnnnnnnnnnnnnnnnnnnnnnnnnnnnnnnnnnnnnnnnnnnnnnnnnnnnnnnnnnnnnnnnnnnnnnnnnnnnnnnnnnnnnnnnnnnnnnnnnnnnnnnnnnnnnnnnnnnnnnnnnnnnnnnnnnnnnnnnnnnnnnnnnnnnnnnnnnnnnnnnnnnnnnnnnnnnnnnnnnnnnnnnnnnnnnnnnnnnnnnnnnnnnnnnnnnnnnnnnnnnnnnnnnnnnnnnnnnnnnnnnnnnnnnnnnnnnnnnnnnnnnnnnnnnnnnnnnnnnnnnnnnnnnnnnnnnnnnnnnnnnnnnnnnnnnnnnnnnnnnnnnnnnnnnnnnnnnnnnnnnnnnnnnnnnnnnnnnnnnnnnnnnnnnnnnnnnnnnnnnnnnnnnnnnnnnnnnnnnnnnnnnnnnnnnnnnnnnnnnagtgatgatttactggaggatgcagacagtgaagagcattnnnnnnnnnnnnnnnnnnagggcatacatcacagaaggaagccatggaagtaagccttgatataacagcactcagcattctgcaacagccagaaaaacttcagtgggagattgttgcaaatgtgcttgaagatactgttaaggatcttgaagaacttggggcaaatccttgtttaacaaactctaagagtgaaaagacaaaggaaaagcatcaggaacagcacaacattccttttccgtgtttattagctggaggtttattaacatataaatctcctgctacctcacccattagtagtaattctcacaggtcactggatggtttgagcagaactcagggtgaaagtatatcagaacaagggtcaactgacaatgaatcctgcactaattcagaactaaattctcctctggtgaggaggactttaccggttttgcttctttatagcatcaaggaatctgatgagaaagcaggaaagatcttttcacagatgaacaatattatgagtaaaagtttgcatgatgatggttttactgttccacagattattgaaatggagctggatagtcaggagcagttgttattgcaggatcctcctgtgacttacattcagcaatttgcagatgcagcagccaaccttacctctccggattctgagaagtggaactctgtgtttcccaagcctgggactttggttcagtgcttgaggctgccaaagtttgcagaggaggagaatctttgtatagactcaataactccttgtgctgacggaattcatttgatggtaggactgcggacatgccctgnnnnnnnnnnnnnnnnnnnnnnnnnnnnnnnnnnnnnnnnnnnnnnnnnnnnnnnnnnnnnnnnnnnnnnnnnnnnnnnnnnnnnnnnnnnnnnnnnnnnnnnnnnnnnnnnnnnnnnnnnnnnnnnnnnnnnnnnnnnnnnnnnnnnnnnnnnnnnnnnnnnnnnnnnnnnnnnnnnnnnnnnnnnnnnnnnnnnnnnnnnnnnnnnnnnnnnnnnnnnnnnnnnnnnnnnnnnnnnnnnnnnnnnnnnnnnnnnnnnnnnnnnnnnnnnnnnnnnnnnnnnnnnnnnnnnnnnnnnnnnnnnnnnnnnnnnnnnnnnnnnnnnnnnnnnnnnnnnnnnnnnnnnnnnnnnnnnnnnnnnnnnnnnnnnnnnnnnnnnnnnnnnnnnnnnnnnnnnnnnnnnnnnnnnnnnnnnnnnnnnnnnnnnntttctactcttggacacctggtaataactactcagggaggatatgtaaaaatactagatctttcgaactttgaaattttggccaaagtggagcctcccaaaaaggagggcactgaggaacaggacacatttgtttctgtgatttactgctctggcacagacaggctgtgtgcatgcaccaaaggnnnnnnnnnnnnnnnnnnnnnnnnnnnnnnnnnnnnnnnnnnnnnnnnnnnnnnnnnnnnnnnnnnnnnnnnnnnnnnnnnnnnnnnnnnnnnnnnnnnnnnnnnnnnnnnnnnnnnnnnnnnnnnnnnnnnnnnnnnnnnnnnnnnnnnnnnnnnnnnnnnnnnnnnnnnnnnnnnnnnnnnnnnnnnnnnnnnnnnnnnnnnnnnnnnnnnnnnnnnnnnnnnnnnnnnnnnnnnnnnnnnnnnnnnnnnnnnnnnnnnnnnnnnnnnnnnnnnnnnnnnnnnnnnnnnnnnnnnnnnnnnnnnnnnnnnnnnnnnnnnnnnnnnnnnnnnnnnnnnnnnnnnnnnnnnnnnnnnnnnnnnnnnnnnnnnnnnnnnnnnnnnnnnnnnnnnnnnnnnnnnnnnnnnnnnnnnnnnnnnnnnnnnnnnnnnnnnnnnnnnnnnnnnnnnnnnnnnnnnnnnnnnnnnnnnnnnnnnnnnnnnnnnnnnnnnnnnnnnnnnnnnnnnnnnnnnnnnnnnnnnnnnnnnnnnnnngctcttaacattgaagtggaacaaaatgggaaaccgtccctggttgatttgaatgaagaaatgcagcacatggatgtagaggaatcacagtgnnnnnnnnnnnnnnnnnnnnnnnnnnnnnnnnnnnnnnnnnnnnnnnnnnnnnnnnnnnnnnnnnnnnnnnnnnnnnnnnnnnnnnnnnnnnnnnnnnnnnnnnnnnnnnnnnnnnnnnnnnnnnnnnggtatggcaggaggaaaatatcgttcgtttttaannnnnnnnnnnnnnnnnnnnnnnnnnnnnnnnnnnnnnnnnnnnnnnnnnnnnnnnnnnnnnnnnnnnnnnnnnnnnnnnnnnnnnnnnnnnnnnnnnnnnnnnnnnnnnnnnnnnnnnnnnnnnnnnnnnnnnnnnnnnnnnnnnnnnnnnnnnnnnnnnnnnnnnnnnnnnnnnnnnnnnnnnnnnnnnnnnnnnnnnnnnnnnnnnnnnnnnnnnnnnnnnnnnnnnnnnnnnnnnnnnnnnnnnnnnnnnnnnnnnnnnnnnnnnnnnnnnnnnnnnnnnnnnnnnnnnnnnnnnnnnnnnnnnnnnnnnnnnnnnnnnnnnnnnnnnnnnnnnnnnnnnnnnnnnnnnnnnnnnnnnnnnnnnnnnnnnnnnnnnnnnnnnnnnnnnnnnnnnnnnnnnnnnnnnnnnnnnnnnnnnnnnnnnnnnnnnnnnnnnnnnnnnnnnnnnnnnnnnnnnnnnnnnnnnnnnnnnnnnnnnnnnnnnnnnnnnnnnnnnnnnnnnnnnnnnnnnnnnnnnnnnnnnnnnnnnnnnnnnnnnnnnnnnnnnnnnnnnnnnnnnnnnnnnnnnnnnnnnnnnnnnnnnnnnnnnnnnnnnnnnnnnnnnnnnnnnnnnnnnnnnnnnnnnnnnnnnnnnnnnnnnnnnnnnnnnnnnnnnnnnnnnnnnnnnnnnnnnnnnnnnnnnnnnnnnnnnnnnnnnnnnnnnnnnnnnnnnnnnnnnnnnnnnnnnnnnnnnnnnnnnnnnnnnnnnnnnnnnnnnnnnnnnnnnnnnnnnnnnnnnnnnnnnnnnnnnnnnnnnnnnnnnnnnnnnnnnnnnnnnnnnnnnnnnnnnnnnnnnnnnnnnnnnnnnnnnnnnnnnnnnnnnnnnnnnnnnnnnnnnnnnnnnnnnnnnnnnnnnnnnnnnnnnnnnnnnnnnnnnnnnnnnnnnnnnnnnnnnnnnnnnnnnnnnnnggaaatggaaaggtcagtagttgcacagctgctgagggtagtttcacatctctcactggacttttggaagttgaacctctgcactttacttgtgtgtcaactagtgatggaaccagaatagaaagggatgatgcaannnnnnnnnnnnnnnnnnnnnnnnnnnnnnnnnnnnnnnnnnnnnnnnnnnnnnnnnnnnnnnnnnnnnnnnnnnnnnnnnnnnnnnnnnnnnnnnnnnnnnnnnnnnnnnnnnnnnnnnnnnnnnnnnnnnnnnnnnnnnnnnnnnnnnnnnnnnnnnnnnnnnnnnnnnnnnnnnnnnnnnnncagaaagcaaagctggaagccaagttacatcagacaacagctgcagcagctgcagcagcatcagcagtaggtcctgttcacaactctgtgccttccaacccagtggctgcccctggattcttcattcatccatctgatgttattccacccactccaaaaacaacacctctttttatgactccaccactcactccacccaatgaagcagtttccgttggattaatgccgaacnnnnnnnnnnnnnnnnnnnnnnnnnnnnnnnnnnnnnnnnnnnnnnnnnnnnnnnnnnnnnnnnnnnnnnnnnnnnnnnnnnnnnnnnnnnnnnnnnnnnnnnnnnnnnnnnnnnnnnnnnnnnnnnnnnnnnnnnnnnnnnnnnnnnnnnnnnnnnnnnnnnnnnnnnnnnnnnnnnnnnnnnnnnnnnnnnnnnnnnnnnnnnnnnnnnnnnnnnnnnnnnnnnnnnnnnnnnnnnnnnnnnnnnnnnnnnnnnnnnnnnnnnnnnnnnnnnnnnnnnnnnnnnnnnnnnnnnnnnnnnnnnnnnnnnnnnnnnnnnnnnnnnnnnnnnnnnnnnnnnnnnnnnnnnnnnnnnnnnnnnnnnnnnnnnnnnnnnnnnnnnnnnnnnnnnnnnnnnnagatcactgtcattggacgttacgtgagtacaaatgccagagccaaaatcccattaggattttactatggtcacaagtacatcttaccttgggaaagtgaactgaagttaatgcaagagcctctaaagggagagggannnnnnnnnnnnnnnnnnnnnnnnnnnnnnnnnnnnnnnnnnnnnnnnnnnnnnnnnnnnnnnnnnnnnnnnnnnnnnnnnnnnnnnnnnnnnnnnnnnnnnnnnnnnnnnnnnnnnnnnnnnnnnnnnnnnnnnnnnnnnnnnnnnnnnnnnnnnnnnnnnnnnnnnnnnnnnnnnnnnnnnnnnnnnnnnnnnnnnnnnnnnnnnnnnnnnnnnnnnnnnnnnnnnnnnnnnnnnnnnnnnnnnnnnnnnnnnnnnnnnnnnnnnnnnnnnnnnnnnnnnnnnnnnnnnnnnnnnnnnnnnnnnnnnnnnnnnnnnnnnnnnnnnnnnnnnnnnnnnnnnnnnnnnnnnnnnnnnnnnnnnnnnnnnnnnnnnnnnnnnnnnnnnnnnnnnnnnnnnnnnnnnnnnnnnnnnnnnnnnnnnnnnnnnnnnnnnnnnnnnnnnnnnnnnnnnnnnnnnnnnnnnnnnnnnnnnnnnnnnnnnnnnnnnnnnnnnnnnnnnnnnnnnnnnnnnnnnnnnnnnnnnnnnnnnnnnnnnnnnnnnnnnnnnnnnnnnnnnnnnnnnnnnnnnnnnnnnnnnnnnnnnnnnnnnnnnnnnnnnnnnnnnnnnnnnnnnnnnnnnnnnnnnnnnnnnnnnnnnnnnnnnnnnnnnnnnnnnnnnnnnnnnnnnnnnnnnnnnnnnnnnnnnnnnnnnnnnnnnnnnnnnnnnnnnnnnnnnnnnnnnnnnnnnnnnnnnnnnnnnnnnnnnnnnnnnnnnnnnnnnnnnnnnnnnnnnnnnnnnnnnnnnnnnnnnnnnnnnnnnnnnnnnnnnnnnnnnnnnnnnnnnnnnnnnnnnnnnnnnnnnnnnnnnnnnnnnnnnnnnnnnnnnnnnnnnnnnnnnnnnnnnnnnnnnnnnnnnnnnnnnnnnnnnnnnnnnnnnnnnnnnnnnnnnnnnnnnnnnnnnnnnnnnnnnnnnnnnnnnnnnnnnnnnnnnnnnnnnnnnnnnnnnnnnnnnnnnnnnnnnnnnnnnnnnnnnnnnnnnnnnnnnnnnnnnnnnnnnnnnnnnnnnnnnnnnnnnnnnnnnnnnnnnnnnnnnnnnnnnnnnnnnnnnnnnnnnnnnnnnnnnnnnnnnnnnnnnnnnnnnnnnnnnnnnnnnnnnnnnnnnnnnnnnnnnnnnnnnnnnnnnnnnnnnnnnnnnnnnnnnnnnnnnnnnnnnnnnnnnnnnnnnnnnnnnnnnnnnnnnnnnnnnnnnnnnnnnnnnnnnnnnnnnnnnnnnnnnnnnnnnnnnnnnnnnnnnnnnnnnnnnnnnnnnnnnnnnnnnnnnnnnnnnnnnnnnnnnnnnnnnnnnnnnnnnnnnnnnnnnnnnnnnnnnnnnnnnnnnnnnnnnnnnnnnnnnnnnnnnnnnnnnnnnnnnnnnnnnnnnnnnnnnnnnnnnnnnnnnnnnnnnnnnnnnnnnnnnnnnnnnnnnnnnnnnnnnnnnnnnnnnnnnnnnnnnnnnnnnnnnnnnnnnnnnnnnnnnnnnnnnnnnnnnnnnnnnnnnnnnnnnnnnnnnnnnnnnnnnnnnnnnnnnnnnnnnnnnnnnnnnnnnnnnnnnnnnnnnnnnnnnnnnnnnnnnnnnnnnnnnnnnnnnnnnnnnnnnnnnnnnnnnnnnnnnnnnnnnnnnnnnnnnnnnnnnnnnnnnnnnnnnnnnnnnnnnnnnnnnnnnnnnnnnnnnnnnnnnnnnnnnnnnnnnnnnnnnnnnnnnnnnnnnnnnnnnnnnnnnnnnnnnnnnnnnnnnnnnnnnnnnnnnnnnnnnnnnnnnnnnnnnnnnnnnnnnnnnnnnnnnnnnnnnnnnnnnnnnnnnnnnnnnnnnnnnnnnnnnnnnnnnnnnnnnnnnnnnnnnnnnnnnnnnnnnnnnnnnnnnnnnnnnnnnnnnnnnnnnnnnnnnnnnnnnnnnnnnnnnnnnnnnnnnnnnnnnnnnnnnnnnnnnnnnnnnnnnnnnnnnnnnnnnnnnnnnnnnnnnnnnnnnnngccctggatgctcgcctagaagttggacttgaacagcaagcagaactcatgttgaaaatgatgtctaccctggaagcagattccattttacaggcattaacaaatacatctccnnnnnnnnnnnnnnnnnnnnnnnnnnnnnnnnnnnnnnnnnnnnnnnnnnnnnnnnnnnnnnnnnnnnnnnnnnnnnnnnnnnnnnnnnnnnnnnnnnnnnnnnnnnnnnnnnnnnnnnnnnnnnnnnnnnnnnnnnnnnnnnnnnnnnnnnnnnnnnnnnnnnnnnnnnnnnnnnnnnnnnnnnnnnnnnnnnnnnnnnnnnnnnnnnnnnnnnnnnnnnnnnnnnnnnnnnnnnnnnnnnnnnnnnnnnnnnnnnnnnnnnnnnnnnnnnnnnnnnnnnnnnnnnnnnnnnnnnnnnnnnnnnnnnnnnnnnnnnnnnnnnnnnnnnnnnnnnnnnnnnnnnnnnnnnnnnnnnnnnnnnnnnnnnnnnnnnnnnnnnnnnnnnnnnnnnnnnnnnnnnnnnnnnnnnnnnnnnnnnnnnnnnnnnnnnnnnnnnnnnnnnnnnnnnnnnnnnnnnnnnnnnnnnnnnnnnnnnnnnnnnnnnnnnnnnnnnnnnnnnnnnnnnnnnnnnnnnnnnnnnnnnnnnnnnnnnnnnnnnnnnnnnnnnnnnnnnnnnnnnnnnnnnnnnnnnnnnnnnnnnnnnnnnnnnnnnnnnnnnnnnnnnnnnnnnnnnnnnnnnnnnnnnnnnnnnnnnnnnnnnnnnnnnnnnnnnnnnnnnnnnnnnnnnnnnnnnnnnnnnnnnnnnnnnnnnnnnnnnnnnnnnnnnnnnnnnnnnnnnnnnnnnnnnnnnnnnnnnnnnnnnnnnnnnnnnnnnnnnnnnnnnnnnnnnnnnnnnnnnnnnnnnnnnnnnnnnnnnnnnnnnnnnnnnnnnnnnnnnnnnnnnnnnnnnnnnnnnnnnnnnnnnnnnnnnnnnnnnnnnnnnnnnnnnnnnnnnnnnnnnnnnnnnnnnnnnnnnnnnnnnnnnnnnnnnnnnnnnnnnnnnnnnnnnnnnnnnnnnnnnnnnnnnnnnnnnnnnnnnnnnnnnnnnnnnnnnnnnnnnnnnnnnnnnnnnnnnnnnnnnnnnnnnnnnnnnnnnnnnnnnnnnnnnnnnnnnnnnnnnnnnnnnnnnnnnnnnnnnnnnnnnnnnnnnnnnnnnnnnnnnnnnnnnnnnnnnnnnnnnnnnnnnnnnnnnnnnnnnnnnnnnnnnnnnnnnnnnnnnnnnnnnnnnnnnnnnnnnnnnnnnnnnnnnnnnnnnnnnnnnnnnnnnnnnnnnnnnnnnnnnnnnnnnnnnnnnnnnnnnngagcaagtggattacatctcactaaacatgaaaactttcatggtgggttggatgctatatcagttggggatggattatttaccatactgacaacccttagtaaaannnnnnnnnnnnnnnnnnnnnnnnnnnnnnnnnnnnnnnnnnnnnnnnnnnnnnnnnnnnnnnnnnnnnnnnnnnnnnnnnnnnnnnnnnnnnnnnnnnnnnnnnnnnnnnnnnnnnnnnnnnnnnnnnnnnnnnnnnnnnnnnnnnnnnnnnnnnnnnnnnnnnnnnnnnnnnnnnnnnnnnnnnnnnnnnnnnnnnnnnnnnnnnnnnnnnnnnnnnnnnnnnnnnnnnnnnnnnnnnnnnnnnnnnnnnnnnnnnnnnnnnnnnnnnnnnnnnnnnnnnnnnnnnnnnnnnnnnnnnnnnnnnnnnnnnnnnnnnnnnnnnnnnnnnnnnnnnnnnnnnnnnnnnnnnnnnnnnnnnnnnnnnnnnnnnnnnnnnnnnnnnnnnnnnnnnnnnnnnnnnnnnnnnnnnnnnnnnnnnnnnnnnnnnnnnnnnnnnnnnnnnnnnnnnnnnnnnnnnnnnnnnnnnnnnnnnnnnnnnnnnnnnnnnnnnnnnnnnnnnnnnnnnnnnnnnnnnnnnnnnnnnnnnnnnnnnnnnnnnnnnnnnnnnnnnnnnnnnnnnnnnnnnnnnnnnnnnnnnnnnnnnnnnnnnnnnnnnnnnnnnnnnnnnnnnnnnnnnnnnnnnnnnnnnnnnnnnnnnnnnnnnnnnnnnnnnnnnnnnnnnnnnnnnnnnnnnnnnnnnnnnnnnnnnnnnnnnnnnnnnnnnnnnnnnnnnnnnnnnnnnnnnnnnnnnnnnnnnnnnnnnnnnnnnnnnnnnnnnnnnnnnnnnnnnnnnnnnnnnnnnnnnnnnnnnnnnnnnnnnnnnnnnnnnnnnnnnnnnnnnnnnnnnnnnnnnnnnnnnnnnnnnnnnnnnnnnnnnnnnnnnnnnnnnnnnnnnnnnnnnnnnnnnnnnnnnnnnnnnnnnnnnnnnnnnnnnnnnnnnnnnnnnnnnnnnnnnnnnnnnnnnnnnnnnnnnnnnnnnnnnnnnnnnnnnnnnnnnnnnnnnnnnnnnnnnnnnnnnnnnnnnnnnnnnnnnnnnnnnnnnnnnnnnnnnnnnnnnnnnnnnnnnnnnnnnnnnnnnnnnnnnnnnnnnnnnnnnnnnnnnnnnnnnnnnnnnnnnnnnnnnnnnnnnnnnnnnnnnnnnnnnnnnnnnnnnnnnnnnnnnnnnnnnnnnnnnnnnnnnnnnnnnnnnnnnnnnnnnnnnnnnnnnnnnnnnnnnnnnnnnnnnnnnnnnnnnnnnnnnnnnnnnnnnnnnnnnnnnnnnnnnnnnnnnnnnnnnnnnnnnnnnnnnnnnnnnnnnnnnnnnnnnnnnnnnnnnnnnnnnnnnnnnnnnnnnnnnnnnnnnnnnnnnnnnnnnnnnnnnnnnnnnnnnnnnnnnnnnnnnnnnnnnnnnnnnnnnnnnnnnnnnnnnnnnnnnnnnnnnnnnnnnnnnnnnnnnnnnnnnnnnnnnnnnngttactttttaattggtccatgtctcttccctgcaatatggttttgaagaaagctgttgacagtctactttgctcaatgtgtcacgtacacccaaactatttttctttgctcatgggctggatgggaattacccctcctccagtgcaatgtcaccatggactgtccatgacagatgatagcaaaaagcaggatcttagttcatctttaacagatgactctaaaaatgcacaagcacctctcgcattaactgaatcacatttggctacccttgcttcctcttctcaatctcctgaagctattaaacaattactagactcaggtttgccttctcttcttgtgaggagtctggctagtttctgctttagccacatttctgaaacagaaagcattgnnnnnnnnnnnnnnnnnnnnnnnnnnnnnnnnnnnnnnnnnnnnnnnnnnnnnnnnnnnnnnnnnnnnnnnnnnnnnnnnnnnnnnnnnnnnnnnnnnnnnnnnnnnnnnnnnnnnnnnnnnnnnnnnnnnnnnnnnnnnnnnnnnnnnnnnnnnnnnnnnnnnnnnnnnnnnnnnnnnnnnnnnnnnnnnnnnnnnnnnnnnnnnnnnnnnnnnnnnnnnnnnnnnnnnnnnnnnnnnnnnnnnnnnnnnnnnnnnnnnnnnnnnnnnnnnnnnnnnnnnnnnnnnnnnnnnnnnnnnnnnnnnnnnnnnnnnnnnnnnnnnnnnnnnnnnnnnnnnnnnnnnnnnnnnnnnnnnnnnnnnnnnnnnnnnnnnnnnnnnnnnnnaggttctttgtgaactatttcagacatctcctcaaagagggaaccttccaacatctgggaacatttcagggtttatacgaagattatttttacagttgatgctggaagatgagaaagtgacaatgtttcttcagtctccatgtcca

SEQ ID NO: 31556 - DNA, 3506 bp, Macaca Mulatta
  misc_feature (1)...(3506): n = A,T,C or G
attttgaccactatttagacgagtgacctcataaaccctttagcaaagtagacactcatacctaccacatttcttcaaagtagatttgtattttgatttgagatggatgaaaagcatgataggtttggagtgcacctagttatgtcccagctcataaagactgttgagctctctgcactgctgttgatgaagcaaggcatgaacccagaaaatggggatgccaaagcagaggcttaggtgctgttccttgnnnnnnnnnnnnnnnnnnnnnnnnnnnnnnnnnnnnnnnnnnnnnnnnnnnnnnnnnnnnnnnnnnnnnnnnnnnnnnnnnnnnnnnnnnnnnnnnnnnnnnnnnnnnnnnnnnnnnnnnnnnnnnnnnnnnnnnnnnnnnnnnnnnnnnnnnnnnnnnnnnnnnnnnnnnnnnnnnnnnnnnnnnnnnnnnnnnnnnnnnnnnnnnnnnnnnnnnnnnnnnnnnnnnnnnnnnnnnnnnnnnnnnnnnnnnnnnnnnnnnnnnnnnnnnnnnnnnnnnnnnnnnnnnnnnnnnnnnnnnnnnnnnnnnnnnnnnnnnnnnnnnnnnnnnnnnnnngaagatccaaccatggagcgaccctatacgtttaaggactttctcctcagaccaagaannnnnnnnnnnnnnnnnnnnnnnnnnnnnnnnnnnnnnnnnnnnnnnnnnnnnnnnnnnnnnnnnnnnnnnnnnnnnnnnnnnnnnnnnnnnnnnnnnnnnnnnnnnnnnnnnnnnnnnnnnnnnnnnnnnnnnnnnnnnnnnnnnnnnnnnnnnnnnnnnnnnnnnnnnnnnnnnnnnnnnnnnnnnnnnnnnnnnnnnnnnnnnnnnnnnnnnnnnnnnnnnnnnnnnnnnnnnnnnnnnnnnnnnnnnnnnnnnnnnnnnnnnnnnnnnnnnnnnnnnnnnnnnnnnnnnnnnnnnnnnnnnnnnnnnnnnnnnnnnnnnnnnnnnnnnnnnnnnnnnnnnnnnnnnnnnnnnnnnnnnnnnnnnnnnnnnnnnnnnnnnnnnnnnnnnnnnnnnnnnnnnnnnnnnnnnnnnnnnnnnnnnnnnnnnnnnnnnnnnnnnnnnnnnnnnnnnnnnnnnnnnnnnnnnnnnnnnnnnnnnnnnnnnnnnnnnnnnnnnnnnnnnnnnnnnnnnnnnnnnnnnnnnnnnnnnnnnnnnnnnnnnnnnnnnnnnnnnnnnnnnnnnnnnnnnnnnnnnnnnnnnnnnnnnnnnnnnnnnnnnnnnnnnnnnnnnnnnnnnnnnnnnnnnnnnnnnnnnnnnnnnnnnnnnnnnnnnnnnnnnnnnnnnnnnnnnnnnnnnnnnnnnnnnnnnnnnnnnnnnnnnnnnnnnnnnnnnnnnnnnnnnnnnnnnnnnnnnnnnnnnnnnnnnnnnnnnnnnnnnnnnnnnnnnnnnnnnnnnnnnnnnnnnnnnnnnnnnnnnnnnnnnnnnnnnnnnnnnnnnnnnnnnnnnnnnnnnnnnnnnnnngcttgcagaagatggtgcgtctggatcagccacaaacagtaacaaccatctaatcgagcctcagatccgccggcctcgtagcctcagctcgccaacagtaactttatctgccccgctggaggnnnnnnnnnnnnnnnnnnnnnnnnnnnnnnnnnnnnnnnnnnnnnnnnnnnnnnnnnnnnnnnnnnnnnnnnnnnnnnnnnnnnnnnnnnnnnnnnnnnnnnnnnnnnnnnnnnnnnnnnnnnnnnnnnnnnnnnnnnnnnnnnnnnnnnnnnnnnnnnnnnnnnnnnnnnnnnnnnnnnnnnnnnnnnnnnnnnnnnnnnnnnnnnnnnnnnnnnnnnnnnnnnnnnnnnnnnnnnnnnnnnnnnnnnnnnnnnnnnnnnnnnnnnnnnnnnnnctggctgggaagaaagaattcacctggatggccgaacgttttatattgatcatatagcaaaattactcagtgggaagacccgagactgcagaacccagctattactggtccggnggctgttccttactccagagagtttaagcagaaatatgactacttcaggaagaaattaaagaaacctnnnnnnnnnnnnnnnnnnnnnnnnnnnnnnnnnnnnnnnnnnnnnnnnnnnnnnnnnnnnnnnnnnnnnnnnnnnnnnnnnnnnnnnnnnnnnnnnnnnnnnnnnnnnnnnnnnnnnnnnnnnnnnnnnnnnnnnnnnnnnnnnnnnnnnnnnnnnnnnnnnnnnnnnnnnnnnnnnnnnnnnnnnnnnnnnnnnnnnnnnnnnnnnnnnnnnnnnnnnnnnnnnnnnnggacaactacactcttcagatcaaccctaattcaggcctctgtaatgaagatcatttgtcctacttcacttttattggaagagttgctggtctggccgtatttcatggaaagctcttagatggnnnnnnnnnnnnnnnnnnnnnnnnnnnnnnnnnnnnnnnnnnnnnnnnnnnnnnnnnnnnnnnnnnnnggatagtgaatattacaactctttgaaatggatcctggagaatgaccctactgagctggacctcatgttctgcatagatgaagaaaactttggacannnnnnnnnnnnnnnnnnnnnnnnnnnnnnnnnnnnnnnnnnnnnnnnnnnnnnnnnnnnnnnnnnnnnnnnnnnnnnnnnnnnnnnnnnnnnnnnnnnnnnnnnnnnnnnnnnnnnnnnnnnnnnnnnnnnnnnnnnnnnnnnnnnnnnnnnnnnnnnnnnnnnnnnnnnnnnnnnnnnnnnnnnnnnnnnnnnnnnnnnnnnnnnnnnnnnnnnnnnnnnnnnnnnnnnnnnnnnnnnnnnnnnnnnnnnnnnnnnnnnnnnnnnnnnnnnnnnnnnnnnnnnnnnnnnnnnnnnnnnnnnnnnnnnnnnnnnnnnnnnnnnnnnnnnnnnnnnnnnnnnnnnnnnnnnnnnnnnnnnnnnnnnnnnnnnnnnnnnnnnnnnnnnnnnnnnnnnnnnnnnnnnnnnnnnnnnnnnnnnnnnnnnnnnnnnnnnnnnnnnnnnnnnnnnnnnnnnnnnnnnnnnnnnnnnngctttaatcgccttgacttacctccatatgaaacctttgaagatttacgagagaaacttctcatggccgtggaaaatgctcaaggatttgaaggggtggattaagcaccctctgcctcgggggtggttgttcttcaagcaagttctgcttgcacttttgcatttgcctaacagacttttgcagaggcgacggcagagagcagctgcaggcatggtccctggagccgagccttcgccatgcactcgtccaagatcggatgtgggaacctggtcccagcttgagtttctgcatttcccaccacaaattatcaactggttgatgtgtacactaattacatttcaggaggacttacgctatttatgttgtgcctctgcaggcaaagcccttaataaatattttacatcctttctaatgacaatgaatggaattaatcactctacaggtatattat

SEQ ID NO: 31557 - DNA, 754 bp, Macaca Mulatta
ggggaggaagaaagtacatcccagattgaaagaccacttttgcaagaacctgcaaaaaaagtgaaagcgaagaagaaacacactaacgcagagaaaaagttggcaaacagggaaagtgctctagcgagtgctgatttagaagaagaaattcaccagaaacaagggcagaaaaggaaaaattctcaacctggtgttaaagtagcagatagaaaaatacttgatgatgtagatgacacagttatcagtcaaagaaagaaaattcaaatcaacgaagaagaagagagattaaagaacgagagaactgtatttgttgggaatttgcctgttacatgtaataagaagaagctgaaatcgttttttaaagagtatggacaaatagaatctgtacgatttcgttctctgattccagcagagggaactctatccaaaaagctggcagcaataaaacgtaaaattcatcctgatcagaaaaatattaatgcctatgttgtgtttaaggaagagagtgctgccacacaggcgttgaaaagaaatggggcccaaattgcagatggatttcgtattagagttgatctcgcatctgagacctcatctagagacaagagatcggtttttgtggggaatctcccttataaagttgcagaatctgcccgttgaagaagcacttttctgggactggtggaaagtggtcatgggcccgttgaaggattgtggaagaggacccaggtggacaagggcatccggccaaaaaggg

SEQ ID NO: 31558 - DNA, 427 bp, Macaca Mulatta
aggtcgcccggctcatggagatgggattttccagaggtgatgctttggaagccctgagagcttcaaacaatgacctcaatgtcgccaccaacttcctgctgcaacactgatggtcccaggccaacactgggaccggaccggccgccgagtgactgtgcgtggtccccaccatcagatcagcccggggacctttttttctggtgctgatgttcttgtgggaatagggaggttccaccacacccctgccttcaaccccaagactgttgccattatagtatggaaataagtttgccattacattatcatgtattttctacctatattttttattgggcattttccctaggttggagagtcatcactcgttttgaatgggtttaaaatgcattataatggatgatttctgcaggcagttgaatggcactcc

SEQ ID NO: 31559 - DNA, 473 bp, Macaca Mulatta
catgttgggagaggggagtggattcttgctgctggtatgaaactccctgggacctagaggctggcaaatgtttaaaatcaccatgtgtaagaggcagccaagtcagctctgccaacagctaggggagttgggaaagagtgggtgtgtgtctgcatcccctctgtaggaaaaagaactcagtagcttgctgctccctcaccccaccctccaggttcaagaccctttctctgggagacagaagtcaatggcctgctttttccaaatgctattccctgtccatcctgccccatctggccagcccagcccagtccaggacctggctggatgcttcgtctccctggaactcttccagcctttctacttgatctccagcccccaggtctttgccagatgatgggaaggcaaggaagaagggacagggaaagagaattactgataaaggaagggggtattcgactgtataaccatatgga

SEQ ID NO: 31560 - DNA, 802 bp, Macaca Mulatta
  misc_feature (1)...(802): n = A,T,C or G
gggtagaaaaaggttataaagttggaatcttaaattgtaaaattaaccattgagtatcaaagttctaaaagcagaactcattttgtgcaatgaacataaggaaagactactgtatagnnnnnnnnnnnnnnnnnnnaaatgaagaagagctttgcttaagggttgcatacttttattggagtaaatctgaatgatcctactcctttggagtaaaactagtgcttaccagtttccaattgtatttagcttctggttggaatttnnnnnnnnnnnnnnnnnnnnnnnnnnnnnntaaataaaataggtgaaagttccctgactattcaggtgaatacnnnnnnnnnnnnnnnnnnnnnnnnnnnnnnnnnnnnnnnnnnnnnnnnnnnnnnnnnnnnnnnnnnnnnnnnnnnnnnnnnnnnnnnnnnnnnnnnnnnnnnnntgtgcggccccccccgccccccaaaaactttttaaaacttttttttgggcccggggccccaaaaggtaaggaaaatgggcccaaactggttcctaagaaaaaaccgggcaaaaaaaggggcttggattnnnnnnnnnnnnnnnnnnncccggggggaaaccgaaggttttttaaaaaaatcccaaaagggtgtttggaaggccttttcgggggttctttccacccgggaattccccaaccgaggccccaatataacaatatcacccccccccgccccggggcacctttatttgaaagaaaaaggggtgggaaaaattccccaaaaaaccctttttttcggccccaaaatgtgggagaaacccc

SEQ ID NO: 31561 - DNA, 218 bp, Macaca Mulatta
atcacaacggggcagctctagtaatacgaaggtgaggtctaggatgctgcgtgaggcgcgacgacaggaggtatgacctgggtggggtcagggaaggtgttagctgagaactaagagatgagggaggcacgaactctacacgggtgagggggggaactgtgtgtgcaaaggtgagcggggtgtgagaaaggcccctgtggccatcatcgacactagcg

SEQ ID NO: 31562 - DNA, 620 bp, Macaca Mulatta
ggaagctgaatagaatatattgttgaagccttcaggtcacaaactgtcttttttaacctcctgtccctcctaaaacacgccaacccctgcagtcaaatcacattagtaatctgatttgctgacagtcctgtcctgcctgctccttgtattcccacatgtcctgcatccctcccccactggagtgatttcagtgaatcagacaaggaaggatgtttaggatcactactgcattgcaataccctgttatcctcagcaacaaaacccacatttcatacgtcctttgtgtactcaggataaagaccgatgtttactctctgggcactgttgtaagataggttttgtcagagcataatcattgtctgcaaagtgtttggtgcgaggaagattattgctaattttgtgaaataaagagtctagccctctccttttaatgaacttaactctcgctggcatctgtagtatcattgggagcttaggcacacatggaaatgagagcccggcgcatggattttaatgtttttctaacaactgtggagatttgagggaatgtgtggtgaatgtaaaatacctagtttacttggcagtctcttgtgtaaatcacagtaaaacaaagtaaatga

SEQ ID NO: 31563 - DNA, 507 bp, Macaca Mulatta
  misc_feature (1)...(507): n = A,T,C or G
gtgtattcccgcgtggcccgcatctgtaaaaacgacatgggtggctcccagcgggtcctggagaaacactggacttcatttctgaaggctcggctgaactgttctgtacgtggagattcgtttttctactttgatgttctgcagtctatagcagacataatacaaatcaatggcatccccannnnnnnnnnnnnnnnnnnnnnnnnnnnnnngcatccctggttccgctgtctgtgcatttagcatggatgacattgaaaaagtattcaaaggacggtttaaggaacagaaaactccagattctgtttggacagcagttcccgaagacaaagtcccaaagccaaggnaggcctggctgttgtgcaaaacacggcctcgctgaagcttataaaacctccatcgatttcccggatgaaaccctgtcattcatcaaatctcatcctctgatggactctgctgttccacccattgccgatgagccctggttcacaaagactcgggtcaggt

SEQ ID NO: 31564 - DNA, 550 bp, Macaca Mulatta
gtgacgctgacaccaggtcatccaggagggctggcccccctggaatattgtgaatgactagggaggtggggtaggggcctctccgtcctgccgctggcaaggaatggggacagtggctgtctgcaatcaggtatggcagcatggggcagtgactggatttctgcccaagaccagaggagtgtgctgtgctggcaagtgtgagtcctccagttgctctggcccaggagcccatggtggggtgctctcttcctggtcctctgcttctctggatcctcctcaccccctcctgcgcatggggccggccctttactcagagatcactcaataaatctgagaacactcctactggctccagcctttcttctttggtggcggggcttctgtttctgggatcatggtatggagaggtgctcaggcagaaggcagggctcttggatgaaatagagatatgggacagatatacaggaagccggcccaggggaatgagaggctgctccacagagccgccacctaggttgtgaataggagtgtctgacagcgggatgccctc

SEQ ID NO: 31565 - DNA, 741 bp, Macaca Mulatta
caaaatatagaagcaatgacttatttaaaatccataccattcttatgaactactaacaaccaatgaaaagacttagaagttcatggaactcagaatctatgggaattgagattttaccaggtacatgagtgctagctcatctcccttgtgcccttggtgagctaaaattccacgatattcacccaaagcagtaactaacaaagacgttagaaatcactaaaagaatgaaagcgtccctttccaccgtaagttcaaaactcaccataaaagcccctgtcaaggcgctcatggaaatgctgttcgatgtgaactctggtgaagccgaggctcaccagtgacactggacagagcacgcgccactttctgcgtgtgaataaaatgggtgaggaaacaaaggcagccaggtttttgtgtttctttctgcaggccgctacgtccaagacatctgtgtatatggaccaggagacctgccatggctcattcagtcgtcttctctgtttgcctacaaattcgaaccctcgacagacccgcttgtagttacctgcttagagcggcggcacagacttcaagtgctgaggcaggcagaagttcccatagagccacactggcattttcaccagcagagtcatttcaacatgagaatgaaccactaggggactgtttgctttcttactgagtggtatcattctgtttccttgacttgaaacaagagaatattgaaccgaagaaagtgggaagatg

SEQ ID NO: 31566 - DNA, 74 bp, Macaca Mulatta
ataatggtacataccgctgtgaagcttcaaacatagtggggaaagctcactcggattatatgctgtatgtatac

SEQ ID NO: 31567 - DNA, 2050 bp, Macaca Mulatta
  misc_feature (1)...(2050): n = A,T,C or G
ggtaaaaagcaggacatctggtatgttattgacctcctgactggggagaagcagcagaccttgtcatcagcctttgcagatagtctctgcccatcaacctctcttctgtatcttgggcgaacagnnnnnnnnnnnnnnnnnnnnnnnnnnnnnnnnnnnnnnnnnnnnnnnnnnnnnnnnnnnnnnnnnnnnnnnnnnnnnnnnnnnnnnnnnnnnnnnnnnnnnnnnnnnnnnnnnnnnnnnnnnnnnnnnnnnnnnnnnnnnnnnnnnnnnnnnnnnnnnnnnnnnnnnnnnnnnnnnnnnnnnnnnnnnnnnnnnnnnnnnnnnnnnnnnnnnnnnnnnnnnnnnnnnnnnnnnnnnnnnnnnnnnnnnnnnnnnnnnnnnnnnnnnnnnnnnnnnnnnnnnnnnnnnnnnnnnnnnnnnnnnnnnnnnnnnnnnnnnnnnnnnnnnnnnnnnnnnnnnnnnnnnnnnnnnnnnnnnnnnnnnnnnnnnnnnnnnnnnnnnnnnnnnnnnnnnnnnnnnnnnnnnnnnnnnnnnnnnnnnnnnnnnnnnnnnnnnnnnnnnnngccccgcggcagcacacttcctttgctggaagggccccagactgatggcgtcaccattggggacaagggggagtgtgtgatcacgcccagcacagagctcaagtttgactccggactcaaaagcaagaacaagctcaactacttgaggaattactggcttctgataggnnnnnnnnnnnnnnnnnnnnnnnnnnnnnnnnnnnnnnnnnnnnnnnnnnnnnnnnnnnnnnnnnnnnnnnnnnnnnnnnnnnnnnnnnnnnnnnnnnnnnnnnnnnnnnnnnnnnnnnnnnnnnnnnnnnnnnnnnnnnnnnnnnnnnnnnnnnnnnnnnnnnnnnnnnnnnnnnnnnnnnnnnnnnnnnnnnnnnnnnnnnnnnnnnnnnnnnnnnnnnnnnnnnnnnnnnnnnnnnnnnnnnnnnnnnnnnnnnnnnnnnnnnnnnnnnnnnnnnnnnnnnnnnnnnnnnnnnnnnnnnnnnnnnnnnnnnnnnnnnnnnnnnnnnnnnnnnnnnnnnnnnnnnnnnnnnnnnnnnnnnnnnnnnnnnnnnnnnnnnnnnnnnnnnnnnnnnnnnnnnnnnnnnnnnnnnnnnnnnnnnnnnnnnnnnnnnnnnnnnnnnnnnnnnnnnnnnnnnnnnnnnnnnnnnnnnnnnnnnnnnnnnnnnnnnnnnnnnnnnnnnnnnnnnnnnnnnnnnnnnnnnnnnnnnnnnnnnnnnnnnnnnnnnnnnnnnnnnnnnnnnnnnnnnnnnnnnnnnnnnnnnnnnnnnnnnnnnnnnnnnnnnnnnnnnnnnnnnnnnnnnnnnnnnnnnnnnnnnnnnnnnnnnnnnnnnnnnnnnnnnnnnnnnnnnnnnnnnnnnnnnnnnnnnnnnnnnnnnnnnnnnnnnnnnnnnnnnnnnnnnnnnnnnnnnnnnnnnnnnnnnnnnnnnnnnnnnnnnnnnnnnnnnnnnnnnnnnnnnnnnnnnnnnnnnnnnnnnnnnnnnnnnnnnnnnnnnnnnnnnnnnnnnnnnnnnnnnnnnnnnnnnnnnnnnnnnnnnnnnnnnagtatgtggagcagaaggactttgcgcatctcggcctggagcccatcaccttgctgcagcagaccacctcgggcctggcccaccttcactccctcaacatcgngttcacagagacctaaagccccacaacattctcatatccatgcccaatgcacatggcaagatcaaggccatgatctctgactttggcctgtgcaagaagctggcagcgggcaggcacagcttcagccgccgatctggggtgcctggcacagaaggctggatcgctccagagatgctgagcgaagactgtaaggagaaccctnacctacacggtggacatcttttctgcaggctgcgtcttttactacgtgatctctgagggcagccacccttttggcaagtccctgcagcggcaggccaacatcctcctgggtgcctgcagcctcgagtgcttgcacccagagaagcacg

SEQ ID NO: 31568 - DNA, 611 bp, Macaca Mulatta
tgctttaatacaaaaacaaaatctgtaaaaggtgtccaaatacatagtaatcttttccaattatgtctgattaagatttaaaactgaaggtgcattttgggagtaggattttaaagctcaatctgtatctgctaaaactgattattgttgattgatagaagaggggaaatttgatttaaattgcatctattaatctttttatctgaaactttgtacacttttccacttttaaaacctattttaagtacagcaaaatttatttaaaactgtcaaagcagtaaaaagtattaccatgaaatggttagggtattaatggaacaaacccagtttccctctattgacacacttactaggaagggattgcttcactggtttaataattaaaaagttatgtttattaaaacaccctgtcagaacagtcattttcagtattagattcctgtactgttgtgttttgagtgtgctttggaaccttcatagaacacactttcttttggaatgtatttgattgataagaaagtttaaacattgttttcacctcaatgtagaaatacagtggtttcgtctacattcacttcttttagtgctgacaaaataaaatactcattttt

SEQ ID NO: 31569 - DNA, 2792 bp, Macaca Mulatta
  misc_feature (1)...(2792): n = A,T,C or G
agacaccccatcacagagggtacagtttattcttggaaccgaggatgatgacgaggaacacattcctcatgaccttttcacagaactggatgagatttgttggcgtgaaggtgaggatgctgagtggcgagaaacagccaggtgnnnnnnnnnnnnnnnnnnnnnnnnnnnnnnnnnnnnnnnnnnnnnnnnnnnnnnnnnnnnnnnnnnnnnnnnnnnnnnnnnnnnnnnnnnnnnnnnnnnnnnnnnnnnnnnnnnnnnnnnnnnnnnnnnnnnnnnnnnnnnnnnnnnnnnnnnnnnnnnnnnnnnnnnnnnnnnnnnnnnnnnnnnnnnnnnnnnnnnnnnnnnnnnnnnnnnnnnnnnnnnnnnnnnnnnnnnnnnnnnnnnnnnnnnnnnnnnnnnnnnnnnnnnnnnnnnnnnnnnnnnnnnnnnnnnnnnnnnnnnnnnnnnnnnnnnnnnnnnnnnnnnnnnnnnnnnnnnnnnnnnnnnnnnnnnnnnnnnnnnnnnnnnnnnnnnnnnnnnnnnnnnnnnnnnnnnnnnnnnnnnnnnnnnnnnnnnnnnnnnnnnnnnnnnnnnnnnnnnnnnnnnnnnnnnnnnnnnnnnnnnnnnnnnnnnnnnnnnnnnnnnnnnnnnnnnnnnnnnnnnnnnnnnnnnnnnnnnnnnnnnnnnnnnnnnnnnnnnnnnnnnnnnnnnnnnnnnnnnnnnnnnnnnnnnnnnnnnnnnnnnnnnnnnnnnnnnnnnnnnnnnnnnnnnnnnnnnnnnnnnnnnnnnnnnnnnnnnnnnnnnnnnnnnnnnnnnnnnnnnnnnnnnnnnnnnnnnnnnnnnnnnnnnnnnnnnnnnnnnnnnnnnnnnnnnnnnnnnnnnnnnnnnnnnnnnnnnnnnnnnnnnnnnnnnnnnnnnnnnnnnnnnnnnnnnnnnnnnnnnnnnnnnnnnnnnnnnnnnnnnnnnnnnnnnnnnnnnnnnnnnnnnnnnnnnnnnnnnnnnnnnnnnnnnnnnnnnnnnnnnnnnnnnnnnnnnnnnnnnnnnnnnnnnnnnnnnnnnnnnnnnnnnnnnnnnnnnnnnnnnnnnnnnnnnnnnnnnnnnnnnnnnnnnnnnnnnnnnnnnnnnnnnnnnnnnnnnnnnnnnnnnnnnnnnnnnnnnnnnnnnnnnnnnnnnnnnnnnnnnnnnnnnnnnnnnnnnnnnnnnnnnnnnnnnnnnnnnnnnnnnnnnnnnnttggaggatgctgggagaagcaactgaagggcgtatanagtgcaattgaatctctctttggagcatccatgactgggatagcctattctctctttggtggacagcctcttaccatattaggcagtacaggaccagttttggtgtttgaaaagattttgtttaaattttgcaannnnnnnnnnnnnnnnnnnnnnnnnnnnnnnnnnnnnnnnnnnnnnnnnnnnnnnnnnnnnnnnnnnnnnnnnnnnnnnnnnnnnnnnnnnnnnnnnnnnnnnnnnnnnnnnnnnnnnnnnnnnnnnnnnnnnnnnnnnnnnnnnnnnnnnnnnnnnnnnnnnnnnnnnnnnnnnnnnnnnnnnnnnnnnnnnnnnnnnnnnnnnnnnnnnnnnnnnnnnnnnnnnnnnnnnnnnnnnnnnnnnnnnnnnnnnnnnnnnnnnnnnnnnnnnnnnnnnnnnnnnnnnnnnnnnnnnnnnnnnnnnnnnnnnnnnnnnnnnnnnnnnnnnnnnnnnnnnnnnnnnnnnnnnnnnnnnnnnnnnnnnnnnnnnnnnnnnnnnnnnnnnnnnnnnnnnnnnnnnnnnnnnnnnnnnnnnnnnnnnnnnnnnnnnnnnnnnnnnnnnnnnnnnnnnnnnnnnnnnnnnnnnnnnnnnnnnnnnnnnnnnnnnnnnnnnnnnnnnnnnnnnnnnnnnnnnnnnnnnnnnnnnnnnnnnnnnnnnnnnnnnnnnnnnnnnnnnnnnnnnnnnnnnnnnnnnnnnnnnnnnnnnnnnnnnnnnnnnnnnnnnnnnnnnnnnnnnnnnnnnnnnnnnnnnnnnnnnnnnnnnnnnnnnnnnnnnnnnnnnnnnnnnnnnnnnnnnnnnnnnnnnnnnnnnnnnnnnnnnnnnnnnnnnnnnnnnnnnnnnnnnnnnnnnnnnnnnnnnnnnnnnnnnnnnnnnnnnnnnnnnnnnnnnnnnnnnnnnnnnnnnnnnnnnnnnnnnnnnnnnnnnnnnnnnnnnnnnnnnnnnnnnnnnnnnnnnnnnnnnnnnnnnnnnnnnnnnnnnnnnnnnnnnnnnnnnnnnnnnnnnnnnnnnnnnnnnnnnnnnnnnnnnnnnnnnnnnnnnnnnnnnnnnnnnnnnnnnnnnnnnnnnnnnnnnnnnnnnnnnnnnnnnnnnnnnnnnnnnnnnnnnnnnnnnnnnnnnnnnnnnnnnnnnnnnnnnnnnnnnnnnnnnnnnnnnnnnnnnnagtttattcccatgccagtgctatatggagtgtttctttatatgggtgcttcatctctaaagggaattcannnnnnnnnnnnnnnnnnnnnnnnnnnnnnnnnnnnnnnnnnnnnnnnnnnnnnnnnnnnnnnnnnnnnnnnnnnnnnnnnnnnnnnnnnnnnnnnnnnnnnnnnnnnnnnnnnnnnnnnnnnnnnnnnnnnnnnnnnnnnnnnnnnnnnnnnnnnnnnnnnnnnnnnnnnnngtgttagccctggtatttgtaagaaagttgatggacttgttgttcacgaagcgggaactcagctggttggatgatttaatgcccgagagtaagaaaaagaaactggaagatgctgaaaaagaag

SEQ ID NO: 31570 - DNA, 912 bp, Macaca Mulatta
  misc_feature (1)...(912): n = A,T,C or G
tgttctcagctgtcccttcggcggccggctatgcgctcatggcgggtgcgcacgccttatggatgctgctgctcggaaggacgctgacgggcttcgccggggggctcacagccgcctgcatcccggtnnnnnnnnnnnnnnnnnnnnnnnnnnnnnnnnnnnnnnnnnnnnnnnnnnnnnnnnnnnnnnnnnnnnnnnnnnnnnnnnnnnnnnnnnnnnnnnnnnnnnnnnnnnnnnnnnnnnnnnnnnnnnnnnnnctgccgtggcgctggctggctgtggccggggaggcgcccgtgctcgtcatgatcctgctgctcagcttcatgcccaactcgccgcgcttcctgctctctcggggcagggatgaggaggccctgcgggcgctggcctggctgcgcgggacggacgctgacgtccactgggagttcgagcaaatccaggacaacgtccggagacannnnnnnnnnnnnnnnnnnnnnnnnnnnnnnnnnnnnnnnnnnnnnnnnnnnnnnnnnnnnnnnnnnnnnnnnnnnnnnnnnnnnnnnnnnnnnnnnnnnnnnnnnnnnnnnnnnnnnnnnnnnnnnnnnnnnnnnnnnnnnnnnnnnnnnngcccccgaaggatgacgcagccatcgttggggctgtgcggctcctgtctgtgctgatcgctgccctcaccatggacctcgctggccgcaaggtgctgctcttcgtctcanncagcggccatcatgtttgctgccaacctgactctggggctgtacatccactttggccccaggcctctgagccccaacagcactgcgggcctggaaagtgagtcctgggggaacttggcgcagcccctggcagcacccgctggctacctcaccctggtgcccctgctggccaccatgttcttcattatgg

SEQ ID NO: 31571 - DNA, 439 bp, Macaca Mulatta
  misc_feature (1)...(439): n = A,T,C or G
ggggcttccggtggcggagcggcggattagcctgcgcggggcaaaatggagcttgaggccatgagcagatacaccagcccagtgaacccggctgtcttcccccatctgaccgtggtgcttttggccatcggcatgttcttcaccgcctggttcttcgtttacgaggtcacctctaccaagtacactcgtgatatctataaagagctcctcatctctttggtggcctcactcttcatgggctttggagtccttttcctgctgctctgggttggcatctacgtgtgagcgcccaagggtaacaaccagatggcttcactgaacccctgcttttgtaaattacttttttttttactgttgctggaagtgtcccacctgctgctcataataaaggcagatgtatgannaanannnnnannnnnnnnnnnnnnnnnnnnnnnnn

SEQ ID NO: 31572 - DNA, 846 bp, Macaca Mulatta
  misc_feature (1)...(846): n = A,T,C or G
ggtttgcagtaagcattggctacnnnnnnnnnnnnnnnnnnnnnnnnnnnnnnnnnnnnnnnnnnnnnnnnnnnnnnnnnnnnnnnnnnnnnnnnnnnnnnnnnnnnnnnnnnnnnnnnnnnnnnnnnnnnnnnnnnnnnnnnnnnnnnnnnnnnnnnnnnnnnnnnnnnnnnnnnnnnnnnnnnnnnnnnnnnnnnnnnnnnnnnnnnnnnnnnnnnnnnnnnnnnnnnnnnnnnnnnnnnnnnnnnnnnnnnnnnnnnnnnnnnnnnnnnnnnnnnnnnnnnnnnnnnnnnnnnnnnnnnnnnnnnnnnnnnnnnnnnnnnnnnnnnnnnnnnnnnnnnnnnnnnnnnnnnnnnnnnnnnnnnnnnnnnnnnnnnnnnnnnnnnnnnnnnnnnnnnnnnnnnnnnnnnnnnnnnnnnnnnnnnnnnnnnnnnnnnnnnnnnnnnnnnnnnnnnnnnnnnnnnnnnnnnnnnnnnnnnnnnnnnnnnnnattgccaacactcctgatagctgaatgtgtgctggtttacatgactccagagcagtctgcaaacctcctgaagtgggcagccagcagttttgaggcagccatgttcataaactacgaacaggnnnnnnnnnnnnnnnnnnnnnnnnnnnnnnnnnnnnnnnnnnnnnnnnnnnnnnnnnnnnnnnnnnnnnnnnnnnnnnnnnnnnnnnnnnnnnnnnnnnnnnnnnnnnnnnnnnnnnnnnnnnnnnnnnnnnnnnnnnnnnnnnnnnnnnnnnnnnnnnnnnnnnnnnnnnnnnnnnnnnnnnnnnnnncaggatagaatcacttgaatttctggaagaaatggagctgctgga

SEQ ID NO: 31573 - DNA, 174 bp, Macaca Mulatta
tgcaagcccctttctcttttcaggctactcgacatgcagaaatggtggccattgatcaggtcctcgattggtgtcgtcgaagtggcaagagtccctctgaagtatttgaacacactgtgttatatgtcactgtggagccgtgcattatgtgtgcagctgctctccgcctgatga

SEQ ID NO: 31574 - DNA, 639 bp, Macaca Mulatta
cggaggtcctgaagcgtcaaggctacgatgcggcgtgtgacatctggagtttgggaatcctgttgtacaccatgctggcaggatttaccccttttgcaaatgggccagacgatacccctgaggagattttggcgcggatcgttattgggaagtatgccctttctgggggaaactgggactccatatctgacgcagccaaagacgtcgtgtccaagatgctccacgtggaccctcatcagcgcctgacagcgatgcaagtgctcaaacacccctgggtggtcaacagagagtacctgtcccaaaaccagctcagccgacaggacgtgcacctggtgaagggcgcgatggccgccacctactttgctctaaacagagcacctcaggccccgcggctggagcccgtgctgtcgtccaacctggctcagcgcagaggcatgaagagactcacgtccacgcggttgtagcaggtgggaccctggccccagcgtcccccgccagcatcctcgtgggctcacagaccccggcctcggagcccatctggcacccagagtgaccacaagtccagcagggaggcggcgcccgccctcgccgtgtccgtgttttctttttcaaccccggagagggtcctgacccgggggc

SEQ ID NO: 31575 - DNA, 941 bp, Macaca Mulatta
  misc_feature (1)...(941): n = A,T,C or G
agattggaagaattgttgaaaattctgatgctgttactgagattctaaataatgctgaattactaaaacaaattgtttattgcatcggtggagagaatctatctgtagcaaaagcggnnatcaaatccctgtcaagaatatcactaacccaagctggactggaggctttatttgaaagcaatctgctggatgatttgaaaagtgtaatgaaaacaaatgacattgttcgatacagggtgtatgagnnnnnnnnnnnnnnnnnnnnnnnnnnnnnnnnnnnnnnnnnnnnnnnnnnnnnnnnnnnnnnnnnnnnnnnnnnnnnnnnnnnnnnnnnnnnnnnnnnnnnnnnnnnnnnnnnnnnnnnnnnnnnnnnnnnnnnnnnnnnnnnnnnnnnnnnnnnnnnnnnnnnnnnnnnnnnnnnnnnnnnnnnnnnnnnnnnnnnnnnnnnnnnnnnnnnnnnnnnnnnnnnnnnnnnnnnnnnnnnnnnnnnnnnnnnnnnnnnnnnnnnnnnnnnnnnnnnnnnnnnnnnnnnnnnnnnnnnnnnnnnnnnnnnnnnnnnnnnnnnnnnnnnnnnnnnnnnnnnnnnnnnnnnnnnnnnnnnnnnnnnnnnnnnnnnnnnnnnnnnnnnnnnnnnnnnnnnnnnnnnnnnnnnnnnnnnnnnnnnnnnnnnnnnnnnnnnnnnnnnnnnnnnnnnnnnnnnnnnnnnnnnnnnnnnnnnnnnnnnnnnnnnnnnnnnnnnnnnnnnnnnnnnnnnnnnnnnnnnnnnnnnnnnnnnnnnnnnnnnnnnnnnnnnnnnnnnnctgagcagcagactgatgaccttctgaggatgacagaatcctggttttctgctttatctcgggatccactggagctcttccgtggcattagtagtcaacccttccctgaactacactgtgctgccttaaaagtgtttacgg

SEQ ID NO: 31576 - DNA, 589 bp, Macaca Mulatta
aggtgtcctccgcagtcagggccctggagggacgctctctgctctccatacttcctgtcctggctctcccggccctgctctgactaggacagcgaccttggacagcacagctagctaccgcatcctgcctgcctgggctgcctctctggcctgctggccccttgaaaagggactgccttaccccccaagccggccctggtgctctcaccccgctgccctttgtaggtctggataccctgtgtgccatccccctgaggtgagggatgtaggctggggcctgactgcaaagcccccggtctccctgtcaggaggtatcttggttgtagctccctttatccacagaccttgagaccactggcgtctctcacaaggttgggtcaggagagggtcacttttgtagctgagacctccctggagccccagatctcctagagaaggtcagagaccattcaaaaatcccagaattctaggaagttatatcagcctcccaagcagataaccccttaaggaatccatcggacaagaccccttctaacagtgcataatcccagctgggcattacccaccattgtagccacctgtgcaccat

SEQ ID NO: 31577 - DNA, 838 bp, Macaca Mulatta
  misc_feature (1)...(838): n = A,T,C or G
ggtaaaattgcggagttgctgtctccgggctcagtggatccactgacgaggctggttctggtgaatgctgtctatttcaaaggaaactggaatgaacagtttgacaaggagaacaccgaggagaggcggtttaaagtcagcaaggcgannnnnnnnnnnnnnnnnnnnnnnnnnnnnnnnnnnnnnnnnnnnnnnnnnnnnnnnnnnnnnnnnnnnnnnnnnnnnnnnnnnnnnnnnnnnnnnnnnnnnnnnnnnnnnnnnnnnnnnnnnnnnnnnnnnnnnnnnnnnnnnnnnnnnnnnnnnnnnnnnnnnnnnnnnnnnnnnnnnnnnnnnnnnnnnnnnnnnnnnnnnnnnnnnnnnnnnnnnnnnnnnnnnnnnnnnnnnnnnnnnnnnnnnnnnnnnnnnnnnnnnnnnnnnnnnnnnnnnnnnnnnnnnnnnnnnnnnnnnnnnnnnnnnnnnnnnnnnnnnnnnnnnnnnnnnnnnnnnnnnnnnnnnnnnnnnnnnnnnnnnnnnnnnnnnnnnnnnnnnnnnnnnnnnnnnnnnnnnnnnnnnnnnnnnnnnnnnnnnnnnnnnnnnnnnnnnntcatgatgatgcggtgcgcccgattcgtcccccgcttctgcgccgaccaccccttccttttcttcatccagcacagcaagaccaacgggattctcttctgcggccgcttttcctctccctgaggacagggcggcctctgtgcagcccctctcctttctgtcccctacactccacagtgtgcctgcaacccaagtggccttatccgtgccgtggtggcagttcagaaataaagggcccgatggtgggatgccgcat

SEQ ID NO: 31578 - DNA, 651 bp, Macaca Mulatta
  misc_feature (1)...(651): n = A,T,C or G
gcagtacctgaggggtctgtaggttcacactttggtaccagataactgtttgttgtctttataagcaagcctgagtactccacactgcacaataactcctcccagggtttaaactttgttttattttcaaaaccaggtccaatgagctttctgaacagctggtgtagctacagagaaaccagcttccttcagagagcagtgcttttgccggggaggaggaaatcccttcatacttgaacgttttctaattgcttatttattgtattctggggtatggcgtaagtacagagaagccatcacctcagatggcagcttttnnnnnnnnnnnnnnnnnnnnnaacaccatgattcctttaacatgtttccagcattcccaggtaggccaaggtgtcctacagaaaaaccttgggttagacctacagggggtctggctggtgttaacagaagggagggcagagctggtgcggctggccatggagaaagctgacttggctggtgtggtacagagaagccagcttgtttacatgcttattccatgactgcttgccctaagcagaaagtgcctttcaggatctatttttggaggtttattacgtatgtctggttctcaattccaacagtttaatgaagatctaaataaatgctagttct

SEQ ID NO: 31579 - DNA, 759 bp, Macaca Mulatta
ggggtctttggattcagttctcccgtgtgcatggctttccaaaaggactgtgagttctttggaattgtgaacattcttttgaaatatggagcccggataaatgaacttcatttggcatactgcctgaagtacgagaagttttcgatatttcgctactttttgaggaaaggttgctcattgggaccatggaaccatatatatgaatttgtaaatcatgcaattaaagcacaagcaaaatataaggaatggttaccacatcttctggttgctggatttgacccacagattctactgtgtagttcttggatcgactcagtcagcattgacacccttaccttcactttggagtttactaattggaagacacttccgccagctgttgaaaggatgctctctgctcgtgcctcaaacgcttggattctacagcaacatattgccactattccatccctgacccatctttgtcgtttggaaattcggtcccgtctaaaatcagaacgtctacggtctgacagttatattagtgagttgccgcttcccagaagcctacataattatttgctctatgaagatgttctgaggatgtatgaggttccggaactggcagctattcaagatggataaatctgtgaaactacttatcacagctcattttttcctctgaaaaaccatcgagacaaaagagccatggagtacaaggttttatgattttatagtccaaagaatgaatattgttttgtgagataagttaaggttttg

SEQ ID NO: 31580 - DNA, 327 bp, Macaca Mulatta
  misc_feature (1)...(327): n = A,T,C or G
ggtacttatatgaacgcattgatgggcgagttagaggaaaccttcgacaggctgccattgaccgcttcagcaaacctgactcagaccgctttgtcttcttactgtgtacccgggctggtggacttggtattaatcttacagctgctgatacctgcatcatctttgattcagactggaatccacaaaatgacctgcaggnnnngcaggcccaggcacgatgtcatcggattgggcagagcaaagctgtgaaggtgtgccgcctcatcactcgtaattcctacgagagagagatgtttgataaggctagcctcaagttgggattggata

SEQ ID NO: 31581 - DNA, 410 bp, Macaca Mulatta
caaatggacaatctcacaaaagtgacagaattcctgctgatggagttttccggcacctgggagctgcaggtgctgcacgctgggctctttctgctgatttatctggcagcgctggtgggaaacctgctcatcactgcggtcatcactctcgatcagcatcttcacacccccatgtacttcttcctgaagaacctctccgttttggatctgtgctacatctcagtcactgtgcctaaatccatccataactccctgactcacagaagctccatctcttatcttggctgtgtggctcaagtctattttttctttgcctttgcatctgctgagctggccttcctcactgtcatgtcctacgaccgctatattgccatttgccaccccctccgatacggagctgtgatgacatc

SEQ ID NO: 31582 - DNA, 1501 bp, Macaca Mulatta
  misc_feature (1)...(1501): n = A,T,C or G
cagaagcagatgagagcagaggaagcaaaaactgttcaagaaaaagctgcaaagatcaaggaatgggtgacactcaagttggcannnnnnnnnnnnnnnnnnnnnnnnnnnnnnnnnnnnnnnnnnnnnnnnnnnnnnnnnnnnnnnnnnnnnnnnnnnnnnnnnnnnnnnnnnnnnnnnnnnnnnnnnnnnnnnnnnnnnnnnnnnnnnnnnnnnnnnnnnnnnnnnnnnnnnnnnnnnnnnnnnnnnnnnnnnnnnnnnnnnnnnnnnnnnnnnnnnnnnnnnnnnnnnnnnnnnnnnnnnnnnnnnnnnnnnnnnnnnnnnnnnnnnnnnnnnnnnnnnnnnnnnnnnnnnnnnnnnnnnnnnnnnnnnnnnnnnnnnnnnnnnnnnnnnnnnnnnnnnnnnnnnnnnnnnnnnnnnnnnnnnnnnnnnnnnnnnnnnnnnnnnnnnnnnnnnnnnnnnnnnnnnnnnnnnnnnnnnnnnnnnnnnnnnnnnnnnnnnnnnnnnnnnnnnnnnnnnnnnnnnnnnnnnnnnnnnnnnnnnnnnnnnnnnnnnnnnnnnnnnnnnnnnnnnnnnnnnnnnnnnnnnnnnnnnnnnnnnnnnnnnnnnnnnnnnnnnnnnnnnnnnnnnnnnnnnnnnnnnnnnnnnnnnnnnnnnnnnnnnnnnnnnnnnnnnnnnnnnnnnnnnnnnnnnnnnnnnnnnnnnnnnnnnnnnnnnnnnnnnnnnnnnnnnnnnnnnnnnnnnnnnnnnnnnnnnnnnnnnnnnnnnnnnnnnnnnnnnnnnnnnnnnnnnnnnnnnnnnnnnnnnnnnnnnnnnnnnnnnnnnnnnnnnnnnnnnnnnnnnnnnnnnnnnnnnnnnnnnnnnnnnnnnnnnnnnnnnnnnnnnnnnnnnnnnnnnnnnnnnnnnnnnnnnnnnnnnnnnnnnnnnnnnnnnnnnnnnnnnnnnnnnnnnnnnnnnnnnnnnnnnnnnnnnnnnnnnnnnnnnnnnnnnnnnnnnnnnnnnnnnnnnnnnnnnnnnnnnnnnnnnnnnnnnnnnnnnnnnnnnnnnnnnnnnnnnnnnnnnnnnnnnnnnnnnnnnnnnnnnnnnnnnnnnnnnnngagagccacgcagatcagcaacatgcccttggtgaacgagtcctctgggtccgacgatgactgcagctctcaggcgagtttccgaatgtcggtgccctgctctgagtccaggaagaccagtggactaggcagcccccgggccatcaagagagnnnnnnnnnnnnnnnnnnnnnnnnnnnnnnnnnnnnnnnnnnnnnnnnnnnnnnnnnnnnnnnnnnnnnnnnnnnnnnnnnnnnnnnnnnnnnnnnnnnnnnnnnnnnnnnnnnnnnnnnnnnnnnnnnnnnnnnnnnnnngagtcactggagaagtcgggctacctgctgaaaatggggagccgggtgaagacatggaagaggcgctggtttgtcctgagacagggacagattatgtactacaagtccccg

SEQ ID NO: 31583 - DNA, 379 bp, Macaca Mulatta
cagagtattccttttaagcagggtgggggacagtggggggtccaggaatgtggctgaaaatgctttgtcctctctctttttcctagatggactgggctgtgttccaagcagtgaaggtggccgtggggacattgcaggaggccaaatagagggatgctgggtgtttggggtcggggtggggacaggtagaccaggtgctcagcccaggtacaactttagcagggaatgacgctaggggacttgaggatttctggtcaaccccacaagcaccactccgggcacaagcagagcaccctgttctcctcccccttaagccaacaaccacagtgccacctagctcacacctgtccttctcaggctggcacctcccccaccctgt

SEQ ID NO: 31584 - DNA, 182 bp, Macaca Mulatta
aggttttgccagatcgaagtcatcctaaactgctgatgagtggaggtgggggttaccttctctccggcttcaccgttgccatggacaaccttaaagcagacaccagactcaaatctaatgcaagcactttagaatcacaggagactgaggagcctgcagctaaaaaacggaaatgcccggag

SEQ ID NO: 31585 - DNA, 299 bp, Macaca Mulatta
cattcttaaatggcacatcttcaatttcttgccctgtcctcactttagtatgccccagaagaagccaaagatatggacaatttaagactcagaagagctttctcaggatttcattttcctatttattttcaatcattctatttaaaaaaggtacaattttaaacctgtctttaattaaaagacaccagagttacaatgcaatactatttggcaatcaaaactaatgaagcacggatgcatgctgcaacataatgaacttggaaacattgtgctaagtgaaataagccagttattataca

SEQ ID NO: 31586 - DNA, 715 bp, Macaca Mulatta
  misc_feature (1)...(715): n = A,T,C or G
nnnnnnnnnnnnnnnnnnnnnnnnnnnnnnnnnnnnnnnnnnnnnnnnnnnnnnnnnnnnnnnnnnnnnnnnnnnnnnnnnnnnnnnnnnnnnnnnnnnnnnnnnnnnnnnnnnnnnnnnnnnnnnnnnnnnnnnnnnnnnnnnnnnnnnnnnnnnnnnnnnnnnnnnnnnnnnnnnnnnnnnnnnnnnnnnnnnnnnnnnnnnnnnnnnnnnnnnnnnnnnnnnnnnnnnnnnnnnnnnnnnnnnnnnnnnnnnnnnnnnnnnnnnnnnnnnnnnnnnnnnnnnnnnnnnnnnnnnnnnnnnnnnnnnnnnnnnnnnnnnnnnnnnnnnnnnnnnnnnnnnnnnnnnnnnnnnnnnnnnnnnnnnnnnnnnnnnnnnnnnnnnnnnnnnnnnnnnnnnnnnnnnnnnnnnnnnnnnnnnnnnnnnnnnnnnnnnnnnnnnnnnnnnnnnnnnnnnnnnnnnnnnnnnnnnnnnnnnnnnnnnnnnnnnnnnnnnnnnnnnnnnnnnnncagacaagttatttacttatcaccctgggccctttttgacctggaaagtgggggtgggccaggggccgggcccagcatgcacccccacttctttgggggctgatccctcccccagctctgctgggtcctggggccacagcgtcagaccggtgggggcagaggtagaggtgggagagacagggctgacagcacgggagcgcacaatg

SEQ ID NO: 31587 - DNA, 972 bp, Macaca Mulatta
ctgcccacattatgttagcaggctgtggagagaggtgcctgtgtctacccttttcccaggacagtcctcatttccaaattctagttttgtcacaaaggctcatgctgttccctgtgtcctcttcaaatctggaccgacagcagagtcttctgactagagccatcgtgcttctcagctccgctgtgtgtgccgtgtggactctgagtggtgtcgtgcagagggcgagtgggcaggagggctcaggtcaactctaaggcacttttctctacatccaatggcaggttgtccccccggcacactccacagctggtgacccgacagttcctggctccttgttcagacagctcgtcagcgaagaagacaacacgtctgcaccttcattattcaaactgggctggctctctagtatgactaagtaacatggcaacacgtctgtctctccctaaataaatactaccacattatttcttctaaagatgcctctgctcatctgattctcagccacaccaatctttgcagtttcactgatggaatgtggccccctagttactgttgggggttactttaagcatcaggttaatccttgtcccataatttcacaatacttgttgctttagacatcagttcaggtagcttacattttattagcattcaacaacgccttaattgttgacactacaaggtggaattgtcagtgagatcgtataagctgctgactgaccaagtttgtaggacaaaaagtcattacatattacttcacttgcagaactgtgccatgtttcctactgaagtctgaggtgcagactctggaggaatagtgacacagaagttatctgggtatacaggaatctaaaagacgttctccctggaaatacaaatatataacaaagagtagagactattattagggagggtgcttcactgacagtctgaattggatctgattattctccctgtacacaggagagagta

SEQ ID NO: 31588 - DNA, 578 bp, Macaca Mulatta
gtttctccagagactcccaggggtaaggatctggaagttttattccagaacctaatattccaaggagttgttggtcagaggttctttttcgcatagattctcccttccaaaggtcaaagcaattttggaactgtaacctgaatttataaataccttcaagggaagaatcaaggcaactgtctgccagtcttcccgaaaatacaggaaaggacatcacgcctgctataatcggattaatgcccaaggatggacgtcctattcctgaacgagagaggagattcaaggtgactgggtcactgcggctggagctcactgggttcttcatttcacattcataggttcctgcagtatcctttctgacaccagatagaacgagggtcctgttgttttcggacagctgcaacttgcgactgatagggaggctctgtccatttatccaccacaagtagcttacgtcctgagtgtcaggatcacaggataagatcacagtctccgtgccctccactggggtttaagttgctgctggagatgtagggcttgggagtctccaggtataaggaaatgtccagttaccctcg

SEQ ID NO: 31589 - DNA, 837 bp, Macaca Mulatta
  misc_feature (1)...(837): n = A,T,C or G
ggggtggctattgtgggaagtcataaaccacagatagattaacctaagaatcctggcccttctccacactccaccatgcagaacaaacatcctcttaagcaatcaacgtagaatgcttgggtaatagtcataattacccacatatagtaattaatagatggtaattaatagatccttgatgtgatgttcttttgtgtattgccttcattctaaagttctctggccgggcgcggtggctttnnnnnnnnnnnnnnnnnnnnnnnnnnnnnnnnnnnnnnnnnnnnnnnnnnnnnnnnnnnnnncagccaacatggcnnnnnnnnnnnnnnnnnnnnnnnnnnnnnnnnntggtgacatctgcctgtagtctcatnnnnnnnnnnnnnnnnnnnnnnnnnnnnnnnnnnnnnnnnnnagtnnnnnnnnnnnnnnnnnnnnnnnnnnnnnnnnnnnnnnnnnnnnnnntcaacagaatgnnnnnnnnnnnnnngannnnnnnnnnnnnnnaaataaagttgttctctgaagagcaaatgtctcattccagtaatgacccactcagccggaatatggtggagttcagtccaattcaggtcagccatatacaaaagactaccaagtctttcttaaagttgagcaaaaagcgtttctatctattagcaagaaagggccctctctggcagcagaaggttaaaaatttggcccaaacttctcttttccaataacttcgggggaattacgccaatgttggaagaattttccttttccctaggactttgaatctcctctctctctgttgggaacccaggtttaataaaaccacccaaagaaacccct

SEQ ID NO: 31590 - DNA, 398 bp, Macaca Mulatta
ttttaaaagctgagcaagtaaacatttcaaaatttgagagatttagggtctcactagaatgatatggtagcatcattaagactcaacgcgtttccttttagccggaagggccatcttccagtaatttgccataaataaggaacacaaagggaaagaggtgaggcacctgatacatgttgtctaggccttttagaaaataagaaattgttcctttggccacatacacgcgaatgtacgaaaaaggtgataatgtagacatcaagggaatgggtgctttccaagaaaggagtgcctcgcaaatgttaccacagcaaagctggaagagtctacagtgttacccagcatgctgttggcattgttgtaaacaagggcaagatttttgccaagagaatgaatgt

SEQ ID NO: 31591 - DNA, 421 bp, Macaca Mulatta
gcttgaaagaaaataccaggggacaggaaactgatcattaaagtctgtatcgctttcaaactgtgctaaaaagcctgttattttatgctagatcagcttcaaccacacaggcaaattgagagagacagagaaagtcagcagtagggaaccttaacctggagcaggcttagcctcagagccctcagcacactgagaaggtaggcaagtttgtctctgccccctccccttccattgccctcttcatattcttgaagggagagcctctactctctttccctccctctcagcacatgttcatttcccccaggaacttgttctcgccaacaattgctttactaaaagacaggcccagtgcagcaacctggtgaaaagaaactgagtggccaatcagaagacctttttccagccctaaccatgtctc

SEQ ID NO: 31592 - DNA, 468 bp, Macaca Mulatta
taggtctaattggataaatggaagcaaactcatttttaaacctatgaatgtggtttgaatattatttggacttgcattttaggagtgaagacattgtttttatccttgaaacttttactgaatttaactttcaattctgacttaaagtgttagatatttgttttaagagatgatatcctttcctgagaaaaagttcactttccttttttctttgtccttagttttttaaaggattggcttcttctggtgcttgggcttgctttgatgaattcaatcgaattgagttggaagtgttgtcagtggtagctcaacagatcctttgcattcagagagccattcaacagaagttggatgtgtttgtttttgaagggacagaacttaagctcaatccgaattgctttgtagctattaccatgaatcctggttatgcaggacgctctgaattgccggacaatcttaaggtaatat

SEQ ID NO: 31593 - DNA, 149 bp, Macaca Mulatta
tccagccaaaagactttaaccatacggatcatttctcagtagccatattcaccatccaccggatcctcccccctgactcacgagtttgggtctgcagtgcgaacacagtggctgggatggtggaaagcccttcaacatttctgttaaag

SEQ ID NO: 31594 - DNA, 271 bp, Macaca Mulatta
cagccttctatatcatcttccagacagaggaccccgaagagctgggccacttttacgactaccccatggccctgttcagcaccttcgagctattccttaccatcattgatggcccagccaactacaacgtggacctgcccttcatgtacagcatcacctacgctgccttcgccatcatcgccacgctgctcatgctcaacctcctcattgccatgatgggcgagactaactggcgagtggcccatgagcgcgatgagctgtggagggccca

SEQ ID NO: 31595 - DNA, 1030 bp, Macaca Mulatta
  misc_feature (1)...(1030): n = A,T,C or G
gcccatcccagccatttgatactaagttccagctctctctaccactatgggctgaagtgctctgaggtcctaaataagcttgaaaggcagtctaggccacaaggactgcaattcctgggcaagttctggtgctgtgctgggctcagaggcagtggacttcaggtacataagacctagtgagacaccagctggggcagccaagggagtgcttgtagcagccatcccccagccccaggcagcacagcttgcagcttcaagagagagaccttccttttgcttgagaggaggagaggggagagtaaagaggacttgtcttgcaatctggataccagctcagccacagcagaacagggcacctcaggcagagtcccgaggtccccattccaggccctagctcccagacatttctagacacatctctggccagaagagaatccactgccttaaagagaaggacccagttctggcaagattcataacttactgactaaagagcccttgggctttgaataaacaccagcagtggccagacaacactcactgcaggccttagccagnnnnnnnnnnnnnnnnnnnnnnnnnnnnnnnnnnnnnnnnnnnnnnnnnnnnnnnnnnnnnnnnnnnnnnnnnnnnnnnnnnnnnnnnnnnnnnnnnnnnnnnnnnnnnnnnnnnnnnnnnnnnnnnnnnacagtgaagtagagcaccaagcaggctcctggggttcccaattccaggccttggctcctggatggcatttctggactcccactgggccagaggggagcccattgccctgaagggagagacctaggcctggcagcattccccacaagctgactgaagagccttgagtgaacattagtggtatccagccagtacttgctacaggcctgggtggttgtgtccatagagagactcctgcttgaggagaggggagggaagagtgggaagaactttgtcttctggcttgggtgccagctcagctgcagtagaatagagtaccaaacaaattcctaagtttcctgactcc

SEQ ID NO: 31596 - DNA, 653 bp, Macaca Mulatta
  misc_feature (1)...(653): n = A,T,C or G
acggtgactacagtttatgccaacaatggttctgttctccaaggaaagttctgtagcctcagtgtatgatgggaagttgctcataggcactttataccacagagccttgtattgtgaactctaaattgtacttttggcatgaaagtgcaataacttaacaattaattttctatgaattgctaattctgagggaattagcaacattgacccagaaatgtatggcatgtgtagttaatattattccaataaggaacggcccttttagttcttacagcacttttaacaataaaagaagaatgaacaggttctttaaaatgccaagcaagggagagaaaagaaagctgcttttgaataaagtgaataccttttgcacaaaataagcctcacctttgcattctaactgccagaacacggattccactgaaatagagtgaattatatttccttaaaatgtgagtgacctcagttctggcactgtgaccactatggctgtgtagaactactgataataacgtattctgatgtactgtacttacatctttgtttaccattaacaagttggagttatattaaagactaactaaaaatcccgaagactaataaactgaaatgcgannnnnnnnnnnnngnnnnnnnnnnnnnnnnnnnnnnnn

SEQ ID NO: 31597 - DNA, 691 bp, Macaca Mulatta
ccgcagctgttcagaaatattactcggcttggtttataaagtctttttataagcttcttcccagctataatgggctggagcacttatttttcagctaacagatttccacgtttatgagcctggaagtccgatgcctggcacagagttgctgcatgatgggagttgtgccgtctggctgagcaggtttcagtgtcaggaaactgcagggaccactggttgggacaccactgtgaccagagagatgacacacggggagacttggaaggaggaaagtgaaatggagcactcggaggcttctggcaattgtggcccagatgtctagggtggagagtgcaaaaaggagaagagaactcacaggagatgggataaatctctcgctgactttgccatctgaggggccatcttgggagcgcagcgggatgtgccccggagctgccgcttgaggccctcaggtctccggaggtgtcatggaggaacctagctcctgccatcctcttcccccaatttgccacttccagcagctttagcccatgaggaggatgtgagggagactgagtcaggagctccccggaagcatggagaccgtggtgattgttgccataggtgtgctggccaccatctttctggcttcgtttgcagtcttggtgctggattgcaggcagcgctactaccagccccgagacctctcccc

SEQ ID NO: 31598 - DNA, 667 bp, Macaca Mulatta
tagaagccctcacctcacacccctctttcccaccaccaagctatgccacagatgatgacattgtgtttgaggactttgcccggcttcggctgaaggggatgaaggatgacgactatgatgaccaactctgctaggaagcagggcgggaagaagggaggggatggggttggaagaggtgaagacaggaccaagatccccactgtcactgggggattgtcccagcctctcttcccttcccctccacctggaagcttcttcaaccaaccccttcactctcccccgcaccccccaccatgatacgcactggaccctctcttgctgaatgtgggcattaattttttgactgcagctctgcttctccagccccgcagtgggtggcaagctgtgttcatacctaaattttctggaaggggacagtaaaaagaggagtgacaggagggaaagagggagacaaaactcccactcaacctcacaccaacacctcccatgatcactccgtctgcccccattccttcacgaggagaccctttgtggacaaggctgtttctttgtttctgagcataaagaaaaaaataaatcttttactaagcatgagtgtgttttctctatagtgtttagagcagtgtatactgtgcttgtccatgattctgttagcttgtgggggagg

SEQ ID NO: 31599 - DNA, 3710 bp, Macaca Mulatta
  misc_feature (1)...(3710): n = A,T,C or G
tatctggggaagatgaagtagagtgctctgacaaggatgagcccgacctcgatggggacgtgtccagcgactgccccaccatccgcgtcccgctgacatccctcaagagccaccagggcgtggtcatcgccgctgactggctggttggggggaagcaggctgtgactgcctcctgggaccggacggcaaacctgtacgacgtggagacgtctgagcttgttcattctctgacaggnnnnnnnnnnnnnnnnnnnnnnnnnnnnnnnnnnnnnnnnnnnnnnnnnnnnnnnnnnnnnnnnnnnnnnnnnnnnnnnnnnnnnnnnnnnnnnnnnnnnnnnnnnnnnnnnnnnnnnnnnnnnnnnnnnnnnnnnnnnnnnnnnnnnnnnnnnnnnnnnnnnnnnnnnnnnnnnnnnnnnnnnnnnnnnnnnnnnnnnnnnnnnnnnnnnnnnnnnnnnnnnnnnnnnnnnnnnnnnnnnnnnnnnnnnnnnnnnnnnnnnnnnnnnnnnnnnnnnnnnnnnnnnnnnnnnnnnnnnnnnnnnnnnnnnnnnnnnnnnnnnnnnnnnnnnnnnnnnnnnnnnnnnnnnnnnnnnnnnnnnnnnnnnnnnnnnnnnnnnnnnnnnnnnnnnnnnnnnnnnnnnnnnnnnnnnnnnnnnnnnnnnnnnnnnnnnnnnnnnnnnnnnnnnnnnnnnnnnnnnnnnnnnnnnnnnnnnnnnnnnnnnnnnnnnnnnnnnnnnnnnnnnnnnnnnnnnnnnnnnnnnnnnnnnnnnnnnnnnnnnnnnnnnnnnnnnnnnnnnnnnnnnnnnnnnnnnnnnnnnnnnnnnnnnnnnnnnnnnnnnnnnnnnnnnnnnnnnnnnnnnnnnnnnnnnnnnnnnnnnnnnnnnnnnnnnnnnnnnnnnnnnnnnnnnnnnnnnnnnnnnnnnnnnnnnnnnnnnnnnnnnnnnnnnnnnnnnnnnnnnnnnnnnnnnnnnnnnnnnnnnnnnnnnnnnnnnnnnnnnnnnnnnnnnnnnnnnnnnnnnnnnnnnnnnnnnnnnnnnnnnnnnnnnnnnnnnnnnnnnnnnnnnnnnnnnnnnnnnnnnnnnnnnnnnnnnnnnnnnnnnnnnnnnnnnnnnnnnnnnnnnnnnnnnnnnnnnnnnnnnnnnnnnnnnnnnnnnnnnnnnnnnnnnnnnnnnnnnnnnnnnnnnnnnnnnnnnnnnnnnnnnnnnnnnnnnnnnnnnnnnnnnnnnnnnnnnnnnnnnnnnnnnnnnnnnnnnnnnnnnnnnnnnnnnnnnnnnnnnnnnnnnnnnnnnnnnnnnnnnnnnnnnnnnnnnnnnnnnnnnnnnnnnnnnnnnnnnnnnnnnnnnnnnnnnnnnnnnnnnnnnnnnnnnnnnnnnnnnnnnnnnnnnnnnnnnnnnnnnnnnnnnnnnnnnnnnnnnnnnnnnnnnnnnnnnnnnnnnnnnnnnnnnnnnnnnnnnnnnnnnnnnnnnnnnnnnnnnnnnnnnnnnnnnnnnnnnnnnnnnnnnnnnnnnnnnnnnnnnnnnnnnnnnnnnnnnnnnnnnnnnnnnnnnnnnnnnnnnnnnnnnnnnnnnnnnnnnnnnnnnnnnnnnnnnnnnnnnnnnnnnnnnnnnnnnnnnnnnnnnnnnnnnnnnnnnnnnnnnnnnnnnnnnnnnnnnnnnnnnnnnnnnnnnnnnnnnnnnnnnnnnnnnnnnnnnnnnnnnnnnnnnnnnnnnnnnnnnnnnnnnnnnnnnnnnnnnnnnnnnnnnnnnnnnnnnnnnnnnnnnnnnnnnnnnnnnnnnnnnnnnnnnnnnnnnnnnnnnnnnnnnnnnnnnnnnnnnnnnnnnnnnnnnnnnnnnnnnnnnnnnnnnnnnnnnnnnnnnnnnnnnnnnnnnnnnnnnnnnnnnnnnnnnnnnnnnnnnnnnnnnnnnnnnnnnnnnnnnnnnnnnnnnnnnnnnnnnnnnnnnnnnnnnnnnnnnnnnnnnnnnnnnnnnnnnnnnnnnnnnnnnnnnnnnnnnnnnnnnnnnnnnnnnnnnnnnnnnnnnnnnnnnnnnnnnnnnnnnnnnnnnnnnnnnnnnnnnnnnnnnnnnnnnnnnnnnnnnnnagacagaggaaggtaatatttgtccctgtcatgtgacacccccaggtctttgtgttttgccccgttttatggtgaggtaggagggaacccatctggtgactggtagatgcaggtgcattaggacgtgggacttttggacccgtcctttggtgcagctcgccagggctgagaggcacctccctacttgggtcttcaggagctggcccgaggaactttgaatctaagtcatctagaatgactctgaaatgactgacagcctggggcccaagaataactgataacgacctcagatggatctgacgtggctgagggacaaacagcaaatatttcagtcatttgattttacagataaaaaatgtgttgtatttttgtccgacattgtttcctgactgcactgttctgagaacggagcctacctggtccctctggttgattagactctcaggtttcagctcctgctgtcctgagcgaacttgcctgatgcagggctgtgctgtgtccagatgttgctggggcctcgcttttctcttggccggaggtccaattcccagagcctcccgcactgcacatgcaaaggtctgagcccagggcagcttctggggccactgcacaggccgcctgcttgggttcctcgnnnnnnnnnnnnnnnnnnnnnnnnnnnnnnnnnnnnnnnnnnnnnnnnnnnnnnnnnnnnnnnnnnnnnnnnnnnnnnnnnnnnnnnnnnnnnnnnnnnnnnnnnnnnnnnnnnnnnnnnnnnnnnnnnnnnnnnnnnnnnnnnnnnnnnnnnnnnnnnnnnnnnnnnnnnnnnnnnnnnnnnnnnnnnnnnnnnnnnnnnnnnnnnnnnnnnnnnnnnnnnnnnnnnnnnnnnnnnnnnnnnnnnnnnnnnnnnnnnnnnnnnnnnnnnnnnnnnnnnnnnnnnnnnnnnnnnnnnnnnnnnnnnnnnnnnnnnnnnnnnnnnnnnnnnnnnnnnnnnnnnnnnnnnnnnnnnnnnnnnnnnnnnnnnnnnnnnnnnnnnnnnnnnnnnnnnnnnnnnnnnnnnnnnnnnnnnnnnnnnnnnnnnnnnnnnnnnnnnnnnnnnnnnnnccacatgtgatctcgtgtgaaacagtgtttggaagtgggaacaggtttgtcctgtatgctgatgtgtccagaatttcatttaatgatagacagaaaatgtgtggttactgaaaagtgtgtatcaacacaggatttcttaacagccatgctgttgggcaaaacaactctttttcaaccactgctcatcagtttcagtagagacaaaaactctgtacatattttggaatctgaagaatcctctataaatcatttgttacttaaatctgtgaaaaacatgtttctttggaggaaaatgtatgcatttataagtgttctgtggaatcagtttttattgtattgatataattgtctctaagtgttgagtgtcttcattgcaatatgaaattcattaaaatgtccatgttccataattattattataaaagctttgtgttattgggagtcttttattatttttacagtttttcatgttttgctttggtgaaacattgtgaatgactatataaatatcacgatgacctagaaattgaacaaatataatactggtcactcg

SEQ ID NO: 31600 - DNA, 4000 bp, Macaca Mulatta
  misc_feature (1)...(4000): n = A,T,C or G
aggcagtgatttgggggcagagaattctgcaagcctaacacgtggtactgaactgcgaagagtttgaggggtcagaacactaaaagagtcgaatagtttgttggcnnnnnnnnnnnnnnnnttggcttctgtaaattcagattctcataaatcgtgtaagcctcgccgacacctctgagataaaagggcccctttcgattagcctctgctnnnnnnnnnnnnnnnnnnnnnnnnnnnnnnnnnnnnnnnnnnnnnnnnnnnnnnnnnnnnnnnnnnnnnnnnnnnnnnnnnnnnnnnnnnnnnnnnnnnnnnnnnnnnnnnnnnnnnnnnnnnnnnnnnnnnnnnnnnnnnnnnnnnnnnnnnnnnnnnnnnnnnnnnnnnnnnnnnnnnnnnnnnnnnnnnnnnnnnnnnnnnnnnnnnnnnnnnnnnnnnnnnngcagaccaacatgaagtcttgacagaatataaagaaggagttggaaagtttataggnnnnnnnnnnnnnnnnnnnnnnnnnnnnnnnnnnnnnnnnnnnnnnnnnnnnnnnnnnnnnnnnnnnnnnnnnnnnnnnnnnnnnnnnnnnnnnnnnnnnnnnnnnnnnnnnnnnnnnnnnnnnnnnnnnnnnnnnnnnnnnnnnnnnnnnnnnnnnnnnnnnnnnnnnnnnnnnnnnnnnnnnnnnnnnnnnnnnnnnnnnnnnnnnnnnnnnnnnnnnnnnnnnnnnnnnnnnnnnnnnnnnnnnnnnnnnnnnnnnnnnnnnnnnnnnnnnnnnnnnnnnnnnnaggttcttcagaagagtgtgatcattggagtgattgaaggtggagatgtgatggaagagaggctgaggtcagcacgagagacagccaagcggcccgtaggtggcttccttctggatggttttcaaggaaatccaacaaccctggagactagactgtgcttactgtcatcagtcactgcagagctgccggaggacaaaccaaggccagnnnnnnnnnnnnnnnnnnnnnnnnnnnnnnnnnnnnnnnnnnnnnnnnnnnnnnnnnnnnnnnnnnnnnnnnnnnnnnnnnnnnnnnnnnnnnnnnnnnnnnnnnnnnnnnnnnnnnnnnnnnnnnnnnnnnnnnnnnnnnnnnnnnnnnnnnnnnnnnnnnnnnnnnnnnnnnnnnnnnnnnnnnnnnnnnnnnnnnnnnnnnnnnnnnnnnnnnnnnnnnnnnnnnnnnnnnnnnnnnnnnnnnnnnnnnnnnnnnnnnnnnnnnnnnnnnnnnnnnnnnnnnnnnnnnnnnnnnnnnnnnnnnnnnnnnnnnnnnnnnnnnnnnnnnnnnnnnnnnnnnnnnnnnnnnnnnnnnnnnnnnnnnnnnnnnnnnnnnnnnnnnnnnnnnnnnnnnnnnnnnnnnnnnnnnnnnnnnnnnnnnnnnnnnnnnnnnnnnnnnnnnnnnnnnnnnnnnnnnnnnnnnnnnnnnnnnnnnnnnnnnnnnnnnnnnnnnnnnnnnnnnnnnnnnnnnnnnnnnnnnnnnnnnnnnnnnnnnnnnnnnnnnnnnnnnnnnnnnnnnnnnnnnnnnnnnnnnnnnnnnnnnnnnnnnnnnnnnnnnnnnnnnnnnnnnnnnnnnnnnnnnnnnnnnnnnnnnnnnnnnnnnnnnnnnnnnnnnnnnnnnnnnnnnnnnnnnnnnnnnnnnnnnnnnnnnnnnnnnnnnnnnnnnnnnnnnnnnnnnnnnnnnnnnnnnnnnnnnnnnnnnnnnnnnnnnnnnnnnnnnnnnnnnnnnnnnnnnnnnnnnnnnnnnnnnnnnnnnnnnnnnnnnnnnnnnnnnnnnnnnnnnnnnnnnnnnnnnnnnnnnnnnnnnnnnnnnnnnnnnnnnnnnnnnnnnnnnnnnnnnnnnnnnnnnnnnnnnnnnnnnnnnnnnnnnnnnnnnnnnnnnnnnnnnnnnnnnnnnnnnnnnnnnnnnnnnnnnnnnnnnnnnnnnnnnnnnnnnnnnnnnnnnnnnnnnnnnnnnnnnnnnnnnnnnnnnnnnnnnnnnnnnnnnnnnnnnnnnnnnnnnnnnnnnnnnnnnnnnnnnnnnnnnnnnnnnnnnnnnnnnnnnnnnnnnnnnnnnnnnnnnnnnnnnnnnnnnnnnnnnnnnnnnnnnnnnnnnnnnnnnnnnnnnnnnnnnnnnnnnnnnnnnnnnnnnnnnnnnnnnnnnnnnnnnncagctgctttcatctggttatgcagatccattgtgatctgccttccaggctcattaatagtctaactacgtaataactgaagccctatctcttgtgaagattcattctcaatgtgttcacttagacagagccccgcctggcctaacgattagaagatagtctccatcctcttcagatatgactcctgggcaattcacttaacttatccatggctgtttcctgctgaataaatagggacaggcataatggataggaatgaatgaacttgtaagatactgtctagctctaaaatttgaagaacaaaaagttttagattagagtcataaccttaatagccctaattgtcatcctgggagacaggcaacagtagggatatttgagagcctaaagtgaggtttggcctgtgggttcttaaacggttattgaattggtatcaggagatcctgaggctggtaggggaaggtgattctttnnnnnnnnnnnnnnnnnnnnnnnnnnnnnnnnnnnnnnnnnnnnnnnnnnnnnnnnnnnnnnnnnnnnnnnnnnnnnnnnnnnnnnnnnnnnnnnnnnnnnnnnnnnnnnnnnnnnnnnnnnnnnnnnnnnnnnnnnnnnnnnnnnnnnnnnnnnnnnnnnnnnnnnnnnnnnnnnnnnnnnnnnnnnnnnnnnnnnnnnnnnnnnnnnnnnnnnnnnnnnnnnnnnnnnnnnnnnnnnnnnnnnnnnnnnnnnnnnnnnnnnnnnnnnnnnnnnnnnnnnnnnnnnnnnnnnnnnnnnnnnnnnnnnnnnnnnnnnnnnnnnnnnnnnagacggagtctcgctctgttgcccaggctggagtgcagtggctggatctcagctcactgcaagctccgcctcccaggttcacgccattctcctgcctcagcctcccgagtagctgggactacaggcgcccgccaccgcgcccggctaattnnnnnnnnnnnnnnnnagatgcggtttcaccgtgttacctggatggtctcgatctcctgacctnnnnnnnnnnnnnnnnnnnnnnnnnnnnnnnnnnnnnnnnnnnnnnnnnnnnnnnnnnnnnnnnnnnnnnnnnnnnnnnnnnnnnnnnnnnnnnnnnnnnnnnnnnnnnnnnnnnnnnnnnnnnnnnnnnnnnnnnnnnnnnnnnnnnnnnnnnnnnnnnnnnnnnnnnnnnnnnnnnnnnnnnnnnnnnnnnnnnnnnnnnnnnnnnnnnnnnnnnnnnnnnnnnnnnnnnnnnnnnnnnnnnnnnnnnnnnnnnnnnncctcccacccggccccaccttcaacactggggattacatttcaccatgagatttggnnnnnnnnnnnnnnnnnnnnnnnnnnnnnnnnnnnnnnnnnnnnnnnnnnnnnnnnnnnnnnnnnnnnnnnnnnnnnnnnnnnnnnnnnnnnnnnnnnnnnnnnnnnnnnnnnnnnnnnnnnnnnnnnnnnnnnnnnnnnnnnnnnnnnnnnnnnnnnnnnnnnnnnnnnnnnnnnnnnnnnnnnnnnnnnnnnnnnnnnnnnnnnnnnnnnnnnnnnnnnnnnnnnnnnnnnnnnnnnnnnnnnnnnnnnnnnnnnnnnnnnnnnnnnnnnnnnnnnnnnnnnnnnnnnnnnnnnnnnnnnnnnnnnnnnnnnnnnnnnnnnnnnnnnnnnnnnnnnnnnnnnnnnnnnnnnnnnnnnnnnnnnnnnnnnnnaaatctgttaaaggcaatagcaaataaaacatttttaatttaaaaaatgtactgtgtttggctttctgtaaatgtagtaggtctgttaaacaaaatattaaatttctgtaataccagaa

SEQ ID NO: 31601 - DNA, 626 bp, Macaca Mulatta
ggtggggctgcggagttgccgatcccgccggaagcgccaggacaatggggacccgggacgacgagtacgactacctattcaaagtggtgctcatcggggactcgggcgtgggcaagagcaacctgctgtcgcgcttcacccgcaacgagttcaacctggagagcaagagcaccatcggcgtggagttcgccacccgcagcatccaggtggacggcaagaccatcaaggcgcagatctgggacaccgccggccaggagcgctaccgcgccatcacctccgcgtactaccgaggcgcagtgggcgccctgctggtgtatgacatcgccaagcacctgacctatgagaacgtggagcgctggctgaaggagcttcgggaccacgcagacagcaacattgtcatcatgctggtgggcaacaagagtgacctgcgccatctgcgggccgtgcccactgacgaggcccgcgccttcgcagaaaagaacaacttgtccttcatcgagacctcagccttggattccaccaacgtagaggaagcgttcaagaacatcctcacagagatctaccgcatcgtgtctcagaaacagattgcagaccgcgctgcccacgacgagtccccggggaacaac

SEQ ID NO: 31602 - DNA, 246 bp, Macaca Mulatta
taggttcaagctggagaatccttcaaaatcctacacccacattccctgcaactcctcatctccctgatcttccagacaaactacctggatgttgcccttaaaccatttctagctgttaaccctgtccagaaaaatgattgagtgatagctgagaagtggaaagtgtgggatttttggcaggtgctctctttcctctgctccccgtgccattctttctcttcctcctctctgtgatggtatgtccag

SEQ ID NO: 31603 - DNA, 230 bp, Macaca Mulatta
gtgggtgtcggcactgcacactggggaagcacggattcgtgtgcgctgtgtgaccctgagcctgccactgacctctctgagccttgctgtctgcctctccagtagggatgacgactcctacttcatggggttgtactgggggctcaggggcacagggagatccagctgaggctcccagggccctgccagtgcttggcaaggagcagttctgatgggggatgtgtcagctg

SEQ ID NO: 31604 - DNA, 1286 bp, Macaca Mulatta
  misc_feature (1)...(1286): n = A,T,C or G
gtttggaatcagttgctaccattcttgtctctctgccacccaggacgttatggcagctcacttggtaaagcgatgcacgtgcctcctgagagaagctgctcgtcaggcccctgtcatggctccagttggccgactgagacttgccagggtagcccataagactctgacttcctcagccacctcacccatttcccacttcccaggttcattggtggagctggtggagaaggaacaagcgtttactccctacatagagaaccaggtggaccgtctcatcaagaaggccgcaaggccagaggagctcctggagctccttggtggcagtcaccacttggacaacaatcatgcggccctagtacttatccggctctctcacttgctgtctgagaaaccaaaagacaaagccttgcttatacaggatgcccgctttcagcaacttctctgtctgctcaacagtcagnnnnnnnnnnnnnnnnnnnnnnnnnnnnnnnnnnnnnnnnnnnnnnnnnnnnnnnnnnnnnnnnnnnnnnnnnnnnnnnnnnnnnnnnnnnnnnnnnnnnnnnnnnnnnnnnnnnnnnnnnnnnnnnnnnnnnnnnnnnnnnnnnnnnnnnnnnnnnnnnnnnnnnnnnnnnnnnnnnnnnnnnnnnnnnnnnnnnnnnnnnnnnnnnnnnnnnnnnnnnnnnnnnnnnnnnnnnnnnnnnnnnnnnnnnnnnnnnnnnnnnnnnnnnnnnnnnnnnnnnnnnnnnnnnnnnnnnnnnnnnnnnnnnnnnnnnnnnnnnnnnnnnnnnnnnnnnnnnnnnnnnnnnnnnnnnnnnnnnnnnnnnnnnnnnnnnnnnnnnnnnnnnnnnnnnnnnnnnnnnnnnnnnnnnnnnnnnnnnnnnnnnnnnnnnnnnngtacatgagaagctggggtcagagctgccaggcctggagccagccctgcaggtagacctggtgtgggccttgtgtgtgctgcagcaggcacgggaagcagagctgcaagccgtcctccaccctgaatttcacatccaatttctaggnnnnctagggggcaagtctcagaaggatcagaacaccttccagaagctgctccacatcaacgccactgccatgctagagcaccccgagtactcaggtccccttctgccagcctcggctgtggcccctaggccctcaaaccatgacaggaaggtgacccccctgcaaaaggagctgcaggagacactgaaggggctgctggggagcgccgacaggggcagcctcgaggtggccacgcagtatggctg

SEQ ID NO: 31605 - DNA, 886 bp, Macaca Mulatta
  misc_feature (1)...(886): n = A,T,C or G
agtggctatcaacttagtgttcatcagagatttcatactggtgagaagctttatcaatgtaaggaattcgggaagacctttannnnnnnnnnnnnnnnnnnnnnnnnnnnnnnnnnnnnnnnnnnnnnnnnnnnnnnnnnnnnnnnnnnnnnnnnnnnnnnnnnnnnnnnnnnnnnnnnnnnnnnnnnnnnnnnnnnnnnnnnnnnnnnnnnnnnnnnnnnnnnnnnnnnnnnnnnnnnnnnnnnnnnnnnnnnnnnnnnnnnnnnnnnnnnnnnnnnnnnnnnnnnnnnnnnnnnnnnnnnnnnnnnnnnnnnnnnnnnnnnnnnnnnnnnnnnnnnnnnnnnnnnnnnnnnnnnnnnnnnnnnnnnnnnnnnnnnnnnnnnnncttatggatgtaaagactgtgggaaggcctttggtagtggctatcaacttagtgttcatcagagatttcatactggtgagaagctttatcaatgtaaggaattcgggaagacctttannnggggttcaagcctaattaagcatgagagagtgcatactaatgagaagacttatggatgtaaagactgtgggaaggcctttggtagtggctatcaacttagtgttcatcagagatttcatactggtgagaagctttatcaatgtaaggaatnnnnnnnnnnnnnnnnnnnnnnnnnnnnnnnnnnnnnnnnnnnnnnnnnnnnnnnnnnnnnnnnnnnnnnnnnnnnnnnnnnnnnnnnnnnnnnnnnnnnnnnnnnnnnnnnnnnnnnnnnnnnnnnnnnnnnnnnnnnnnnnnnnnnnnnnnnnnnnnnnnnnnnnnnnnnnnnnnncttcagttgggggttcaagcctaattaagcatgagagagtgcatactaatgag

SEQ ID NO: 31606 - DNA, 122 bp, Macaca Mulatta
gggccagcccagtgtcagaacaggactgtgtccccccacagaacccaggacggggcccaggctcagggactcaacaatcacatattgtggatgagacagacacattttcttctctctccttg

SEQ ID NO: 31607 - DNA, 543 bp, Macaca Mulatta
gtatgaagtacagctacaccttcccaagttcaagctggaagacagttatgatctcaagtcaaccctgagcagtatggggatgagtgatgctttcagccagagcaaagctgatttctcaggaatgtcttcagcgagaaacctatttttatccaatgttttccacaaggcttttgtggaaataaatgtttttggtactgaagccgcagctggcactgggagtgagatagattcacgaattagagtcccatccattgaattcaatgcaaatcacccattcctcttcttcatcaggcacaataaaaccaacaacattcttttttatggaagattatgctccccctaaatcccacatctctctcaacaaacaaggccatcttacagtgtgaaaaatgtaccatgagatggaaaagcacaattttcacaaaaatgagtttgtagtctaaacttttttcatatttggatataagtaaataaatcttgaaataatgcattctaatgatcctgtcatatctgcacagctggagagaataacaagttttattt

SEQ ID NO: 31608 - DNA, 434 bp, Macaca Mulatta
  misc_feature (1)...(434): n = A,T,C or G
tgtggctctgcgcgagatccgccgttatcagaagtctaccgaactgctgattcgtaaactacctntccagcgcctagtgcgcgagattgcgcaggacttcaaaacagacctgcgcttccagagctctgctgtgatggctctgcaggaggcttgcgaggcctacttagttgggctgtttgaggacactaacctgtgcgccatccacgccaagcgcgtcactatcatgcccaaggacatccagctggctcgccgcatccgcggagagcgggcatgattactccggcagctctgacggtccaatcaaaggctcttttcagagccaccaccttttcaagtaaggtagctgtaagaagccaatctaagacgaaagggaatgcattgggagcacttttcgttttgatgtttgccactgaaggcttaaaaaccattcgatt

SEQ ID NO: 31609 - DNA, 731 bp, Macaca Mulatta
cgaagtgagctcccatctctgatccatcgtcggggcattgacattgaacccgtgactttagaggttggagattacatcctcactcccagaaatgtgtgtggagcgcaagagtatcagtgatttaatcggctctttaaataacggccgcctctacagccagtgcgtctccatgtcccgctactacaagcgtcctgtgcttctgatcgagtttgaccccagcaagcctttctctctcactgcccgcggtgccttgttccaggagatctccagcaatgacattagttccaaactcactcttcttacactccacttccccagactacggattctctggtgcccctctcctcatgcaacggcggagttatttgaggagctgaaacaaaataagccacagcctgatgcggcgacagcactggccattacagcagattccgaaacccttcccgagtcagaaaagtacaatgctggtccccaagacttcttgttaaaaatgccaggggtgaatgccaaaaactgccgctccttgatgcaccacgttaagaacatcgcagaattagcaaccctgtcacaagacaagctcacgagtattctggggaatgccgcaaatgccaagcagctttatgatttcattcacacctcttacgcagaagtcgtatcgaaaggaaaagggaaaaagtgaacagtgatggctgttttcttatcccacacctgtacttttcagctgctccttg

SEQ ID NO: 31610 - DNA, 350 bp, Macaca Mulatta
ctgtgctcggagggcagacaggctcctggaaatgaagatgagctccacccggcacccgagcttctctggctgtatcccctcactgagggggccccccgcacccgggaggagacgcgggacttggtccacgctcccttacccttgacctggaaacgctcgagcctgtgtggcgaggagcagggatcccccgaggaactgaggcagcgggaggtggctgagcccctggtggggcgggtgcttcctgtgggtgaggcagacctgccctggaactttgggcctttataaaaaccccggcgggaactgcgacgagccagcccggggatgattgatgtccggaaaaaccccctgta

SEQ ID NO: 31611 - DNA, 317 bp, Macaca Mulatta
agattatgctgactcaaatgcagtgtaatggcaagttaaacaaatgagtgataggtgtggtagtccttttttcaggttttcaacttcatatgactcaggttttatggtaaaattgatttttcacatgtatgggacagtgttcttcagaacttttaagtaccctttaacattattatgcagtgcaaactagttatgccattgtttctttcatgcttctagtcagatgtttattaaatgataaatataaatatatctgggaaaacattaaacattgcattcatctaagattctgagaagaggcaaaattctgaagatta

SEQ ID NO: 31612 - DNA, 717 bp, Macaca Mulatta
cccaaggtcaaggtggtctttgtggacccttcattccatcaccgggctattctgcacgagatctttcctgctgcccgcgtcctcctttccatctaccacacaacccgactcttggagaagaagctgcatcgtagttcagcaaatccatcctttaaaaggctcatgaaggaagccctgcgggaggctgtgtttgtcacttccgaagccagcctgaaaaatctctgccagatgtcccaggccctactggatgaggatctcttcaacttcctgcaggcccactggttcacctgtgaactgctgtggtacatgcatgttaggaagggcctgcttgcgtgtaacacctacatggacagcctagacattgtcaccagcaaggtgtcaagcctctttcgggaacagcagtccctgctggactgcatcctctgctttgtggattacatcgacttctttaataccaaaggcttgaagaacttgcccacagctcctcccaagttaaagagagctcggccagcaagcgtgccactgaagtccaagaaggcttttggaatctatggagaaagccttaccagcctccctgtagaagagaccaagccagactcacagcaggtacaggtgcagcagcggtcacaggtgccaccctcgcaggttggcatgctggacaccttgcaccagagtggctctgaactagcctacaagctgtgccacaatgagtgggag

SEQ ID NO: 31613 - DNA, 438 bp, Macaca Mulatta
  misc_feature (1)...(438): n = A,T,C or G
gtgagaggctgccccagtcacctcctggggtgcagctgagctgctgtttctctgtcctaggaggggtnttcagtgcaaacaaaccctncacattctcctctcctggagtgggccctccaggagcccccacccctgagcgccctcttgcttggtcagttcttagccctgctcatccctgggctattagcttcaggggtactgtctgtcctgggccactaaatctgtcccaactctcttgtcagacacaggcctctgaggcttccctcctgagtctggaccagggagagtctccctagatagtgggattgggggtcgctccctggggattctcctaagtccccaaagttctcagagtagacacaagagggcacccaaggggcgcgctctgctgcttggaggctgtttttctctttcgctggtggggggcctcttagatga

SEQ ID NO: 31614 - DNA, 312 bp, Macaca Mulatta
gtatataacagatctgtccagtttgtgcatgaaatggatttgataaagtttttgctatgttattttactacatttgaggattaattcgtgatttatatgtatgtttttctataaatctactttttttgtacaagatgttctacaagatatgaagctaagggaggaaaacgccaaagatatctctagttatgttgaacatagccaacatggtttcaatggatcagtaagaaaaaaccatttcagtaaggaatgaaataagtacttatttgagaaaatgtttcttaacaataaaaaggtatatatttttctctt

SEQ ID NO: 31615 - DNA, 811 bp, Macaca Mulatta
gggggctttttagggagtccaaggtacagtcgtcgcgtgcggagctagtggatagttggcctcatggcgggtccgagcgtctttcgagaacaactgtgagatcggctgctttgccaagctcaccaacacctactggctggtggcgattggaggttcagagaacttttacagtgtgttcgagggcgggctctccgataccatccccgtggtgcacgcgtctatcggcggctgccgcatcatcgggcgcatgtgtgtggggaacaggcacggtctcctggtgcccaacaataccactgaccaggagctgcaacatattcgcaacagcctcccagacacagtgcaaattcggcgggtggaggagcggctctcagccttgggcagtgtcaccacctgcaatgactacgtggccttggtccacccagacttggacagggagacagaagaaattcgggcagatgtgctcaaggtggaagtcttcagacagagaggggccgaccaggtgctagtaggaagttactgtgtcttcagcaatcaagggaaggctggtgcatcccaaggacttcaatcggaagaccaggaatgagctgtcccgtctcttctttcaggtccgcccctttgtgggcagggcaacgtgtggaaccggaaggcaagtggcgggttgaatttgcttgcgtggggaaaggggtgggttagaaaaggaacttgggggtgcttgcccctttccttgggtgggcccttggggaacaacgaaacgccagggggacaataaaaaccttgttttcaaaattgggttttgggcacgaaaaaatat

SEQ ID NO: 31616 - DNA, 376 bp, Macaca Mulatta
  misc_feature (1)...(376): n = A,T,C or G
gtattattttcgtacacgacttaacaaataagaagtcctcccaaaacttgcgtcgttggtcattggaagctctcaacagggatttggtgcccactggggtcttggtaacaaatgggnnnnnnnnnnnnnnnnnnnnnnnnnnnnnnnnnnnnnnnnnnnnnnnnnnnnnnnnnnnnnnnnnnnnnnnnnnnnnnnnnnnnnnnnnnnnnnnnnnnnnnnnnnnnnnnnnnnnnnnnnnnnnnnnnnnnnnnnnnnnnnnnnnnnnnnnnnnnnnnnnnnnnnnnnnnnnnnnnnnnnnnnnnnnnnnnnnnnnnnnnnnnnnnnnnnnnnnnnnnnggtcatagagaagagatactttttaagagaaggtaatcag

SEQ ID NO: 31617 - DNA, 202 bp, Macaca Mulatta
ttgctgtgctctccgctcctgcagcgtccccactggccctgccaccaccttctgctcctttgataaaagctgccgctgtggagtctgtctacccagcacctgcccacatgagatcagcctccttcagcccatctgctgtgacacctgccccccaccctgctgcaagcctgatacctatgtgccaacttgctggctgctcaac

SEQ ID NO: 31618 - DNA, 833 bp, Macaca Mulatta
gggtactttattttagttggattttctaattggcctcatctggaagtagttatcttagtgggtttctggatcttctacttgatgacactgataggaaacctgttcatcattatcctgtcctacctggactcccatctacacactcccttgtatttcttcctttcaagtctctcatttctggatctctgttacaccaccaactctatccctcagttgctggacaatctctgggggctggaaaagaccatttcttatgctggttgcatggttcaactttactttgttctcacactgggaaccacagagtgtgtcctactggtgatgatgtactatgactgttacgcagctgtgtgtagacttttgcattacactgtcctcatgcaccctcgtttctgctgcttgttggctgtggcttcttgggtaagtggttttacaaactcagcacttaattcctccttctccttctgggtaccgctgtgtggacatcaccaagtagatcactttttctgtgaagttccagcacttttgagattattgtgggtcagtacccatgcaaataagctgaccctcataatcacaagctccatttttgttctcatacttctcacccccattttcacttcttatggtgccatcgtccaagctgtactgaggatgcagttaactgctgggcttcagaaagtgtttggaatatgtggagctcatcttatggctgtatctctctttttctttccgcccatgtgcatgtatctccagccatcatcaggaaattctagagatcaaggcaagttcattgctctcttttatacggttgtcacacctagtcttaaccc

SEQ ID NO: 31619 - DNA, 296 bp, Macaca Mulatta
tgaggatttctgaatccaaatctggccaagtcttattttgctaaaatcatttcctaggagctcagcatagaaaactcttctatgctattttagtatattaaccaaaacctttaaaggtaaaaagactgccaggcgatccacatcagtgattcttggtttctagacctctttgagaatatgtgagatatagatccgctgaagcctatccatagaaagtcctttttggatgaaagagattatagaactcattgtttatatgttgataaagaccaaggagctttatgtgttcctaatga

SEQ ID NO: 31620 - DNA, 678 bp, Macaca Mulatta
  misc_feature (1)...(678): n = A,T,C or G
cagagtgaccatggcccctgccttccggctatcactgaaagcgaaggtcagtgacaacatgagtcacctcatggtggacttcgcacaagagcggcagatgctacaggcactcaagtttctgcctgnnnnnnnnnnnnnnnnnnnnnnnnnnnnnnnnnnnnnnnnnnnnnnnnnnnnnnnnnnnnnnnnnnnnnnnnnnnnnnnnnnnnnnnnnnnnnnnnnnnnnnnnnnnnnnnnnnnnnnnnnnnnnnnnnnnnnnnnnnnnnnnnnnnnnnnnnnnnnnnnnnnnnnnnnnnnnnnnnnnnnnnnnnnnnnnnnnnnnnnnnnnnnnnnnnnnnnnnnnnnnnnnnnnnnnnnnnnnnnnnnnnnnnnnnnnnnnnnnnnnnnnnnnnnnnnnnnnnnnnnnnnnnnnnnnnnnnnnnnnnnnnnncagcgttcatgttccgcctggatgcgtccacatcccaccagaacctgcgggtggatgatctctccgtggagtgggacgctatgggcgggaaggtgcaggatatcaaggctcgcgagaaagatggcaaggggcggacggcgtctcccatcaattccccggccagncagaggtactccatctcccaagaggatgccctcaggtcgtgggggacgggaccgcttcaccgctgagtcctacacagtgctggg

SEQ ID NO: 31621 - DNA, 684 bp, Macaca Mulatta
cgcgtgcacacgggcgagaagccctacgcgtgcgccgactgtggcaaggctttcggccagaggtcggacgccgccaagcaccgccgcacccacaccggggagaggctgtacgcgtgcggcgagtgcggaaagcgcttcctgcacagctccaacgtggtccggcaccggcggacccaccacggggagaacccgtacgagtgccgggagtgcggccaggccttcagccagagctccaacctcctccagcaccagcgcgtgcacacgggggagcggcccttcgcctgccaggactgtttttgcgccttcagccgcagctccttcctccgcgagcaccgccgcatccacaccggggagaagccccacgagtgcggccactgcgggcgcgcgttccgggcgctgtcgggcttcttccggcaccagcggctccacacgggcgagaagccgttccgctgcaccgagtgcggccgcgcctttcgcctgagcttccacctcatccagcaccagcgggtgcacggcgccgagtgagccggggctgccgctgaagagatgccagtggcctggtgggcgtaaggccgaggccgggtgagtcctgtccgcaccatgcacggtgaggaagtaacaaccggctgcccgcctggttctcgggctgcagaagcctcgcccggcctgcacctgccttggctc

SEQ ID NO: 31622 - DNA, 1373 bp, Macaca Mulatta
  misc_feature (1)...(1373): n = A,T,C or G
ctttagcggccgtgactgggcagcagggggtcaggatgcggcgaagctcccgcccgggctcggcctcgtcctcgcgcaagcacacacccaactttttcagcgagaacagctcagtgagcatcacctcggaggacagcaacgggctccggtcagcggggccggggcctggggaccccgagggcagaggagcccggttttctagctgcggtgagcccgccttgagcgcgggagtgcccggaggaaccacatgggcaggaagctctcggcagaagccggcgcctcggagccacaactggcagccagcctgtggcgcggcaaccgtgaggggcggggcctcgnnnnnnnnnnnnnnnnnnnnnnnnnnnnnnnnnnnnnnnnnnnnnnnnnnnnnnnnnnnnnnnnnnnnnnnnnnnnnnnnnnnnnnnnnnnnnnnnnnnnnnnnnnnnnnnnnnnnnnnnnnnnnnnnnnnnnnnnnnnnnnnnnnnnnnnnnnnnnnnnnnnnnnnnnnnnnnnnnnnnnnnnnnnnnnnnnnnnnnnnnnnnnnnnnnnnnnnnnnnnnnnnnnnnnnnnnnnnnnnnnnnnnnnnnnnnnnnnnnnnnnnnnnnnnnnnnnnnnnnnnnnnnnnnnnnnnnnnnnnnnnnnnnnnnnnnnnnnnnnnnnnnnnnnnnnnnnnnnnnnnnnnnnnnnnnnnnnnnnnnnnnnnnnnnnnnnnnnnnnnnnnnnnnnnnnnnnnnnnnnnnnnnnnnnnnnnnnnnnnnnnnnnnnnnnnnnnnnnnnnnnnnnnnnnnnnnnnnnnnnnnnnnnnnnnnnnnnnnnnnnnnnnnnnnnnnnnnnnnnnnnnnnnnnnnnnnnnnnnnnnnnnnnnnnnnnnnnnnnnnnnnnnnnnnnnnnnnnnnnnnnnnnnnnnnnnnnnnnnnnnnnnnnnnnnnnnnnnnnnnnnnnnnnnnnnnnnnnnnnnnnnnnnnnnnnnnnnnnnnnnnnnnnnnnnnnnnnnnnnnnnnnnnnnnnnnnnnnnnnnnnnnnnnnnnnnnnnnnnnnnnnnnnnnnnnnnnnnnnnnnnnnnnnnnnnnnnnnnnnnnnnnnnnnnnnnnnnnnnnnnnnnnnnnnnnnnnnnnnnnnnnnnnnnnnnnnnnnnnnnnnnnnnnnnnnnnnnnnnnnnnnnnnnnnnnnnnnnnnnnnnnnnnnnnnnnnnnnnnnnnnnnnnnnnnnnnnnnnnnnnnnnnnnccaaggtgaagatccagattctaagcaactggggccacccccgtttcacatgcttgtatcgagtccgtgcccatggtgtgcgaacctcagagggggcagagggcagtgccacaggggggccccattaaacatgctgattgttggagta

SEQ ID NO: 31623 - DNA, 1524 bp, Macaca Mulatta
  misc_feature (1)...(1524): n = A,T,C or G
aggtgtccagctatccattaccaagaagaaatctattcgtttgagcctaaagaactctttgaggtaaaaaattagaatgaaagaacctttggatggtgaatgtggcaaagcagtggtaccacagcaggagcttctggacaaaattaaagaagaaccagacaatgctcaannnnnnnnnnnnnnnnnnnnnnnnnnnnnnnnnnnnnnnnnnnnnnnnnnnnnnnnnnnnnnnnnnnnnnnnnnnnnnnnnnnnnnnnnnnnnnnnnnnnnnnnnnnnnnnnnnnnnnnnnnnnnnnnnnnnnnnnnnnnnnnnnnnnnnnnnnnnnnnnnnnnnnnnnnnnnnnnnnnnnnnnnnnnnnnnnnnnnnnnnnnnnnnnnnnnnnnnnnnnnnnnnnnnnnnnnnnnnnnnnnnnnnnnnnnnnnnnnnnnnnnnnnnnnnnnnnnnnnnnnnnnnnnnnnnnnnnnnnnnnnnnnnnnnnnnnnnnnnnnnnnnnnnnnnnnnnnnnnnnnnnnnnnnnnnnnnnnnnnnnnnnnnnnnnnnnnnnnnnnnnnnnnnnnnnnnnnnnnnnnnnnnnnnnnnnnnnnnnnnnnnnnnnnnnnnnnnnnnnnnnnnnnnnnnnnnnnnnnnnnnnnnnnnnnnnnnnnnnnnnnnnnnnnnnnnnnnnnnnnnnnnnnnnnnnnnnnnnnnnnnnnnnnnnnnnnnnnnnnnnnnnnnnnnnnnnnnnnnnnnnnnnnnnnnnnnnnnnnnnnnnnnnnnnnnnnnnnnnnnnnnnnnnnnnnnnnnnnnnnnnnnnnnnnnnnnnnnnnnnnnnnnnnnnnnnnnnnnnnnnnnnnnnnnnnnnnnnnnnnnnnnnnnnnnnnnnnnnnnnnnnnnnnnnnnnnnnnnnnnnnnnnnnnnnnnnnnnnnnnnnnnnnnnnnnnnnnnnnnnnnnnnnnnnnnnnnnnnnnnnnnnnnnnnnnnnnnnnnnnnnnnnnnnnnnnnnnnnnnnnnnnnnnnnnnnnnnnnnnnnnnnnnnnnnnnnnnnnnnnnnnnnnnnnnnnnnnnnnnnnnnnnnnnnnnnnnnnnnnnnnnnnnnnnnnnnnnnnnnnnnnnnnnnnnnnnnnnnnnnnnnnnnnnnnnnnnnnnnnnnnnnnnnnnnnnnnnnnnnnnnnnnnnnnnnnnnnnnnnnnnnnnnnnnnnnnnnnnnnnnnnnnnnnnnnnnnnnnnnnnnnnnnnnnnnnnnnnnnnnnnnnnnnnnnnnnnnnnnnnnnnnnnnnnnnnnnnnnnnnnnnnnnnnnnnnnnnnnnnnnnnnnnnnnnnnnnnnnnnnnnnnnnnnnnnnnnnnnnnnnnnnnnnnnnnnnnnnnnnnnnnnnnnnnnnnnnnnnnnnnnnnnnnnnnnnnnnnnnnnnnnnnnnnnnntaacatatcatttgtaggcccctattttgtctttggccatgtttatctgctttgtgtcttgacctaaactatctaaaagtagatcctgctatatggaaatttccagctaaacaggagagaggat

SEQ ID NO: 31624 - DNA, 149 bp, Macaca Mulatta
  misc_feature (1)...(149): n = A,T,C or G
atttcagttatcattagtttcattttgatgtttggaaatttaatgtacttatcttctttttattcttcatctttgttaatgatgtgggnggcaataattctaaagagaaagaaaatttaaaaactgggagtatctgaactcaacttttg

SEQ ID NO: 31625 - DNA, 843 bp, Macaca Mulatta
  misc_feature (1)...(843): n = A,T,C or G
accttacaggatcgagacggagggagagaagcaggagctgtggaaatatacgatcgacaatgtttcccccctcgcacagccagaggaggaggagcgggaacggcgtgtgttcaaggatnnnnnnnnnnnnnnnnnnnnnnnnnnnnnnnnnnnnnnnnnnnnnnnnnnnnnnnngactgtcccaggtgccctccggctctttgtaaatggagaggnnnnnnnnnnnnnnnnnnnnnnnnnnnnnnnnnnnnnnnnnnnnnnnnnnnnnnnnnnnnnnnnnnnnctggtcaagcccagcattccagcagctctcaggagtaacacagacatgcaccaccaagtccctggnnnnnnnnnnnnnnnnnnnnnnnnnnnnnnnnnnnnnnnnnnnnnnnnnnnnnnnnnnnnnnnnnnnnnnnnnnnnnnnnnnnnnnnnnnnnnnnnnnnnnnnnnnnnnnnnnnnnnnnnnnnnnnnnnnnnnnnnnnnnnnnnnnnnnnnnnnnnnnnnnnnnnnnnnnnnnnnnnnnnnnnnnnnnnnnnnnnnnnnnnnnnnnnnnnnnnnnnnnnnnnnnnnnnnnnnnnnnnnnnnnnnnnnnnnnnnnnnnnnnnnnnnnnnnnnnnnnnnnnnnnnnnnnnnnnnnnnnnnnnnnnnnnnnnnnnnnnnnnnnnnnnnnnnnnnnnnnnnnnnnnnnnnnnnnnnnnnnnnnnnnnnnnnnnnnnnnnnnnnnnnnnnnnnnnnnnnnnnagggccttcatggaatcgagctcccttcggaaaaggatgcggagtgtgttggaccgtctggaagggttcagccagcagagttccattcacaatgtgct

SEQ ID NO: 31626 - DNA, 556 bp, Macaca Mulatta
gcggcgcgcacgttcccatccaggctcggagcgcgaggtccccaggcgggccccaaacgcgggaccctgcccttctgcactggggcccagccgcctcccggcctttcctccctcccctaggagatgagacgtatcttgacatcttccgcgacttctccctcatggcgtcagacgacccggagaagctgagccggcgcagtcacgacctccacacgctgtgaccccaggccctaagggtctgcgcctccctcccctccccgtcaccgggccctctgccattaaagcttccgtgcttcgctcttcccttctggttcacttcttgggcgccacctttggacccgtagggtgttgggcgctgaggctcccggggtgcggggagcggctgggggtttgcgacctcgagtccagcaaggggcgactccagggagcgaggcggcagcttcggccgcgacccgagcgccgggcgttgcggggcgggggctcttgggcttgggcgacgtggccagcccagtcctgccgagaggtggggccggccctggggctctctggccccgcc

SEQ ID NO: 31627 - DNA, 2350 bp, Macaca Mulatta
  misc_feature (1)...(2350): n = A,T,C or G
nggttattcagaagttttgttttcctcttagttctgtgcctgctgcaccggtcaaatagttccttcattaggctgaataataatggttttgaagatattatcattgtaatagatcctagtgtgccagaagatgaaaaaataattgaacaaatnnnnnnnnnnnnnnnnnnnnnnnnnnnnnnnnnnnnnnnnnnnnnnnnnnnnnnnnnnnnnnnnnnnnnnnnnnnnnnnnnnnnnnnnnnnnnnnnnnnnnnnnnnnnnnnnnnnnnnnnnnnnnnnnnnnnnnnnnnnnnnnnctgatgttatagttgcaccacctacgctcccaggtagagatgaaccatacaccaagcagttcacagaatgtggagagaaaggcgaacacattcacttcacccctgactttctacttggaaaaaccagaatgaatatggaccaccaggnnnnnnnnnnnnnnnnnnnnnnnnnnnnnnnnnnnnnnnnnnnnnnnnnnnnnnnnnnnnnnnnnnnnnnnnnnnnnnnnnnnnnnnnnnnnnnnnnnnnnnnnnnnnnnnnnnnnnnnnnnnnnnnnnnnnnnnnnnnnnnnnnnnnnnnnnnnnnnnnnnnnnnnnnnnnnnnnnnnnnnnnnnnnnnnnnnnnnnnnnnnnnnnnnnnnnnnnnnnnnnnnnnnnnnnnnnnnnnnnnnnnnnnnnnnnnnnnnnnnnnnnnnnnnnnnnnnnnnnnnnnnnnnnnttgttgaattctgtaatgaaaaaacccataatcaagaagctccaagcctacaaaacaaaaagtgcaattttagaagtacatgggaggtgattagcagttctgaggattttaataacaccatacccatggtgacaccacctcctccacctgtcttctcattgctgaagatcaatcaaagaattgtgtgcttagttcttgataagtctgaaagcatggnnnnnnnnnnnnnnnnnnnnnnnnnnnnnnnnnnnnnnnnnnnnnnnnnnnnnnnnnnnnnnnnnnnnnnnnnnnnnnnnnnnnnnnnnnnnnnnnnnnnnnnnnnnnnnnnnnnnnnnnnnnnnnnnnnnnnnnnnnnnnnnnnnnnnnnnnnnnnnnnnnnnnnnnnnnnnnnnnnnnnnnnnnnnnnnnnnnnnnnnnnnnnnnnnnnnnnnnnnnnnnnnnnnnnnnnnnnnnnnnnnnnnnnnnnnnnnnnnnnnnnnnnnnnnnnnnnnnnnnnnnnnnnnnnnnnnnnnnnnnnnnnnnnnnnnnnnnnnnnnnnnnnnnnnnnnnnnnnnnnnnnnnnnnnnnnnnnnnnnnnnnnnnnnnnnnnnnnnnnnnnnnnnnnnnnnnnnnnnnnnnnnnnnnnnnnnnnnnnnnnnnnnnnnnnnnnnnnnnnnnnnnnnnnnnnnnnnnnnnnnnnnnnnnnnnnnnnnnnnnnnnnnnnnnnnnnnnnnnnnnnnnnnnnnnnnnnnnnnnnnnnnnnnnnnnnnnnnnnnnnnnnnnnnnnnnnnnnnnnnnnnnnnnnnnnnnnnnnnnnnnnnnnnnnnnnnnnnnnnnnnnnnnnnnnnnnnnnnnnnnnnnnnnnnnnnnnnnnnnnnnnnnnnnnnnnnnnnnnnnnnnnnnnnnnnnnnnnnnnnnnnnnnnnnnnnnnnnnnnnnnnnnnnnnnnnnnnnnnnnnnnnnnnnnnnnnnnnnnnnnnnnnnnnnnnnnnnnnnnnnnnnnnnnnnnnnnnnnnnnnnnnnnnnnnnnnnnnnnnnnnnnnnnnnnnnnnnnnnnnnnnnnnnnnnnnnnnnnnnnnnnnnnnnnnnnnnnnnnnnnnnnnnnnnnnnnnnnnnnnnnnnnnnnnnnnnnnnnnnnnnnnnnnnnnnnnnnnnnnnnnnnnnnnnnnnnnnnnnnnnnnnnnnnnnnnnnnnnnnnnnnnnnnnnnnnnnnnnnnnnnnnnnnnnnnnnnnnnnnnnnnnnnnnnnnnnnnnnnnnnnnnnnnnnnnnnnnnnnnnnnnnnnnnnnnnnnnnnnnnnnnnnnnnnnnnnnnnnnnnnnnnnnnnnnnnnnnnnnnnnnnnnnnnnnnnnnnnnnnnnnnnnnnnnnnnnnnnnnnnnnnnnnnnnnnnnnnnnnnnnnnnnnnnngggaaattgaagcaaacccaccaagacctgaaattgatgaggatactcagaccaccttggaggatttcagccgaacagtgtctggaggtgcatttgtggtgtcacaagtcccannnnnnnnnnnnnnnnnnnnnnnncaccaagtcaaatcacagaccttgatgccacacttcaggaggatgagattattcttacatggacagcaccaggagataattttgatgttgggaaag

SEQ ID NO: 31628 - DNA, 2138 bp, Macaca Mulatta
  misc_feature (1)...(2138): n = A,T,C or G
cagctacttgagaggctgaggcaggagaaacgcttgaacctgggaggtagaggttgcagcaagccgagaccacgccactgctctccagcctaggcaacaaagctagactccatctcnnnnnnnnnnnnnnnnnnnnnnnnaagcgcctgtccatgtgtttggccaaatccatcctccgagatcttaagggggccggagtaggagtcctcgttggtgttctaaggcagttgttctggcttccagtcagctctaaaccttaccttctggggactccaggattttctgctcttggcctgatgcaagagaaaggagaatccccagagagagaagtggggcggtaaagagcattttctccacttacctttgggttttttgtgctcccaagtagaaatacgtatcaagaattcacaagtttacttaagcacaggttgcccctgggctgtgtgtcagggctggtggtactgnnnnnnnnnnnnnnnnnnnnnnnnnnnnnnnnnnnnnnnnnnnnnnnnnnnnnnnnnnnnnnnnnnnnnnnnnnnnnnnnnnnnnnnnnnnnnnnnnnnnnnnnnnnnnnnnnnnnnnnnnnnnnnnnnnnnnnnnnnnnnnnnnnnnnnnnnnnnnnnnnnnnnnnnnnnnnnnnnnnnnnnnnnnnnnnnnnnnnnnnnnnnnnnnnnnnnnnnnnnnnnnnnnnnnnnnnnnnnnnnnnnnnnnnnnnnnnnnnnnnnnnnnnnnnnnnnnnnnnnnnnnnnnnnnnnnnnnnnnnnnnnnnnnnnnnnnnnnnnnnnnnnnnnnnnnnnnnnnnnnnnnnnnnnnnnnnnnnnnnnnnnnnnnnnnnnnnnnnnnnnnnnnnnnnnnnnnnnnnnnnnnnnnnnnnnnnnnnnnnnnnnnnnnnnnnnnnnnnnnnnnnnnnnnnnnnnnnnnnnnnnnnnnnnnnnnnnnnnnnnnnnnnnnnnnnnnnnnnnnnnnnnnnnnnnnnnnnnnnnnnnnnnnnnnnnnnnnnnnnnnnnnnnnnnnnnnnnnnnnnnnnnnnnnnnnnnnnnnnnnnnnnnnnnnnnnnnnnnnnnnnnnnnnnnnnnnnnnnnnnnnnnnnnnnnnnnnnnnnnnnnnnnnnnnnnnnnnnnnnnnnnnnnnnnnnnnnnnnnnnnnnnnnnnnnnnnnnnnnnnnnnnnnnnnnnnnnnnnnnnnnnnnnnnnnnnnnnnnnnnnnnnnnnnnnnnnnnnnnnnnnnnnnnnnnnnnnnnnnnnnnnnnnnnnnnnnnnnnnnnnnnnnnnnnnnnnnnnnnnnnnnnnnnnnnnnnnnnnnnnnnnnnnnnnnnnnnnnnnnnnnnnnnnnnnnnnnnnnnnnnnnnnnnnnnnnnnnnnnnnnnnnnnnnnnnnnnnnnnnnnnnnnnnnnnnnnnnnnnnnnnnnnnnnnnnnnnnnnnnnnnnnnnnnnnnnnnnnnnnnnnnnnnnnnnnnnnnnnnnnnnnnnnnnnnnnnnnnnnnnnnnnnnnnnnnnnnnnnnnnnnnnnnnnnnnnnnnnnnnnnnnnnnnnnnnnnnnnnnnnnnnnnnnnnnnnnnnnnnnnnnnnnnnnnnnnnnnnnnnnnnnnnnnnnnnnnnnnnnnnnnnnnnnnnnnnnncagtttaggctaacacagtccacaccgttaccactaaaataaagtaacagaatgcttaaatattgtccttatcaaacatccatcactttgttgcttttatgagatgtagattgctaaaaacttntgaggtagtaactggttacctttaggcatcaatgaacacaaacagtgaagacctcagagaagagtgacctcattttctctacacgatctccagtgtagtctaagataaggcccatacatagttaaaagctggtaacagctctgaacagaagtatgcattaaaagtttcaaacttgtatatatttttgaatgcttttgtttttggagtgaatttttaatgctctgtgttaaaagaaaaacgttccatcgtgtaggcagtgttcctaagtaaaaatctttgttgcattttcccatataaatgaatcacccttattaaaacaggaggagggagggattcgtggtgacctaccactgccctccccttctaagagaagaggaggccatgggatatgataac

SEQ ID NO: 31629 - DNA, 246 bp, Macaca Mulatta
cattgatatccatattaaaattacaaacacctacattaatgtagataaagcactgtttggatatgagaagtagtgaactccaagacattattggacttccatttggaatcatatgggacactgctggtcttatcctgtccctcctccaggaagagagaccacatgcaggctcaacataacataagctagaaaaattagatgaccgaatttctatggcatattgataataaaattcattccatttgc

SEQ ID NO: 31630 - DNA, 5535 bp, Macaca Mulatta
  misc_feature (1)...(5535): n = A,T,C or G
gttcaactccaagaacgatgtgtacgtggccatcgcgcagcccagcatggagaactgcatggtgctggagtgggaccacatcgaaatgaatttccggagctatgacaacattacaggnnnnnnnnnnnnnnnnnnnnnnnnnnnnnnnnnnnnnnnnnnnnnnnnnnnnnnnnnnnnnnnnnnnnnnnnnnnnnnnnnnnnnnnnnnnnnnnnnnnnnnnnnnnnnnnnnnnnnnnnnnnnnnnnnnnnnnnnnnnnnnnnnnnnnnnnnnnnnnnnnnnnnnnnnnnnnnnnnnnnnnnnnnnnnnnnnnnnnnnnnnnnnnnnnnnnnnnnnnnnnnnnnnnnnnnnnnnnnnnnnnnnnnnnnnnnnnnnnnnnnnnnnnnnnnnnnnnnnnnnnnnnnnnnnnnnnnnnnnnnnnnnnnnnnnnnnnnnnnnnnnnnnnnnnnnnnnnnnnnnnnnnnnnnnnnnnnnnnnnnnnnnnnnnnnnnnnnnnnnnnnnnnnnnnnnnnnnnnnnnnnnnnnnnnnnnnnnnnnnnnnnnnnnnnnnnnnnnnnnnnnnnnnnnnnnnnnnnnnnnnnnnnnnnnnnnnnnnnnnnnnnnnnnnnnnnnnnnnnnnnnnnnnnnnnnnnnnnnnnnnnnnnnnnnnnnnnnnnnnnnnnnnnnnnnnnnnnnnnnnnnnnnnnnnnnnnnnnnnnnnnnnnnnnnnnnnnnnnnnnnnnnnnnnnnnnnnnnnnnnnnnnnnnnnnnnnnnnnnnnnnnnnnnnnnnnnnnnnnnnnnnnnnnnnnnnnnnnnnnnnnnnnnnnnnnnnnnnnnnnnnnnnnnnnnnnnnnnnnnnnnnnnnnnnnnnnnnnnnnnnnnnnnnnnnnnnnnnnnnnnnnnnnnnnnnnnnnnnnnnnnnnnnnnnnnnnnnnnnnnnnnnnnnnnnnnnnnnnnnnnnnnnnnnnnnnnnnnnnnnnnnnnnnnnnnnnnnnnnnnnnnnnnnnnnnnnnnnnnnnnnnnnnnnnnnnnnnnnnnnnnnnnnnnnnnnnnnnnnnnnnnnnnnnnnnnnnnnnnnnnnnnnnnnnnnnnnnnnnnnnnnnnnnnnnnnnnnnnnnnnnnnnnnnnnnnnnnnnnnnnnnnnnnnnnnnnnnnnnnnnnnnnnnnnnnnnnnnnnnnnnnnnnnnnnnnnnnnnnnnnnnnnnnnnnnnnnnnnnnnnnnnnnnnnnnnnnnnnnnnnnnnnnnnnnnnnnnnnnnnnnnnnnnnnnnnnnnnnnnnnnnnnnnnnnnnnnnnnnnnnnnnnnnnnnnnnnnnnnnnnnnnnnnnnnnnnnnnnnnnnnnnnnnnnnnnnnnnnnnnnnnnnnnnnnnnnnnnnnnnnnnnnnnnnnnnnnnnnnnnnnnnnnnnnnnnnnnnnnnnnnnnnnnnnnnnnnnnnnnnnnnnnnnnnnnnnnnnnnnnnnnnnnnnnnnnnnnnnnnnnnnnnnnnnnnnnnnnnnnnnnnnnnnnnnnnnnnnnnnnnnnnnnnnnnnnnnnnnnnnnnnnnnnnnnnnnnnnnnnnnnnnnnnnnnnnnnnnnnnnnnnnnnnnnnnnnnnnnnnnnnnnnnnnnnnnnnnnnnnnnnnnnnnnnnnnnnnnnnnnnnnnnnnnnnnnnnnnnnnnnnnnnnnnnnnnnnnnnnnnnnnnnnnnnnnnnnnnnnnnnnnnnnnnnnnnnnnnnnnnnnnnnnnnnnnnnnnnnnnnnnnnnnnnnnnnnnnnnnnnnnnnnnnnnnnnnnnnnnnnnnnnnnnnnnnnnnnnnnnnnnnnnnnnnnnnnnnnnnnnnnnnnnnnnnnnnnnnnnnnnnnnnnnnnnnnnnnnnnnnnnnnnnnnnnnnnnnnnnnnnnnnnnnnnnnnnnnnnnnnnnnnnnnnnnnnnnnnnnnnnnnnnnnnnnnnnnnnnnnnnnnnnnnnnnnnnnnnnnnnnnnnnnnnnnnnnnnnnnnnnnnnnnnnnnnnnnnnnnnnnnnnnnnnnnnnnnnnnnnnnnnnnnnnnnnnnnnnnnnnnnnnnnnnnnnnnnnnnnnnnnnnnnnnnnnnnnnnnnnnnnnnnnnnnnnnnnnnnnnnnnnnnnnnnnnnnnnnnnnnnnnnnnnnnnnnnnnnnnnnnnnnnnnnnnnnnnnnnnnnnnnnnnnnnnnnnnnnnnnnnnnnnnnnnnnnnnnnnnnnnnnnnnnnnnnnnnnnnnnnnnnnnnnnnnnnnnnnnnnnnnnnnnnnnnnnnnnnnnnnnnnnnnnnnnnnnnnnnnnnnnnnnnnnnnnnnnnnnnnnnnnnnnnnnnnnnnnnnnnnnnnnnnnnnnnnnnnnnnnnnnnnnnnnnnnnnnnnnnnnnnnnnnnnnnnnnnnnnnnnnnnnnnnnnnnnnnnnnnnnnnnnnnnnnnnnnnnnnnnnnnnnnnnnnnnnnnnnnnnnnnnnnnnnnnnnnnnnnnnnnnnnnnnnnnnnnnnnnnnnnnnnnnnnnnnnnnnnnnnnnnnnnnnnnnnnnnnnnnnnnnnnnnnnnnnnnnnnnnnnnnnnnnnnnnnnnnnnnnnnnnnnnnnnnnnnnnnnnnnnnnnnnnnnnnnnnnnnnnnnnnnnnnnnnnnnnnnnnnnnnnnnnnnnnnnnnnnnnnnnnnnnnnnnnnnnnnnnnnnnnnnnnnnnnnnnnnnnnnnnnnnnnnnnnnnnnnnnnnnnnnnnnnnnnnnnnnnnnnnnnnnnnnnnnnnnnnnnnnnnnnnnnnnnnnnnnnnnnnnnnnnnnnnnnnnnnnnnnnnnnnnnnnnnnnnnnnnnnnnnnnnnnnnnnnnnnnnnnnnnnnnnnnnnnnnnnnnnnnnnnnnnnnnnnnnnnnnnnnnnnnnnnnnnnnnnnnnnnnnnnnnnnnnnnnnnnnnnnnnnnnnnnnnnnnnnnnnnnnnnnnnnnnnnnnnnnnnnnnnnnnnnnnnnnnnnnnnnnnnnnnnnnnnnnnnnnnnnnnnnnnnnnnnnnnnnnnnnnnnnnnnnnnnnnnnnnnnnnnnnnnnnnnnnnnnnnnnnnnnnnnnnnnnnnnnnnnnnnnnnnnnnnnnnnnnnnnnnnnnnnnnnnnnnnnnnnnnnnnnnnnnnnnnnnnnnnnnnnnnnnnnnnnnnnnnnnnnnnnnnnnnnnnnnnnnnnnnnnnnnnnnnnnnnnnnnnnnnnnnnnnnnnnnnnnnnnnnnnnnnnnnnnnnnnnnnnnnnnnnnnnnnnnnnnnnnnnnnnnnnnnnnnnnnnnnnnnnnnnnnnnnnnnnnnnnnnnnnnnnnnnnnnnnnnnnnnnnnnnnnnnnnnnnnnnnnnnnnnnnnnnnnnnnnnnnnnnnnnnnnnnnnnnnnnnnnnnnnnnnnnnnnnnnnnnnnnnnnnnnnnnnncaagactaaagcctgcaatctacagagcgcctatgctgtggaaggagatatttattctggccaacttactaaaggagcatagatgttcttggcacagggtggcgaacgctttgcttcattaatcttactgcttcatctcaagaatccctgaagttttaaacaattcctgcaagaagcattcttccagtaataatgtaaaacacaaaaccaaccaagcaacagcaaaaatgcaaagcagagacatatgtggactgtccccagtggagatcagcttgaagcggggggcagatctttcttctactttccctcccatcacccattgggtggtcgtctgctcagcttgtttcttcttgatgagctctgtggctaggctcctggactgatccctctgtgcagccatgtggctttaaggcctttccttaaagggggacttgtccccatactccataggatcgggaatgagtctgttatcaagactctaaaaataaatcttagatatgaagagcactgtgttattggacagtggatgataaggccaccttacatnnnnnnnnnnnnnnnnnnnnnnnnnnnnnnnnnnnnnnnnnnnnnnnnnnnnnnnnnnnnnnnnnnnnnnnnnnnnnnnnnnnnnnnnnnnnnnnnnnnnnnnnnnnnnnnnnnnnnnnnnnnnnnnnnnnnnnnnnnnnnnnnnnnnnnnnnnnnnnnnnnnnnnnnnnnnnnnnnnnnnnnnnnnnnnnnnnnnnnnnnnnnnnnnnnnnnnnnnnnnnnnnnnnnnnnnnnnnnnnnnnnnnnnnnnnnnnnnnnnnnnnnnnnnnnnnnnnnnnnnnnnnnnnnnnnnnnnnnnnnnnnnnnnnnnnnnnnnnnnnnnnnnnnnnnnnnnnnnnnnnnnnnnnnnnnnnnnnnnnnnnnnnnnnnnnnnnnnnnnnnnnnnnnnnnnnnnnnnnnnnnnnnnnnnnnnnnnnnnnnnnnnnnnnnnnnnnnnnnnnnnnnnnnnnnnnnnnnnnnnnnnnnnnnnnnnnnnnnnnnnnnnnnnnnnnnnnnnnnnnnnnnnnnnnnnnnnnnnnnnnnnnnnnnnnnnnnnnnnnnnnnnnnnnnnnnnnnnnnnnnnnnnnnnnnnnnnnnnnnnnnnnnnnnnnnnnnnnnnnnnnnnnnnnnnnnnnnnnnnnnnnnnnnnnnnnnnnnnnnnnnnnnnnnnnnnnnnnnnnnnnnnnnnnnnnnnnnnnnnnnnnnnnnnnnnnnnnnnnnnnnnnnnnnnnnnnnnnnnnnnnnnnnnnnnnnnnnnnnnnnnnnnnnnnnnnnnnnnnnnnnnnnnnnnnnnnnnnnnnnnnnnnnnnnnnnnnnnnnnnnnnnnnnnnnnnnnnnnnnnnnnnnnnnnnnnnnnnnnnnnnnnnnnnnnnnnnnnnnnnnnnnnnnnnnnnnnnnnnnnnnnnnnnnnnnnnnnnnnnnnnnnnnnnnnnnnnnnnnnnnnnnnnnnnnnnnnnnnnnnnnnnnnnnnnnnnnnnnnnnnnnnnnnnnnnnnnnnnnnnnnnnnnnnnnnnnnnnnnnnnnnnnnnnnnnnnnnnnnnnnnnnnnnnnnnnnnnnnnnnnnnnnnnnnnnnnnnnnnnnnnnnnnnnnnnnnnnnnnnnnnnnnnnnnnnnnnnnnnnnnnnnnnnnnnnnnnnnnnnnnnnnnnnnnnnnnnnnnnnnntttgcctcagccaggcaagcagagcatagaatgaccaggaaaattaacaacatctcaattagtaatgaagagaaccaactataatgctcattcaaataagaagtatattgtaaagctactgagatctaaaccaagtcattattatccttactatattccattgcttgtatcaaaatctacttttttttctagtaggaaactatgcattccctatcaatccctttgattatcaggaacgtataagaattgtgataaaataggccaatatgctatttggtaccatttgtatgtattttaaatgcataacctaggtaaaataagaatagttgctatgtgtaaagaagcaagttttacagtatgcagactacagtggatgtattttaggctgtatacatatttagctctttttggtaaatagggcgtacaaactatatgcttcttaattcaatatattcggtaagcctattaataaaaagtggttcatgcc

SEQ ID NO: 31631 - DNA, 569 bp, Macaca Mulatta
  misc_feature (1)...(569): n = A,T,C or G
tgtcaatagtgtgaaaggctgtggaaactgttcgtgctaagtcacataagacattttctttttttgttgttttggactacatatttgcactgaagcagaattgttttattaaaaaaatcatacattcccattttctataatccttcttttagataagatttatttaaaaggggatttgagttttacatctttcacaatctatttaatgcagcatctgtaattatccccaaattattttcttgtcactgtcctggttgtgctcaatgcataatttttgctacctgtttgatattaccacattaccctcttgaagcctgacattcatttgatatctatagccagatgaatcagattggtttcccaatttttgtagtttttaaaacctcctttatgctgacnatttnagaggnaaaagtgtctgtttcttanatgaaaataaagaagatagtgtaagtttattgtttctctccctccctccctcnannttgaatgatgtgaaaatgaatttataacttttaaaatttagatgtatcagaaatagacatgcatttatagttggatgtcntacn

SEQ ID NO: 31632 - DNA, 2290 bp, Macaca Mulatta
  misc_feature (1)...(2290): n = A,T,C or G
acaggtaattcaacaggcgttgcatcggcctcccagctcagctgctcagtaccttcagcaaatgtatgcagcccaacagcagcacttaatgctgcatactgcagctcttcagcagcagcatttaagcagctcccagcttcagagccttgctgccgttcagnnnnnnnnnnnnnnnnnnnnnnnnnnnnnnnnnnnnnnnnnnnnnnnnnnnnnnnnnnnnnnnnnnnnnnnnnnnnnnnnnnnnnnnnnnnnnnnnnnnnnnnnnnnnnnnnnnnnnnnnnnnnnnnnnnnnnnnnnnnnnnnnnnnnnnnnnnnnnnnnnnnnnnnnnnnnnnnnnnnnnnnnnnnnnnnnnnnnnnnnnnnnnnnnnnnnnnnnnnnnnnnnnnnnnnnnnnnctgattttcacacccgctaccactgtggctgctgtacagtctgacattcctgttgtctcgtcgtcatcgtcatcttcctgtcagtctgcagctactcaggtnnnnnnnnnnnnnnnnnnnnnnnnnnnnnnnnnnnnnnnnnnnnnnnnnnnnnnnnnnnnnnnnnnnnnnnnnnnnnnnnnnnnnnnnnnnnnnnnnnnnnnnnnnnnnnnnnnnnnnnnnnnnnnnnnnnnnnnnnnnnnnnnnnnnnnnnnnnnnnnnnnnnnnnnnnnnnnnnnnnnnnnnnnnnnnnnnnnnnnnnnnnnnnnnnnnnnnnnnnnnnnnnnnnnnnnnnnnnnnnnnnagcttcatattctccaattcagcctcattctctaataaaacatcagcagattcctcttcatnnnnnnnnnnnnnnnnnnnnnnnnnnnnnnnnnnnnnnnnnnnnnnnnnnnnnnnnnnnnnnnnnnnnnnnnnnnnnnnnnnnnnnnnnnnnnnnnnnnnnnnnnnnnnnnnnnnnnnnnnnnnnnnnnnnnnnnnnnnnnnnnnnnnnnnnnnnnnnnnnnnnnnnnnnnnnnnnnnnnnnnnnnnnnnnnnnnnnnnnnnnnnnnnnnnnnnnnnnnnnnnnnnnnnnnnnnnnnnnnnnnnnnnnnnnnnnnnnnnnnnnnnnnnnnnnnnnnnnnnnnnnnnnnnnnnnnnnnnnnnnnnnnnnnnnnnnnnnnnnnnnnnnnnnnnnnnnnnnnnnnnnnnnnnnnnnnnnnnnnnnnnnnnnnnnnnnnnnnnnnnnnnnnnnnnnnnnnnnnnnnnnnnnnnnnnnnnnnnnnnnnnnnnnnnnnnnnnnnnnnnnnnnnnnnnnnnnnnnnnnnnnnnnnnnnnnnnnnnnnnnnnnnnnnnnnnnnnnnnnnnnnnnnnnnnnnnnnnnnnnnnnnnnnnnnngcagtcctctccaattccaattgcaagtcctccacagatgtcgacatctcctccagctcagattccaccactgcccttgcagtctatgcagtctttacaagtgcagcctgaaattctgtcccagggccaggttttggtgcagaatgctttggtgtcagaagaggagcttccagctgcagaagctttggtccagttgccatttcagactcttcctcctccacagacggttgcggtaaacctacaannnnnnnnnnnnnnnnnnnnnnnnnnnnnnnnnnnnnnnnnnnnnnnnnnnnnnnnnnnnnnnnnnnnnnnnnnnnnnnnnnnnnnnnnnnnnnnnnnnnnnnnnnnnnnnnnnnnnnnnnnnnnnnnnnnnnnnnnnnnnnnnnnnnnnnnnnnnnnnnnnnnnnnnnnnnnnnnnnnnnnnnnnnnnnnnnnnnnnnnnnnnnnnnnnnnnnnnnnnnnnnnnnnnnnnnnnnnnnnnnnnnnnnnnnnnnnnnnnnnnnnnnnnnnnnnnnnnnnnnnnnnnnnnnnnnnnnnnnnnnnnnnnnnnnnnnnnnnnnnnnnnnnnnnnnnnnnnnnnnnnnnnnnnnnnnnnnnnnnnnnnnnnnnnnnnnnnnnnnnnnnnnnnnnnnnnnnnnnnnnnnnnnnnnnnnnnnnnnnnnnnnnnnnnnnnnnnnnnnnnnnnnnnnnnnnnnnnnnnnnnnnnnnnnnnnnnnnnnnnnnnnnnnnnnnnnnnnnnnnnnnnnnnnnnnnnnnnnnnnnnnnnnnnnnnnnnnnnnnnnnnnnnnnnnnnnnnnnnnnnnnnnnnnnnnnnnnnnnnnnnnnnnnnnnnnnnnnagagacattagaagaaatggacagtgagttgctcaagtgtgaattctgtgggaaaatgggatatgctaatgaatttttgcggtcaaaacgattctgcactatgtcatgtgccaaaaggt

SEQ ID NO: 31633 - DNA, 1623 bp, Macaca Mulatta
  misc_feature (1)...(1623): n = A,T,C or G
gaagccctggagcagctctacccctgggagtgcttcgtcttctgcctgaccatcttcggcactttcaccaaccagatccacaagtggtcacacacgtactttgggctgccacgctgggtcactctcctgcaggactggcatgtcatcctgccacgtaaacaccatcgcatccaccacgtctcaccccacgagacctacttctgcatcaccacagnnnnnnnnnnnnnnnnnnnnnnnnnnnnnnnnnnnnnnnnnnnnnnnnnnnnnnnnnnnnnnnnnnnnnnnnnnnnnnnnnnnnnnnnnnnnnnnnnnnnnnnnnnnnnnnnnnnnnnnnnnnnnnnnnnnnnnnnnnnnnnnnnnnnnnnnnnnnnnnnnnnnnnnnnnnnnnnnnnnnnnnnnnnnnnnnnnnnnnnnnnnnnnnnnnnnnnnnnnnnnnnnnnnnnnnnnnnnnnnnnnnnnnnnnnnnnnnnnnnnnnnnnnnnnnnnnnnnnnnnnnnnnnnnnnnnnnnnnnnnnnnnnnnnnnnnnnnnnnnnnnnnnnnnnnnnnnnnnnnnnnnnnnnnnnnnnnnnnnnnnnnnnnnnnnnnnnnnnnnnnnnnnnnnnnnnnnnnnnnnnnnnnnnnnnnnnnnnnnnnnnnnnnnnnnnnnnnnnnnnnnnnnnnnnnnnnnnnnnnnnnnnnnnnnnnnnnnnnnnnnnnnnnnnnnnnnnnnnnnnnnnnnnnnnnnnnnnnnnnnnnnnnnnnnnnnnnnnnnnnnnnnnnnnnnnnnnnnnnnnnnnnnnnnnnnnnnnnnnnnnnnnnnnnnnnnnnnnnnnnnnnnnnnnnnnnnnnnnnnnnnnnnnnnnnnnnnnnnnnnnnnnnnnnnnnnnnnnnnnnnnnnnnnnnnnnnnnnnnnnnnnnnnnnnnnnnnnnnnnnnnnnnnnnnnnnnnnnnnnnnnnnnnnnnnnnnnnnnnnnnnnnnnnnnnnnnnnnnnnnnnnnnnnnnnnnnnnnnnnnnnnnnnnnnnnnnnnnnnnnnnnnnnnnnnnnnnnnnnnnnnnnnnnnnnnnnnnnnnnnnnnnnnnnnnnnnnnnnnnnnnnnnnnnnnnnnnnnnnnnnnnnnnnnngcttgtttaatgtaaataatagaaagccttaatatcttttctgtaacacggagtaatattttaatgtcatgttttggatgtacataatatatttataacaaagcagcaagagtctacttaaccttggctgcctcgtggtgtttcctggctggtggggtgggggggttatcaaggagcctgagacgtgaggcccgactcactccattcccagctcccccaacccgggccttaggataagagctgtcacctaagacagtgaattaatgtcgacatctgcttcaaagccttttggaggggattgggtgaggacagtggtctttcttattgatcatgatgataaagtaacgatggctgatccctgtttgtgacttccgtctgcagatattcactggcacctggtgtgtgccaggctctctcctgtacacaggtacagcggggaaagaaccaacaaagacctgtcctggtggggctgatctcctggggaaagagtcaataaacaaataaatgcacatggaaattc

SEQ ID NO: 31634 - DNA, 685 bp, Macaca Mulatta
  misc_feature (1)...(685): n = A,T,C or G
tgaggatccagagcctcctcctcctgggggccctcctggctgtggggagtcagctgcctgctgtctttggcaggaagaagggagnagagaaatggggaggctgtccagcagatgatgggccgtgcctcctatcggtgcctgaccagtgcgtggaagacagccagtgtcccttgaccaggaagtgctgctacagagcttgcttccgccagtgcatccccagggtctctgngtgaagccgggcagctgcccacaggaccaactgcgctgcctcagccccatgaaccacctgtgtcacaaggactcagactgctcgggcaaaaagcgatgctgccacagcgcctgtggccgggattgccgagatcctgccagaggtgtggctcctgggtgcccggggcaggnnncaggctaattctgatttaggatccgtggctctgcacctaagctggggaccaacggaaagagttcacgatgggaggcctggggccctgcccgccggacagcactatctctactagcggtggttccagccttctgataaacactggcctgctgtcacttccctgcaacgcatctgcccctggattctccccctgggagtcaaagtccatagcctgacctcggaggaaggcctctgtatcacgccagcaccctgcaccactgccacatgagcttcccacccttccta

SEQ ID NO: 31635 - DNA, 677 bp, Macaca Mulatta
  misc_feature (1)...(677): n = A,T,C or G
ggaaaatggtcatgtgctgggtatggagaaactctcccccttcctgccaggaatcctacagtagtaaaaagctgtgcacactggccatccatgccatggatatcccaccacccactggacccacctgggccctgggcgccaccttcatccgaaagttctacacggagtttgatcggcgtaacaaccgcattggcttcgccttggcccactaaggccccctgccgcccaggcaggcccagccttcagccctggcccagagcgggaacactctctgagatgcccctctgcctgggcttatgccctcacatggagacactggatgtggagctcctgctggatgcgtgccctgacccctgcacctgcccttccctgctttgaggccaaacagaataaagacttcatgttcacagcctgtcgcatccgggttcactagggtttagaacagagggaggggctgcatgatcatgtgtggacaggaatgtgacacagacaagctacacattcgcctcacacacaggttcttgcatgcagggatggtgccatccatcagccatcaacaggactcaggtagagctatttacacaaccntcgggtgggaagtctgaagagagccggaaccaagctccctctagtccctcagggaccaaggccaatgctgtggcagtagactgcgggtc

SEQ ID NO: 31636 - DNA, 1128 bp, Macaca Mulatta
  misc_feature (1)...(1128): n = A,T,C or G
ttacagaggcagtttagcacagtgaatgtccctgcccccacactccatatggtcctgttgtcctgaaaatacactccaggtagcacagacttgttattttgcctggctggttacacacatgctgtcttgctttgctgctcagccgcctccctctgaggccaacttaggccaacctacctgggactccatctgaagtcagacgccagagaaactgagtggtgaccacgggtctgcttttctctctgatcctaggggacttgttgacatgggagtatctgttcccacatggaaggatgtgtgtttctctctcatctctgaatagatgtaatgtatgacaagtctagtgtccatggtttaaaatgttgctttgaggattctccatcctgtataagaagaatgactttcttcagattataatcgttattaaagttgtatgtaccctttacttaaaaactattaacagtttttcatgttgcactggtaattttgaacttggaattgctgggtgagaattccaggaaccacagagtattgatttttgctgccaaaatgctattgaggcagatgttcctgtgctcccttggctgcttctggctgaaggggagaggtgtggactgaagcttgggtactcatgtgtgtcccctcccctcattaggcagccatagatgagcctggaacttgactgtcactagtgacttcatcctggtgtaaaatgcatactcgggataaggtcactcaggtattttatttcttggccacaactcccatagatgccaatgttttgatagcctcggtttctcaacgatgtcctttgtttacagtgctacacttcatacaagtcaagaagtacttgagttagaagaaacttcttattcaggtttgagtaagcattttacttccatgtgtacttttaaataatccataccttgaagaagttggccagtgacattatatancatgctgatctggttgttcttttcattccttgagtcagcttcagggtcttggatattaaagaggagagggagaactgttaatatttcgggtcatcatttgtgaacaaggccagactttgcccattttaggttatccaggactcaaggtagccatctgggatccatagaaagc

SEQ ID NO: 31637 - DNA, 1031 bp, Macaca Mulatta
ggcccccgcctccaggctacggagcgccgttgccccccgccccgctgcaggtgtctgaatctccctggttccatgccccatctctgaggagcagctgtgaatatgtgagtctctaccaccagcctgccgccaagatggaggacagtaattcagatgactacatcaatgttcctgcctgacaactccccagctgtcccccgaccccaggctcagactgtggtgccaaggagtctcatctgtctgctgatatccaatacctgcttcatgtgttcttagagccctcatcacttcccatgccccatcttgactcccatccccgtctatctgtgccctgagcatggctctgccctcaggtcctcttgcacaccttggcagcctcctgtagttgacaggtaagctgtaggcatgcagagcaattgtcccaatgccacttgcttcttttccaatctaacaggctgtgggatttgcagagcatttcttccatgtctttgaccacagggttgttgctgcccagactctagaccacatggcatcaggctggggcagaggcatagctattgtcttgggcatccttcccatgcttgggtcttacacaagtagaaggctgttgctctgaattatgtggacatgcctcagccccaaggactaggcaggggtctagtataaaaacactcccggaaacgcctttgccctgatccaaaagttagcacttctagtgaacctctacttatctcaagttctatgctaaaggcaatttatcttgatgtgatgaggtattctaaatttcagaaccaagcttgttagcgagatatgcatatatatccataaactctctttactttgtctccatcacttgatgcacgtaagtgccctgacctcagcatctctcctcaaaaaaaaaagtatttgtcatctctttatctttcttccatagcctgacactgatgtttgtgcacttaccttaacttttatctattttagtcatccaaaactattacatttcttggctttcacaaatgttgcccatttct

SEQ ID NO: 31638 - DNA, 510 bp, Macaca Mulatta
  misc_feature (1)...(510): n = A,T,C or G
ggaagtcagtgtgctccgttgtcaacttggggatcgactaaatgtggaggtggacgctgctcccccagtggatctcaacaagatcctgtaggatatgagatgccagtacgaggcactggtggagaataaccgcagagatgtggaggcctggttcaacacccagnnnnnnnnnnnnnnnnnnnnnnnnnnnnnnnnnnnnnnnnnnnnnnnnnnnnnnnnnnnnnnnnnnnnnnnnnnnnnnnnnnnnnnnnnnnnnnnnnnnnnnnnnnnnnnnnnnnnnnnnnnnnnnnnnnnnnnnnnnnnnnnnnnnnnnnnnnnnnnnnnnnnnnnnnnnnnnnnnnnnnnnncccagatgcagtgcctgatcagcaacgtggaggcccagctgtctgagatccgctgcgacctggagcggcagaaccaggagtaccaggtgctactggacgtcaaggcccggctggagggcgagatcgctacctaccgccgcctgctggagggagaggactgcaa

SEQ ID NO: 31639 - DNA, 106 bp, Macaca Mulatta
gatttggaagcaaaaagctcagtatctgcagcacaaacagaacaaagcagaagccacaactgtgaaaaggaaagcatccagctcagaaggttccatgaaagtcaaa

SEQ ID NO: 31640 - DNA, 340 bp, Macaca Mulatta
  misc_feature (1)...(340): n = A,T,C or G
gaaaataacctaaangggganataggggggantctggacnacaaggaagtgatnaannngatgccanaggagaatantntagaaantcnatganccgttggngcggaggaacacgntgantgatcagnccgcccatgaaatggggcaggagtggcaaaagaccccaatcactttccgacctgctggcctgcctgagaagtactgagcttcctcttcagtcggctctcaggagacctggctgtgaggccctcagggcagggatacaaagttagtgaggtctgtgtccacagaggctgagatatggcatacaataggcatctaataaatgcttaagaggttg

SEQ ID NO: 31641 - DNA, 114 bp, Macaca Mulatta
ggtaactgttgagaattttttacgggtattaactgggaggatcccacctagtactcctcggtcaaaacgtcttctttctgatgatagaagcaatattctaatttatatgacagg

SEQ ID NO: 31642 - DNA, 1858 bp, Macaca Mulatta
  misc_feature (1)...(1858): n = A,T,C or G
ggcactctgcaggcacaattctgcttttccaggaactgcatcactcaggactctgcaagtttccagaagtaagaaggaaaatgaccatgttcaagnnnnnnnnnnnnnnnnnnnnnnnnnnnnnnnnnnnnnnnnnnnnnnnnnnnnnnnnnnnnnnnnnnnnnnnnnnnnnnnnnnnnnnnnnnnnnnnnnnnnnnnnnnnnnnnnnnnnnnnnnnnnnnnnnnnnnnnnnnnnnnnnnnnnnnnnnnnnnnnnnnnnnnnnnnnnnnnnnnnnnnnnnnnnnnnnnnnnnnnnnnnnnnnnnnnnnnnnnaggagacaagatccaaactgagatggagactatttcagaagcaggaacagatcaagagtggtcctgccagcaaatctgggaaaaaattgcaagtgatttaaccaggtctcaagacttggtgataaatagctctcagttctccagagaaggtgatttccccagccagtctgaggcaggactatctgtaattcacacaagacagaaatcttcccagagcaatggatataaacagtccttcagtgatgtctccatctttgatttccatcaacaattacactcaggagagatgtctcatacatgtgatgagtgtggaaaaagcttctgttacatctcagcccttcgtattcatcagagagtccacctgggagagaaacgctacaagtgtgacgtgtgtggtaaggaattcagtcagagctcacgtctgcaaactcatcagagagtccacactggagagaaaccattcaaatgtgtggaatgtgggaaaggcttcagtcgtagatcagcgcttaatgttcatcataaattacacacaggagagaaaccttataattgtgaggaatgcgggaaggccttcattcacgattcccagcttcaagaacatcagannnnnnnnnnnnnnnnnnnnnnnnnnnnnnnnnnnnnnnnnnnnnnnnnnnnnnnnnnnnnnnnnnnnnnnnnnnnnnnnnnnnnnnnnnnnnnnnnnnnnnnnnnnnnnnnnnnnnnnnnnnnnnnnnnnnnnnnnnnnnnnnnnnnnnnnnnnnnnnnnnnnnnnnnnnnnnnnnnnnnnnnnnnnnnnnnnnnnnnnnnnnnnnnnnnnnnnnnnnnnnnnnnnnnnnnnnnnnnnnnnnnnnnnnnnnnnnnnnnnnnnnnnnnnnnnnnnnnnnnnnnnnnnnnnnnnnnnnnnnnnnnnnnnnnnnnnnaaatgtcagaagtgtgggaagggctacattagtaagtttaatcttgactcgcaccagagggtccacacgggagagagaccttataattgtaaggaatgtggaaagagcttcaggtgggcctcaggtattttgagacataagagactccatactggagaaaaaccattcaaatgtgaagagtgtgggaagaggtttactgagaattcaaaacttcgtttccatcaaagaattcacactggagaaaagccttacaaatgtgaggagtgtggaaagggcttcagatgggcctcaactcatctaacccatcagagactccacagtagagaannnnnnnnnnnnnnnnnnnnnnnnnnnnnnnnnnnnnnnnnnnnnnnnnnnnnnnnnnnnnnnnnnnnnnnnnnnnnnnnnnnnnnnnnnnnnnnnnnnnnnnnnnnnnnnnnnnnnnnnnnnnnnnnnnnnnnnnnnnnnnnnnnnnnnnnnnnnnnnnnnnnnnnnnnnnnnngaagtgtcaggagtgtgatatgtgctttagtcgggcctcaagtcttcagcttcatcagaacgttcatgttggagaaaaaccttagtgatgtgatggtgcgataaagtcttcactcagtcttcat

SEQ ID NO: 31643 - DNA, 3885 bp, Macaca Mulatta
  misc_feature (1)...(3885): n = A,T,C or G
gaaggcgtaacccggcggctgggcgcgggagaagtgcgaaggagccatgggcgccgggagctccaccgagcagcgcagcccggagcagccgcccgaggggagctccacgccggctgagcccgagcccagcggcggtggcccctcggccgaggcggcgccagacaccaccggggaccccgccatcgccgccgcggaccccgccaccaagnnnnnnnnnnnnnnnnnnnnnnnnnnnnnnnnnnnnnnnnnnnnnnnnnnnnnnnnnnnnnnnnnnnnnnnnnnnnnnnnnnnnnnnnnnnnnnnnnnnnnnnnnnnnnnnnnnnnnnnnnnnnnnnnnnnnnnnnnnnnnnnnnnnnnnnnnnnnnnnnnnnnnnnnnnnnnnnnnnnnnnnnnnnnnnnnnnnnnnnnnnnnnnnnnnnnnnnnnnnnnnnnnnnnnnnnnnnnnnnnnnnnnnnnnnnnnnnnnnnnnnnnnnnnnnnnnnnnnnnnnnnnnnnnnnnnnnnnnnnnnnnnnnnnnnnnnnnnacaacccactgagtcccaggctaatgatattggatttaagaaggtgtttatgtttgttggctttaaattcactgtgaaaaaggataaaacagagaagcctgacactgtccagctactcactgtgaaaaaagatgaaggggaaggagcagcaggggctggcgaccaccaggaccccaaccttggggctggagaagcagcatccaaagaaagcgaactcaaacaatctacagagaaacccgaagagaccctgaagcgcgagcaaagccacgcggaaatttctcctccagccgaatctagccaagcaatggtggaggaatgcaaagaggaaggagaagagaaacaagaaaaagaacccagcaagtctgcagaatctccaacgagtcccgtgaccagtgacacgggatcgaccttcaaaaaattcttcactcaaggttgggctggctggcgaaaaaagaccagtttcaggaagccaaaggaggatgaagtggaagcttcagagaagaaaaaggaacaagagccagaaaaagttgacacagaagaaaacgganaggcagaggccgactccgagaaactgaccgcctccgagcaagcccacccacaggagccggcggaaagtgcccacgagccccggttatcagctgagtatgagaaagtcgagctgccctcnnnnnnnnnnnnnnnnnnnnnnnnnnnnnnnnnnnnnnnnnnnnnnnnnnnnnnnnnnnnnnnnnnnnnnnnnnnnnnnnnnnnnnnnnnnnnnnnnnnnnnnnnnnnnnnnnnnnnnnnnnnnnnnnnnnnnnnnnnnnnnnnnnnnnnnnnnnnnnnnnnnnnnnnnnnnnnnnnnnnnnnnnnnnnnnnnnnnnnnnnnnnnnnnnnnnnnnnnnnnnnnnnnnnnnnnnnnnnnnnnnnnnnnnnnnnnnnnnnnnnnnnnnnnnnnnnnnnnnnnnnnnnnnnnnnnnnnnnnnnnnnnnnnnnnnnnnnnnnnnnnnnnnnnnnnnnnnnnnnnnnnnnnnnnnnnnnnnnnnnnnnnnnnnnnnnnnnnnnnnnnnnnnnnnnnnnnnnnnnnnnnnnnnnnnnnnnnnnnnnnnnnnnnnnnnnnnnnnnnnnnnnnnnnnnnnnnnnnnnnnnnnnnnaggaggaggagatgaggaatcaggggagcacactcaggttccagccgattctccggacagccacgaggagcaaaaaggcgagagctctgcctcctccccggaggagcccgaggagatcacgtgtctggagaagggcttagccgaggtgcagcaggatggggaagctgaggaaagagctacttccgatggagagaaaaannnnnnnnnnnnnnnnnnnnnnnnnnnnnnnnnnnnnnnnnnnnnnnnnnnnnnnnnnnnnnnnnnnnnttcggaaagtgataaagaagatgagctggacaaggtcaagagcgctaccttgtcttccaccgagagcgcagcctctgaaatgcaagaagaaatgaaagggagcgtggaagagccaaagccagaagaaccgaagcgcaaggtggatacctcagtatcttgggaagctttaatttgtgtgggatcatccaagaaaagagcaaggaaagggtcctcttctgatgaggaagggggaccaaaaacaatgggaggagacaaccagaaagccgatgaggccggaaaagacaaagagacgggaacagacgggatccttgctggttcccaagaacatgatccagggcagggaagttcctcccctgagcaagctggaagccctaccgaaggggaaggcgtttccacctgggagtcatttaaaaggttagtcacaccaagaaaaaaatcaaagtccaagctggaagagaagagcgaagactccatagctgggtctggtgtagaacattccactccagatgctgaacccgggaaagaagaatcttgggtctcaatcaagaagtttattcctggacgaaggaagaaaaggccagatgggaaacaagaacaagcccctgttgaagacgcagggccagcaggggccaacgaagatgactctgatgtcccggctgtggtccctctttctgannnnnnnnnnnnnnnnnnnnnnnnnnnnnnnnnnnnnnnnnnnnnnnnnnnnnnnnnnnnnnnnnnnnnnnnnnnnnnnnnnnnnnnnnnnnnnnnnnnnnnnnnnnnnnnnnnnnnnnnnnnnnnnnnnnnnnnnnnnnnnnnnnnnnnnnnnnnnnnnnnnnnnnnnnnnnnnnnnnnnnnnnnnnnnnnnnnnnnnnnnnnnnnnnnnnnnnnnnnnnnnnnnnnnnnnnnnnnnnnnnnnnnnnnnnnnnnnnnnnnnnnnnnnnnnnnnnnnnnnnnnnnnnnnnnnnnnnnnnnnnnnnnnnnnnnnnnnnnnnnnnnnnnnnnnnnnnnnnnnnnnnnnnnnnnnnnnnnnnnnnnnnnnnnnnnnnnnnnnnnnnnnnnnnnnnnnnnnnnnnnnnnnnnnnnnnnnnnnnnnnnnnnnnnnnnnnnnnnnnnnnnnnnnnnnnnnnnnnnnnnnnnnnnnnnnnnnnnnnnnnnnnnnnnnnnnnnnnnnnnnnnnnnnnnnnnnnnnnnnnnnnnnnnnnnnnnnnnnnnnnnnnnnnnnnnnnnnnnnnnnnnnnnnnnnnnnnnnnnnnnnnnnnnnnnnnnnnnnnnnnnnnnnnnnnnnnnnnnnnnnnnnnnnnnnnnnnnnnnnnnnnnnnnnnnnnnnnnnnnnnnnnnnnnnnnnnnnnnnnnnnnnnnnnnnnnnnnnnnnnnnnnnnnnnnnnnnnnnnnnnnnnnnnnnnnnnnnnnnnnnnnnnnnnnnnnnnnnnnnnnnnnnnnnnnnnnnnnnnnnnnnnnnnnnnnnnnnnnnnnnnnnnnnnnnnnnnnnnnnnnnnnnnnnnnnnnnnnnnnnnnnnnnnnnnnnnnnnnnnnnnnnnnnnngaaaccttatctggggtaaaatcacaggagatggtgatggaacaggctattcctcctgactcggcggaaacccttacagacagtgagaccgatggaagcacctccgtagcagactttgacacgccaggcacaacccagaaagacaagactgtggagatccatgaggagaaagaggtcgcatctggtacccagtcagggggcacagaagcagaggcagttcctgcacagaaagagaggcctccagcaccttccagttttgtgttccaggaagaaactaaagaacaatcaaagatggaagacactctagagcatacagataaaggggtgtcggtggaaactgtacccattctgtcgaaaactgaggagactcaagaggctggccagtttgatgatgagaaaaccgaagacgtaccatt

SEQ ID NO: 31644 - DNA, 380 bp, Macaca Mulatta
  misc_feature (1)...(380): n = A,T,C or G
atctcatctcccagacgccacgtctcttggtttcttcttagatcactcctctgccgaagatcccaacaagacaacatggctcccaagaagcctgagcctaagaaggaggtggccaagccagctccagctccagcccctgcaccagcccctgccccagnnnnnnnnnnnnnnnnnnnnnnnnnnnnnnnnnnnnnnnnnnnnnnnnnnnnnnnnnnnnnnnnnnnnnnnnagagttcaaagaggccttttcattgtttgatcggaccccaactggagagatgaagatcacctacggccagtgtggggatgtactgcgggccctgggtcagaaccctaccaacgccgaggtgctgcgcgtgctgggcaagcccaagcctgaa

SEQ ID NO: 31645 - DNA, 917 bp, Macaca Mulatta
atcaaaaacattaactctaaattggctggaattaatactgttttaatttctccagaaaggttttttgtagcataaccagaagtaaagttcccttctttcacagtacctaactttcatccttgtagggtcatcaagccacctgagatagcaaacttggccttgctgggctttggagatatctttgccctgctgtttgacaaccgctacctgtacatcatggacttgcggacagagagcctgattagtcgctggcctctgccagagtacatgaagtcaaagaggaggctcaagcttcctggcaggcgaagcatcctggctgaatggattggatgggcacaatgacacgggcttggtctttgccaccagcatgcctgaccacagtattcacctggtgttgtggaaggagcacggctgacaccatgagccaccaccgctgactgactttgggtgccggggctgcgggttttgggtgcaacctctgtggcagccaactgcatgaaccaaagttctcacctaatggtatcatcacgcagtgcacaatcatttatctatgtttgccaggggccagggctcggggtgggggagggcttgttttattgacatacaacgcagcatgctaatggggtacaccattgacttcatttgtacttagttaagttggtcagtgtaagatgatgcattttgggttcatctttcttgagtggagtattggttttaagtaaagaaagttaaatgatccattaatctgctaattggttgcctatgaaatcacattgtgtgttattaaagctttttaccatagcctttttttcttttgaagttgaagcaaaggtgctatgatgttgttacagcaacttttcttacacagggtttagcttttataagagccactgttaaaacttccaccaaataccagt

SEQ ID NO: 31646 - DNA, 164 bp, Macaca Mulatta
tcagctgagtctgcacgtgacatagaccttgacaggtggagttcaattcatttgacattcatacagtcattcatcaacttattctattcataatgactgtctacagaggcctcaaactgagttacaaacataaggtcataatctactaggggaagtacataaac

SEQ ID NO: 31647 - DNA, 110 bp, Macaca Mulatta
tacaaatgcaggaatgggatctaatctaaatctgttaggtgaaattgagtgtgatgccagcataatggatggaaaatccttaaattttggagcagttggagcactgagtg

SEQ ID NO: 31648 - DNA, 162 bp, Macaca Mulatta
aggttcagcttgttggtttagatgaggagagttcagagtttatttgcagaaacacctttgaccacccgtaccccaccacaaagctcatgtggatccctgatacaaaaggcgtctatccagacctactggcaacaagcggcgactatctccgtgtgtggaggg

SEQ ID NO: 31649 - DNA, 97 bp, Macaca Mulatta
aggagtcattacgggccaatagtcggctgctggaacaacttcaagagatagggcaggagaaggagcagttgacccaggaactacaggaagctcggaa

SEQ ID NO: 31650 - DNA, 478 bp, Macaca Mulatta
aatctgggtctgtctgattgcccaggcccacagggctgcccctacatctaggtctgggtgtgtgcagtgggggtgctccctgggggctgacacaggtcatctccagggagacagaatcttgtctctgtagggccctggattcaagataacaatccccggaccacatgcatttagaggcagtcctgatgggacacctttctggcatctagcccttgagggccatgtgccgctgctggtcagggcaccctggctcacacagcgggcttcacactgactgtggaagcagccccgcacttgtctccctcacccagttcctgagctcacgttgaccctaacctgaaattggtctgagtcctggccctacccccacccacaacttagccttatcttgtccaatacaactgggccctggccacacgggtgaccccagccctgaccagagctcacctggtgtctggctgcacatggacctcacttg

SEQ ID NO: 31651 - DNA, 393 bp, Macaca Mulatta
caggatttgcaattatacatagctagctaaaaagttgggtctctgagatttcaacttgtagatttaaaagcaagtgccgtatgttaagagaagagcagatcatgctattgtgacatttgcagagatatacacacttttcgtatagaagaggcttgtgctgtggtgggttcgatgtatccctgcccatcccacccccacaactccccttttgctactcccccaaggctcttgcagagctggagctctgaggaggaaggaaagcaacagctctgcccagagtcacccctgatgcctgtgagcaggggccacatctcttccctggggcagcagcaggaggactggggaggagcaaaatcaggcagtcggcctggagtctgtgcctggtcctttgcg

SEQ ID NO: 31652 - DNA, 424 bp, Macaca Mulatta
  misc_feature (1)...(424): n = A,T,C or G
gggaggtgtggcctgaaggagatgtgtttggctctcaagacatttctccagaggaagagatccagttgctgaaacaaatcctgtctgctccacttccccnnnnnnnnnnnnnnnnnnnnnnnnnnnnnnnnnnnnnnnnnnnnnnnnnnnnnnnnnnnnnnnnnnnnnnnnnnnnnnnnnnnnnnnnnnnnnnnnnnnnnnnnnnnnnnnnnnnnnnnnnngctttgcatgttcaactgtcgttcgagcctatgtgctgctgctgcggagctaccagcagaatagtgctcacactaaccattgcattgtgaagatgctgcaccggctggcccatgacctcaaaatggaagccctactttttcagctgtcagtcttctgcctcttcaatcgtctgcttagtgaccctgctgctggagcctacaaa

SEQ ID NO: 31653 - DNA, 400 bp, Macaca Mulatta
tgctgtttactaagctaaaagttattcattgttccacacatgctgctgtgaagttcacattcaaaatgaatgctgagactttgaggacagaaaggcaacttattttcccatctttctatggatggggattggcaggttgaatgggaagtgcagaaggagagacagtagttaaatgaaattctggatgctagcatgtaaagctaatcatctttttgttatgacctgggagttgggcccattttatgaccaaggagatggagagttggaatggtggtactaagaggcagaggaagttgggtctgagtaccattggtgatgggtccaggagaactagactatggttcttgaatatctgtccacaaagaatatactaacttgtgtccacttctcagaactccca

SEQ ID NO: 31654 - DNA, 232 bp, Macaca Mulatta
aggagacgcatcaaggatgtttaggagaacaaaaagctatgacagcctgctgactaccttaattggcgctggaatccgaattcttttcagttcctgccaagaagaaactgcagatttgctaaaggaactgtctttagtggaacaaagaaagaatgttggtattcatgttccaacagtggtgaatagtagtaaaagtgaggcactacagttttatttaagtattcctaatata

SEQ ID NO: 31655 - DNA, 1535 bp, Macaca Mulatta
  misc_feature (1)...(1535): n = A,T,C or G
cagataataattgctgtaagccaactgatagctgatgtagcactaagcggaggatcaagatttcaggagtctttattcattatcaataattttgcaaatagtgacagacctatgaaggnnnnnnnnnnnnnnnnnnnnnnnnnnnnnnnnnnnnnnnnnnnnnnnnnnnnnnnnnnnnnnnnnnnnnnnnnnnnnnnnnnnnnnnnnnnnnnnnnnnnnnnnnnnnnnnnnnnnnnnnnnnnnnnnnnnnnnnnnnnnnnnnnnnnnnnnnnnnnnnnnnnnnnnnnnnnnnnnnnnnnnnnnnnnnnnnnnnnnnnnnnnnnnnnnnnnnnnnnnnnnnnnnnnnnnnnnnnnnnnnnnnnnnnnnnnnnnnnnnnnnnnnnnnnnnnnnnnnnnnnnnnnnnnnnnnnnnnnnnnnnnnnnnnnnnnnnnnnnnnnnnnnnnnnnnnnnnnnnnnnnnnnnnnnnnnnnnnnnnnnnnnnnnnnnnnnnnnnnnnnnnnnnnnnnnnnnnnnnnnnnnnnnnnnnnnnnnnnnnnnnnnnnnnnnnnnnnnnnnnnnnnnnnnnnnnnnnnnnnnnnnnnnnnnnnnnnnnnnnnnnnnnnnnnnnnnnnnnnnnnnnnnnnnnnnnnnnnnnnnnnnnnnnnnnnnnnnnnnnnnnnnnnnnnnnnnnnnnnnnnnnnnnnnnnnnnnnnnnnnnnnnnnnnnnnnnnnnnnnnnnnnnnnnnnnnnnnnnnnnnnnnnnnnnnnnnnnnnnnnnnnnnnnnnnnnnnnnnnnnnnnnnnnnnnnnnnnnnnnnnnnnnnnnnnnnnnnnnnnnnnnnnnnnnnnnnnnnnnnnnnnnnnnnnnnnnnnnnnnnnnnnnnnnnnnnnnnnnnnnnnnnnnnnnnnnnnnnnnnnnnnnnnnnnnnnnnnnnnnnnnnnnnnnnnnnnnnnnnnnnnnnnnnnnnnnnnnnnnnnnnnnnnnnnnnnnnnnnnnnnnnnnnnnnnnnnnnnnnnnnnnnnnnnnnnnnnnnnnnnnnnnnnnnnnnnnnnnnnnnnnnnnnnnnnnnnnnnnnnnnnnnnnnnnnnnnnnnnnnnnnnnnnnnnnnnnnnnnnnnnnnnnnnnnnnnnnnnnnnnnnnnnnnnnnnnnnnnnnnnnnnnnnnnnnnnnnnnnnnnnnnnnnnnnnnnnnnnnnnnnnnnnnnnnnnnnnnnnnnnnnnnnnnnnnnnnnnnnnnnnnnnnnnnnnnnnnnnnnnnnnnnnnnnnnnnnnnnnnnnnnnnnnnnnnnnnnnnnnnnnnnnnnnnnnnnnnnnnnnnnnnnnnnnnnnnnnnnnnnnnnnnnnnnnnnnnnnnnnnnnnnnnnnnnnnnnnnnnnnnnnnnnnnnnnnnnnnnnnnnnnnnntaggaaatttatacaagcatgcagcattgcacttgaactaaatgagcggctaattaaagaagatcaagttgagtaccatgaagggctaaagtcaaatttcagagacatggtaaaagaattatctgacattatccatgagcaggcaagtattag

SEQ ID NO: 31656 - DNA, 813 bp, Macaca Mulatta
  misc_feature (1)...(813): n = A,T,C or G
aaggttggtttgacccctggtgtctgctccacgggcttctgctcccgctcatggccgtgggagtctttttctgccacggagaggtgacacgtnnnnnnnnnnnnnnnnnnnnnnnnnnnnnnnnnnnnnnnnnnnnnnnnnnnnnnnnnnnnnnnnnnnnnnnnnnnnnnnnnnnnnnnnnnnnnnnnnnnnnnnnnnnnnnnnnnnnnnnnnnnnnnnnnnnnnnnnnnnnnnnnnnnnnnnnnnnnnnnnnnnnnnnnnnnnnnnnnnnnnnnnnnnnnnnnnnnnnnnnnnnnnnnnnnnnnnnnnnnnnnnnnnnnnnnnnnnnnnnnnnnnnnnnnnnnnnnnnnnnnnnnnnnnnnnnnnnnnnnnnnnnnnnnnnnnnnnnnnnnnnnnnnnnnnnnnnnnnnnnnnnnnnnnnnnnnnnnnnnnnnnnnnnnnnnnnnnnnnnnnnnnnnnnnnnnnnnnnnnnnnnnnnnnnnnnnnnnnnnnnnnnnnnnnnnnnnnnnnnnnnnnnnnnnnnnnnnnnnnnnnnnnnnnnnnnnnnnnnnnnnnnnnnnnnnnnnnnnnnnnnnnnnnnnnnnnttacgactacaacacttttgaccagaatggtgtggtgggcccccacccactagttgtcaacatgttctttgctactggcttcagtggtcacgggctccagcaggcccctggcgttgggcgagctgtggcagagatgatactggagggcagcttccagaccatcgacctgagccccttcctcttcaaccgcttttacttgggagagaagacccttgagaacaacatcat

SEQ ID NO: 31657 - DNA, 832 bp, Macaca Mulatta
  misc_feature (1)...(832): n = A,T,C or G
gggctcttccttttcccgtcctcgcggacgccgtgccgggccggtattagtctccagccctggttgtggaaagcgacagaagtcatggcgatgtttgaacagatgagagctaacgtgggcaagttgctcaagggtatcgacaggtacaatcctgagaacctggccaccctggagcgctatgtggagacgcaggccaaggaaaatgcctatgatctggaagccaacctggctgtcctgaagctgtaccagttcaacccagccttctttcagaccacggtcaccgcccagatcctgctgaaggccctcaccaacctgccgcacacagatttcaccctatgcaagtgcatgatcgaccaggcacatcaagaagaaaggccaatccgacagattttgtaccttggggacctgctggagacctgccacttccaggccttctgggcagcccctggatgaaaaacatgggacctcttgggaaaggtataactgggctttgaagactcctgtccgaaagttttatctgcccatgttggtggggtatcactttaccaggcacatccaaccgctgggctgctggtgcaaaaagcttcgggggatctggtcgggaacgcccaggcttaaagtggtgggaatgaaccaaatacgggctgggaatggctgaacaaattcgggggccaaaacctttcttccggtgtaacccaaaaaaggaaaggccttttaannnnnnnnnnnnnnnnnnnnnnnnnnnnnnnnttggacttttgaacagtggtggtctccaggcattctggggccctccttccccaggtaaacgggaaggggggtgttaaaataa

SEQ ID NO: 31658 - DNA, 5449 bp, Macaca Mulatta
  misc_feature (1)...(5449): n = A,T,C or G
ctgcttccctgacatctctgctccagccagctcggcctcctactctcacgggcagcctgcgatgcccggctccagcggggttcaccacctgagcccccctgggggtggaccctccccgggacgccatggtcccctcccacccccgagctacggccccccgctgaactgcaacaacaacaacggcatgggcgctgcccccaagcccttcccggggggcgccgggccccccatcaaggccgagcccaaggctccctatgccccagnnnnnnnnnnnnnnnnnnnnnnnnnnnnnnnnnnnnnnnnnnnnnnnnnnnnnnnnnnnnnnnnnnnnnnnnnnnnnnnnnnnnnnnnnnnnnnnnnnnnnnnnnnnnnnnnnnnnnnnnnnnnnnnnnnnnnnnnnnnnnnnnnnnnnnnnnnnnnnnnnnnnnnnnnnnnnnnnnnnnnnnnnnnnnnnnnnnnnnnnnnnnnnnnnnnnnnnnnnnnnnnnnnnnnnnnnnnnnnnnnnnnnnnnnnnnnnnnnnnnnnnnnnnnnnnnnnnnnnnnnnnnnnnnnnnnnnnnnnnnnnnnnnnnnnnnnnnnnnnnnnnnnnnnnnnnnnnnnnnnnnnnnnnnnnnnnnnnnnnnnnnnnnnnnnnnnnnnnnnnnnnnnnnnnnnnnnnnnnnnnnnnnnnnnnnnnnnnnnnnnnnnnnnnnnnnnnnnnnnnnnnnnnnnnnnnnnnnnnnnnnnnnnnnnnnnnnnnnnnnnnnnnnnnnnnnnnnnnnnnnnnnnnnnnnnnnnnnnnnnnnnnnnnnnnnnnnnnnnnnnnnnnnnnnnnnnnnnnnnnnnnnnnnnnnnnnnnnnnnnnnnnnnnnnnnnnnnnnnnnnnnnnnnnnnnnnnnnnnnnnnnnnnnnnnnnnnnnnnnnnnnnnnnnnnnnnnnnnnnnnnnnnnnnnnnnnnnnnnnnnnnnnnnnnnnnnnnnnnnnnnnnnnnnnnnnnnnnngcccatgctcacctaccgtgtggacgcggacaagggcttcaacttttcggtgggcgatgatgcctttgtgtgccagaagaagaaccacttccaggtgacggtgtacatcggcatgctgggcgagcccaagttcgtcaagacgcctgagggcctcaagcccctcgtctgcttctatctgaagctgcatggagtgaaggcannnnnnnnnnnnnnnnnnnnnnnnnnnnnnnnnnnnnnnnnnnnnnnnnnnnnnnnnnnnnnnnnnnnnnnnnnnnnnnnnnnnnnnnnnnnnnnnnnnnnnnnnnnnnnnnnnnnnnnnnnnnnnnnnnnnnnnnnnnnnnnnnnnnnnnnnnnnnnnnnnnnnnnnnnnnnnnnnnnnnnnnnnnnnnnnnnnnnnnnnnnnnnnnnnnnnnnnnnnnnnnnnnnnnnnnnnnnnnnnnnnnnnnnnnnnnnnnnnnnnnnnnnnnnnnnnnnnnnnnnnnnnnnnnnnnnnnnnnnnnnnnnnnnnnnnnnnnnnnnnnnnnnnnnnnnnnnnnnnnnnnnnnnnnnnnnnnnnnnnnnnnnnnnnnnnnnnnnnnnnnnnnnnnnnnnnnnnnnnnnnnnnnnnnnnnnnnnnnnnnnnnnnnnnnnnnnnnnnnnnnnnnnnnnnnnnnnnnnnnnnnnnnnnnnnnnnnnnnnnnnnnnnnnnnnnnnnnnnnnnnnnnnnnnnnnnnnnnnnnnnnnnnnnnnnnnnnnnnnnnnnnnnnnnnnnnnnnnnnnnnnnnnnnnnnnnnnnnnnnnnnnnnnnnnnnnnnnnnnnnnnnnnnnnnnnnnnnnnnnnnnnnnnnnnnnnnnnnnnnnnnnnnnnnnnnnnnnnnnnnnnnnnnnnnnnnnnnnnnnnnnnnnnnnnnnnnnnnnnnnnnnnnnnnnnnnnnnnnnnnnnnnnnnnnnnnnnnnnnnnnnnnnnnnnnnnnnnnnnnnnnnnnnnnnnnnnnnnnnnnnnnnnnnnnnnnnnnnnnnnnnnnnnnnnnnnnnnnnnnnnnnnnnnnnnnnnnnnnnnnnnnnnnnnnnnnnnnnnnnnnnnnnnnnnnnnnnnnnnnnnnnnnnnnnnnnnnnnnnnnnnnnnnnnnnnnnnnnnnnnnnnnnnnnnnnngtcatcgtccgtggttccggaccaggcctgcatcagccagcgcttcctgcagggaaccatcattgccctggtggtggtcatggccttcagncagcgtggtgtccatgtccacactgtacgtgctgagcctgcgcacagaggaggacctggtagacactganngctcttgtgccgtgtccacttcctgtctcctggccctgcacagaccccagccccctggggggagtgaggccttnnnnnnnnnnnnnnnnnnnnnnnnnnnnnnnnnnnnnnnnnnnnnnnnnnnnnnnnnnnnnnnnnnnnnnnnnnnnnnnnnnnnnnnnnnnnnnnnnnnnnnnnnnnnnnnnnnnnnnnnnnnnnnnnnnnnnnnnnnnnnnnnnnnnnnnnnnnnnnnnnnnnnnnnnnnnnnnnnnnnnnnnnnnnnnnnnnnnnnnnnnnnnnnnnnnnnnnnnnnnnnnnnnnnnnnnnnnnnnnnnnnnnnnnnnnnnnnnnnnnnnnnnnnnnnnnnnnnnnnnnnnnnnnnnnnnnnnnnnnnnnnnnnnnnnnnnnnnnnnnnnnnnnnnnnnnnnnnnnnnnnnnnnnnnnnnnnnnnnnnnnnnnnnnnnnnnnnnnnnnnnnnnnnnnnnnnnnnnnnnnnnnnnnnnnnnnnnnnnnnnnnnnnnnnnnnnnnnnnnnnnnnnnnnnnnnnnnnnnnnnnnnnnnnnnnnnnnnnnnnnnnnnnnnnnnnnnnnnnnnnnnnnnnnnnnnnnnnnnnnnnnnnnnnnnnnnnncagcctctctccttgcagagccagtgccctccctgacctccatccaggtgctggagaattcgatgcccatcacctcccagtactgtgctccaggggatgcctgcagnnnnnnnnnnnnnnnnnnnnnnnnnnnnnnnnnnnnnnnnnnnnnnnnnnnnnnnnnnnnnnnnnnnnnnnnnnnnnnnnnnnnnnnnnnnnnnnnnnnnnnnnnnnnnnnnnnnnnnnnnnnnnnnnnnnnnnnnnnnnnnnnnnnnnnnnnnnnnnnnnnnnnnnnnnnnnnnnnnnnnnnnnnnnnnnnnnnnnnnnnnnnnnnnnnnnnnnnnnnnnnnnnnnnnnnnnnnnnnnnnnnnnnnnnnnnnnnnnnnnnnnnnnnnnnnnnnnnnnnnnnnnnnnnnnnnnnnnnnnnnnnnnnnnnnnnnnnnnnnnnnnnnnnnnnnnnnnnnnnnnnnnnnnnnnnnnnnnnnnnnnnnnnnnnnnnnnnnnnnnnnnnnnnnnnnnnnnnnnnnnnnnnnnnnnnnnnnnnnnnnnnnnnnnnnnnnnnnnnnnnnnnnnnnnnnnnnnnnnnnnnnnnnnnnnnnnnnnnnnnnnnnnnnnnnnnnnnnnnnnnnnnnnnnnnnnnnnnnnnnnnnnnnnnnnnnnnnnnnnnnnnnnnnnnnnnnnnnnnnnnnnnnnnnnnnnnnnnnnnnnnnnnnnnnnnnnnnnnnnnnnnnnnnnnnnnnnnnnnnnnnnnnnnnnnnnnnnnnnnnnnnnnnnnnnnnnnnnnnnnnnnnnnnnnnnnnnnnnnnnnnnnnnnnnnnnnnnnnnnnnnnnnnnnnnnnnnnnnnnnnnnnnnnnnnnnnnnnnnnnnnnnnnnnnnnnnnnnnnnnnnnnnnnnnnnnnnnnnnnnnnnnnnnnnnnnnnnnnnnnnnnnnnnnnnnnnnnnnnnnnnnnnnnnnnnnnnnnnnnnnnnnnnnnnnnnnnnnnnnnnnnnnnnnnnnnnnnnnnnnnnnnnnnnnnnnnnnnnnnnnnnnnnnnnnnnnnnnnnnnnnnnnnnnnnnnnnnnnnnnnnnnnnnnnnnnnnnnnnnnnnnnnnnnnnnnnnnnnnnnnnnnnnnnnnnnnnnnnnnnnnnnnnnnnnnnnnnnnnnnnnnnnnnnnnnnnnnnnnnnnnnnnnnnnnnnnnnnnnnnnnnnnnnnnnnnnnnnnnnnnnnnnnnnnnnnnnnnnnnnnnnnnnnnnnnnnnnnnnnnnnnnnnnnnnnnnnnnnnnnnnnnnnnnnnnnnnnnnnnnnnnnnnnnnnnnnnnnnnnnnnnnnnnnnnnnnnnnnnnnnnnnnnnnnnnnnnnnnnnnnnnnnnnnnnnnnnnnnnnnnnnnnnnnnnnnnnnnnnnnnnnnnnnnnnnnnnnnnnnnnnnnnnnnnnnnnnnnnnnnnnnnnnnnnnnnnnnnnnnnnnnnnnnnnnnnnnnnnnnnnnnnnnnnnnnnnnnnnnnnnnnnnnnnnnnnnnnnnnnnnnnnnnnnnnnnnnnnnnnnnnnnnnnnnnnnnnnnnnnnnnnnnnnnnnnnnnnnnnnnnnnnnnnnnnnnnnnnnnnnnnnnnnnnnnnnnnnnnnnnnnnnnnnnnnnnnnnnnnnnnnnnnnnnnnnnnnnnnnnnnnnnnnnnnnnnnnnnnnnnnnnnnnnnnnnnnnnnnnnnnnnnnnnnnnnnnnnnnnnnnnnnnnnnnnnnnnnnnnnnnnnnnnnnnnnnnnnnnnnnnnnnnnnnnnnnnnnnnnnnnnnnnnnnnnnnnnnnnnnnnnnnnnnnnnnnnnnnnnnnnnnnnnnnnnnnnnnnnnnnnnnnnnnnnnnnnnnnnnnnnnnnnnnnnnnnnnntatagtggagccgagtccttgaagcctatgaactgcaggcccccttttgtcactgatctcaaagcacttgtcctcaggatagggaacagcagggggaatgcaggaatagcagggatagcttcctcccagccccctccccaatttggttccgctgacataggaattttatgattcccataccatgcaggggctgagccttctttaggatgactttgttctccctcccactaggggaatcctccctatgccttaaaactgccgagccccactccatttaataggattcctgggcttcctcaannnnnnnnnnnnnnnnngactgcggcccctcagtccttaactggaaagtgaccgtccactgctccctggagcccatctggacacagcacagtcccaaacctgttagcagctggctctgtttccatgcctggggaggggttcctcagtgcaggagttggggccaggctggggctccgagctgcttgagggggtcaaccttggaccaaagttgccttaagcctgtggtaaaagggcttcagggaaggtcagtgggccacctgctagaagctgccagctgcccggctggcaatggtgtgtcttggccccaaccctgccctggggtccagcaggtcatccctcccttctcctctctcctttggtgtttgttcctgtagccactgggctaatctccccctagcttcaagctgtacatagggcctcccagtg

SEQ ID NO: 31659 - DNA, 825 bp, Macaca Mulatta
ggggaaggggaaagtgttccaggaacctctgttttatgaggcccccagatctgtggattggagagagaaaggctacgtgactcctgtgaagaatcagggtcagtgtggttcttgttgggcttttagcgctactggtgctcttgaaggacagatgttccggaaaactgggaagcttgtctcactgagtgagcagaatctggtagactgctctgggcctcaaggcaatgagggctgcaatggtggcctaatggattatgccttccagtatgttgccgacaatggaggcctggactctgaggaatcctatccatatgaggcaacagaagaatcctgtaagtacaatcccgagtattctgttgctaatgacaccggctttgtggacatccctaagcaggagaaggccctgatgaaggcagttgcaactgtggggcccatttctgttgctattgatgcaggtcatgagtccttcatgttctataaagaaggcatttattttgagccagactgtagcagtgaagacatggatcatggtgtgctggtggttggctatggatttgaaagcacagaatcagaccacagtaaatattggctgggggaaaaacagctgggggtgaaagaaaggggggcatggggtggggctacttaaaagaatgggcccaagggaccgggaaagaaaacccatttgttggggaaatttggccttcagacaagcccaagccttaacccccaaccggttggttgaaacctcgggcgtgggcacacaatttggatttgcagggggaaaaggggaacctttggaacccttggggggaggatatgggagca

SEQ ID NO: 31660 - DNA, 1819 bp, Macaca Mulatta
  misc_feature (1)...(1819): n = A,T,C or G
atggtttggaaagtagctgtatttctcagtgtgaccctgggcattggtgctgttcccatagatgatcctgaagatggaggcaagcactgggtagtgatcgtggcgggttcaaatggctggtataattataggcaccagnnnnnnnnnnnnnnnnnnnnnnnnnnnnnnnnnnnnnnnnnnnnnnnnnnnnnnnnnnnnnnnnnnnnnnnnnnnnnnnnnnnnnnnnnnnnnnnnnnnnnnnnnnnnnnnnnnnnnnnnnnnnnnnnnnnnnnnnnnnnnnnnnnnnnnnnnnnnnnnnnnnnnnnnnnnnnnnnnnnnnnnnnnnnnnnnnnnnnnnnnnnnnnnnnnnnnnnnnnnnnnnnnnnnnnnnnnnnnnnnnnnnnnnnnnnnnnnnnnnnnnnnnnnnnnnnnnnnnnnnnnnnnnnnnnnnnnnnnnnnnnnnnnnnnnnnnnnnnnnnnnnnnnnnnnnnnnnnnnnnnnnnnnnnnnnnnnnnnnnnnnnnnnnnnnnnnnnnnnnnnnnnnnnnnnnnnnnnnnnnnnnnnnnnnnnnnnnnnnnnnnnnnnnnnnnnnnnnnnnnnnnnnnnnnnnnnnnnnnnnnnnnnnnnnntttatgcaactactgccgccaaccccagagagtcgtcctacgcctgttactatgatgagaagaggtccacatacctgggggactggtacagcgtcaactggatggaagactcggacgtggntggaagatctgactaaagagaccctgcacaagcagtacctttctggtgaaatcacacaccaacaccagccacgtcatgcagtacggaaacaaannnnnnnnnnnnnnnnnnnnnnnnnnnnnnnnnnnnnnnnnnnnnnnnnnnnnnnnnnnnnnnnnnnnnnnnnnnnnnnnnnnnnnnnnnnnnnnnnnnnnnnnnnnnnnnnnnnnnnnnnnnnnnnnnnnnnnnnnnnnnnnnnnnnnnnnnnnnnnnnnnnnnnnnnnnnnnnnnnnnnnnnnnnnnnnnnnnnnnnnnnnnnnnnnnnnnnnnnnnnnnnnnnnnnnnnnnnnnnnnnnnnnnnnnnnnnnnnnnnnnnnnnnnnnnnnnnnnnnnnnnnnnnnnnnnnnnnnnnnnnnnnnnnnnnnnnnnnnnnnnnnnnnnnnnnnnnnnnnnnnnnnnnnnnnnnnnnnnnnnnnnnnnnnnnnnnnnnnnnnnnnnnnnnnnnnnnnnnnnnnnnnnnnnnnnnnnnnnnnnnnnnnnnnnnnnnnnnnnnnnnnnnnnnnnnnnnnnnnnnnnnnnnnnnnnnnnnnnnnnnnnnnnnnnnnnnnnnnnnnnnnnnnnnnnnnnnnnnnnnnnnnnnnnnnnnnnnnnnnnnnnnnnnnnnnnnnnnnnnnnnnnnnnnnnnnnnnnnnnnnnnnnnnnnnnnnnnnnnnnnnnnnnnnnnnnnnnnnnnnnnnnnnnnnnnnnnnnnnnnnnnnnnnnnnnnnnnnnnnnnnnnnnnnnnnnnnnnnnnnnnnnnnnnnnnnnnnnnnnnnnnnnnnnnnnnnnnnnnnnnnnnnnnnnnnnnnnnnnnnnnnnnnnnnnnnnnnnnnnnnnnnaggagcaggaagttcatgggggcttctgacgtagcccctcacaaaaggagtctttattctgagaaatttgaaccaaaacctctttcaatcttcacaatgattttattgaagagggcctcaagccccaaatggaaaactgtttttagaaattattatgatttttgattgcttttgtatttaattctgcaagtgttcaagtcttaaaaaataaagatttataacagaacccaaat

SEQ ID NO: 31661 - DNA, 300 bp, Macaca Mulatta
  misc_feature (1)...(300): n = A,T,C or G
gnnnnnnnnnnnnnnnnnnnnnnnnnnnnnnnnngagtttattctgattgattttttttctcggtttctggataaaccaccctctggggacaggataataaaacatgtaatatttttaagaaggattcctacagtgtcatcttttttctctctcgtgtctgtcctccactcctaggagagccagggcagagctagtaccgtcctaagctgtcaacgtggactagctcgtgtcatctactcaagaggggctgtcactgtccttgtttctgagtgagcagcacacaggccagagtggtcacc

SEQ ID NO: 31662 - DNA, 147 bp, Macaca Mulatta
agatcaaaacagatagaatctgcctgcttcagtggaacagcagctttcatggaagtgagaattcagtctgtggttgttgagttcatcctgaatcacgttgatgtgctcttcagtggcaaaatcagcatggtcatgcaagaaggggca

SEQ ID NO: 31663 - DNA, 582 bp, Macaca Mulatta
  misc_feature (1)...(582): n = A,T,C or G
cctttgaaacttctgctggtgtgagtgccctcaagggttccccagaaatatcgataccacaccaacaggnnnnnnnnnnnnnnnnnnnnnnnnnnnnnnnnnnnnnnnnnnnnnnnnnnnnnnnnnnnnnnnnnnnggttcaatgaaagatcacccacagcagcaaccaggcatgttgtcccgtgtgactgggggtatcttcagtgttacaaagggagctgttggtgccaccattggtggtgtggcttggattggtggaaagagtctggaagtgaccaaaacagctgttacaactgtgccttccatgggaatagggctggtgaaagggggtgtatctgctgtggctggaggtgttacagctgttgggtctgctgttgtaaacaaagtgcccttaacaggaaagaagaaagacaaatctgactaaaatatggagatacacttgtgctccacagcactataatgccagtggcattgaattgctaaattatggactacaaccaagtcaactgttttggacgtttatcttctaaactgctgtgttgaaagtattgatgactggctttcatctaaaaagaggagacc

SEQ ID NO: 31664 - DNA, 953 bp, Macaca Mulatta
  misc_feature (1)...(953): n = A,T,C or G
nagcggagctcccacctccatatacagccattgccagtccagatgccagtggtattccagtaataaactgccgtgtgtgccaatcactaatcaatttggatggcaagcttcaccagcatgtggttaagtgcacagtttgtaatgaagctacnnnnnnnnnnnnnnnnnnnnnnnnnnnnnnnnnnnnnnnnnnnnnnnnnnnnnnnnnnnnnnnnnnnnnnnnnnnnnnnnnnnnnnnnnnnnnnnnnnnnnnnnnnnnnnnnnnnnnnnnnnnnnnnnnnnnnnnnnnnnnnnnnnnnnnnnnnnnnnnnnnnnnnnnnnnnnnnnnnnnnnnnnnnnnnnnnnnnnnnnnnnnnnnnnnnnnnnnnnnnnnnnnnnnnnnnnnnnnnnnnnnnnnnnnnnnnnnnnnnnnnnnnnnnnnnnnnnnnnnnnnnnnnnnnnnnnnnnnnnnnnnnnnnnnnnnnnnnnnnnnnnnnnnnnnnnnnnnnnnnnnnnnnnnnnnnnnnnnnnnnnnnnnnnnnnnnnngttggcacccaagattttgcaaggcgatttcgagcaacctatgtttcttgggcaattgcttatctcctagggttgatctgccttatccgagcttgttattggggagccataagagtcagttatccagaacacagttttgcataagcttgtttatgattcattgatgcaggtgagagtgtctagcagttcttggtaagctactctggacatctttaaattatttatcctaatggattccattctggtttatgtataatagtttcaagactttgggagtcttttatgaacaaatgctcattgcactacattatatgcaaattgttttgctgctaggttttcaacatttgaataataaagccttttcatgttcttttacatctcttatagatatttttggatttgttaccaaacattacatttactctca

SEQ ID NO: 31665 - DNA, 1721 bp, Macaca Mulatta
  misc_feature (1)...(1721): n = A,T,C or G
ttttggctgatggaatttggaagatttgtatttggnnnnnnnnnnnnnnnnnnnnnnnnnnnnnnnnnnnnnnnnnnnnnnnnnnnnnnnnnnnnnnnnnnnnnnnnnnnnnnnnnnnnnnnnnnnnnnnnnnnnnnnnnnnnnnnnnnnnnnnnnnnnnnnnnnnnnnnnnnnnnnnnnnnnnnnnnnnnnnnnnnnnnnnnnnnnnnnnnnnnnnnnnnnnnnnnnnnnnnnnnnnnnnnnnnnggggataacatgtattctttcactaatctgtgccttggctcttgcctacttggatcagagagcagagagaatccttcacaaagaacaaggaaaaacaggtnnnnnnnnnnnnnnnnnnnnnnnnnnnnnnnnnnnnnnnnnnnnnnnnnnnnnnnnnnnnnnnnnnnnnnnnnnnnnnnnnnnnnnnnnnnnnnnnnnnnnnnnnnnnnnnnnnnnnnnnnnnnnnnnnnnnnnnnnnnnnnnnnnnnnnnnnnnnnnnnnnnncagtgttgtatatgtcatatcagctcccatgtccccagtatttgggctcctggtggataaaacagggaagaacatcctctgggttctttgcgcagtagcagccactcttgtgtcccacatgatgctggcctttacgatgtggaatccttggattgctatnnnnnnnnnnnnnnnnnnnnnnnnnnnnnnnnnnnnnnnnnnnnnnnnnnnnnnnnnnnnnnnnnnnnnnnnnnnnnnnnnnnnnnnnnnnnnnnnnncatgcagtccattcagaatcttgggttggccatcatttccatcattgctggtatgatactggattctcgggggtatttgtttttagaagtgttcttcattgcctgtgtttctnnnnnnnnnnnnnnnnnnnnnnnnnnnnnnnnnnnnnnnnnnnnnnnnnnnnnnnnnnnnnnnnnnnnnnnnnnnnnnnnnnnnnnnnnnnnnnnnnnnnnnnnnnnnnnnnnnnnnnnnnnnnnnnnnnnnnnnnnnnnnnnnnnnnnnnnnnnnnnnnnnnnnnnnnnnnnnnnnnnnnnnnnnnnnnnnnnnnnnnnnnnnnnnnnnnnnnnnnnnnnnnnnnnnnnnnnnnnnnnnnnnnnnnnnnnnnnnnnnnnnnnnnnnnnnnnnnnnnnnnnnnnnnnnnnnnnnnnnnnnnnnnnnnnnnnnnnnnnnnnnnnnnnnnnnnnnnnnnnnnnnnnnnnnnnnnnnnnnnnnnnnnnnnnnnnnnnnnnnnnnnnnnnnnnnnnnnnnnnnnnnnnnnnnnnnnnnnnnnnnnnnnnnnnnnnnnnnnnnnnnnnnnnnnnnnnnnnnnnnnnnnnnnnnnnnnnnnnnnnnnnnaaaaaatcttttgaggggaatagaaggactgtgttacacaaaataaacaatggcattgtcataggccttccttttggtggtagggcataatgctggggaatatgtgaagatgtttgtatgaagtctctttccgatcatgaccagtagcttgcgctgtactctgtagttatgtggattgctgagcaatgacccttttcaattgcttatttctgtgttactgagcacgacgtaattagggacgtaattttatagcataaactttctgtacagtttttcttatagtctaataactaaaaagtgaccttcaaattgtgataattgcctatgtacatggataaattaaaacactgcacacggag

SEQ ID NO: 31666 - DNA, 168 bp, Macaca Mulatta
  misc_feature (1)...(168): n = A,T,C or G
ggctacatatccaccattgtgatttttcaaactataatccagatacttctttntcatggattcccatgatcacccaattaagagctcttctgtactccccaaattgaactgatcttcgcaagcacattcatttcttcctactctgaacagtagttaattaggtttttg

SEQ ID NO: 31667 - DNA, 2030 bp, Macaca Mulatta
  misc_feature (1)...(2030): n = A,T,C or G
atgataagaaagtgaagcagctttattgctgatatggagaatgtttgagtgatctgatagaagattagatcaggcaccatcttcccttaagccaaagcgtaatccagagcaaggccctaactctcttcaattctatgaaggctaagagaggtgaggaagctgcagaataaaagctggaagctagcagaggttggtttatgaggtttaaggaaagaagccatttccataacataaaagtacaaggtgaagcagcaagtgtcaacgtagaatctgcagcaagttattcagaagatctagctaagatcattgatgaaggtggctacactaaacaacgcatttttcaatgtagatgaaacagccttctattggaagaagatgccatctaggacttttttagctagagaggagaagtcaatgcctggcttcaaatgagaggccaactctcttgttagggactaatgcagctggtgactaagttgaagccaatgcttattgaccattctgaaaaatcctaggacttttaagaatgatgctaaatctactctgcctgtgctctatgaagggaacaacaaagcctggaggacagcacatctgtttatagcatggtttactgaatattttaagcctactcttgagacctactgctcagacaaaaagattcctttcanaatattactgctcattgacaatgcacctggtcacacaagagctctgctggagatgtacaaggagatgaatgttnnnnnnnnnnnnnnnnnnnnnnnnnnnnnnnnnnnnngagaggtgaggaagctgcagcaaaagtctgatgacagcagaggttggtttatcaaatttaaggaaagacatcgtcttcataatataaaagtgcaaggtgaaggagcaagagctgatgtagaagtgttagcaagttatccagatctagctaagatcattgatgaaagtggctaccttgaacaacaaattttcaagtatacaaaacagtcttctgttggaagaagatggtatctaggactttcatagttagagaggagaagttaattcctggcctcaaagtttcaaaggacatgctgactatcttgacagggactaatgcagctggggactttaagctgaagccaacacttcatttaccattctgaaaattctggggcccttgagaattacgctaaatctactctgcctgtgctgtataaatgtaacaacaaaggctggatgacagcacatccgatgacagcatggtttagtgaatgttaatactttatgcttactgttgggacctactgctcagacaaaaatattcctttccaaataataccactcattgacaatgcacctggtcatccaagagctctcatggagatatacaagatcaacgttgttttcatgcctgctaacacaacatccattttgcagcccagggatgaagtagtaattttgattttcaagtcttatgatttaagaaatacgttttgaaaggctaaagttgccacagatagtgattcctctgatggatctgagcaaagtcagttgaaaaccttctggaaaggattaaccatttcaaatgccattaagaacatttgtgattcatgggaggaagttgaaacctcagcattaacaggtgtttagaagaagttgatttcaaccctaaggagtgactctgagaggttcaagacttcagtgaaggaagtaattgcagatgtggtagaaatagcaagagaactagaattagaagtggagcctgaagatgtgactgaattgctgcaatctcatgataaaacgtgaatggatgaggagttgtttcttatggatgagcagagaaagtggtttcttgagataaaatttactcctggtgaaaatgctgtaaaacattttgaaattacaacaaaggatttagaatattacataaacatggatgataaagcagaggcagggttggagaggattgactcccattttgaaagaagttctactgtggttaaaatgctgtcaaacagtatcgcatgctatagaaaaatctttcatgaaag

SEQ ID NO: 31668 - DNA, 132 bp, Macaca Mulatta
cagaaaacatgtaccttcaaggaagtggtatatgagacagtgagagtgcccggctgtgctcaccatgcagactccttgtatacatacccagtggccacccagtgtcactgtggcaagtgtgacagcgacagc

SEQ ID NO: 31669 - DNA, 740 bp, Macaca Mulatta
  misc_feature (1)...(740): n = A,T,C or G
ggggcacacaaaccttggatccaccatccagactgaagactggatgaaactgtgcatgtttctgtcccttccattgccttatgttgaatcagttatatttatctgtaccttctttgctacttataatatgctcaaagtttgtagtcatgtagaaaaggccagtataaaaatatagtagacttagataccccacacgaccatgagactttctctttgtcaatttgggaattattattattaatttagaaatggggtcttgttaggttgcccaggccgaattcagactcctgggcttaagggatcnnnnnnnnnnnnnnnnnnnnnnnnnnnnnnnnnnnnntgtgcaccaccacaccaaacaagaattgattatattgcttctgtgctatggtaccagcagatgattcagtcatgcttccaaaggcagtctagtctagaggccatacagctgtttggtttgcatatgttttagcttttctttttgtttttagtatttcctaaaacatagggggaaaaacgaagtcatttctactaaacactagaaacctgccacagtgaagtttaagttgccttacccttgccagcaagtttaaaaccaaaaaatgggggtttccggtcctttgtttccaagccaaaaagggggcttggcattttccctggcttccaaagggaaaggaattttcccttgggcctgggcctggnnnnnnnnnnnnnnnnnnngttcccccggggttggcgcc

SEQ ID NO: 31670 - DNA, 775 bp, Macaca Mulatta
ggggcgacggccgcggcggtagctggagcctccgcgactgcacctccaagcggcccggaacccgcggcttccctggctcccgcgagcatctcacggggcggcactggccagcgccagccctcgggccggcccggatgaccagaagcctgtagatacccgccgccctctcccggctcggcgcagcggccgcccgcgcgcgactcgccccgggacacggcacagttctcaagtgggtcccatttttagccaccgagtgctgaaaagtctagtgggaagggaccaggcggagagtcagagggagaaattcgtttctatttccatctctaccactgtaacccctggttgaagaaatatggagatcaacacaaaactgttcatcagtgttatttgtaccagctttttcacctttcagcttcttttctactttgtaagttactggttttcagcaaaagtttctccaggtttcaatagtctcagcttcgaaaagaagattgaatggaactcaagggtagtatccacatgccattctttggtggttggtatttttggcctgtacattttcttattcgatgagcctactaaaactgatccactttggggtggtccatcacttgcaaacgtgaatattgctattgcctcaagctacctcatttctgaattgtccattatgatttttgtattggaaagtgattgggtgacaaatttttttataatacattcattggtgcggtccctggtattgcatactaaccttggtactggaaaaaatgggagt

SEQ ID NO: 31671 - DNA, 89 bp, Macaca Mulatta
caggataccagtcggaacctgcgacaagtggaccagatgcttggacgataccgagaatacagtaatggacaggcgggtgcgatagaaca

SEQ ID NO: 31672 - DNA, 1325 bp, Macaca Mulatta
  misc_feature (1)...(1325): n = A,T,C or G
attaccatttcctctacactgcagaagaagcaaaactcctttgtgagaattactgcacatgtgtatggggaaaatcgttctgaaaggctagaatgatacaagtgagcaaaagaagttggtcagcttgactatggagtggtggcaataatctctaaacattccaaaagaccatgagctgaacctaaattcccttggaatctgaacagaaaaggaatatcaaattgccatttgaaaactgaccagctaatctggacctcagagatgtatcagccagtggccaaagccatttcaagtacagaaattgtattgagactacagctaaataaatttgaacattaagtataatttttccacttttcctctttataagcatatttgtaaactcaaagctgagcagaagtgatgttattctctcaagttcgatactgagttgattgactgctcccttacccctcactcttccccttccctttcctaaggcaatagtgcacaatttaggttatttttgcttccgaatttgaataaaaaacctaatgccatggatttttttttcttttgcaacacacctgtttatcaccttgtttaaatgtaaatgtcccctcatgcttttgaaataaatttccttttgtaaaacaaccacaaccacaaccacaacaactaaatatgtgcctnnnnnnnnnnnnnnnnnnnnnnnnnnnnnnnnnnnnnnnnnnnnnnnnnnnnnnnnnnnnnnnnnnnnnnnnnnnnnnnnnnnnnnnnnnnnnnnnnnnnnnnnnnnnnnnnnnnnnnnnnnnnnnnnnnnnnnnnnnntttctccctagggccccttnnnnnnnnnnnnnnnnnnnnnnnnnnnnnnnnngggcgccccccccccccttatagttttttcccggaaaaccnnnnnnnnnnnnnnnnnnnnngggttttcccccccaagnnnnnnnnnnnnnnnnnnnnnnnnnnnnnnnnnnnnnnnnnnnnnnnncgaggtgttgttataaaaagaccaaaagtggggggttgttgtagacacccaggggggtccccccccaccaacgggaaatccacaagaaagagccccccacaaaaataaaatcaacccccggcccccgggggggggtgtattatatgaaaaagaagtgttgttggcggcaaaaaagaaagaaacctctctccacaacaagaggggggggaggaccacccccaaagaggccgggcggggaggaaaatattaaacccctccgtgcgcgcggcttataaaaaaaacaaatatgtttcctgcccgcnnnnnnnnnnnnnnnnnnggcggccgaccaaaaaaa

SEQ ID NO: 31673 - DNA, 614 bp, Macaca Mulatta
  misc_feature (1)...(614): n = A,T,C or G
ggggacagccagccccgcccagagagcgaaatcatggagccttccaagaccttcatgagaaatctgccaatcacaccaggctacagcggcttcataccattcctcagctgccaaggaacgtccagggaggatgacatgaaccactgtgtgaaaaccttccaggagaaaacacagcactataaagaccagttgcgggaattttgctgtgcagtggccactgccccaaaactgaagcctgtcaactccgaggagatggtcctgcgggccctgcaccagtacaatcagcagcaccaccccctgctcctggaatgcaaatacgtaaagaaacctctccaggagcctccaatccctggctgggcaggctacctgccgagagccagggtcactgaatttggctgtggcacgagatatactgtcatggccaaaaactgctacaaggatttcctggacatcacagagagggccaagaaagcacatctganaccatatgaagaaatatacggagttagctccacaaaaacttctgctccttctcaaaagttttgcagcatgaagagctgctgccaaaatatcccgatttttctattccagatgaaagctgccctgcccttggn

SEQ ID NO: 31674 - DNA, 648 bp, Macaca Mulatta
  misc_feature (1)...(648): n = A,T,C or G
gggtattcaagaaaaaacacagttgaagggatctgaactggaaattacactcaccagaggatcttcccttcctggtcctgcttgtgcatatgtcaatcttaacatttgtgcaaatggcagtgaacaaggtggagtgttgctcctggaaaatccaaaaggtgataataggttggaccttttaaagctgaagagtgttgtcactagcatttttggtgtgaaaaatacagagctggctgtcttccatgatgaaacagaaatacaaaacgaaaccgacctactgagtcttagtggaaaaacactttgtgtgactgcaggatcggctccctctctgatcagcagttctagtactcttctttgtcagtatatcaacctacagctcctgaatgcagagccacaagagtgtttaatggggacagtgggcactctcctgcttgaaaacccgcttgggcagaatggactcacccaccaaggtcttctgtatgaagcagccaaggtgtttggccttcggagcaggaagctaaagctgtttctgaatgagacccanacgcaagaaattacagaagacatccccgtgaagactttgaatatgaagactgtgtatgtttctgtattacccaacacagccagacttctagcatgcccnttcag

SEQ ID NO: 31675 - DNA, 453 bp, Macaca Mulatta
aatgaccaccattttgcattttgaaataaaaaactttttataccatatctcatctaattcctgagaggtgtggtatcctggggtgggcagcagggagggttagcaggcgtgtgacggtgatggggtcttacctgagcactgcagcgggagcagcttcctgaaggtcaggcacttgcttcacacctaggaactgtgtaataagctactacatgcaggtaagtctgctgaggactcgtttttccttcttgttaggggtgggaagagagaaacttttataacttccatgaaatttagcattttaagatgagaaggtagatcaacttctaagctagagtgagtgggaggtaactgattaattctaaggcagaaaattctaaggctctttgatcctcacacctgtgcaccagagcttcccatggctgataactttttcttcccaactgtattttagag

SEQ ID NO: 31676 - DNA, 271 bp, Macaca Mulatta
actaaaaacacactgatggtcaacacaggtcaaaaccaagagagactgtgtagttttcaaggtcttggccagaacctttaggaaagaagacctctttatacattgaaggaacaaaagaaggaagcagttgccttcctgagggggctctgagagaatctagcctccccgctgtcttatcagagcaaagattggagtgagtgttgcgaccaacaggattttatcgtttgactccaatacctgaaattctgacctgtctcctgtgcttcaatga

SEQ ID NO: 31677 - DNA, 1879 bp, Macaca Mulatta
  misc_feature (1)...(1879): n = A,T,C or G
gaccagacctggtggagaattaggtgctgctgggagctcctgccttccacagcatcccagctgcagggagcctcagggactctgggccgtgcagagttgggggcattccccagacagcatcgccatggcctggagggagcagttatcaaagaatcaggtcaattgggtgtttgctggcattacnnnnnnnnnnnnnnnnnnnnnnnnnnnnnnnnnnnnnnnnnnnnnnnnnnnnnnnnnnnnnnnnnnnnnnnnnnnnnnnnnnnnnnnnnnnnnnnnnnnnnnnnnnnnnnnnnnnnnnnnnnnnnnnnnnnnnnnnnnnnnnnnnnnnnnnnnnnnnnnnnnnnnnnnnnnnnnnnnnnnnnnnnnnnnnnnnnnnnnnnnnnnnnnnnnnnnnnnnnnnnnnnnnnnnnnnnnnnnnnnnnnnnnnnnnnnnnnnnnnnnnnnnnnnnnnnnnnnnnnnnnnnnnnnnnnnnnnnnnnnnnnnnnnnnnnnnnnnnnnnnnnnnnnnnnnnnnnnnnnnnnnnnnnnnnnnnnnnnnnnnnnnnnnnnnnnnnnnnnnnnnnnnnnnnnnnnnnnnnnnnnnnnnnnnnnnnnnnnnnnnnnnnnnnnnnnnnnnnnnnnnnnnnnnnnnnnnnnnnnnnnnnnnnnnnnnnnnnnnnnnnnnnnnnnnnnnnnnnnnnnnnnnnnnnnnnnnnnnnnnnnnnnnnnnnnnnnnnnnnnnnnnnnnnnnnnnnnnnnnnnnnnnnnnnnnnnnnnnnnnnnnnnnnnnnnnnnnnnnnnnnnnnnnnnnnnnnnnnnnnnnnnnnnnnnnnnnnnnnnnnnnnnnnnnnnnnnnnnnnnnnnnnnnnnnnnnnnnnnnnnnnnnnnnnnnnnnnnnnnnnnnnnnnnnnnnnnnnnnnnnnnnnnnnnnnnnnnnnnnnnnnnnnnnnnnnnnnnnnnnnnnnnnnnnnnnnnnnnnnnnnnnnnnnnnnnnnnnnnnnnnnnnnnnnnnnnnnnnnnnnnnnnnnnnnnnnnnnnnnnnnnnnnnnnnnnnnnnnnnnnnnnnnnnnnnnnnnnnnnngaatgccacacggaaaccaatgtactacacgggaggcagcctgatccctcttctccagctgcctggggatgatggtctgaatgtggagtggctggttcctgacgtccagggcagtggtcaaacagcaacaatgaccctcccagnnnnnnnnnnnnnnnnnnnnnnnnnnnnnnnnnnnnnnnnnnnnnnnnnnnnnnnnnnnnnnnnnnnnnnnnnnnnnnnnnnnnnnnnnnnnnnnnnnnnnnnnnnnnnnnnnnnnnnnnnnnnnnnnnnnnnnnnnnnnnnnnnnnnnnnnnnnnnnnnnnnnnnnnnnnnnnnnnnnnnnnnnnnnnnnnnnnnnnnnnnnnnnnnnnnnnnnnnnnnnnnnnnnnnnnnnnnnnnnnnnnnnnnnnnnnnnnnnnnnnnnnnnnnnnnnnnnnnnnnnnnnnnnnnnnnnnnnnnnnnnnnnnnnnnnnnnnnnnnnnnnnnnnnnnnnnnnnnnnnnnnnnnnnnnnnnnnnnnnnnnnnnnnnnnnnnnnnnnnnnnnnnnnnnnnnnnnnnnnnnnnnnnnnnnnnnnnnnnnnnnnnnnnnnnnnnnnnnnnnnnnnnccagatgcaggccatactgctgggccacagcacagctggagccatagccaggctgctggcatcctccccccgggccaccgtcacagtggagcacagcccagaggggggcgactatgcctctgtgaggacagcgctgctggcagccagggctgtggataggacccgagtctactacaggctgccccaggggcaccgcaaggacttgctggccgatgttggcagaaactg

SEQ ID NO: 31678 - DNA, 1157 bp, Macaca Mulatta
  misc_feature (1)...(1157): n = A,T,C or G
acataagggatgaccctgccctttagttctcgccctctgagctgggcttcccacactacagcgccgaagtgcctgagcccgagcctctggagctggccgtgcagaacgccaaggcctacctgctgcagaccagcatcagttgcgacctcagcctgtnnnnnnnnnnnnnnnnnnnnnnnnnnnnnnnnnnnnnnnnnnnnnnnnnnnnnnnnnnnnnnnnnnnnnnnnnnnnnnnnnnnnnnnnnnnnnnnnnnnnnnnnnnnnnnnnnnnnnnnnnnnnnnnnnnnnnnnnnnnnnnnnnnnnnnnnnnnnnnnnnnnnnnnnnnnnnnnnnnnnnnnnnnnnnnnnnnnnnnnnnnnnnnnnnnnnnnnnnnnnnnnnnnnnnnnnnnnnnnnnnnnnnnnnnnnnnnnnnnnnnnnnnnnnnnnnnnnnnnnnnnnnnnnnnnnnnnnnnnnnnnnnnnnnnnnnnnnnnnnnnnnnnnnnnnnnnnnnnnnnnnnnnnnnnnnnnnnnnnnnnnnnnnnnnnnnnnnnnnnnnnnnnnnnnnnnnnnnnnnnnnnnnnnnnnnnnnnnnnnnnnnnnnnnnnnnnnnnnnnnnnnnnnnnnnnnnnnnnnnnnnnnnnnnnnnnnnnnnnnnnnnnnnnnnnnnnnnnnnnnnnnnnnnnnnnnnnnnnnnnnnnnnnnnnnnnnnnnnnnnnnnnnnnnnnnnnnnnnnnnnnnnnnnnnnnnnnnnnnnnnnnnnnnnnnnnnnnnnnnnnnnnnnnnnnnnnnnnnnnnnnnnnnnnnnnnnnnnnnnnnnnnnnnnnnnnnnnnnnnnnnnnnnnnnnnnnnnnnnnnnnnnnnnnnnnnnnnnnnnnnnnnnnnnnnnnnnnnnnnnnnnnnnnnnnnnnnnnnnnnnnnnnnnnnnnnnnnnnnnnnnnnnnnnnnnnnnnnnnnnnnnnnnnnnnnnnnnnnnnnnnnnnnnnnnnnnnnnnnnnnnnnnnnnnnnnnnnnnnnnnnnnnnnnnnnnnnnnnnnnnnnnnnnnnnnnnnnnnnnnnnnnnnnnnnnngggcgcgactcctacgaggagaaccccgacttcgagggcatccccgtgctggagctggtcgactccatggccaactgggtgcatcacacacagcacatcctgccgcagg

SEQ ID NO: 31679 - DNA, 258 bp, Macaca Mulatta
  misc_feature (1)...(258): n = A,T,C or G
ggtgcctttatctctgaggctgtggaggctcctcctccatctttctacagagattactttgctgccttaacatttccctcctacctctccttttgaggcttctccttctcctgccccactatttctctacactaaggggtatgttcccacttgtccctctccctacctttatatttggggtccttttttatacaggaaaaacaaaacnnnnnnnnnnnnnnnnnnnnnnnnnnnnnnnnnnnnnnnnnnnnnnnnnnn

SEQ ID NO: 31680 - DNA, 708 bp, Macaca Mulatta
agctcagagagaaaagaagcagcccggcggtcccggagaattgaccgccacctgcgctcagagagccaacggcagcgccgcgagatcaagctgctcctgctgggcaccagcaactcaggcaagagcaccatcgtcaaacagatgaagatcatccacagtggcggcttcaacctggaggcctgcaaggagtacaagcccctcatcatctacaacgccatcgactcgctgacccgcatcatccgggccctggccgccctcaggatcgatttccacaaccccgaccgcgcctacgacgctgtgcagctcttcgcgctgacaggccccgctgagagcaagggcgagatcacacccgagctgctgggcgtcatgcggcggctctgggccgacccaggggcacaggcctgcttcagccgctccagcgagtatcacctggaggacaacgctgcctactacctgaacgacctggagcgcattgccgcagctgactacatccctactgtcgaggacatcctgcgctcccgggacatgaccacgggcatcgtggagaacaagttcaccttcaaggagctcaccttcaagatggtggacgtgggtgggcagaggtcagagcgcaaaaagtggatccactgcttcgagggcgtcacagccatcatcttctgtgtggagctcagcggctacgacctgaaactctacgaggataaccagaca

SEQ ID NO: 31681 - DNA, 1710 bp, Macaca Mulatta
  misc_feature (1)...(1710): n = A,T,C or G
aaaacaaagaattttgttagccgaagcctcgtcctaggagaagtcgtctccatggcggacatggccacaggagtgaannnnnnnnnnnnnnnnnnnnnnnnnnnnnnnnnnnnnnnnnnnnnnnnnnnnnnnnnnnnnnnnnnnnnnnnnnnnnnnnnnnnnnnnnnnnnnnnnnnnnnnnnnnnnnnnnnnnnnnnnnnnnnnnnnnnnnnnnnnnnnnnnnnnnnnnnnnnnnnnnnnnnnnnnnnnnnnnnnnnnnnnnnnnnnnnnnnnnnnnnnnnnnnnnnnnnnnnnnnnnnnnnnnnnnnnnnnnnnnnnnnnnnnnnnnnnnnnnnnnnnnnnnnnnnnnnnnnnnnnnnnnnnnnnnnnnnnnnnnnnnnnnnnnnnnnnnnnnnnnnnnnnnnnnnnnnnnnnnnnnnnnnnnnnnnnnnnnnnnnnnnnnnnnnnnnnnnnnnnnnnnnnnnnnnnnnnnnnnnnnnnnnnnnnnnnnnnnnnnnnnnnnnnnnnnnnnnnnnnnnnnnnnnnnnnnnnnnnnnnntttggttccgtggctccagacagacagtaccattcccctacgaggaacaagagcgcaagattcagtgccatgctggcagcactgatcccttcgagattagctgtggctttccaagctatgggtgccatgaagnnnnnnnnnnnnnnnnnnnnnnnnnnnnnnnnnnnnnnnnnnnnnnnnnnnnnnnnnnnnnnnnnnnnnnnnnnnnnnnnnnnnnnnnnnnnnnnnnnnnnnnnnnnnnnnnnnnnnnnnnnnnnnnnnnnnnnnnnnnnnnnnnnnnnnnnnnnnnnnnnnnnnnnnnnnnnnnnnnnnnnnnnnnnnnnnnnnnnnnnnnnnnnnnnnnnnnnnnnnnnnnnnnnnnnnnnnnnnnnnnnnnnnnnnnnnnnnnnnnnnnnnnnnnnnnnnnnnnnnnnnnnnnnnnnnnnnnnnnnnnnnnnnnnnnnnnnnnnnnnnnnnnnnnnnnnnnnnnnnnnnnnnnnnnnnnnnnnnnnnnnnnnnnnnnnnnnnnnnnnnnnnnnnnnnnnnnnnnnnnnnnnnnnnnnnnnnnnnnnnnnnnnnnnnnnnnnnnnnnnnnnnnnnnnnnnnnnnnnnnnnnnnnnnnnnnnnnnnnnnnnnnnnnnnnnnnnnnnnnnnnnnnnnnnnnnnnnnnnnnnnnnnnnnnnnnnnnnnnnnnnnnnnnnnnnnnnnnnnnnacctttcaatgggaacagagaataaaaattccagccatagggcccagcctggtggccacctctcacggacaggcacccggctgctcagtgttttccaattgctagaggccattcctagcatttcgacttggggaattaatttattgttactttatttttatctttatagatgggggcttgctctgtcacccaggctagagtgtagtggcatgatcatagctcactgcagccttgaactcctgaactcaggcaatcttcctgccacagccacctgagtagctggaactgtaggcatgtgccaccatgcccaactaattttatttttatttcaattgtagaggtggagcctaaccctgttgcccaggctggtctctgactcctggtctctagtgatcctcctgccttggcctcccaaagtactaggattacaagcgtgaaccaacatgctggccccattattgactgttaccctaaagtgtg

SEQ ID NO: 31682 - DNA, 1560 bp, Macaca Mulatta
  misc_feature (1)...(1560): n = A,T,C or G
tggctgcagcggcggccggggccgggagcgggccctgggctgcccaggagaagcagttcccgcccgcgctgctgagtttcttcatctacaacccgcgcttcgggccgcgagaaggannnnnnnnnnnnnnnnnnnnnnnnnnnnnnnnnnnnnnnnnnnnnnnnnnnnnnnnnnnnnnnnnnnnnnnnnnnnnnnnnnnnnnnnnnnnnnnnnnnnnnnnnnnnnnnnnnnnnnnnnnnnnnnnnnnnnnnnnnnnnnnnnnnnnnnnnnnnnnnnnnnnnnnnnnnnnnnnnnnnnnnnnnnnnnnnnnnnnnnnnnnnnnnnnnnnnnnnnnnnnnnnnnnnnnnnnnnnnnnnnnnnnnnnnnnnnnnnnnnnnnnnnnnnnnnnnnnnnnnnnnnnnnnnnnnnnnnnnnnnnnnnnnnnnnnnnnnnnnnnnnnnnnnnnnnnnnnnnnnnnnnnnnnnnnnnnnnnnnnnnnnnnnnnnnnnnnnnnnnnnnnnnnnnnnnnnnnnnnnnnnnnnnnnnnnnnnnnnnnnnnnnnnnnnnnnnnnnnnnnnnnnnnnnnnnnnnnnnnnnnnnnnnnnnnnnnnnnnnnnnnnnnnnnnnnnnnnnnnnnnnnnnnnnnnnnnnnnnnnnnnnnnnnnnnnnnnnnnnnnnnnnnnnnnnnnnnnnnnnnnnnnnnnnnnnnnnnnnnnnnnnnnnnnnnnnnnnnnnnnnnnnnnnnnnnnnnnnnnnnnnnnnnnnnnnnnnnnnnnnnnnnnnnnnnnnnnnnnnnnnnnnnnnnnnnnnnnnnnnnnnnnnnnnnnnnnnnnnnnnnnnnnnnnnnnnnnnnnnnnnnnnnnnnnnnnnnnnnnnnnnnnnnnnnnnnnnnnnnnnnnnnnnnnnnnnnnnnnnnnnnnnnnnnnnnnnnnnnnnnnnnnnnnnnnnnnnnnnnnnnnnnnnnnnnnnnnnnnnnnnnnnnnnnnnnnnnnnnnnnnnnnnnnnnnnnnnnnnnnnnnnnnnnnnnnnnnnnnnnnnnnnnnnnnnnnnnnnnnnnnnnnnnnnnnnnnnnnnnnnnnnnnnnnnnnnnnnnnnnnnnnnnnnnnnnnnnnnnnnnnnnnnnnnnnnnnnnnnnnnnnnnnnnnnnnnnnnnnnnnnnnnnnnnnnnnnnnnnnnnnnnnnnnnnnnnnnnnnnnnnnnnnnnnnnnnnnnnnnnnnnnnnnnnnnnnnnnnnnnnnnnnnnnnnnnnnnnnnnnnnnnnnnnnnnnnnnnnnnnnnnnnnnnnnnnnnnnnnnnnnnnnnnnnnnnnnnnnnnnnnnnnnnnnnnnnnnnnnnnnnnnnnnnnnnnnnnnnnnnnnnnnnnnnnnnnnnnnnnnnnnnnnnnnnnnnnnnnnnnnnnnnnnnnnnnnnnngaagaggtcaagaaactctgtgcaacgcagttcaacaacatcttcttcttggattgactgacggctcaccgaaagcgtatttaaaagacactcggcaaacatttgggcatatgcaagttactggtcatatgacggactgcaatcaggacaagggaaaagcaatacttgc

SEQ ID NO: 31683 - DNA, 592 bp, Macaca Mulatta
ggggccgccctagggttcctgcgcactggctgttcctcctgggtgtcactggcagccccgtccttcctagagggactggaacctaattctcctgaggctgagggagggtggagggtctcaaggcaacactggccccacgacggagtgccaggagcactaacagtacccttagcttgctttcctcctccctcctttttattctcaagttcctttttatttctccttgcgtaacaaccttcttcccttctgcaccactgcccgtacccctacccgccccgccacctccttgttaccccactcttgaagccacagctgttggcagggtccccagctcatgccagcctcatctcttttctcgctagcccccaaagggcctccaggcaacatgggggttccggtcagagagccggcactctcagttgccctctggttgagttggggtgcagctctgggggctgtggcttgtgccatggctctgctgacccaacagacagagctgcagagcctcaggagagaggtgagccggctgcagaggacaggagggccctcccagaaggcagaagggtatccctggcagagtctcccggagcag

SEQ ID NO: 31684 - DNA, 397 bp, Macaca Mulatta
tcatctgtcaatatttaattggtttgctttatcccaaaaatgtttatagaaagtcagctttttgttttcaactctagatctttgctcctgttcctcaagcctggtggtcaccctctggcttctgctaggcaatctgtttcctctactggctggatttcttctgtgtgtatggcattaggaatggaaaagtggatcttcaagatatccttttatgttatgttcatgtgaacaaagcacaaagtttgagtgagtgccagcctatgcagatggcagaagtggcattcttgattttggcttagaagagttgatgaccatcagaccttataacagaacttcacagctggctgtgctcatcagcaacccggccaccttcatcagcaacccggccaccttcatc

SEQ ID NO: 31685 - DNA, 3252 bp, Macaca Mulatta
  misc_feature (1)...(3252): n = A,T,C or G
ggctgggatcatttactatagccaggaaaagtacttccaccacgtgcagcagactgcagctgtgggcctggaaaaattcagcaatgaccctgtgttgaagttctttaaagcttatggagtcctcaaagaannnnnnnnnnnnnnnnnnnnnnnnnnnnnnnnnnnnnnnnnnnnnnnnnnnnnnnnnnnnnnnnnnnnnnnnnnnnnnnnnnnnnnnnnnnnnnnnnnnnnnnnnnnnnnnnnnnnnnnnnnnnnnnnnnnnnnnnnnnnnnnnnnnnnnnnnnnnnnnnnnnnnnnnnnnnnnnnnnnnnnnnnnnnnnnnnnnnnnnnnnnnnnnnnnnnnnnnnnnnnnnnnnnnnnnnnnnnnnnnnnnnnnnnnnnnnnnnnnnnnnnnnnnnnnnnnnnnnnnnnnnnnnnnnnnnnnnnnnnnnnnnnnnnnnnnnnnnnnnnnnnnnnnnnnnnnnnnnnnnnnnnnnnnnnnnnnnnnnnnnnnnnnnnnnnnnnnnnnnnnnnnnnnnnnnnnnnnnnnnnnnnnnnnnnnnnnnnnnnnnnnnnnnnnnnnnnnnnnnnnnnnnnnnnnnnnnnnnnnnnnnnnnnnnnnnnnnnnnnnnnnnnnnnnnnnnnnnnnnnnnnnnnnnnnnnnnnnnnnnnnnnnnnnnnnnnnnnnnnnnnnnnnnnnnnnnnnnnnnnnnnnnnnnnnnnnnnnnnnnnnnnnnnnnnnnnnnnnnnnnnnnnnnnnnnnnnnnnnnnnnnnnnnnnnnnnnnnnnnnnnnnnnnnnnnnnnnnnnnnnnnnnnnnnnnnnnnnnnnnnnnnnnnnnnnnnnnnnnnnnnnnnnnnnnnnnnnnnnnnnnnnnnnnnnnnnnnnnnnnnnnnnnnnnnnnnnnnnnnnnnnnnnnnnnnnnnnnnnnnnnnnnnnnnnnnnnnnnnnnnnnnnnnnnnnnnnnnnnnnnnnnnnnnnnnnnnnnnnnnnnnnnnnnnnnnnnnnnnnnnnnnnnnnnnnnnnnnnnnnnnnnnnnnnnnnnnnnnnnnnnnnnnnnnnnnnnnnnnnnnnnnnnnnnnnnnnnnnnnnnnnnnnnnnnnnnnnnnnnnnnnnnnnnnnnnnnnnnnnnnnnnnnnnnnnnnnnnnnnnnnnnnnnnnnnnnnnnnnnnnnnnnnnnnnnnnnnnnnnnnnnnnnnnnnnnnnnnnnnnnnnnnnnnnnnnnnnnnnnnnnnnnnnnnnnnnnnnnnnnnnnnnnnnnnnnnnnnnnnnnnnnnnnnnnnnnnnnnnnnnnnnnnnnnnnnnnnnnnnnnnnnnnnnnnnnnnnnnnnnnnnnnnnnnnnnnnnnnnnnnnnnnnnnnnnnnnnnnnnnnnnnnnnnnnnnnnnnnnnnnnnnnnnnnnnnnnnnnnnnnnnnnnnnnnnnnnnnnnnnnnnnnnnnnnnnnnnnnnnnnnnnnnnnnnnnnnnnnnnnnnnnnnnnnnnnnnnnnnnnnnnnnnnnnnnnnnnnnnnnnnnnnnnnnnnnnnnnnnnnnnnnnnnnnnnnnnnnnnnnnnnnnnnnnnnnnnnnnnnnnnnnnnnnnnnnnnnnnnnnnnnnnnnnnnnnnnnnnnnnnnnnnnnnnnnnnnnnnnnnnnnnnnnnnnnnnnnnnnnnnnnnnnnnnnnnnnnnnnnnnnnnnnnnnnnnnnnnnnnnnnnnnnnnnnnnnnnnnnnnnnnnnnnnnnnnnnnnnnnnnnnnnnnnnnnnnnnnnnnnnnnnnnnnnnnnnnnnnnnnnnnnnnnnnnnnnnnnnnnnnnnnnnnnnnnnnnnnnnnnnnnnnnnnnnnnnnnnnnnnnnnnnnnnnnnnnnnnnnnnnnnnnnnnnnnnnnnnnnnnnnnnnnnnnnnnnnnnnnnnnnnnnnnnnnnnnnnnnnnnnnnnnnnnnnnnnnnnnnnnnnnnnnnnnnnnnnnnnnnnnnnnnnnnnnnnnnnnnnnnnnnnnnnnnnnnnnnnnnnnnnnnnnnnnnnnnnnnnnnnnnnnnnnnnnnnnnnnnnnnnnnnnnnnnnnnnnnnnnnnnnnnnnnnnnnnnnnnnnnnnnnnnnnnnnnnnnnnnnnnnnnnnnnnnnnnnnnnnnnnnnnnnnnnnnnnnnnnnnnnnnnnnnnnnnnnnnnnnnnnnnnnnnnnnnnnnnnnnnnnnnnnnnnnnnnnnnnnnnnnnnnnnnnnnnnnnnnnnnnnnnnnnnnnnnnnnnnnnnnnnnnnnnnnnnnnnnnnnnnnnnnnnnnnnnnnnnnnnnnnnnnnnnnnnnnnnnnnnnnnnnnnnnnnnnnnnnnnnnnnnnnnnnnnnnnnnnnnnnnnnnnnnnnnnnnnnnnnnnnnnnnnnnnnnnnnnnnnnnnnnnnnnnnnnnnnnnnnnnnnnnnnnnnnnnnnnnnnnnnnnnnnnnnnnnnnnnnnnnnnnnnnnnnnnnnnnnnnnnnnnnnnnnnnnnnnnnnnnnnnnnnnnnnnnnnnnnnnnnnnnnnnnnnnnnnnnnnnnnnnnnnnnnnnnnnnnnnnnnnnnnnnnnnnnnnnnnnnnnnnnnnnnnnnnnnnnnnnnnnnnnnnnnnnnnnnnnnnnnnnnnnnnnnnnnnnnnnnnnnnnnnnnnnnnnnnnnnnnnnnnnnnnnnnnnnnnnnnnnnnnnnnnnnnnnnnnnnnnnnnnnnnnnnnnnnnnnnnnnnnnnnnnnnnnnnnnnnnnnnnnnnnnnnnnnnnnnnnnnnnnnnnnnnnnnnnnnnnnnnnnnnnnnnnnnnnnnnnnnnnnnnnnnnnnnnnnnnnnnnnnnnnnnnnnnnnnnnnnnnnnnnnnnnnnnnnnnnnnnnnnnnnnnnnnnnnnnnnnnnnnnnnnnnnnnnnnnnnnnnnnnnnnnnngttgatggctgacctgatgtttagaaaacagaaacatgaagcggccatcaatctttaccaccaagtcttggagaaagtgccannnnnnnnnnnnnnnnnnnnnnnnnnnnnnnnnnnnnnnnnnnnnnnnnnnnnnnnnnnnnnnnnnnnnnnnnnnnnnnnnnnnnnnnnnnnnnnnnnnnnnnnnnnnnnnnnnnnnnnnnnnnnnnnnnnnnnnnnnnnnnnnnnnnnnggcacatagggcagcccaacgaagccttaaagttcctgaacaaggcacgcaaggacagcacttggggccagagcgccatataccacatggtgcagatctgtctgaatccagacaatgaggttgtgggcggagaggcttttgagaaccagggggccgagagca

SEQ ID NO: 31686 - DNA, 2539 bp, Macaca Mulatta
  misc_feature (1)...(2539): n = A,T,C or G
agtgtgccttcagctatgcacggggacagtcatgaccggtatgagcgtctcacctctgtatccggctccgttgactttgaccaaagggacaatgnnnnnnnnnnnnnnnnnnnnnnnnnnnnnnnnnnnnnggatgatgagatccgggacaaatgtgggggcgacgccgtgcactacctgtcctttcagcggcacatcatcgggctgctggtggttgtgggcgtcctctccgtaggcatcgtgctgcctgtcaacttctcaggggacctgctnnnnnnnnnnnnnnnnnnnnnnnnnnnnnnnnnnnnnnnnnnnnnnnnnnnnnnnnnnnnnnnnnnnnnnnnnnnnnnnnnnnnnnnnnnnnnnnnnnnnnnnnnnnnnnnnnnnnnnnnnnnnnnnnnnnnnnnnnnnnnnnnnnnnnnnnnnnnnnnnngtgaagcggaccctcttcatcaatggaatctccaaatatgcagagtcagaaaagatcaagaagcattttgagnnnnnnnnnnnnnnnnnnnnnnnnnnnnnnnnnnnnnnnnnnnnnnnnnnnnnnnnnnnnnnnnnnnnnnnnnnnnnnnnnnnnnnnnnnnnnnnnnnnnnnnnnnnnnnnnnnnnnnnnnnnnnnnnnnnnnnnnnnnnnnnnnnnnnnnnnnnnnnnnnnnnnnnnnnnnnnnnnnnnnnnnnnnnnnnnnnnnnnnnnnnnnnnnnnnnnnnnnnnnnnnnnnnnnnnnnnnnnnnnnnnnnnnnnnnnnnnnnnnnnnnnnnnnnnnnnnnnnnnnnnnnnnnnnnnnnnnnnnnnnnnnnnnnnnnnnnnnnnnnnnnnnnnnnnnnnnnnnnnnnnnnnnnnnnnnnnnnnnnnnnnnnnnnnnnnnnnnnnnnnnnnnnnnnnnnnnnnnnnnnnnnnnnnnnnnnnnnnnnnnnnnnnnnnnnnnnnnnnnnnnnnnnnnnnnnnnnnnnnnnnnnnnnnnnnnnnnnnnnnnnnnnnnnnnnnnnnnnnnnnnnnnnnnnnnnnnnnnnnnnnnnnnnnnnnnnnnnnnnnnnnnnnnnnnnnnnnnnnnnnnnnnnnnnnnnnnnnnnnnnnnnnnnnnnnnnnnnnnnnnnnnnnnnnnnnnnnnnnnnnnnnnnnnnnnnnnnnnnnnnnnnnnnnnnnnnnnnnnnnnnnnnnnnnnnnnnnnnnnnnnnnnnnnnnnnnnnnnnnnnnnnnnnnnnnnnnnnnnnnnnnnnnnnnnnnnnnnnnnnnnnnnnnnnnnnnnnnnnnnnnnnnnnnnnnnnnnnnnnnnnnnnnnnnnnnnnnnnnnnnnnnnnnnnnnnnnnnnnnnnnnnnnnnnnnnnnnnnnnnnnnnnnnnnnnnnnnnnnnnnnnnnnnnnnnnnnnnnnnnnnnnnnnnnnnnnnnnnnnnnnnnnnnnnnnnnnnnnnnnnnnnnnnnnnnnnnnnnnnnnnnnnnnnnnnnnnnnnnnnnnnnnnnnnnnnnnnnnnnnnnnnnnnnnnnnnnnnnnnnnnnnnnnnnnnnnnnnnnnnnnnnnnnnnnnnnnnnnnnnnnnnnnnnnnnnnnnnnnnnnnnnnnnnnnnnnnnnnnnnnnnnnnnnnnnnnnnnnnnnnnnnnnnnnnnnnnnnnnnnnnnnnnnnnnnnnnnnnnnnnnnnnnnnnnnnnnnnnnnnnnnnnnnnnnnnnnnnnnnnnnnnnnnnnnnnnnnnnnnnnnnnnnnnnnnnnnnnnnnnnnnnnnnnnnnnnnnnnnnnnnnnnnnnnnnnnnnnnnnnnnnnnnnnnnnnnnnnnnnnnnnnnnnnnnnnnnnnnnnnnnnnnnnnnnnnnnnnnnnnnnnnnnnnnnnnnnnnnnnnnnnnnnnnnnnnnnnnnnnnnnnnnnnnnnnnnnnnnnnnnnnnnnnnnnnnnnnnnnnnnnnnnnnnnnnnnnnnnnnnnnnnnnnnnnnnnnnnnnnnnnnnnnnnnnnnnnnnnnnnnnnnnnnnnnnnnnnnnnnnnnnnnnnnnnnnnnnnnnnnnnnnnnnnnnnnnnnnnnnnnnnnnnnnnnnnnnnnnnnnnnnnnnnnnnnnnnnnnnnnnnnnnnnnnnnnnnnnnnnnnnnnnnnnnnnnnnnnnnnnnnnnnnnnnnnnnnnnnnnnnnnnnnnnnnnnnnnnnnnnnnnnnnnnnnnnnnnnnnnnnnnnnnnnnnnnnnnnnnnnnnnnnnnnnnnnnnnnnnnnnnnnnnnnnnnnnnnnnnnnnnnnnnnnnnnnnnnnnnnnnnnnnnnnnnnnnnnnnnnnnnnnnnnnnnnnnnnnnnnnnnnnnnnnnnatttattagatctaaagcccctttctccccagcccctgctttcattaaggtatttaagcctggggatttcaccactctcccccatgatggagggaggcagggagccccccaacctcagtgaggagagccccgagccggccccggggcaaagaggggtacagagggagttcccccagatcagcaccccccacccgctccacagctagtagcatgaccaggaaagggttaatgagagccgagagga

SEQ ID NO: 31687 - DNA, 392 bp, Macaca Mulatta
  misc_feature (1)...(392): n = A,T,C or G
agaggaagaaaagtatgcctttgtcaactggataaacaaagccctggaaaatgatcctgactgtcggcatgtcatcccgatgaatccaaacacgaatgatctctttaatgctgttggagatggcattgtcctttgntaaaatgatcaatctgtcagtgccagacacaattgatgaaagaacaatcaacaaaaagaagctcacccctttcaccattcaggnnnncaggaaaatctgaacttggctctgaactctgcctcagccattgggtgttatgtggtcaacataggggctgaggacctgaaggatgttaatccctatctagtcctgggacttctgtggcaagtcatcaagattgggttatttgctgacatcgaactcagcagaaatgaag

SEQ ID NO: 31688 - DNA, 2139 bp, Macaca Mulatta
  misc_feature (1)...(2139): n = A,T,C or G
catgcactgagcctctggtagtctttcagccatgcattccatctaagctctgcaaaattgaagaggctgactgcaagaataaatttcgctgtgacagtggnggccgctgcattgccagaaagttagaatgcaatggagaaaatgactgtggagacaattcagatgaaagggactgtgggaggacaaaggcagtatgtgcacggaagtataatcccatccctagtgtacagttgatgggcaatgggnnnnnnnnnnnnnnnnnnnnnnnnnnnnnnnnnnnnnnnnnnnnnnnnnnnnnnnnnnnnnnnnnnnnnnnnnnnnnnnnnnnnnnnnnnnnnnnnnnnnnnnnnnnnnnnnnnnnnnnnnnnnnnnnnnnnnnnggtagaaactgcagaagatgatttgaaaacagatttctacaaggatttaacttctcttggacacaatgaaaatcaacaaggctccttttcaagtcagnnnnnnnnnnnnnnnnnnnnnnnnnnnnnnnnnnnnnnnnnnnnnnnnnnnnnnnnnnnnnnnnnnnnnnnnnnnnnnnnnnnnnnnnnnnnnnnnnnnnnnnnnnnnnnnnnnnnnnnnnnnnnnnnnnnnnnnnnnnnnnnnnnnnnnnnnnnnnnnnnnnnnnnnnnnnnnnnnnnnnnnnnnnnnnnnnnnnnnnnnnnnnnnnnnnnnnnnnnnnnnnnnnnnnnnnnnnnnnnnnnnnnnnnnnnnnnnnnnnnnnnnnnnnnnnnnnnnnnnnnnnnnnnnnnnnnnnnnnnnnnnnnnnnnnnnnnnnnnnnnnnnnnnnnnnnnnnnnnnnnnnnnnnnnnnnnnnnnnnnnnnnnnnnnnnnnnnnnnnnnnnnnnnnnnnnnnnnnnnnnnnnnnnnnnnnnnnnnnnnnnnnnnnnnnnnnnnnnnnnnnnnnnnnnnnnnnnnnnnnnnnnnnnnnnnnnnnnnnnnnnnnnnnnnnnnnnnnnnnnnnnnnnnnnnnnnnnnnnnnnnnnnnnnnnnnnnnnnnnnnnnnnnnnnnnnnnnnnnnnnnnnnnnnnnnnnnnnnnnnnnnnnnnnnnnnnnnnnnnnnnnnnnnnnnnnnnnnnnnnnnnnnnnnnnnnnnnnnnnnnnnnnnnnnnnnnnnnnnnnnnnnnnnnnnnnnnnnnnnnnnnnnnnnnnnnnnnnnnnnnnnnnnnnnnnnnnnnnnnnnnnnnnnnnnnnnnnnnnnnnnnnnnnnnnnnnnnnnnnnnnnnnnnnnnnnnnnnnnnnnnnnnnnnnnnnnnnnnnnnnnnnnnnnnnnnnnnnnnnnnnnnnnnnnnnnnnnnnnnnnnnnnnnnnnnnnnnnnnnnnnnnnnnnnnnnnnnnnnnnnnnnnnnnnnnnnnnnnnnnnnnnnnnnnnnnnnnnnnnnnnnnnnnnnnnnnnnnnnnnnnnnnnnnnnnnnnnnnnnnnnnnnnnnnnnnnnnnnnnnnnnnnnnnnnnnnnnnnnnnnnnnnnnnnnnnnnnnnnnnnnnnnnnnnnnnnnnnnnnnnnnnnnnnnnnnnnnnnnnnnnnnnnnnnnnnnnnnnnnnnnnnnnnnnnnnnnnnnnnnnnnnnnnnnnnnnnnnnnnnnnnnnnnnnnnnnnnnnnnnnnnnnnnnnnnnnnnnnnnnnnnnnnnnnnnnnnnnnnnnnnnnnnnnnnnnnnnnnnnnnnnnnnnnnnnnnnnnnnnnnnnnnnnnnnnnnnnnnnnnnnnnnnnnnnnnnnnnnnnnnnnnnnnnnnnnnnnnnnnnnnnnnnnnnnnnnnnnnnnnnnnnnnnnnnnnnnnnnnnnnnnnnnnnnnnnnnnnnnnnnnnnnnnnnnnnnnnnnnnnnnnnnnnnnnnnnnnnnnnnnnnnnnnnnnnnnnnnnnnnnnnnnnnnnnnnnnnnnnnnnnnnnnnnnnnnnnnnnnnnnnnnnnnnnnnnnnnnnnnnnnnnnnagatagtctaacaaaattaaaaggccattgtcagctggggcagaaacaatcaggatctgaatgcatttgtatgtctcnnnnnnnnnnnnnagccattattcagaagatctctgtgtgtttgacacagactccaacgattactttacttcacctgcttgtaagtttatggctgagaaatgtttaaataatcagcaac

SEQ ID NO: 31689 - DNA, 351 bp, Macaca Mulatta
tctaagtaaaatagaaaatttgcaagattgtaatgaaagaagactgacattattctcagttacattaaaaatatctttttctccagattttgattggcagtggattatcttagatggcccagtggacaccttttgggtagaaaatctgaactctgtgctagatgatactagaacattatgcctagcaaacagtgagagaatagctttaactaataaaataagagtgatttttgaagtggacagtctctctcaggccagtcctgctactgtcagccgatgtgccatggtctatatggtaagctttcaaaaacaaatgttttaacaaagcaaaaatgttgtttatgatagtaa

SEQ ID NO: 31690 - DNA, 517 bp, Macaca Mulatta
gcattcttctacccctaaaagttctgaattctccagaaagtaacagatactttcgcttaaaccattacatttaaaaatttgtttttaaaacgtgtttgcctttccttggaatttgctatatattatgttttgcaataaaccacggccttttccatatagacattttttgtatgtgggaccattatccctctgttaatgtatttttaatatgctatgactgtaaagtattaaatcaatcttgttacttgatagtgatgccccaagtatagctatttgtatgtactaaacacatcatttttggtatctgtgtctctgtgtttttggctagtattactacttaataagttgattgtaaaatggctttactacagttaacacgagtcatcttcctagcagttaatgagtattgctgaatcagatgcccacctcacagtgatgaagctaggtaaggggtaatgttttgctcttgacacagataaatttaatagttttatatactaaaatataatatctttta

SEQ ID NO: 31691 - DNA, 396 bp, Macaca Mulatta
taagatctgctccgaattcatctatggccgttgccaggggaacaataacaacttccaaactgaagctatctgcctggtcacctgcaaaaaataccataagtcccggaggtcccagtctcctgtgctcaccaaggccacactgggaggtctgggtgttggctggtctattccaagacctaggtgggcctgggaatcacaaaatcagctctaatgcataagtataagtagaaggatattttgggacagagggtgggaagggaaggattagtcaaacggatattggcaagtacgaggtgagtagtgggtgtagagagaaaacaaaagtgttgaagtatcccagaccaggtcagatggaagcccagtaaacccagcccagccctgggcaccattcatcag

SEQ ID NO: 31692 - DNA, 2539 bp, Macaca Mulatta
  misc_feature (1)...(2539): n = A,T,C or G
gtcatctcagcaaaacttaaggaaaataagaagaattggtttggaccaagtccttatgtagaggtcacagtagatggacagtcaaagaagacagaaaaatgcaacaacacaaacagtcctaagtggaagcaaccccttacagatcgttacccctgtgagtaaattacattttcgtgtgtggagtcaccagacactgaaatctgatgttttgttgggaactgctgcattagatatttatgaaacattaaagtcaaacaatatgaaacnnnnnnnnnnnnnnnnnnnnnnnnnnnnnnnnnnnnnnnnnnnnnnnnnnnnnnnnnnnnnnnnnnnnnnnnnnnnnnnnnnnnnnnnnnnnnnnnnnnnnnnnnnnnnnnnnnnnnnnnnnnnnnnnnnnnnnnnnnnnnnnnnnnnnnnnnnnnnnnnnnnnnnnnnnnnnnnnnnnnnnnnnnnnnnnnnnnnnnnnnnnnnnnnnnnnnnnnnnnnnnnnnnnnnnnnnnnnnnnnnnnnnnnnnnnnnnnnnnnnnnnnnnnnnnnnnnnnnnnnnnnnnnnnnnnnnnnnnnnnnnnnnnnnnnnnnnnnnnnnnnnnnnnnnnnnnnnnnnnnnnnnnnnnnnnnnnnnnnnnnnnnnnnnnnnnnnnnnnnnnnnnnnnnnnnnnnnnnnnnnnnnnnnnnnnnnnnnnnnnnnnnnnnnnnnnnnnnnnnnnnnnnnnnnnnnnnnnnnnnnnnnnnnnnnnnnnnnnnnnnnnnnnnnnnnnnnnnnnnnnnnnnnnnnnnnnnnnnnnnnnnnnnnnnnnnnnnnnnnnnnnnnnnnnnnnnnnnnnnnnnnnnnnnnnnnnnnnnnnnnnnnnnnnnnnnnnnnnnnnnnnnnnnnnnnnnnnnnnnnnnnnnnnnnnnnnnnnnnnnnnnnnnnnnnnnnnnnnnnnnnnnnnnnnnnnnnnnnnnnnnnnnnnnnnnnnnnnnnnnnnnnnnnnnnnnnnnnnnnnnnnnnnnnnnnnnnnnnnnnnnnnnnnnnnnnnnnnnnnnnnnnnnnnnnnnnnnnnnnnnnnnnnnnnnnnnnnnnnnnnnnnnnnnnnnnnnnnnnnnnnnnnnnnnnnnnnnnnnnnnnnnnnnnnnnnnnnnnnnnnnnnnnnnnnnnnnnnnnnnnnnnnnnnnnnnnnnnnnnnnnnnnnnnnnnnnnnnnnnnnnnnnnnnnnnnnnnnnnnnnnnnnnnnnnnnnnnnnnnnnnnnnnnnnnnnnnnnnnnnnnnnnnnnnnnnnnngagaagagaacagacagcaatggcagagtatatttcgtcaaccacaacactcgaattacacaatgggaagaccccagaagtcaaggtcaattaaatgaaaagcccttacctgaaggttgggaaatgagattcacagtggatggaattgcatattttgtggaccacaatagaagaactaccacctatatagatccccgcacaggaaaatctgccctagacaatggacctcagatagcctatgttcgggacttcaaagcaaaggttcagtatttccgattctggtgtcannctggccatgccacagcacataaagattacagggacgaggaaaacattgtttgaggattcctttcaacagnagataatgagcctcagtccccaagatctgcgaagacgtttgtgggtgatttttccaggagaagaaggtttagattatggaggtgtagcaannnnnnnnnnnnnnnnnnnnnnnnnnnnnnnnnnnnnnnnnnnnnnnnnnnnnnnnnnnnnnnnnnnnnnnnnnnnnnnnnnnnnnnnnnnnnnnnnnnnnnnnnnnnnnnnnnnnnnnnnnnnnnnnnnnnnnnnnnnnnnnnnnnnnnnnnnnnnnnggctctgttccatgggaaaatcatagacacaagtttttctctaccattctataagcgtatcttgagcaaaccagttggactcaaggatttagaatctattgatccagaattttacaattctctcatctgggttaannnnnnnnnnnnnnnnnnnnnnnnnnnnnnnnnnnnnnnnnnnnnnnnnnnnnnnnnnnnnnnnnnnnnnnnnnnnnnnnnnnnnnnnnnnnnnnnnnnnnnnnnnnnnnnnnnnnnnnnnnnnnnnnnnnnnnnnnnnnnnnnnnnnnnnnnnnnnnnnnnnnnnnnnnnnnnnnnnnnnnnnnnnnnnnnnnnnnnnnnnnnnnnnnnnnnnnnnnnnnnnnnnnnnnnnnnnnnnnnnnnnnnnnnnnnnnnnnnnnnnnnnnnnnnnnnnnnnnnnnnnnnnnnnnnnnnnnnnnnnnnnnnnnnnnnnnnnnnnnnnnnnnnnnnnnnnnnnnnnnnnnnnnnnnnnnnnnnnnnnnnnnnnnnnnnnnnnnnnnnnnnnnnnnnnnnnnnnnnnnnnnnnnnnnnnnnnnnnnnnnnnnnnnnnnnnnnnnnnnnnnnnnnnnnnnnnnnnnnnnnggagcaatggaccacagaaattctgcattgaaaaagttgggaaagaaaattggctacccagaagtcatacctg

SEQ ID NO: 31693 - DNA, 838 bp, Macaca Mulatta
  misc_feature (1)...(838): n = A,T,C or G
ggccaaactgcaggggcacgtggagccgctgaggaagcacctggaggctgtgcagaagatgaaagccaaggaggagaggcgaatgacggaactgaagnnnnnnnnnnnnnnnnnnnnnnnnnnnnnnnnnnnnnnnnnnnnnnnnnnnnnnnnnnnnnnnnnnnnnnnnnnnnnnnnnnnnnnnnnnnnnnnnnnnnnnnnnnnnnnnnnnnnnnnnnnnnnnnnnnnnnnnnnnnnnnnnnnnnnnnnnnnnnnnnnnnnnnnnnnnnnnnnnnnnnnnnnnnnnnnnnnnnnnnnnnnnnnnnnnnnnnnnnnnnnnnnnnnnnnnnnnnnnnnnnnnnnnnnnnnnnnnnnnnnnnnnnnnnnnnnnnnnnnnnnnnnnnnnnnnnnnnnnnnnnnnnnnnnnnnnnnnnnnnnnnnnnnnnnnnnnnnnnnnnnnnnnnnnnnnnnnnnnnnnnnnnnnnnnnnnnnnnnnnnagtggacctgacgctggaccctgacacggctcacccggccctgatgctgtcccctgaccgccggggggtccgcctggcagagcggcggcaggaggttgctgaccatcccaagcgcttctcggccgactgctgcgtactgggggcccagggcttccgctctggccggcactactgggaggtagaggtgggcgggcggcggggatgggcggtgggcgctgcccgtgaatccacccatcataaggaaaaggtgggccctgggggttcctccgtggacggcggggatgccagctcctcacgccaccaccatcgctaacgggcggctccacctgccccagcagcctctgctccagcgggaggtgtg

SEQ ID NO: 31694 - DNA, 857 bp, Macaca Mulatta
  misc_feature (1)...(857): n = A,T,C or G
agctgtggccctatatgattaccaaggaggtaggttgggagtggcctgaggagcctggtacctgcaggcncctgatataagacaaggggacgtgggagaagagacattcatgtctgaccattctaatatcccctcaactttctcctcagagggaagtgatgagctttcctttgatccggacgacgtaatcactgacattgagatggtggacgagggctggtggcggggacgttgccatggccactttggactcttccctgcaaattatgtcaagcttctggagtgactggagctcactgtccactgcaactgtgatttcccatgtccaaagtggctctgcctccaccccctccctattccttttgcagatgtctaaccagatgagattctggacagacttccctctcccgcttcattaagggcttggggcagagatagcatggggaaggaggtccccttccccaagagtcctctctaccctggatgagctcgtggacatttctcttgtggtcttgcctccttccccatgaacacctctctaccaccccaagttctgctctagtcctctatgagctctgggcttcctggtttgtttacccggaaaagtacgtctagattgtgtggtttgcctggttgtgctatttgcccactttccttccctgaagaaatatctctgaaccttctttctgttcagtcctaaaattcgaaataaagtgagactatggttcacctgtatgctgaggtaaataatactttttgtgtggccctcatggccccaaataaagaggctccaacctttcctcttgcagacatatccaggagaattgctcttaccactgccaattctcctgcaccct

SEQ ID NO: 31695 - DNA, 481 bp, Macaca Mulatta
  misc_feature (1)...(481): n = A,T,C or G
agatatcagcccaccagcacaaggagtggaccacaggcaagtgcagaaagaactaggagatgtccttgtccgtcttcataatccagttgtactgactcccaccactgttcaggtcacatggacggtnnnnnnnnnnnnnnnnnnnnnnnnnnnnnnnnnnnnnnnnnnnnnnnnnnnnnnnnnnnnnnnnnnnnnnnnnnnnnnnnnnnnnnnnnnnnnnnnnnnnnnnnnnnnnnnnnnnnnnnnnnnnnnnnnnnnnnnnnnnnnnnnnnnnnnnnnnnnnnnnnnnnnnnnnnnnnnnnnnnnnnnnnnnnnnnnnnnnnnnnnnnnnnnnnnnnnnnnnnnnnnnnnnnnagccccaagtgcccctccacagtctgtcactgtactgacagttggaagctacaatagcacaagtattagtgtttcctgggatcctcctcctccagatcaccagaatggaattctccaagaatacaag

SEQ ID NO: 31696 - DNA, 406 bp, Macaca Mulatta
  misc_feature (1)...(406): n = A,T,C or G
aatgaaaaatctactactcctgtttcaaagtccaatacccctactccacgaactgatgcgcccaccccaggcagtaactctactcccggattgaggcctgtacctggaaaaccaccaggagttgaccctttggngcctcaagcctaaggaccccaatggcagtaccctgtccatatcccactccatttgggatcgtgccccatgctggaatgaacggagagctgaccagccccggagcggcctatgctgggctccacaacatctcccctcagatgagcgcannnnnnnnnnnnnnnnnnnnnnnnnnnnnnnnnnnnnnnnnnnnnnnggtgggatttgatccacaccatcacatgcgtgtgccagcaatacctccaaacctgacaggcattccaggaggaaaacc

SEQ ID NO: 31697 - DNA, 305 bp, Macaca Mulatta
  misc_feature (1)...(305): n = A,T,C or G
ggctgaggcgggaatggctgctatactgcagcgcgtcgagcggctgtccaatcgagtcgtgcgtgtgttgggctgtaacccgggtcccatgaccctccagggcactaacacctacctagtggggaccggccccaggnnnaggagaatcctcattgacactggagaaccagcaattccagaatatatccgctgtttaaagcaggctctaactgaatttaacacagcaatccaggaaattgtagtgactcactggcaccacgatcattctggaggcataggagatatttgtaaaagcatcaataatg

SEQ ID NO: 31698 - DNA, 1071 bp, Macaca Mulatta
  misc_feature (1)...(1071): n = A,T,C or G
aagagtgaagaatatgttgcttaagtccaactgtgttttggaagcttttggaaatgccaaaaccaaccgtaatgacaactccagcaggtttggaaaatacatggatatcaactttgacttcaagggtgaccctattggtgggcatatcaataactacttactggaaaagnnnnnnnnnnnnnnnnnnnnnnnnnnnnnnnnnnnnnnnnnnnnnnnnnnnnnnnnnnnnnnnnnnnnnnnnnnnnnnnnnnnnnnnnnnnnnnnnnnnnnnnnnnnnnnnnnnnnnnnnnnnnnnnnnnnnnnnnnnnnnnnnnnnnnnnnnnnnnnnnnnnnnnnnnnnnnnnnnnnnnnnnnnnnnnnnnnnnnnnnnnnnnnnnnnnnnnnnnnnnnnnnnnnnnnnnnnnnnnnnnnnnnnnnnnnnnnnnnnnnnnnnnnnnnnnnnnnnnnnnnnnnnnnnnnnnnnnnnnnnnnnnnnnnnnnnnnnnnnnnnnnnnnnnnnnnnnnnnnnnnnnnnnnnnnnnnnnnnnnnnnnnnnnnnnnnnnnnnnnnnnnnnnnnnnnnnnnnnnnnnnnnnnnnnnnnnnnnnnnnnnnnnnnnnnnnnnnnnnnnnnnnnnnnnnnnnnnnnnnnnnnnnnnnnnnnnnnnnnnnnnnnnnnnnnnnnnnnnnnnnnnnnnnnnnnnnnnnnnnnnnnnnnnnnnnnnnnnnnnnnnnnnnnnnnnnnnnnnnnnnnnnnnnnnnnnnnnnnnnnnnnnnnnnnnnnnnnnnnnnnnnnnnnnnnnnnnnnnnnnnnnnnnnnnnnnnnnnnnnnnnnnnnnnnnnnnnnnnnnnnnnnnnnnnnnnnnnnnnnnnnnnnnnnnnnnnnnnnnnnnnnnnnnnnnnnnnnnnnnnnnnnnnnnnnnnattgactacttcaacaatcagatcattgttgaccttgtggagcagcagcacaaagggatcattgcaatcctcgatgacgcttgcatgaatgtcggcaaagtcactgatgaaatgtttcttgaagcacttaacagtaaattaggcaaacatggccatttttccagccgaaa

SEQ ID NO: 31699 - DNA, 648 bp, Macaca Mulatta
ttgttatttgaagaggaatagtatagatttgagaagtatgaaagtagatgtcaaatcttttctctcatcctaaaacctttttttttctttgatactaggtaaaagctgctgaaacatgtcaagagccaaaggaattcagattgccgaaaggccatcagtttggtatgataaatatgaagagcattcccaaaggcaaaatttccgttgtagaagcattgacacttctcaataatcataaactttatccagaaacctggactgctgagaaaatagtgcaagaataccagttagaaaagaaagatgtgaattctcttcttaagtattttgttacttttgaagtcaaaatcttcactcctgaagacaagaaggcaatacaatcaaaatgaagaaaatcacaaaaatttcctatgtgtactcctcatccctcatcctgtatattttctctttttttgcatattaaattatgttaattaccaaatatttaatgctctcatcatgaggccatattcttaatatttattgagctccctgacttttcaagattgccatagaatgtattttgttttattataatttggtttaggcatatttcatatgtgcatgtcagcatgactaatcggcacatctgtacctttattatggtgaaaa

SEQ ID NO: 31700 - DNA, 4216 bp, Macaca Mulatta
  misc_feature (1)...(4216): n = A,T,C or G
gatgggacgcctatgcctgacagctacccaacaaccccatcttcaactgatgcagctacatctgagtccaaggagacccttggcactctgcagtcctcacaacagcaaccaacactcccaaccccaccagctttgggagaggttcctcaggagctgcagtccccagctggagaagggggcagctctacacagctattgatgcctgtagagccagaggaattgggtcccacaaggccaagtggggaagcagaaacaacgcagatggagttatccccagctcccactataannnnnnnnnnnnnnnnnnnnnnnnnnnnnnnnnnnnnnnnnnnnnnnnnnnnnnnnnnnnnnnnnnnnnnnnnnnnnnnnnnnnnnnnnnnnnnnnnnnnnnnnnnnnnnnnnnnnnnnnnnnnnnnnnnnnnnnnnnnnnnnnnnnnnnnnnnnnnnnnnnnnnnnnnnnnnnnnnnnnnnnnnnnnnnnnnnnnnnnnnnnnnnnnnnnnnnnnnnnnnnnnnnnnnnnnnnnnnnnnnnnnnnnnnnnnnnnnnnnnnnnnnnnnnnnnnnnnnnnnnnnnnnnnnnnnnnnnnnnnnnnnnnnnnnnnnnnnnnnnnnnnnnnnnnnnnnnnnnnnnnnnnnnnnnnnnnnnnnnnnnnnnnnnnnnnnnnnnnnnnnnnnnnnnnnnnnnnnnnnnnnnnnnnnnnnnnnnnnnnnnnnnnnnnnnnnnnnnnnnnnnnnnnnnnnnnnnnnnnnnnnnnnnnnnnnnnnnnnnnnnnnnnnnnnnnnnnnnnnnnnnnnnnnnnnnnnnnnnnnnnnnnnnnnnnnnnnnnnnnnnnnnnnnnnnnnnnnnnnnnnnnnnnnnnnnnnnnnnnnnnnnnnnnnnnnnnnnnnnnnnnnnnnnnnnnnnnnnnnnnnnnnnnnnnnnnnnnnnnnnnnnnnnnnnnnnnnnnnnnnnnnnnnnnnnnnnnnnnnnnnnnnnnnnnnnnnnnnnnnnnnnnnnnnnnnnnnnnnnnnnnnnnnnnnnnnnnnnnnnnnnnnnnnnnnnnnnnnnnnnnnnnnnnnnnnnnnnnnnnnnnnnnnnnnnnnnnnnnnnnnnnnnnnnnnnnnnnnnnnnnnnnnnnnnnnnnnnnnnnnnnnnnnnnnnnnnnnnnnnnnnnnnnnnnnnnnnnnnnnnnnnnnnnnnnnnnnnnnnnnnnnnnnnnnnnnnnnnnnnnnnnnnnnnnnnnnnnnnnnnnnnnnnnnnnnnnnnnnnnnnnnnnnnnnnnnnnnnnnnnnnnnnnnnnncaggccttctggcagtaatgtagatactctcctccgcctccgaggacggctccttctggaccacgaagccctttcttgtctcctggtcctactttttgtggatgagccaaagctcaatactagccgtctacaccgagtactgagaaatctctgctaccatgcccagacccgccactgggtcatccgcagtctgctctccatcttgcagcgcagcagtgagagtgagctatgcattgaaacacccaaactcactacaagtgaggaaaagggcaaaaagtcgagcaagagctgtgggtcaagtagccatgagannnnnnnnnnnnnnnnnnnnnnnnnnnnnnnnnnnnnnnnnnnnnnnnnnnnnnnnnnnnnnnnnnnnnnnnnnnnnnnnnnnnnnnnnnnnnnnnnnnnnnnnnnnnnnnnnnnnnnnnnnnnnnnnnnnnnnnnnnnnnnnnnnnnnnnnnnnnnnnnnnnnnnnnnnnnnnnnnnnnnnnnnnnnnnnnnnnnnnnnnnnnnnnnnnnnnnnnnnnnnnnnnnnnnnnnnnnnnnnnnnnnnnnnnnnnnnnnnnnnnnnnnnnnnnnnnnnnnnnnnnnnnnnnnnnnnnnnnnnnnnnnnnnnnnnnnnnnnnnnnnnnnnnnnnnnnnnnnnnnnnnnnnnnnnnnnnnnnnnnnnnnnnnnnnnnnnnnnnnnnnnnnnnnnnnnnnnnnnnnnnnnnnnnnnnnnnnnnnnnnnnnnnnnnnnnnnnnnnnnnnnnnnnnnnnnnnnnnnnnnnnnnnnnnnnnnnnnnnnnnnnnnnnnnnnnnnnnnnnnnnnnnnnnnnnnnnnnnnnnnnnnnnnnnnnnnnnnnnnnnnnnnnnnnnnnnnnnnnnnnnnnnnnnnnnnnnnnnnnnnnnnnnnnnnnnnnnnnnnnnnnnnnnnnnnnnnnnnnnnnnnnnnnnnnnnnnnnnnnnnnnnnnnnnnnnnnnnnnnnnnnnnnnnnnnnnnnnnnnnnnnnnnnnnnnnnnnnnnnnnnnnnnnnnnnnnnnnnnnnnnnnnnnnnnnnnnnnnnnnnnnnnnnnnnnnnnnnnnnnnnnnnnnnnnnnnnnnnnnnnnnnnnnnnnnnnnnnnnnnnnnnnnnnnnnnnnnnnnnnnnnnnnnnnnnnnnnnnnnnnnnnnnnnnnnnnnnnnnnnnnnnnnnnnnnnnnnnnnnnnnnnnnnnnnnnnnnnnnnnnnnnnnnnnnnnnnnnnnnnnnnnnnnnnnnnnnnnnnnnnnnnnnnnnnnnnnnnnnnnnnnnnnnnnnnnnnnnnnnnnnnnnnnnnnnnnnnnnnnnnnnnnnnnnnnnnnnnnnnnnnnnnnnnnnnnnnnnnnnnnnnnnnnnnnnnnnnnnnnnnnnnnnnnnnnnnnnnnnnnnnnnnnnnnnnnnnnnnnnnnnnnnnnnnnnnnnnnnnnnnnnnnnnnnnnnnnnnnnnnnnnnnnnnnnnnnnnnnnnnnnnnnnnnnnnnnnnnnnnnnnnnnnnnnnnnnnnnnnnnnnnnnnnnnnnnnnnnnnnnnnnnnnnnnnnnnnnnnnnnnnnnnnnnnnnnnnnnnnnnnnnnnnnnnnnnnnnnnnnnnnnnnnnnnnnnnnnnnnnnnnnnnnnnnnnnnnnnnnnnnnnnnnnnnnnnnnnnnnnnnnnnnnnnnnnnnnnnnnnnnnnnnnnnnnnnnnnnnnnnnnnnnnnnnnnnnnnnnnnnnnnnnnnnnnnnnnnnnnnnnnnnnnnnnnnnnnnnnnnnnnnnnnnnnnnnnnnnnnnnnnnnnnnnnnnnnnnnnnnnnnnnnnnnnnnnnnnnnnnnnnnnnnnnnnnnnnnnnnnnnnnnnnnnnnnnnnnnnnnnnnnnnnnnnnnnnnnnnnnnnnnnnnnnnnnnnnnnnnnnnnnnnnnnnnnnnnnnnnnnnnnnnnnnnnnnnnnnnnnnnnnnnnnnnnnnnnnnnnnnnnnnnnnnnnnnnnnnnnnnnnnnnnnnnnnnnnnnnnnnnnnnnnnnnnnnnnnnnnnnnnnnnnnnnnnnnnnnnnnnnnnnnnnnnnnnnnnnnnnnnnnnnnnnnnnnnnnnnnnnnnnnnnnnnnnnnnnnnnnnnnnnnnnnnnnnnnnnnnnnnnnnnnnnnnnnnnnnnnnnnnnnnnnnnnnnnnnnnnnnnnnnnnnnnnnnnnnnnnnnnnnnnnnnnnnnnnnnnnnnnnnnnnnnnnnnnnnnnnnnnnnnnnnnnnnnnnnnnnnnnnnnnnnnnnnnnnnnnnnnnnnnnnnnnnnnnnnnnnnnnnnnnnnnnnnnnnnnnnnnnnnnnnnnnnnnnnnnnnnnnnnnnnnnnnnnnnnnnnnnnnnnnnnnnnnnnnnnnnnnnnnnnnnnnnnnnnnnnnnnnnnnnnnnnnnnnnnnnnnnnnnnnnnnnnnnnnnnnnnnnnnnnnnnnnnnnnnnnnnnnnnnnnnnnnnnnnnnnnnnnnnnnnnnnnnnnnnnnnnnnnnnnnnnnnnnnnnnnnnnnnnnnnnnnnnnnnnnnnnnnnnnnnnnnnnnnnnnnnnnnnnnnnnnnnnnnnnnnnnnnnnnnnnnnnnnnnnnnnnnnnnnnnnnnnnnnnnnnnnnnnnnnnnnnnnnnnnnnnnnnnnnnnnnnnnnnnnnnnnnnnnnnnnnnnnnnnnnnnnnnnnnnnnnnnnnnnnnnnnnnnnnnnnnnnnnnnnnnnnnnnnnnnnnnnnnnnnnnnnnnnnnnnnnnnnnnnnngagatgttaaaccctagtatgccttgtcccttcctcccttgtgatcgggtcccttacaccatcaatccatctccccattgcaaccccaaccacttaagttacttcaagtttgtcggacgcattgtggccaaaagctgtatatgacaaccgtcttctggagtgttactttcctcgatccttttacaaacacatcttgggcaagtcagtca

SEQ ID NO: 31701 - DNA, 783 bp, Macaca Mulatta
  misc_feature (1)...(783): n = A,T,C or G
actggtgagaaaccatacaagtgcccagaggagctgtgcagcaaggccttcaagacctcaggagacctgcagaagcatgtccgtacccacactggtngaacgcccgttccggtgcccttttgagggctgtggccgctccttcaccacgtccaacatccgcaaggtacatgtgcgcaccctcacaggcgnnnnnnnnnnnnnnnnnnnnnnnnnnnnnnnnnnnnnnnnnnnnnnnnnnnnnnnnnnnnnnnnnnnnnnnnnnnnnnnnnnnnnnnnnnnnnnnnnnnnnnnnnnnnnnnnnnnnnnnnnnnnnnnnnnnnnnnnnnnnnnnnnnnnnnnnnnnnnnnnnnnnnnnnnnnnnnnnnnnnnnnnnnnnnnnnnnnnnnnnnnnnnnnnnnnnnnnnnnnnnnnnnnnnnnnnnnnnnnnnnnnnnnnnnnnnnnnnnnnnnnnnnnnnnnnnnnnnnnnnnnnnnnnnnnnnnnnnnnnnnnnnnnnnnnnnnnnnnnnnnnnnnnnnnnnnnnnnnnnnnnnnnnnnnnnnnnnnnnnnnnnnnnnnnnnnnnnnnnnnnnnnnnnnnnnnnnnnnnnnnnnnnnnnnnnnnnnnnnnnnnnnnnnnnnnnnnnnnnnnnnnnnnnnnnnnnnnnnnnnnnnnnnnnnnnnnnnnnnnnngcaggtcagcctgtccccggaagacctccaggccctggggagtgccatcagtatggtcacccagcacagcagcaccactctcaccatccccagtcatgaaaacgacctggccac

SEQ ID NO: 31702 - DNA, 1303 bp, Macaca Mulatta
  misc_feature (1)...(1303): n = A,T,C or G
agagtggaagatggtgaacaccaagttaaaatgaaggccttcagnnnnnnnnnnnnnnnnnnnnnnnnnnnnnnnnnnnnnnnnnnnnnnnnnnnnnnnnnnnnnnnnnnnnnnnnnnnnnnnnnnnnnnnnnnnnnnnnnnnnnnnnnnnnnnnnnnnnnnnnnnnnnnnnnnnnnnnnnnnnnnnnnnnnnnnnnnnnnnnnnnnnnnnnnnnnnnnnnnnnnnnnnnnnnnnnnnnnnnnnnnnnnnnnnnnnnnnnnnnnnnnnnnnnnnnnnnnnnnnnnnnnnnnnnnnnnnnnnnnnnnnnnnnnnnnnnnnnnnnnnnnnnnnnnnnnnnnnnnnnnnnnnnnnnnnnnnnnnnnnnnnnnnnnnnnnnnnnnnnnnnnnnnnnnnnnnnnnnnnnnnnnnnnnnnnnnnnagatgttgccaagtaaaggaacaactttcttcttttgatatttcaccaagagaaaagctaatagatgccaaaanctggtttgcaagttcacagtaatttcatactggaaagacacatgtttattctgggctcagacgatctttttctgtcggataaagagttgtaaatctctgtcnnnnnnnnnnnnnnnnnnnnnnnnnnnnnnnnnnnnnnnnnnnnnnnnnnnnnnnnnnnnnnnnnnnnnnnnnnnnnnnnnnnnnnnnnnnnnnnnnnnnnnnnnnnnnnnnnnnnnnnnnnnnnnnnnnnnnnnnnnnnnnnnnnnnnnnnnnnnnnnnnnnnnnnnnnnnnnnnnnnnnnnnnnnnnnnnnnnnnnnnnnnnnnnnnnnnnnnnnnnnnnnnnnnnnnnnnnnnnnnnnnnnnnnnnnnnnnnnnnnnnnnnnnnnnnnnnnnnnnnnnnnnnnnnnnnnnnnnnnnnnnnnnnnnnnnnnnnnnnnnnnnnnnnnnnnnnnnnnnnnnnnnnnnnnnnnnnnnnnnnnnnnnnnnnnnnnnnnnnnnnnnnnnnnnnnnnnnnnnnnnnnnnnnnnnnnnnnnnnnnnnnnnnnnnnnnnnnnnnnnnnnnnnnnnnnnnnnnnnnnnnnnnnnnnnnnnnnnnnnnnnnnnnnnnnnnnnnnnnnnnnnnnnnnnnnnnnnnnnnnnnnnnnnnnnnnnnnnnnnnnnnnnnnnnnnnnnnnnnnnnnnnnnnnnnnnnnnnnnnnnnnnnnnnnnnnnnnnagaatcctctcgacagtcttgtatgagtgtacctggaatgtctgctggaacagtacttggtgctggtagtattggaacagatattgcaaatgaaattctggatttacagaggt

SEQ ID NO: 31703 - DNA, 197 bp, Macaca Mulatta
tactacccaatgggccacccagcatctgtccacctctacttccttgccgaccgcttccagggctttctgatcaagcatcatgctaccaatctggccgtgagcaaactggagactctggagacctgggtgatgccaaaaaaagtcttcaagatcgcaagcccacccagcgactttgggaggcttcagttttccgaggt

SEQ ID NO: 31704 - DNA, 1592 bp, Macaca Mulatta
  misc_feature (1)...(1592): n = A,T,C or G
gggagctgactggaaccggtaaagctcagttgtttctctgggctaactttaacaatgatttcttgagatcttgtagatgatactctccaagctctaaggaagaagtcaagcattaaagagacctggactggagaggagcctttttcaaaaaacaacaatgacaagagaaaattgggcccacaatgctctgagacaagagggccttgtgaaggggaaggatgatacctggaaatggggaaccagcttccaaggaagcagctcctctgtttgggagatctcccacctacactttagacaattacgttaccatgagacatctggaccccaggaggccctgagccggctcagggaactctgtcgccggtggctgagaccagaagcacgcaccaaggcacagatcctggagctgctggtgctggagcagtttctgagcatcctgcctggggagattcggacctgggtacagctccatcaccctggaagtggcgaggaggctgtggccctggtagaggagctgcagaaagaccttgatggaccagcaatacaagnnnnnnnnnnnnnnnnnnnnnnnnnnnnnnnnnnnnnnnnnnnnnnnnnnnnnnnnnnnnnnnnnnnnnnnnnnnnnnnnnnnnnnnnnnnnnnnnnnnnnnnnnnnnnnnnnnnnnnnnnnnnnnnnnnnnnnnnnnnnnnnnnnnnnnnnnnnnnnnnnnnnnnnnnnnnnnnnnnnnnnnnnnnnnnnnnnnnnnnnnnnnnnnnnnnnnnnnnnnnnnnnnnnnnnnnnnnnnnnnnnnnnnnnnnnnnnnnnnnnnnnnnnnnnnnnnnnnnnnnnnnnnnnnnnnnnnnnnnnnnnnnnnnnnnnnnnnnnnnnnnnnnnnnnnnnnnnnnnnnnnnnnnnnnnnnnnnnnnnnnnnnnnnnnnnnnnnnnnnnnnnnnnnnnnnnnnnnnnnnnnnnnnnnnnnnnnnnnnnnnnnnnnnnnnnnnnnnnnnnnnnnnnnnnnnnnnnnnnnnnnnnnnnnnnnnnnnnnnnnnnnnnnnnnnnnnnnnnnnnnnnnnnnnnnnnnnnnnnnnnnttgaccatgagagactccataatggggagaagccatatgaatgtcaagagtgtgggaannnnnnnnnnnnnnnnnnnnnnnnnnnnnnnnnnnnnnnnnnnnnnnnnnnnnnnnnnnnnnnnnnnnnnnnnnnnnnnnnnnnnnnnnnnnnnnnnnnnnnnnnnnnnnnnnnnnnnnnnnnnnnnnnnnnnnnnnnnnnnnnnnnnnnnnnnnnnnnnnnnnnnnnnnnnnnnnnnnnnnnnnnnnnnnnnnnnnnnnnnnnnnnnacatcagagaactcatactggagagagaccctacgcatgtgaggaatgtgggaaagcctttagtcgtagttcattccttgttcaacatcaaagaattcacactggagtgaaaccatatggatgtgagcagtgtgggaaaacatttcgatgtcgatcatttcttactcagcatcaaagagttcacactggagagaaacgttataaatgtaatgaatgtgggaattccttccgcaataactgacatctcactgaacac

SEQ ID NO: 31705 - DNA, 179 bp, Macaca Mulatta
ggcatcactgtccacatctccctaccaagatttatgataaaacagagaaaccatgtcttctctccgaatataccgagaactacccttgctatcactcttacctgcccagagagtccttcaagccaaggcgggaataccagaaagggtctataccaatggaaggcctgactacatcaagg

SEQ ID NO: 31706 - DNA, 276 bp, Macaca Mulatta
cctgttcctgccgcgtgctcagcctcaactgctgagcgcgctcctctcccggccgcgggcgggcagggctttggggacgcggggcgcttttcgggcgggtgatctctaacagggcggcttcccaggactgggggcgggcggaggttgcaggaggtgggagttcagggagacctggcttgggctaaactcgaaatacaatatatataggctgctcgaaggtgtgctgctgtttctgtaaaggtcccgttagttttcgatgccttcgccacagagtca

SEQ ID NO: 31707 - DNA, 3703 bp, Macaca Mulatta
  misc_feature (1)...(3703): n = A,T,C or G
ttatggctgattgtcctcacacaattggtgttgaatttggtacaagaataatcgaagttagtggccaaaaaataaaactgcagatttgggatacggcaggacaggagcgatttagggctgttacacggagctactacagaggagctgcaggagctcttatggtctatgatatcactannnnnnnnnnnnnnnnnnnnnnnnnnnnnnnnnnnnnnnnnnnnnnnnnnnnnnnnnnnnnnnnnnnnnnnnnnnnnnnnnnnnnnnnnnnnnnnnnnnnnnnnnnnnnnnnnnnnnnnnnnnnnnnnnnnnnnnnnnnnnnnnnnnnnnnnnnnnnnnnnnnnnnnnnnnnnnnnnnnnnnnnnnnnnnnnnnnnnnnnnnnnnnnnnnnnnnnnnnnnnnnnnnnnnnnnnnnnnnnnnnnnnnnnnnnnnnnnnnnnnnnnnnnnnnnnnnnnnnnnnnnnnnnnnnnnnnnnnnnnnnnnnnnnnnnnnnnnnnnnnnnnnnnnnnnnnnnnnnnnnnnnnnnnnnnnnnnnnnnnnnnnnnnnnnnnnnnnnnnnnnnnnnnnnnnnnnnnnnnnnnnnnnnnnnnnnnnnnnnnnnnnnnnnnnnnnnnnnnnnnnnnnnnnnnnnnnnnnnnnnnnnnnnnnnnnnnnnnnnnnnnnnnnnnnnnnnnnnnnnnnnnnnnnnnnnnnnnnnnnnnnnnnnnnnnnnnnnnnnnnnnnnnnnnnnnnnnnnnnnnnnnnnnnnnnnnnnnnnnnnnnnnnnnnnnnnnnnnnnnnnnnnnnnnnnnnnnnnnnnnnnnnnnnnnnnnnnnnnnnnnnnnnnnnnnnnnnnnnnnnnnnnnnnnnnnnnnnnnnnnnnnnnnnnnnnnnnnnnnnnnnnnnnnnnnnnnnnnnnnnnnnnnnnnnnnnnnnnnnnnnnnnnnnnnnnnnnnnnnnnnnnnnnnnnnnnnnnnnnnnnnnnnnnnnnnnnnnnnnnnnnnnnnnnnnnnnnnnnnnnnnnnnnnnnnnnnnnnnnnnnnnnnnnnnnnnnnnnnnnnnnnnnnnnnnnnnnnnnnnnnnnnnnnnnnnnnnnnnnnnnnnnnnnnnnnnnnnnnnnnnnnnnnnnnnnnnnnnnnnnnnnnnnnnnnnnnnnnnnnnnnnnnnnnnnnnnnnnnnnnnnnnnnnnnnnnnnnnnnnnnnnnnnnnnnnnnnnnnnnnnnnnnnnnnnnnnnnnnnnnnnnnnnnnnnnnnnnnnnnnnnnnnnnnnnnnnnnnnnnnnnnnnnnnnnnnnnnnnnnnnnnnnnnnnnnnnnnnnnnnnnnnnnnnnnnnnnnnnnnnnnnnnnnnnnnnnnnnnnnnnnnnnnnnnnnnnnnnnnnnnnnnnnnnnnnnnnnnnnnnnnnnnnnnnnnnnnnnnnnnnnnnnnnnnnnnnnnnnncattatgctggaaaaagctcctagcatcagaggattaacactagcagattctgttccatctttgcactgttgcttacctgctgattttcttaactgttcttgtgcaatcgacaatgtgctaacctgattttctctttttgtaaacgtttttgcattacaggctgcattcttgccttactgtataggaaaagaaaaaaggctgggtttattattgcacattttaagcttttatacctttatcttcttgtaatggtcagattctgaactggacagtcagaaccacaggtctgctgttaagggattttaaattgtgcatttttaacactacagtgaaataagatatccctgtgttcatagtatgaggggctgttttatgtcatgttggcataaattgtttcataaaagggaaagtgtttctaaaggtgnnnnnnnnnnnnnnnnnnnnnnnnnnnnnnnnnnnnnnnnnnnnnnnnnnnnnnnnnnnnnnnnnnnnnnnnnnnnnnnnnnnnnnnnnnnnnnnnnnnnnnnnnnnnnnnnnnnnnnnnnnnnnnnnnnnnnnnnnnnnnnnnnnnnnnnnnnnnnnnnnnnnnnnnnnnnnnnnnnnnnnnnnnnnnnnnnnnnnnnnnnnnnnnnnnnnnnnnnnnnnnnnnnnnnnnnnnnnnnnnnnnnnnnnnnnnnnnnnnnnnnnnnnnnnnnnnnnnnnnnnnnnnnnnnnnnnnnnnnnnnnnnnnnnnnnnnnnnnnnnnnnnnnnnnnnnnnnnnnnnnnnnnnnnnnnnnnnnnnnnnnnnnnnnnnnnnnnnnnnnnnnnnnnnnnnnnnnnnnnnnnnnnnnnnnnnnnnnnnnnnnnnnnnnnnnnnnnnnnnnnnnnnnnnnnnnnnnnnnnnnnnnnnnnnnnnnnnnnnnnnnnnnnnnnnnnnnnnnnnnnnnnnnnnnnnnnnnnnnnnnnnnnnnnnnnnnnnnnnnnnnnnnnnnnnnnnnnnnnnnnnnnnnnnnnnnnnnnnnnnnnnnnnnnnnnnnnnnnnnnnnnnnnnnnnnnnnnnnnnnnnnnnnnnnnnnnnnnnnnnnnnnnnnnnnnnnnnnnnnnnnnnnnnnnnnnnnnnnnnnnnnnnnnnnnnnnnnnnnnnnnnnnnnnnnnnnnnnnnnnnnnnnnnnnnnnnnnnnnnnnnnnnnnnnnnnnnnnnnnnnnnnnnnnnnnnnnnnnnnnnnnnnnnnnnnnnnnnnnnnnnnnnnnnnnnnnnnnnnnnnnnnnnnnnnnnnnnnnnnnnnnnnnnnnnnnnnnnnnnnnnnnnnnnnnnnnnnnnnnnnnnnnnnnnnnnnnnnnnnnnnnnnnnnnnnnnnnnnnnnnnnnnnnnnnnnnnnnnnnnnnnnnnnnnnnnnnnnnnnnnnnnnnnnnnnnnnnnnnnnnnnnnnnnnnnnnnnnnnnnnnnnnnnnnnnnnnnnnnnnnnnnnnnnnnnnnnnnnnnnnnnnnnnnnnnnnnnnnnnnnnnnnnnnnnnnnnnnnnnnnnnnnnnnnnnnnnnnnnnnnnnnnnnnnnnnnnnnnnnnnnnnnnnnnnnnnnnnnnnnnnnnnnnnnnnnnnnnnnnnnnnnnnnnnnnnnnnnnnnnnnnnnnnnnnnnnnnnnnnnnnnnnnnnnnnnnnnnnnnnnnnnnnnnnnnnnnnnnnnnnnnnnnnnnnnnnnnnnnnnnnnnnnnnnnnnnnnnnnggccctcagattagtaattggtgcttagtactatttacacttaaatagatgtttcagtacaatgttcaagtnnnnnnnnnnnnnnnnnnnnnnnnnnnnnnnnnnnnnnnnnnnnnnnnnnggttggtggtgtacacgttaataggtagtacaatttctttggaaagatgtcttttgaagccagatgttaatgttcatacattacctcctttctcaaattccataagacaacagttttggggaacttttttgcccatgtgtctgctgttttaagtgtgattttaaaaacatgagtggttcagttcattcccttaaacagaagaaaagaccaaataattactttccattcctcttcatgtgggagtacatggttcatgtggcattttagagaaaagaaaatttatcctcattcaacacaggcccagaaaattgtgtcccagaaggatgtcaataattgtgactaggccaggccttttagcattttgctaagacttgaaacaaaaaatgtaaatacaaaagaaatcaagttttgttttgaaagtagatgccttctagaacttactgtgtattaataaattgtcact

SEQ ID NO: 31708 - DNA, 823 bp, Macaca Mulatta
gggaggggcggccggctttgttgggtgtgcttggtttggtgtccctgcggctgaccgtgattggtgattcgcagcatcttcgtaaccgctaacaggtcaaaatgcagatcttcgtgaagaccctgaccggcaagaccatcacccttgaggtggagccctgtgacaccatcgaaaatgtgaaggccaaaatccaggataaggaaggcattccccccgaccagcagaggctcatctttgcatgcaagcagctggaatatggccgcactctttctgactacaacatccagaaagaatcgaccctgcaccttgtcctgcgcctgagaggtggtatgacaatcttcgtgaagaccctgaccggcaagacctcaccctggaagtggagcctagtgacaccatctcaaaatgtgaagggccaagatctcttgataaaaaaagcatccttttccgactattcacatgcttcgacttttctagggcaatcaactagaaagaatggcccactttcttttttgaataatcacatactcaaaaggaattcttaaccttgctcccttgtctcatgcgactgaaatatgttggtaaagacaatatttttcgatgataaaaccccgataatgggaaaaaacctatcaaccttgagatgatcgaatctcattttaataattcgaaatagaatattgttttaattgactatgaatacctgaaaaaaatgaaaggtctttattttatctgtacacaagatataagcttctaagctatttgcacgttcatgcacaaccattaatagattgtaacctgcccttctctctctctatttacaact

SEQ ID NO: 31709 - DNA, 716 bp, Macaca Mulatta
ggctgtttgttgaccacataattatttgtttacgtcatccgctggcacagagccttgatgaggtcagaaactgcttagccctgtgttcctggcactaacaatgcctgtcataaaaacaggcattcagtacatttttgatgatgaacaaattatacttatttccttggtatttgacaactagttgactgtatatgatgataattagaagattcactctgagaaatcatttaaaagagaaaacttattcaatgcaatctcaaatccctttacgcatcacactctcattttcttccagattcctggtgcccctgatgatgaagcagtacggatatttttagaatttgagagagttgaatcagcaattaaaggttagttgtacagctaaatattaaagaattaaaaagttgagtttacagccttaatgtttacaagtaaagttactgtttaattaaagttaaatctttataatgtcttataggatacctatattaactgtcttttgtttgcctttcagcggttgttgacttgaatgggaggtattttggtggacgggtggtaaaagcatgtttctacaatttggacaaattcagggtcttggatttggcagaacaagtttgattttaagaactagagcacgagtcatctcccggtgatccttaaatgaactgcaggctgagaaaagaagggaaaaaggtcacagccctcccatggctgtt

SEQ ID NO: 31710 - DNA, 968 bp, Macaca Mulatta
  misc_feature (1)...(968): n = A,T,C or G
tagctgccctggggtaaccgggactgtagagtagggaagagctcatggagcgcgcgaacgtaatacggaggcctctgatgaaggagtacgaaggccgaaaaggagccggcatttgatgagcgaaccnnnnnnnnnnnnnnnnnnnnnnnnnnnnnnnnnnnnnnnnnnnnnnnnnnnnnnnnnnnnnnnnnnnnnnnnnnnnnnnnnnnnnnnnnnnnnnnnnnnnnnnnnnnnnnnnnnnnnnnnnnnnnnnnnnnnnnnnnnnnnnnnnnnnnnnnnnnnnnnnnnnnnnnnnnnnnnnnnnnnnnnnnnnnnnnnnnnnnnnnnnnnnnnnnnnnnnnnnnnnnnnnnnnnnnnnnnnnnnnnnnnnnnnnnnnnnnnnnnnnnnnnnnnnnnnnnnnnnnnnnnnnnnnnnnnnnnnnnnnnnnnnnnnccctagccctaaccccagtaaggtcagagtggaaacatcggccatggttgatccaaaaggcagccaccccaggccttcacaaaaacccgttgactcggtnnngtgcctctaagcagagggaaggagctgctgcagaaggccatcagaaaccagnnnnnnnnnnnnnnnnnnnnnnnnnnnnnnnnnnnnnnnnnnnnnnnnnnnnnnnnnnnnnnnnnnnnnnnnnnnnnnnnnnnnnnnnnnnnnnnnnnnnnnnnnnnnnnnnnnnnnnnnnnnnnnnnnnnnnnnnnnnnnnnnnnnnnnnnnnnnnnnnnnnnnnnnnnnnnnnnnnnnnnnnnnnnnnnnnnnnnnnnnnnnnnnnnnnnnnnnnnnnnnnnnnnnnnnnnnnnnnnnnnnnnnnnnnnnnnnnnnnnnnnnnnnnnnccagagaatccaaggatggagagccaagcctgcgatcagctgcccgcaccatgcccaggaggaagaaaggctactgcgagtgctgccaagaggccttcgaggagctccatgt

SEQ ID NO: 31711 - DNA, 2164 bp, Macaca Mulatta
  misc_feature (1)...(2164): n = A,T,C or G
gtccggcgggcggtggcctctgtggtaggcggctggctgctgcgtctgcgcgaccgctactccttcttccacaagctcatccctctgctgctcagcagcctcagcgatgaggtgcccgaggtcagnnnnnnnnnnnnnnnnnnnnnnnnnnnnnnnnnnnnnnnnnnnnnnnnnnnnnnnnnnnnnnnnnnnnnnnnnnnnnnnnnnnnnnnnnnnnnnnnnnnnnnnnnnnnnnnnnnnnnnnnnnnnnnnnnnnnnnnnnnnnnnnnnnnnnnnnnnnnnnnnnnnnnnnnnnnnnnnnnnnnnnnnnnnnnnnnnnnnnnnnnnnnnnnnnnnnnnnnnnnnnnnnnnnnnnnnnnnnnnnnnnnnnnnnnnnnnnnnnnnnnnnnnnnnnnnnnnnnnnnnnnnnnnnnnnnnnnnnnnnnnnnnnnnnnnnnnnnnnnnnnnnnnnnnnnnnnnnnnnnnnnnnnnnnnnnnnnnnnnnnnnnnnnnnnnnnnnnnnnnnnnnnnnnnnnnnnnnnnnnnnnnnnnnnnnnnnnnnnnnnnnnnnnnnnnnnnnnnnnnnnnnnnnnnnnnnnnnnnnnnnnnnnnnnnnnnnnnnnnnnnnnnnnnnnnnnnnnnnnnnnnnnnnnnnnnnnnnnnnnnnnnnnnnnnnnnnnnnnnnnnnnnnnnnnnnnnnnnnnnnnnnnnnnnnnnnnnnnnnnnnnnnnnnnnnnnnnnnnnnnnnnnnnnnnnnnnnnnnnnnnnnnnnnnnnnnnnnnnnnnnnnnnnnnnnnnnnnnnnnnnnnnnnnnnnnnnnnnnnnnnnnnnnnnnnnnnnnnnnnnnnnnnnnnnnnnnnnnnnnnnnnnnnnnnnnnnnnnnnnnnnnnnnnnnnnnnnnnnnnnnnnnnnnnnnnnnnnnnnnnnnnnnnnnnnnnnnnnnnnnnnnnnnnnnnnnnnnnnnnnnnnnnnnnnnnnnnnnnnnnnnnnnnnnnnnnnnnnnnnnnnnnnnnnnnnnnnnnnnnnnnnnnnnnnnnnnnnnnnnnnnnnnnnnnnnnnnnnnnnnnnnnnnnnnnnnnnnnnnnnnnnnnnnnnnnnnnnnnnnnnnnnnnnnnnnnnnnnnnnnnnnnnnnnnnnnnnnnnnnnnnnnnnnnnnnnnnnnnnnnnnnnnnnnnnnnnnnnnnnnnnnnnnnnnnnnnnnnnnnnnnnnnnnnnnnnnnnnnnnnnnnnnnnnnnnnnnnnnnnnnnnnnnnnnnnnnnnnnnnnnnnnnnnnnnnnnnnnnnnnnnnnnnnnnnnnnnnnnnnnnnnnnnnnnnnnnnnnnnnnnnnnnnnnnnnnnnnnnnnnnnnnnnnnnnnnnnnnnnnnnnnnnnnnnnnnnnnnnnnnnnnnnnnnnnnnnnnnnnnnnnnnnnnnnnnnnnnnnnnnnnnnnnnnnnnnnnnnnnnnnnnnnnnnnnnnnnnnnnnnnnnnnnnnnnnnnnnnnnnnnnnnnnnnnnnnnnnnnnnnnnnnnnnnnnnnnnnnnnnnnnnnnnnnnnnnnnnnnnnnnnnnnnnnnnnnnnnnnnnnnnnnnnnnnnnnnnnnnnnnnnnnnnnnnnnnnnnnnnnnnnnnnnnnnnnnnnnnnnnnnnnnnnnnnnnnnnnnnnnnnnnnnnnnnnnnnnnnnnnnnnnnnnnnnnnnnnnnnnnnnnnnnnnnnnnnnnnnnnnnnnnnnnnnnnnnnnnnnnnnnnnnnnnnnnnnnnnnnnnnnnnnnnnnnnnnnnnnnnnnnnnnnnnnnnnnnnnnnnnnnnnnnnnnnnnnnnnnnnnnnnnnnnnnnnnnnnnnnnnnnnnnnnnnnnnnnnnnnnnnnnnnnnnnnnnnnnnnnnnnnnnnnnnnnnnnnnnnnnnnnnnnnnnnnnnnnnnnnnnnnnnnnnnnnnnnnnnnnnnnnnnnnnnnnnnnnnnnnnnnnnnnnnnnnnnnnnnnncagcttctgagtggattctgcacctttatgtgatttgttctgttcagcgagcggtctcccaaacctttacagctgatgtgaaattaaaagtaaatcacagctgctcnnnnnnnnnnnnnnnnnnnnnnnnnnnnnnnnnnnnnnnnnnnnnnnnnnnnnnnnnnnnnnnnnnnnnnnnnatcctgcttagatgcccaccaagaaagtttttacctatttaac

SEQ ID NO: 31712 - DNA, 340 bp, Macaca Mulatta
cagctcccatggggttgtgaagggtccacggaggggtgagatctggagggttggcagtaggggtctgatgttgctgatctccatggctgtgaacaaaatggctggtgaccacactccttctgcccaggtcggctggaaaactctgggaactgcagcatgagattgaggtgagaccagagcctctggactggagcagggtgccggggggagggtggagttggacagggcacccactaacagggtcttgcggccactgcccccacggggctcccagactggcctgtcgtcccccttccactccctggaccaccactcgggcccagctctgggacccttactt

SEQ ID NO: 31713 - DNA, 1037 bp, Macaca Mulatta
  misc_feature (1)...(1037): n = A,T,C or G
agatccaggccccagcctcagctgacattcgtgttttacgggggcaccagctctctatcacatgtttggtcatcacccccgatgactcggccatcttctctgctgccaaagactgcaccatcattaagtgnnnnnnnnnnnnnnnnnnnnnnnnnnnnnnnnnnnnnnnnnnnnnnnnnnnnnnnnnnnnnnnnnnnnnnnnnnnnnnnnnnnnnnnnnnnnnnnnnnnnnnnnnnnnnnnnnnnnnnnnnnnnnnnnnnnnnnnnnnnnnnnnnnnnnnnnnnnnnnnnnnnnnnnnnnnnnnnnnnnnnnnnnnnnnnnnnnnnnnnnnnnnnnnnnnnnnnnnnnnnctggcattccgcaggggcacccaccagctctacagcacatcccacgatcgctccgtgaaggtgtggaatgtggcggagaactcctatgtggagannnnnnnggacaccaggacgcagtggctgctctggatgccttgagccgggagtgctgtgtgacggctgggggccgggatgggactgtacgtgtgtagaagatccctgaggagtcccannnnnnnnnnnnnnnnnnnnnnnnnnnnnnnnnnnnnnnnnnnnnnnnnnnnnnnnnnnnnnnnnnnnnnnnnnnnnnnnnnngctctgtggccttgtggggcctctccaagaagcgaccacttgccntgcagcgtgaagctcacgggctgcggggagaaccaggcctggagcaacccttctggatatcgtcggtggcagccctcctcaacacagatctcgtggctacagnnnnnnnnnnnnnnnnnnnnnnnnnnnnnnnnnnnnnnnnnnnnnnnnnnnnnnnnnnnnnnnnnnnnnnnnnnnnnnnnnnnnnnnnnnnnnnnnnnnnnnnnnnnnnnnnnnnnnnnnnnnnnnnnnnnnnnnnnnnnnnnnnnnnnncaggcttggccgatggtggagaatcaaagaggctcggaattctgtctgcatcatcccactccgcagggtccccgtacccccagctgctggttcctg

SEQ ID NO: 31714 - DNA, 876 bp, Macaca Mulatta
  misc_feature (1)...(876): n = A,T,C or G
gcatccctggttccgctgtctgtgcatttagcatggatgacattgaaaaagtattcaaaggacggtttaaggaacagaaaactccagattctgtttggacagcagttcccgaagacaaagtcccaaagccaaggnaggcctggctgttgtgcaaaacacggcctcgctgaagcttataaaacctccatcgatttcccggatgaaaccctgtcattcatcaaatctcatcctctgatggactctgctgttccacccattgccgatgagccctggttcacaaagactcgggtcaggtnnnnnnnnnnnnnnnnnnnnnnnnnnnnnnnnnnnnnnnnnnnnnnnnnnnnnnnnnnnnnnnnnnnnnnnnnnnnnnnnnnnnnnnnnnnnnnnnnnnnnnnnnnnnnnnnnnnnnnnnnnnnnnnnnnnnnnnnnnnnnnnnnnnnnnnnnnnnnnnnnnnnnnnnnnnnnnnnnnnnnnnnnnnnnnnnnnnnnnnnnnnnnnnnnnnnnnnnnnnnnnnnnnnnnnnnnnnnnnnnnnnnnnnnnnnnnnnnnnnnnnnnnnnnnnnnnnnnnnnnnnnnnnnnnnnnnnnnnnnnnnnnnnnnnnnnnnnnnnnnnnnnnnnnnnnnnnnnnnnnnnnnnnnnnnnnnnnnnnnnnnnnnnnnnnnnnnnnnnnnnnnnnnnnnnnnnnnnnnnnnnnnnnnnnnnnnnnnnnnnnnnnnnnnnnnnnnnnnnnnnnnnnnnnnnnnnnnnnnnnnnnnnnnnnnnnnnnnnnnnnnnnnnnnnnnnnnnnnnnnnnnnnnnnnacatggaggtatcttcatcttctgttaccacaatggcaagtatcccagaaatcacacctaaagtgattgata

SEQ ID NO: 31715 - DNA, 610 bp, Macaca Mulatta
cgtgtggcagctgctccagatgtggaaaggtcacaagggctgctggctgcgggctcatgccaggcaggggcaggctgcctgagcgggtttgctgcggggctgccttgggctcccagccctgcctgcggtggtgcagccagcgctctgttcacacccgtctctgctgtcggcccgcaggcttcatcatctactttggctacggcctgtggcacagcgaggaggcgtccctggatgctgaccaagcaaggactcctgacggcaacttggaccagtgcaagtgacacacagccccgccccccggaagtggcagcagctccgagggacgcccccagaggaccgggaggcaccccccgctccccaccagtgcaacagaaaccacctgcatccacaccctcactgcagctgaaggtgcaattacttgaactgcagccccagcccaccctcggctctgcagccggctctccaggtcctggtcacctccagacagctgcttggctggggccactaggctgcagccggccactgtgtctcctcacttctctgaacaaacagttcctcccctatcagctcaaacgggatctgccacagcctcaggcagaacggaggtcac

SEQ ID NO: 31716 - DNA, 871 bp, Macaca Mulatta
  misc_feature (1)...(871): n = A,T,C or G
ctgagagatcctataacgcagtgttttggggaggcggaactgaatttttttcttaattatcatgtgacgggttctggatttaatggggggaaaagtgcggaaaaggacaagcatccaaactggcgaatttcctgatcttcgcgtccctctccgctctccggccggtggcgctgccagnnnnnnnnnnnnnnnnngatcctgcaacagcctctttaaactgtttaaatgagaatgtccttggctcagagagtactactcacctggcttttcacattactcttcttgatcatgttggtgttgaaactggatgagaaggcaccttggaactggttcctcatatttattccagtctggatatttgatactatccttcttgtcatgctgattgtgaaaatggctgggcggtgtaagtctggctttgaccctcgacatggatcacacaatattaaaaaaaaagcctggtacctcattgcaatgttacttaaattagccttctgcctcgcactctgtgctaaactggaacagtttactaccatgaatctatcctatgtcttcattcctttatgggccttgctgactggggctttaacagaactcggatataacgtcttttttgtgagagactgacttttaagtacatcatctcatttctattgctgttcaacaagttaccattaaagtgttctgaatctttcaagcttcaagaataccagagaactgagggaaaataacaaatgtagttttatactacttccataaaacaggattggtgaatcacggacttctagtcaacctacagcttaattattcagtatttgagttattgagatccttattgtctctatgtaaataaagtttgttttggacctca

SEQ ID NO: 31717 - DNA, 728 bp, Macaca Mulatta
  misc_feature (1)...(728): n = A,T,C or G
ggagagcagaggccaccccctcaagggaagactggaaaggagggctgggaccctgctgccctggcttccaagggccttgaggccccaccctcagannnnnnnnnnnnnaggagggagaagaagagtgtggccgtgactctgacctgtcagaggaatttgaggacctggggactgaggcatcttttcttcctggggtccctggggaggtggcggaacctctaggccaggtgcctcagctgctactggagcctgcagcctgggatcgggatggggagtctgatgggtttgcagatgaggaagaaagnnnnnnnnnnnnnnnnnnnnnnnnnnnnnnnnnnnnnnnccagaggctgggcggtgggggccaggatcctatgttggcagcctccaggccctgagtagctcccagagaggggacttcctggagtctgattctgtgggtgtcagtgtcccctgggatgacggcttgaggggtgcagtggctggtgcccccatgactgccctggaaactgagtcccaggacagtgctgagccttctggttcagaagaagagtcagaccctgtttccttggagagggaagacaaagtccttgggagtctggaggtccccggtgggatggaggactcaggcccaggggcagacatcattggtgttaatggccttaaaggaacttggaggagaagtcacagcatggaatgggggagagaggaacggactggagcagtct

SEQ ID NO: 31718 - DNA, 337 bp, Macaca Mulatta
gcgcactgccgccgcctcatctgctggcaggcgctgccgcagtgccagggggagccggagtgcagctacgcctacaaccagtacgccgaggcgtgcgcgccggtgctggcgcagcacggcgggggcgacgcgcccggggccgccgccgcagcagcagctttcccggcctcggccgcctccttctcgtcgcgctggcgctgcccgagccactgcatctcggccctcattcagctcaaccacacgcgccgcgggcccgcactggaggactgtgactgcgcgcaggacgagaactgcaagtccaccaagcgcgccattgagccgtgcctgccccggacga

SEQ ID NO: 31719 - DNA, 1425 bp, Macaca Mulatta
  misc_feature (1)...(1425): n = A,T,C or G
gctgggccccgtgtacacggaaggtgggttcgtggaaggcgtcaataagaagctcggcctcctgggcgactctgtggacatcttcaagggcatccccttcgcggctcccaccaaggccctggagaacccccagccacaccccggctggcaaggnagggaccctgaaggccaagtccttcaagaagagatgcctgcaggccaccatcacccaggacagcacctacggggatgaagactgcctgtacctcaacatctgggtgccccaggacaggaagcaagnagtctcccgggacctgcccgttatgatctggatctatggaggcgccttcctcatggggtccggccacggggccaacttcctcagcaactacttgtatgacggcgaggagattgccacacgcggaaacgtcatcgtggtcaccttcaactaccgtgtcggcccccttgggttcctcagcactggggacgccaacctgccaggnnnnnnnnnnnnnnnnnnnnnnnnnnnnnnnnnnnnnnnnnnnnnnnnnnnnnnnnnnnnnnnnnnnnnnnnnnnnnnnnnnnnnnnnnnnnnnnnnnnnnnnnnnnnnnnnnnnnnnnnnnnnnnnnnnnnnnnnnnnnnnnnnnnnnnnnnnnnnnnnnnnnnnnnnnnnnnnnnnnnnnnnnnnnnnnnnnnnnnnnnnnnnnnnnnnnnnnnnnnnnnnnnnnnnnnnnnnnnnnnnnnnnnnnnnnnnnnnnnnnnnnnnnnnnnnnnnnnnnnnnnnnnnnnnnnnnnnnnnnnnnnnnnnnnnnnnnnnnnnnnnnnnnnnnnnnnnnnnnnnnnnnnnnnnnnnnnnnnnnnnnnnnnnnnnnnnnnnnnnnnnnnnnnnnnnnnnnnnnnnnnnnnnnnnnnnnnnnnnnnnnnnnnnnnnnnnnnnnnnnnnnnnnnnnnnnnnnnnnnnnnnnnnnnnnnnnnnnnnnnnnnnnnnnnnnnnnnnnnnnnnnnnnnnnnnnnnnnnnnnnnnnnnnnnnnnnnnnnnnnnnnnnnnnnnnnnnnnnnnnnnnnnnnnnnnnnnnnnnnnnnnnnnnnnnnnnnnnnnnnnnnnnnnnnnnnnnnnnnnnnnnnnnnnnnnnnnnnnnnnnnnnnnnnnnnnnnnnnnnnnnnnnnnnnnnnnnnnnnnnnnnnnnnnnnnnnnnnnnnnnnnnnnnnnnnnnnnnnnnnnnnnnnnnnnnnnnnnnnnnnnnnnngagtgccaagacctacagctacctgttttcccatccctctcggatgcccgtctaccccaaatggatgggggcagaccatgcagatgacatccagtacgttttcgggaagcccttcgccacccccagcggctaccggccccaagacaggacagtctccaaggccatgatcgcctactggaccaactttgccaaaacagg

SEQ ID NO: 31720 - DNA, 820 bp, Macaca Mulatta
  misc_feature (1)...(820): n = A,T,C or G
gatttcggcctgagtaaggaggccattgaccacgacaagagagcgtactccttctgcgggacaatcgagtacatggcccccgaggtggtgaaccggcgagggcacacgcagagcgccgactggtggtctttcggcgtgctcatgnnnnnnnnnnnnnnnnnnnnnnnnnnnnnnnnnnnnnnnnnnnnnnnnnnnnnnnnnnnnnnnnnnnnnnnnnnnnnnnnnnnnnnnnnnnnnnnnnnnnnnnnnnnnnnnnnnnnnnnnnnnnnnnnnnnnnnnnnnnnnnnnnnnnnnnnnnnnnnnnnnnnnnnnnnnnnnnnnnnnnnnnnnnnnnnnnnnnnnnnnnnnnnnnnnnnnnnnnnnnnnnnnnnnnnnnnnnnnnnnnnnnnnnnnnnnnnnnnnnnnnnnnnnnnnnnnnnnnnnnnnnnnnnnnnnnnnnnnnnnnnnnnnnnnnnnnnnnnnnnnnnnnnnnnnnnnnnnnnnnnnnnnnnnnnnnnnnnnnnnnnnnnnnnnnnnnnnnnnnnnnnnnnnnnnnnnnnnnnnnnnnnnnnnnnnnnnnnnnnnnnnnnnnnnnnnnnnnnnnnnnnnnnnnnnnnnnnnnnnnnnnnnnnnnnnnnnnnnnnnnnnnnnnnnnnnnnnnnnnnnnnnnnnnnnnnnnnnnnnnnnnnnnnnnnnnnnnnnnnnnnnnnnnnnnnnnnnnnnnnnnnnnnnnnnnnnnnnnnnnnnnagatcatcgataagagcaagagagacccctcggaagagatcgagatcctgctgcggtacggccagcacccgaacatcatcaccctcaaagatg

SEQ ID NO: 31721 - DNA, 542 bp, Macaca Mulatta
ctcacctggtgatttactcacctacaccatcaatccatcttcccactgcaaccccaaccacctcagctacttcaagtttgtcggacgcattgtggtcaaagctgtatatgacaaccgtcttctggagtgctactttactcgattcttttacaaacacatcttgggcaagtcagtcagatatacagatatggagagtgaagattaccacttctaccagggtctggtttatctgctggaaaatgatgtctccacactaggctatgacctcaccttcagcactgaggtccaagagtttggagtgtgtgaagttcgtgacctcaaacccaatggggccaacatcttggtaacagaggagaataagaaggagtatgtacacctggtatgccagatgagaatgacaggagccatccgcaagcagctggcggctttcttagaaggcttctatgagatcattccaaagcgcctcatttccatcttcactgagcaggagttagagctgcttatatcaagactgcccaccattgacatcgatgatctgaaat

SEQ ID NO: 31722 - DNA, 539 bp, Macaca Mulatta
  misc_feature (1)...(539): n = A,T,C or G
caggcgacttcagaatgcccacactggcctcgacctgactgtgcctcagcaccaggaggtgcggggcaagatgatgtctggacacgtggagtaccagatcctggtggtgacccgcctggctgcgttcaagtcggccaagcacaggcccgaggatgtcgtccagttcttggtnnnnnnnnnnnnnnnnnnnnnnnnnnnnnnnnnnnnnnnnnnnnnnnnnnnnnnnnnnnnnnnnnnnnnnnnnnnnnnnnnnnnnnnnnnnnnnnnnnnnnnnnnnnnnnnnnnnnnnnnnnnnnnnnnnnnnnnnnnnnnnnnaggtaccagatccccaggggctgcagggctcaccagcagagattcctctgtcctggacggcacagacagccagaccgggaatgatgaagaggctttcgacttttttgagcagcaagaccaagtggcggaagagggtcctcctatccagggcctgaagggcgaggatgctgaggaatccttggaggaggaggaggcgctggaccctctgggcattatgcggttgg

SEQ ID NO: 31723 - DNA, 3818 bp, Macaca Mulatta
  misc_feature (1)...(3818): n = A,T,C or G
ctctgagctttgtaagtgagagataatacttgaatgaaaaggagaaagaaaatgagaaattgataaaagaactcactcaaaaactagagcagaacaaaaaaatgaaccgagattatacaaggaatgcttctaatctggaaagaaatgaccttcggattgaggatggcatctcatctacactgccgtccaaagaatcaagaaggaagggcgctctggactacctgaagcaggtggagaatgaaacaagaaacaaatcagaaaacgaaaagaaccgcaatcaggaagacaacaaagtcaaagaccttaaccaggagattgagaaacttaaaacacaaatcaaacactttgaatcgttggaagaagagcttaagaaaatgaaagccaaaaataatgaccttcaggataattacctaagtgagcaaaataaaaacaaattattagccagccaactggaggagataaagctacaaatcaagaaacagaaagagttagaaaatggggaggtagaaggggaagatgctttcctgtccagcaaaggcagacatgagaggactaagtttagaggccacggaagtgaggctcctgcgtccaggcacacagcacgggaactgtctcctcagcataagcgggaacgactccggaacagggagtttgctgtcaacaatgaaaactgttctctgagcaacaggcaggtttcttctcccagtttcgcccacaggagggcagnnnnnnnnnnnnnnnnnnnnnnnnnnnnnnnnnnnnnnnnnnnnnnnnnnnnnnnnnnnnnnnnnnnnnnnnnnnnnnnnnnnnnnnnnnnnnnnnnnnnnnnnnnnnnnnnnnnnnnnnnnnnnnnnnnnnnnnnnnnnnnnnnnnnnnnnnnnnnnnnnnnnnnnnnnnnnnnnnnnnnnnnnnnnnnnnnnnnnnnnnnnnnnnnnnnnnnnnnnnnnnnnnnnnnnnnnnnnnnnnnnnnnnnnnnnnnnnnnnnnnnnnnnnnnnnnnnnnnnnnnnnnnnnnnnnnnnnnnnnnnnnnnnnnnnnnnnnnnnnnnnnnnnnnnnnnnnnnnnnnnnnnnnnnnnnnnnnnnnnnnnnnnnnnnnnnnnnnnnnnnnnnnnnnnnnnnnnnnnnnnnnnnnnnnnnnnnnnnnnnnnnnnnnnnnnnnnnnnnnnnnnnnnnnnnnnnnnnnnnnnnnnnnnnnnnnnnnnnnnnnnnnnnnnnnnnnnnnnnnnnnnnnnnnnnnnnnnnnnnnnnnnnnnnnnnnnnnnnnnnnnnnnnnnnnnnnnnnnnnnnnnnnnnnnnnnnnnnnnnnnnnnnnnnnnnnnnnnnnnnnnnnnnnnnnnnnnnnnnnnnnnnnnnnnnnnnnnnnnnnnnnnnnnnnnnnnnnnnnnnnnnnnnnnnnnnnnnnnnnnnnnnnnnnnnnnnnnnnnnnnnnnnnnnnnnnnnnnnnnnnnnnnnnnnnnnnnnnnnnnnnnnnnnnnnnnnnnnnnnnnnnnnnnnnnnnnnnnnnnnnnnnnnnnnnnnnnnnnnnnnnnnnnnnnnnnnnnnnnnnnnnnnnnnnnnnnnnnnnnnnnnnnnnnnnnnnnnnnnnnnnnnnnnnnnnnnnnnnnnnnnnnnnnnnnnnnnnnnnnnnnnnnnnnnnnnnnnnnnnnnnnnnnnnnnnnnnnnnnnnnnnnnnnnnnnnnnnnnnnnnnnnnnnnnnnnnnnnnnnnnnnnnnnnnnnnnnnnnnnnnnnnnnnnnnnnnnnnnnnnnnnnnnnnnnnnnnnnnnnnnnnnnnnnnnnnnnnnnnnnnnnnnnnnnnnnnnnnnnnnnnnnnnnnnnnnnnnnnnnnnnnnnnnnnnnnnnnnnnnnnnnnnnnnnnnnnnnnnnnnnnnnnnnnnnnnnnnnnnnnnnnnnnnnnnnnnnnnnnnnnnnnnnnnnnnnnnnnnnnnnnnnnnnnnnnnnnnnnnnnnnnnnnnnnnnnnnnnnnnnnnnnnnnnnnnnnnnnnnnnnnnnnnnnnnnnnnnnnnnnnnnnnnnnnnnnnnnnnnnnnnnnnnnnnnnnnnnnnnnnnnnnnnnnnnnnnnnnnnnnnnnnnnnnnnnnnnnnnnnnnnnnnnnnnnnnnnnnnnnnnnnnnnnnnnnnnnnnnnnnnnnnnnnnnnnnnnnnnnnnnnnnnnnnnnnnnnnnnnnnnnnnnnnnnnnnnnnnnnnnnnnnnnnnnnnnnnnnnnnnnnnnnnnnnnnnnnnnnnnnnnnnnnnnnnnnnnnnnnnnnnnnnnnnnnnnnnnnnnnnnnnnnnnnnnnnnnnnnnnnnnnnnnnnnnnnnnnnnnnnnnnnnnnnnnnnnnnnnnnnnnnnnnnnnnnnnnnnnnnnnnnnnnnnnnnnnnnnnnnnnnnnnnnnnnnnnnnnnnnnnnnnnnnnnnnnnnnnnnnnnnnnnnnnnnnnnnnnnnnnnnnnnnnnnnnnnnnnnnnnnnnnnnnnnnnnnnnagacaccatcactgtcgcagcctggacccactcagcaggcatggtgagttccagnnnnnnnnnnnnnnnnnnnnnnnnnnnnnnnnnnnnnnnnnnnnnnnnnnnnnnncccctctcctctggcccgtgtgacccaggatcctgagaactgagtagaactgggttccttaaagaactgttgaaaaatcaggtgggtttggcctttctcctaaagaaggtttttagcagcacgacttttcaaaatccttcttccaatttgttgtcttcattttcctctcacatatgaagccgacacaaaaaggaaatatgttttctattcgctcggttagccagagcagctaaaggagctccctgtaggacctcagagcagcacgaaaagcacaagcagcagctatatctgctggggagctctgagcgacagtaggaggcctggtgccctttctgtagaacacagcgatggggagccaggtcagcaagttctcgtctgcctcagttagcagatcttcacaggctgctggcctctcagggatgaggagagccggggcttacactggnnnnnnnnnnnnnnnnnnnnnnnnnnnnnnnnnnnnnnnnnnnnnnnnnnnnnnnnnnnnnnnnnnnnnnnnnnnnnnnnnnnnnnnnnnnnnnnnnnnnnnnnnnnnnnnnnnnnnnnnnnnnnnnnnnnnnnnnnnnnnnnnnnnnnnnnnnnnnnnnnnnnnnnnnnnnnnnnnnnnnnnnnnnnnnnnnnnnnnnnnnnnnnnnnnnnnnnnnnnnnnnnnnnnnnnnnnnnnnnnnnnnnnnnnnnnnnnnnnnnnnnnnnnnnnnnnnnnnnnnnnnnnnnnnnnnnnnnnnnnnnnnngactctttacagggtacttaacactggacaaaagtacttcactacccactgtgtcattcagtcccttgattatctgcctgggggcagatactatccccatttttcagatatagaagctaagggtcagaaacacaaaacatcttacccaaggttacccagcttaattactggaagagctaagacttgaatccaagattcctgtctctaaatccaatgttctttctactctgctaacctttctcactcatgcctatgttattctttgatctgcatttgcttgggagaaccaagttttttattaaaaagatagaattctggccaggcatggtggcttacacctgtaatctcagcactttgggaggccgaggtgggcagatcacaaggtcaggagttcaaggctagcctggccaatatagtgataccccatctctaccaaaaatacaaaattagccaggtgtggtggcacatgcctgtaatcccagctactcaggaggctga

SEQ ID NO: 31724 - DNA, 123 bp, Macaca Mulatta
ggtatgtgccatcacaagcagatgtggcagtatttgaagccgtgtccgggccaccgcctgctgacttgtgtcatgccctacgttggtataatcacatcaagtcctacgaaaaggaaaaggcca

SEQ ID NO: 31725 - DNA, 630 bp, Macaca Mulatta
agggcggggcttagcccaggctgtgttagagggtgtggcagctggcaccttcctgtatgtcaccttcctagaaattcttccacgggagctagctagtcctgaggcccctctagctaagtggagctgtgtagccgctggttttgccttcatggcctttattgccttatgggcctgagagattcctagcttttctgatggacctatttaggatgacctctctatccccaaggagacctcccaaatggctttggccctcagacatttctttactgagactaaatagcattcaataggactggactggaccccaggtttcctttacatgagatcccatttctcacccaggactgagaaaaagatatttaggttgagcagctattaattggagaattggtacagagatgctccagattttattcttgtcccatttatgctactgtgtgtaataaaatgcccattttaccctccttcagccattctggattttatttctcctggttgcctagaagctatctggcacaggaagtggtggaatagggaatgggaaggataagtgttgaatgcagtattttattctggaattacggcccctagccattctgtcagttgccagccacacccccagacatg

SEQ ID NO: 31726 - DNA, 783 bp, Macaca Mulatta
  misc_feature (1)...(783): n = A,T,C or G
ggggcagaaggccgcgtccattccaggaagaagatcttcttcggaaatgcgagacctatagcatgctgatttaggttattaaggactctggggactggtgaacaatgcaggcgttactaaaccagtgatcttatgtgagtggctgaacatggaggactctatgaatatcctcaaagtgaacctcattggtgtgatccaggtgaccttgagcatgcttcccttggtgaggagagcacggggaaggattgtcaatgtctccagcattctgggaagagttgctttttttgcaggagtctactgtatctccaagtatggagtggaagccttttcagatattctgaggcgtgagcttcaacattttggggtgaaaatcagcatagttgaacctggctacttcagaacgggaatgacaaacctgacacggtccttagaggaaatgaagcaaagttggaaagaagcccccaagcatattaaggagacctatggacagcagtattttgatgccttttacaatatcatcaaggaagggctgttgggttgtagcacanacctgaacctggtcactgactgcatggaacatgctctgacatcagtgtatccacgaactcgatattcagctggctgggatgctaaatttttcttcatccctgtatcctatttacctacatcacttgcagactacattttgactagatcttggcccaaaccagcccaggcagtctaaagaaaacggggttgggtggcttcttgggaatggaagacaaaaaatctggaaatttaatc

SEQ ID NO: 31727 - DNA, 2382 bp, Macaca Mulatta
  misc_feature (1)...(2382): n = A,T,C or G
agtccgaggagaaagctgatctcagtggactcaagaagtgtctccctcctccccctggagttccgcaaagactcgagctatgagctgcaggtgcgggcagggcccatgcctggctcttcctaccaggggacctggagtgagtggagtgatccggtcatctttcagacccagtcagaggnnnnnnnnnnnnnnnnnnnnnnnnnnnnnnnnnnnnnnnnnnnnnnnnnnnnnnnnnnnnnnnnnnnnnnnnnnnnnnnnnnnnnnnnnnnnnnnnnnaggctatggaagaagatatgggccgtccccagccccgagcagttcttcgtgcccctgtacaagggctgcagcggagacttcaannnnnnnnnnnnnnnnnnnnnnnnnnnnnnnnnnnnnnnnnnnnnnnnnnnnnnnnnnnnnnnnnnnnnnnnnnnnnnnnnnnnnnnnnnnnnnnnnnnnnnnnnnnnnnnnnnnnnnnnnnnnnnnnnnnnnnnnnnnnnnnnnnnnnnnnnnnnnnnnnnnnnnnnnnnnnnnnnnnnnnnnnnnnnnnnnnnnnnnnnnnnnnnnnnnnnnnnnnnnnnnnnnnnnnnnnnnnnnnnnnnnnnnnnnnnnnnnnnnnnnnnnnnnnnnnnnnnnnnnnnnnnnnnnnnnnnnnnnnnnnnnnnnnnnnnnnnnnnnnnnnnnnnnnnnnnnnnnnnnnnnnnnnnnnnnnnnnnnnnnnnnnnnnnnnnnnnnnnnnnnnnnnnnnnnnnnnnnnnnnnnnnnnnnnnnnnnnnnnnnnnnnnnnnnnnnnnnnnnnnnnnnnnnnnnnnnnnnnnnnnnnnnnnnnnnnnnnnnnnnnnnnnnnnnnnnnnnnnnnnnnnnnnnnnnnnnnnnnnnnnnnnnnnnnnnnnnnnnnnnnnnnnnnnnnnnnnnnnnnnnnnnnnnnnnnnnnnnnnnnnnnnnnnnnnnnnnnnnnnnnnnnnnnnnnnnnnnnnnnnnnnnnnnnnnnnnnnnnnnnnnnnnnnnnnnnnnnnnnnnnnnnnnnnnnnnnnnnnnnnnnnnnnnnnnnnnnnnnnnnnnnnnnnnnnnnnnnnnnnnnnnnnnnnnnnnnnnnnnnnnnnnnnnnnnnnnnnnnnnnnnnnnnnnnnnnnnnnnnnnnnnnnnnnnnnnnnnnnnnnnnnnnnnnnnnnnnnnnnnnnnnnnnnnnnnnnnnnnnnnnnnnnnnnnnnnnnnnnnnnnnnnnnnnnnnnnnnnnnnnnnnnnnnnnnnnnnnnnnnnnnnnnnnnnnnnnnnnnnnnnnnnnnnnnnnnnnnnnnnnnnnnnnnnnnnnnnnnnnnnnnnnnnnnnnnnnnnnnnnnnnnnnnnnnnnnnnnnnnnnnnnnnnnnnnnnnnnnnnnnnnnnnnnnnnnnnnnnnnnnnnnnnnnnnnnnnnnnnnnnnnnnnnnnnnnnnnnnnnnnnnnnnnnnnnnnnnnnnnnnnnnnnnnnnnnnnnnnnnnnnnnnnnnnnnnnnnnnnnnnnnnnnnnnnnnnnnnnnnnnnnnnnnnnnnnnnnnnnnnnnnnnnnnnnnnnnnnnnnnnnnnnnnnnnnnnnnnnnnnnnnnnnnnnnnnnnnnnnnnnnnnnnnnnnnnnnnnnnnnnnnnnnnnnnnnnnnnnnnnnnnnnnnnnnnnnnnnnnnnnnnnnnnnnnnnnnnnnnnnnnnnnnnnnnnnnnnnnnnnnnnnnnnnnnnnnnggtctgaataccgactctgataccttctggctgtgctacctgagccaagtcgccgcccctctctggtctaaagtttccttgtccggacaatggggaaggcatgacccacctgggggaaattggcaatgtcacccatgtacagtacacagcccagagcagaccctcaataaacgtcagcttccttccttctgtggccagagccgaggcgggcgggggtgagaacatcaatcgtcagtgacagcctgggtgcccgaggggccatcccacttgcagagggccactcaggggatttccaggcttaaaatcagtctgtttcatctcgtggaaacagctccccaccaaccaagatttctttttctaacttctgctactaagttttaaaaaattccctttatgcgctcaagagatatttgttaaacaccaattacatagcaggccaaggctcatgggacccttcccccgtggcattcatggagggagggtgcaggccagaaccatgcagtgtgctccagccacacgtcctgctgggnnnnnnnnnnnnnnnnnnnnnnnnnnnnnnnnnnnnnnnnncttacttgttcatcctggataactgaagggaggtcaagttttttgtcattgatttgtcagagaacctgttgaagtgttaattaagaagctaagaaaata

SEQ ID NO: 31728 - DNA, 2981 bp, Macaca Mulatta
  misc_feature (1)...(2981): n = A,T,C or G
aagacagaaccttatttcattggaatcttttgctttgaagctgggatcaaaattgtggccctggggttcatcttccataagggttcatacctccgcaatggctggaatgtcatggacttcatcgtggtcctcagtgnnnnnnnnnnnnnnnnnnnnnnnnnnnnnnnnnnnnnnnnnnnnnnnnnnnnnnnnnnnnnnnnnnnnnnnnnnnnnnnnnnnnnnnnnnnnnnnnnnnnnnnnnnnnnnnnnnnnnnnnnnnnnnnnnnnnnnnnnnnnnnnnnnnnnnnnnnnnnnnnnnnnnnnnnnnnnnnnnnnnnnnnnnnnnnnnnnnnnnnnnnnnnnnnnnnnnnnnnnnnnnnnnnnnnnnnnnnnnnnnnnnnnnnnnnnnnnnnnnnnnnnnnnnnnnnnnnnnnnnnnnnnnnnnnnnnnnnnnnnnnnnnnnnnnnnnnnnnnnnnnnnnnnnnnnnnnnnnnnnnnnnnnnnnnnnnnnnnnnnnnnnnnnnnnnnnnnnnnnnnnnnnnnnnnnnnnnnnnnnnnnnnnnnnnnnnnnnnnnnnnnnnnnnnnnnnnnnnnnnnnnnnnnnnnnnnnnnnnnnnnnnnnnnnnnnnnnnnnnnnnnnnnnnnnnnnnnnnnnnnnnnnnnnnnnnnnnnnnnnnnnnnnnnnnnnnnnnnnnnnnnnnnnnnnnnnnnnnnnnnnnnnnnnnnnnnnnnnnnnnnnnnnnnnnnnnnnnnnnnnnnnnnnnnnnnnnnnnnnnnnnnnnnnnnnnnnnnnnnnnnnnnnnnnnnnnnnnnnnnnnnnnnnnnnnnnnnnnnnnnnnnnnnnnnnnnnnnnnnnnnnnnnnnnnnnnnnnnnnnnnnnnnnnnnnnnnnnnnnnnnnnnnnnnnnnnnnnnnnnnnnnnnnnnnnnnnnnnnnnnnnnnnnnnnnnnnnnnnnnnnnnnnnnnnnnnnnnnnnnnnnnnncggcacaaggaaaggcttctgcgcatctccattcgccacatggttaaatcccaggtgttttactggattgtgctgagccttgtagcactcaacactgcctgtgtggccattgtccatcacaaccagccccagtggctcacccacctcctctnnnnnnnnnnnnnnnnnnnnnnnnnnnnnnnnnnnnnnnnnnnnnnnnnnnnnnnnnnnnnnnnnnnnnnnnnnnnnnnnnnnnnnnnnnnnnnnnnnnnnnnnnnnnnnnnnnnnnnnnnnnnnnnnnnnnnnnnnnnnnnnnnnnnnnnnnnnnnnnnnnnnnnnnnnnnnnnnnnnnnnnnnnnnnnnnnnnnnnnnnnnnnnnnnnnnnnnnnnnnnnnnnnnnnnnnnnnnnnnnnnnnnnnnnnnnnnnnnnnnnnnnnnnnnnnnnnnnnnnnnnnnnnnnnnnnnnnnnnnnnnnnnnnnnnnnnnnnnnnnnnnnnnnnnnnnnnnnnnnnnnnnnnnnnnnnnnnnnnnnnnnnnnnnnnnnnnnnnnnnnnnnnnnnnnnnnnnnnnnnnnnnnnnnnnnnnnnnnnnnnnnnnnnnnnnnnnnnnnnnnnnnnnnnnnnnnnnnnnnnnnnnnnnnnnnnnnnnnnnnnnnnnnnnnnnnnnnnnnnnnnnnnnnnnnnnnnnnnnnnnnnnnnnnnnnnnnnnnnnnnnnnnnnnnnnnnnnnnnnnnnnnnnnnnnnnnnnnnnnnnnnnnnnnnnnnnnnnnnnnnnnnnnnnnnnnnnnnnnnnnnnnnnnnnnnnnnnnnnnnnnnnnnnnnnnnnnnnnnnnnnnnnnnnnnnnnnnnnnnnnnnnnnnnnnnnnnnnnnnnnnnnnnnnnnnnnnnnnnnnnnnnnnnnnnnnnnnnnnnnnnnnnnnnnnnnnnnnnnnnnnnnnnnnnnnnnnnnnnnnnnnnnnnnnnnnnnnnnnnnnnnnnnnnnnnnnnnnnnnnnnnnnnnnnnnnnnnnnnnnnnnnnnnnnnnnnnnnnnnnnnnnnnnnnnnnnnnnnnnnnnnnnnnnnnnnnnnnnnnnnnnnnnnnnnnnnnnnnnnnnnnnnnnnnnnnnnnnnnnnnnnnnnnnnnnnnnnnnnnnnnnnnnnnnnnnnnnnnnnnnnnnnnnnnnnnnnnnnnnnnnnnnnnnnnnnnnnnnnnnnnnnnnnnnnnnnnnnnnnnnnnnnnnnnnnnnnnnnnnnnnnnnnnnnnnnnnnnnnnnnnnnnnnnnnnnnnnnnnnnnnnnnnnnnnnnnnnnnnnnnnnnnnnnnnnnnnnnnnnnnnnnnnnnnnnnnnnnnnnnnnnnnnnnnnnnnnnnnnnnnnnnnnnnnnnnnnnnnnnnnnnnnnnnnnnnnnnnnnnnnnnnnnnnnnnnnnnnnnnnnnnnnnnnnnnnnnnnnnnnnnnnnnnnnnnnnnnnnnnnnnnnnnnnnnnnnnnnnnnnnnnnnnnnnnnnnnnnnnnnnnnnnnnnnnnnnnnnnnnnnnnnnnnnnnnnnnnnnnnnnnnnnnaaggctgtcttcgactgcgtggtgacctccttgaagaatgtcttcaacatacttattgtctacaagctcttcatgttcatctttgctgtcatcgcagttcagctcttcaagggaaagttcttttattgcacggacagttccaaggacacagagaaggagtgcatnnnnnnnnnnnnnnnnnnnnnnnnnnnnnnnnnnnnnnnnnnnnnnnnnnnnnnnnnnnnnnnnnnnnnnnnnnnnnnnnnnnnnnnnnnnnnnnnnnnnnnnnnnnnnnnnnnnnnnnnnnnnnnnnnnnnnnnnnnagttctgcagcactctgtagatgtgacagaggaagaccgaggcccaagccgcagcaaccgcatggagatgtctatcttttatgtggtctactttgtggtcttccctttcttctttgtcaatatctttgtggctctcatcatcatcaccttccaggagcaaggggataagatgatggaggagtgcagcctggagaagaatga

SEQ ID NO: 31729 - DNA, 371 bp, Macaca Mulatta
tgtctggacgtggtaagggcgggaagggtttgggtaaggggggtgccaagcgccaccgcaaggtgttgcgcgacaacatccagggcatcaccaagccggccatccggcgtctggcccggcgtggaggtgtcaagaggatctctggtctgatctacgaggagactcgcggggtgctcaaggtgtttttggagaacgtgatccgtgacgctgtcacctatacggaacacgccaagcgcaagacggtcactgctatggacgtggtctacgcgctcaagcgccagggacgcaccctttatggctttggcggctaaggttgctgctttctccccagcttgcgtttccgaaccaaaggcccttttcagggccgccca

SEQ ID NO: 31730 - DNA, 121 bp, Macaca Mulatta
agcaccgtggctgccagcatcaatgccttggcaacagtgacctttgaggattttgtcaagagctgttttccccatctctccgacaagctgagcacctggatcagtaaaggcttatgtaggt

SEQ ID NO: 31731 - DNA, 559 bp, Macaca Mulatta
tccacgtcaggaaattcgaggaactggcagatggggccgcttcacgttcacatccatctgttatgtactggggagtcatttggggagcagcaggatctgttgctgattggttaggccattggtctagggaggcctgggggcccttcccatccagctccaggcaatgacgctttctcttcctccacacagaggacgtcacccccatcccctctgacagcactcgcaggaaggggggtcgccgtggtcgccgtctgtgaacaagactcctcaaaatattttctgttaataaattgccttcgtgtaaactgtttgaactccagtcttttctccttcatcaggggctactcgggcatttgatttcttcctcctatttggcttcttgggaggagcctgaggagagctgagatcctcgtgctacatttggggtcttttccatgctacttgcagcattaagttgccttggtcatctaaagcagaccaaggctttggagacctcgttttgagtggagatgctggttctaaaaatggaccaattcttaaagagtcagagtgggaactg

SEQ ID NO: 31732 - DNA, 743 bp, Macaca Mulatta
  misc_feature (1)...(743): n = A,T,C or G
ggggacatctcgctgttgtcaccgcggcttgcgcgcccttgtagacagcccgggccttcgtgagaccggtgcaggcctggggtagtctcctgtctggacagagaagagaagaatgccggacaccggctcagtagtgcctttgcattggtttggctttggctatgcagcactggttgcttctggtgggattattggctatgtaaaagcaggcagccgtgccgtccctcgctgcggggcctgcctcttcggcagccctagcccggctttgggtgccttaccagcctggtcttcaggaatcccaaggaaacgttttggggttttttccctaacctaacatcctggggtaccctttgggctggggccatttaaggggggaaaatggaaaaattttcttaaaaaacatccnnnnnnnnnnnnnnnnnnnnatggccccctggcaccgggggtttttaaaattttccccgaggggggcccccaaaattttttcgcccccaaaaaaggggggtttggccgcannnnnnnnnnnnnnnnnnnnnnntttttcacgcacaattgggggttccccccacccaagggaaatnnnnnnnnnnnnnnnnnnnnncaccnnnnnnnnnnnnnnnnnnccccgggggtggtttttaccaccacgctttttttttttgtgccccaccttgtttgtcttgtggcctcccaatatcaaactaactttttcactgagaaaataaacaacactcttcccttgt

SEQ ID NO: 31733 - DNA, 113 bp, Macaca Mulatta
ggtgacggtcaagtggactttgaggagtttgtgaccctcctgggacccaaactctccacgtcagggatcccagagaagttccatggcactgactttgacactgtcttctggaa

SEQ ID NO: 31734 - DNA, 632 bp, Macaca Mulatta
tggcatgagattgcttaaggtggagaaggtagctgggaggtgtaaatgggttacctggaaggcctgggctggggtgacatcctccctgcagcctccctgatggagtccaggcccgccaatgggccctagttatgggccctggttcattagccctgggcacatcttttgcaggcctggagatgctggaacaagtccgaagccagcccctgaccaatgatgacctggtcacttccattagcgtgccaccgtacactggagacctgtctttggctcccaggataagtggaaccatctgtcttagcgttcctcagccttccccttaccaagtgattggttgttcgggattccatttgagttcactgtatccgtaattaaggactgatctcctctgggaagcggggatgagaggagaagtcttggcttcgcttttggtgagaaagacatgaaagacactgaagaaagtttgaatttgtggctgggacctgtccctcaggtcttgtagacgtgtgtctgagggaagtctcccgaatgtaagaaagtgttattggcaaagcaatccaataaaataagctacctatgatgcaaagccttcgatgtgctgtcctctttccttaggatgaacttattcaccc

SEQ ID NO: 31735 - DNA, 646 bp, Macaca Mulatta
  misc_feature (1)...(646): n = A,T,C or G
gggattttaagaaagagaatgaactgtggaatttattggcagccaaggaatgtgtccaagacacatgctgaggttttgaataaaaagtgaacttttgtaatttgaattgggtcccgcttagttcttgaattgttatgaaaatcctatatctgtttgtatatttgcaaaccctttgtattataattgttgatattttccctttttaaaaaataccattgaaatcagcatgacaaaaataacactgttggcacttataggtaacgtgattgattcagtatcttagagtttacagtttgnnnnnnnnnnnnnntgnnnnnnnnnnnnnnnnnnnnnnngcaccatttctgtatactgtaaaagttataataactgaacctgtttggtcgagtctttgggtgtttaatttcaaggaaaatttgaagttttccaaaatttaaaattttattgaatttcgaagtgaaccaagaacacgctaatcaagcacttttcttatccatattctcaactatttaatacctacgaacccaaaaaacactctctttaaaaaatcaaataaataaaaaattnnnnnnnnnnnnnnnnnnnnnnnnnnnnnnnnnnnnnnnnnnnnnnnnnnnnnnntaacacatatttcccacaaaatccg

SEQ ID NO: 31736 - DNA, 1690 bp, Macaca Mulatta
  misc_feature (1)...(1690): n = A,T,C or G
cacgctgtatgggctgagcgtgctgctcaaaaaccccgaggagggccagagcgagggcagctacctgctgcaccacctgccctggcttgtaggcagcctgggcgtgctgctgctcgacaccatctctccatccagttcctggtgtacaggcgcagcgccgccgcctcggagcttgagcccctcctcctccccagctgaccgaggccggctgagcgcaggaggacggggaccaccggaagccacaccaggcagggggaggtgtgggcagtgatggtgctgcagctctgcatcagtgtgtgggcggcctctggatcccccatggaccgaaccgtcccctctgggaacacaccttcaggtagaccctgaagcctcgaggccgggactggagcggagaccccacctctcaggagacaggctgcccctcctaccacctacctcattctgcctactcaccccaggggccacagctgcagcctgcgggactcaggactgctggtctcgaactcctgacctcagctgatctgcccgcctcagcctcccaaagtgctgggattacaggtgtgccaccacgcccagccaagatgggagtattcttatggccattttacaaatgggaaaacaggctcagtgcaattgagcaacttgcccagctaggagcagcagcaacacgaggccctccagctgcgggggccaccccatgcctggccaacattggcgacccgtgtccccttcgtccgtgctgggggcccagggcttgtggcagtccagcctcaccctcaggagtggcccgaaccctgctgggcccaggctcccttctcaccatcctgaatagtgactttcctgagcctctggccctgctgagatttcaggataagttacccccaggtccccagcccccgcttgccctggcctgtgcctgccacaggtgccagcnnnnnnnnnnnnnnnnnnnnnnnnnnnnnnnnnnnnnnnnnnnnnnnnnnnnnnnnnnnnnnnnnnnnnnnnnnnnnnnnnnnnnnnnnnnnnnnnnnnnnnnnnnnnnnnnnnnnnnnnnnnnnnnnnnnnnnnnnnnnnnnnnnnnnnnnnnnnnnnnnnnnnnnnnnnnnnnnnnnnnnnnnnnnnnnnnnnnnnnnnnnnnnnnnnnnnnnnnnnnnnnnnnnnnnnnnnnnnnnnnnnnnnnnnnnnnnnnnnnnnnnnnnnnnnnnnnnnnnnnnnnnnnnnnnnnnnnnnnnnnnnnnnnnnnnnnnnnnnnnnnnnnnnnnnnnnnnnnnnnnnnnnnnnnnnnnnnnnnnnnnnnnnnnnnnnnnnnnnnnnnnnnnnnnnnnnnnnnnnnnnnnnnnnnnnnnnnnnntcattccagtgccccaagtaggattcaaactgctggggctggaagaacttggtggcctgggtgcctggagccctgttgaaggagctggtgacatccagatgctggaggcaggtggcagggagcacagactttgtgtcctgcacactgagctccgagtgtgccccagccaccgtgagccttgtgacttgagcagacatctgaagccgtttcttcatcccatgagaccaataacaccgcctgcctcagaacagagccgtgatcaagatgagcacggaggctcgtgtcccggcacctggcacacagtaagtgcctgctaaataaacaatggctctatttgct

SEQ ID NO: 31737 - DNA, 902 bp, Macaca Mulatta
ggggatgagccggtgcgtttagtgaacaggccagcactggcattcgcgagcggtggggagggggagagatgatgaggtgctcagtatcctgactttcataggcctttttttgtttgttttaatttttgctagattgatattaaaaactcatgtggaggaactcaaggaatgtttagaagaccaaaagtccccaatgacaggaacaaaaagcaacaaatttttaactttgtttctcttctcattcctgttttcattgatttcccacatgtagtccttttgctcaggaagtctttggggaaattaaggatctttgaagctctgaaataggtgatcaggttagtggtgtctgtcaactgtctaagaggttggaaagtgaactactcaaaatagtcacgaaagtactgaaagtttgatttttctctccatatttgaattaattttttctgtttgactggaaggggtttttgtataactaaaacctcagtgcataaaggagatttaaaaggagcacatgatttagtgggtgggccacgaaactagagatgggatttgggggtaaatttgtcagtatctggattttaatccagacatctctgctaacaagcctttggtaagtcacttcacatacttttcctcctttttacaaagagagggctggcttagttatttgctaaagccccttccaggcctgaattccacaagtacgatttactgtagtgtcttatcactccttcatgtcacgatagtgtggagcattagagaaaagcctagacttttagttgatagagagccagttgaaatatcatcgatagaattttagttctaggcaaaattggtctgatctctagctttattactattacgtatgtgagcttgggcaaatcgcttaatctttgagtcta

SEQ ID NO: 31738 - DNA, 566 bp, Macaca Mulatta
cctccttggattccccttcccaccccagcaccccagccagcctggtaggcagagcccagaataaagcagcttctgcctagacttgacgtgggcctccctcactccaggcaccgatgttcagtccacgctttattaagaaaggaacacatacactttctccaagggcccacctgggggtctcaggcagaacacgctctgagagcgggcctggctccagcgtctcttctgccctgcggttgtgggcagctggcgcccagaagggtggtgagagctgtgccgcttttccctcaaggcatggagagctggaggtggagccgtggccgggcctaggggttgagccaggggtgctggaggcagtcagcggcactggcccgcttttcggggatgtactccatcatgggcagcaggaaggcactgaactgcgtggcctgctctaggggccactcgtacttttccatgagcacctcgtacaggccccagtgcttgagattgtgaatgtgccgcagctctcctgtgggcaggccagtgggcgtcaggctctgtccctgtctccaggcctgccttct

SEQ ID NO: 31739 - DNA, 267 bp, Macaca Mulatta
  misc_feature (1)...(267): n = A,T,C or G
gggtgggggagccaaagctcaaaagtacaaattcaccacaacacatggcttcattttccgggacataacctgagatggattcttacattcgctctcctgtttgtgcatgtctgtgaaatagcagaaggcattgtttcagactcgnnncgggaatcaaggcacctccacctctttatgccggccgtgatgggattcgttgccactacaacatcaatagtgtattatcataatatcgaaacatcaaattttcctaaattacttttaggt

SEQ ID NO: 31740 - DNA, 494 bp, Macaca Mulatta
  misc_feature (1)...(494): n = A,T,C or G
agagcgtacaggtttttccatccgtcctgtggctggttacttatcaccaagagatttcttatcaggtttagcctttcgagtttttcactgcactcaatatgtgagacacagttcagatcccttctataccccagagccnnnnnnnnnnnnnnnnnnnnnnnnnnnnnnnnnnnnnnnnnnnnnnnnnnnnnnnnnnnnnnnnnnnnnnnnnnnnnnnnnnnnnnnnnnnnnnnnnnnnnnnnnnnnnnnnnnnnnnnnnnnnnnnnnnnnnnnnnnnnnnnnnnnnnnnnnnnnnnnnnnnnnnnnnnnnnnnnnnnnnnnnnnnnnnnnnnnnnnnnnnnnnnnnnnnnnnnnnnnnnnncatgcgctttctggacatgccaaagtaaagccctttgatcccaagattacctgcaaacaggaatgtctaatcacaacttttcaggatgtctactttgtatctgaaagctttgaagatgcaaaggagaagatga

SEQ ID NO: 31741 - DNA, 165 bp, Macaca Mulatta
aggctatgtggagccgctgaagggcgtcccgccagagaagttcaaccacaccgccatccccaaaggctaccgctgcccctggcaggagttcgtcagctaccgggactaccagagcgatggccgaagtcacacccccagccccaacgactaccgaaatttcaacaa

SEQ ID NO: 31742 - DNA, 850 bp, Macaca Mulatta
gggggctcttttccgtggcgcctcggaggcgttcagctgcttcaagatgaagctgaacatctccttcccagccactggctgccagaaactcattgaagtggacgatgaacgcaaacttcgtactttttatgagaagcgtatggccacagaagttgctgctgacgctctgggtgaagaatggaagggttatgtggtccgaatcagtggtgggaacgacaaacaaggtttccccatgaagcagggtgtcttgacccatggccgtgtccgcctgctactgagtaaggggcattcctgttacagaccaaggagaacgggagaaagaaagagaaaatcagttcgtggttgcattgtggatgccaatctgagcgttctcaacttggttattgtaaaaaaaggagagaaggatattcctggactgactgatactacagttcctcgccgccctgggccccaaaagagctagcagaatccgcaaacttttcaatctctctaaagaagatgacgtccgccagtatgttgtaaggaaagcccctttaaacaaagaaggtaaggaaaccctagggaccaaagccacccaaaaattcagcggtcttggttactccaccgtgttcctgcaaccacaaaacggcgggcgttatttggctcttaaaaaaagcaccgttagcttagggaaaaaacccaggaaagaaggcctggcaaaaataatgcctaaaaactttttgtggcccaaaaaagaaatgaaaggggaggccttatagggaagaaaaccagcccggaaaacaattttgcgttatgaggccgagggaattttccctcctcctggggaagctcccttattatacagagtctg

SEQ ID NO: 31743 - DNA, 1890 bp, Macaca Mulatta
  misc_feature (1)...(1890): n = A,T,C or G
gggcatgtggacttcacaatagaagttgaaagggccctgagagtgttggatggtgcagtccttgttctctgtgctgttggaggggtacagtgccagaccatgactgtcaatcgtcagatgaaacgctacaacgttccatttctaacttttattaacaaattggaccgactgggctccaacccagccagggccctgcagcaaatgaggnnnnnnnnnnnnnnnnnnnnnnnnnnnnnnnnnnnnnnnnnnnnnnnnnnnnnnnnnnnnnnnnnnnnnnnnnnnnnnnnnnnnnnnnnnnnnnnnnnnnnnnnnnnnnnnnnnnnnnnnnnnnnnnnnnnnnnnnnnnnnnnnnnnnnnnnnnnnnnnnnnnnnnnnnnnnnnnnnnnnnnnnnnnnnnnnnnnnnnnnnnnnnnnnnnnnnnnnnnnnnnnnnnnnnnnnnnnnnnnnnnnnnnnnnnnnnnnnnnnnnnnnnnnnnnnnnnnnnnnnnnnnnnnnnnnnnnnnnnnnnnnnnnnnnnnnnnnnnnnnnnnnnnnnnnnnnnnnnnnnnnnnnnnnnnnnnnnnnnnnnnnnnnnnnnnnnnnnnnnnnnnnnnnnnnnnnnnnnnnnnnnnnnnnnnnnnnnnnnnnnnnnnnnnnnnnnnnnnnnnnnnnnnnnnnnnnnnnnnnnnnnnnnnnnnnnnnnnnnnnnnnnnnnnnnnnnnnnnnnnnnnnnnnnnnnnnnnnnnnnnnnnnnnnnnnnnnnnnnnnnnnnnnnnnnnnnnnnnnnnnnnnnnnnnnnnnnnnnnnnnnnnnnnnnnnnnnnnnnnnnnnnnnnnnnnnnnnnnnnnnnnnnnnnnnnnnnnnnnnnnnnnnnnnnnnnnnnnnnnnnnnnnnnnnnnnnnnnnnnnnnnnnnnnnnnnnnnnnnnnnnnnnnnnnnnnnnnnnnnnnnnnnnnnnnnnnnnnnnnnnnnnnnnnnnnnnnnnnnnnnnnnnnnnnnnnnnnnnnnnnnnnnnnnnnnnnnnnnnnnnnnnnnnnnnnnnnnnnnnnnnnnnnnnnnnnnnnnnnnnnnnnnnnnnnnnnnnnnnnnnnnnnnnnnnnnnnnnnnnnnnnnnnnnnnnnnnnnnnnnnnnnnnnnnnnnnnnnnnnnnnnnnnnnnnnnnnnnnnnnnnnnnnnnnnnnnnnnnnnnnnnnnnnnnnnnnnnnnnnnnnnnnnnnnnnnnnnnnnnnnnnnnnnnnnnnnnnnnnnnnnnnnnnnnngtttgagtttacacataaaaaacaatcaggtggtgcaggccagtatggaaaagtaataggtgtcctggagcctctggacccagaggactacactaaattggagttttcagatgaaacattcggatcaaatattccaaagcagtttgtgcctgctgtagaaaagnnnnnnnnnnnnnnnnnnnnnnnnnnnnnnnnnnnnnnnnnnnnnnnnnnnnnnnnnnnnnnnnnnnnnnnnnnnnnnnnnnnnnnnnnnnnnnnnnnnnnnnnnnnnnnnnnnnnnnnnnnnnnnnnnnnnnnnnnnnnnnnnnnnnnnnnnnnnnnnnnnnnnnnnnnnnnnnnnnnnnnnnnnnnnnnnnnnnnnnnnnnnnnnnnnnnnnnnnnnnnnnnnnnnnnnnnnnnnnnnnnnnnnnnnnnnnnnnnnnnnnnnnnnnnnnnnnnnnnnnnnnnnnnnnnnnnnnnnnnnnnnnnnnnnnnnnnnnnnnnnnnnnnnnnnnnnnnnnnnnnnnnnnnnnnnnnnnnnagggaaagggagaatacacaatggagtactgcaggtatcagccatgtttaccatccacacaagaagacatcattaataagtatttggaagctacaggtcaacttcctgttaaaaaaggaaaagccaagaacta

SEQ ID NO: 31744 - DNA, 685 bp, Macaca Mulatta
agttcctgttgtgcccagtccgatcaattcttgtaggaactaactgcaagaagagcttagaatgttctagagtgaactaaatatagacatgctttacttgttttgaagaggcttttggttttgtttattaggtcttaagttttctgatatgccccctttcgatattgagatatgtatttgttgggaagaataccttaaaatgagggttcttattccagattctggtcagtggtctgagtagtttttttcctggatgaaaagggagcaagcccacttgtcactaaattgaattgtgtgcagtttgctcacttggactccatccacagtgtactactcccaaattgccatgccataggccttcggattcttcctttcatcacctctgctctaagcaaatcttgttagaagggcatggcatgcctttgcttaggcagattgggaacacccactcactacagaataaagattttaaacatgcaataaggtggtaaatgcattctatgaagaatttctacagtgtttagtctgagaatttttgcatgttggttaattgtggccattcttatttaaagttaaaattataatcttaggtagaaaaacttttttataagaagtattatttgaccacttcaggtacacattcaatactgggtaaaatttcagacctatctcagggacacagaaa

SEQ ID NO: 31745 - DNA, 3902 bp, Macaca Mulatta
  misc_feature (1)...(3902): n = A,T,C or G
aatgatttcctcagtgattacgtacagagcgagtccctgcgggttaggggccccctctggagccatcctgatggctttgggggccttgcttccattttccattattatgtggactaccggagcgacagcgcagtccaagaccttgcagncagaccccaactgtaaacttgaagacaagactgaagatggagaggcgctagattgtaagaagaggccggaagacggggaggagttggaagacgaggctgtgcacagctgtgacagctgcctccaggtgtttgaatcgctgagcgatatcacagaacacaagattaatcaatgtcaactgacagnnnnnnnnnnnnnnnnnnnnnnnnnnnnnnnnnnnnnnnnnnnnnnnnnnnnnnnnnnnnnnnnnnnnnnnnnnnnnnnnnnnnnnnnnnnnnnnnnnnnnnnnnnnnnnnnnnnnnnnnnnnnnnnnnnnnnnnnnnnnnnnnnnnnnnnnnnnnnnnnnnnnnnnnnnnnnnnnnnnnnnnnnnnnnnnnnnnnnnnnnnnnnnnnnnnnnnnnnnnnnnnnnnnnnnnnnnnnnnnnnnnnnnnnnnnnnnnnnnnnnnnnnnnnnnnnnnnnnnnnnnnnnnnnnnnnnnnnnnnnnnnnnnnnnnnnnnnnnnnnnnnnnnnnnnnnnnnnnnnnnnnnnnnnnnnnnnnnnnnnnnnnnnnnnnnnnnnnnnnnnnnnnnnnnnnnnnnnnnnnnnnnnnnnnnnnnnnnnnnnnnnnnnnnnnnnnnnnnnnnnnnnnnnnnnnnnnnnnnnnnnnnnnnnnnnnnnnnnnnnnnnnnnnnnnnnnnnnnnnnnnnnnnnnnnnnnnnnnnnnnnnnnnnnnnnnnnnnnnnnnnnnnnnnnnnnnnnnnnnnnnnnnnnnnnnnnnnnnnnnnnnnnnnnnnnnnnnnnnnnnnnnnnnnnnnnnnnnnnnnnnnnnnnnnnnnnnnnnnnnnnnnnnnnnnnnnnnnnnnnnnnnnnnnnnnnnnnnnnnnnnnnnnnnnnnnnnnnnnnnnnnnnnnnnnnnnnnnnnnnnnnnnnnnnnnnnnnnnnnnnnnnnnnnnnnnnnnnnnnnnnnnnnnnnnnnnnnnnnnnnnnnnnnnnnnnnnnnnnnnnnnnnnnnnnnnnnnnnnnnnnnnnnnnnnnnnnnnnnnnnnnnnnnnnnnnnnnnnnnnnnnnnnnnnnnnnnnnnnnnnnnnnnnnnnnnnnnnnnnnnnnnnnnnnnnnnnnnnnnnnnnnnnnnnnnnnnnnnnnnnnnnnnnnnnnnnnnnnnnnnnnnnnnnnnnnnnnnnnnnnnnnnnnnnnnnnnnnnnnnnnnnnnnnnnnnnnnnnnnnnnnnnnnnnnnnnnnnnnnnnnnnnnnnnnnnnnnnnnnnnnnnnnnnnnnnnnnnnnnnnnnnnnnnnnnnnnnnnnnnnnnnnnnnnnnnnnnnnnnnnnnnnnnnnnnnnnnnnnnnnnnnnnnnnnnnnnnnnnnnnnnnnnnnnnnnnnnnnnnnnnnnnnnnnnnnnnnnnnnnnnnnnnnnnnnnnnnnnnnnnnnnnnnnnnnnnnnnnnnnnnnnnnnnnnnnnnnnnnnnnnnnnnnnnnnnnnnnnnnnnnnnnnnnnnnnnnnnnnnnnnnnnnnnnnnnnnnnnnnnnnnnnnnnnnnnnnnnnnnnnnnnnnnnnnnnnnnnnnnnnnnnnnnnnnnnnnnnnnnnnnnnnnnnnnnnnnnnnnnnnnnnnnnnnnnnnnnnnnnnnnnnnnnnnnnnnnnnnnnnnnnnnnnnnnnnnnnnnnnnnnnnnnnnnnnnnnnnnnnnnnnnnnnnnnnnnnnnnnnnnnnnnnnnnnnnnnnnnnnnnnnnnnnnnnnnnnnnnnnnnnnnnnnnnnnnnnnnnnnnnnnnnnnnnnnnnnnnnnnnnnnnnnnnnnnnnnnnnnnnnnnnnnnnnnnnnnnnnnnnnnnnnnnnnnnnnnnnnnnnnnnnnnnnnnnnnnnnnnnnnnnnnnnnnnnnnnnnnnnnnnnnnnnnnnnnnnnnnnnnnnnnnnnnnnnnnnnnnnnnnnnnnnnnnnnnnnnnnnnnnnnnnnnnnnnnnnnnnnnnnnnnnnnnnnnnnnnnnnnnnnnnnnnnnnnnnnnnnnnnnnnnnnnnnnnnnnnnnnnnnnnnnnnnnnnnnnnnnnnnnnnnnnnnnnnnnnnnnnnnnnnnnnnnnnnnnnnnnnnnnnnnnnnnnnnnnnnnnnnnnnnnnnnnnnnnnnnnnnnnnnnnnnnnnnnnnnnnnnnnnnnnnnnnnnnnnnnnnnnnnnnnnnnnnnnnnnnnnnnnnnnnnnnnnnnnnnnnnnnnnnnnnnnnnnnnnnnnnnnnnnnnnnnnnnnnnnnnnnnnnnnnnnnnnnnnnnnnnnnnnnnnnnnnnnnnnnnnnnnnnnnnnnnnnnnnnnnnnnnnnnnnnnnnnnnnnnnnnnnnnnnnnnnnnnnnnnnnnnnnnnnnnnnnnnnnnnnnnnnnnnnnnnnnnnnnnnnnnnnnnnnnnnnnnnnnnnnnnnnnnnnnnnnnnnnnnnnnnnnnnnnnnnnnnnnnnnnnnnnnnnnnnnnnnnnnnnnnnnnnnnnnnnnnnnnnnnnnnnnnnnnnnnnnnnnnnnnnnnnnnnnnnnnnnnnnnnnnnnnnnnnnnnnnnnnnnnnnnnnnnnnnnnnnnnnnnnnnnnnnnnnnnnnnnnnnnnnnnnnnnnnnnnnnnnnnnnnnnnnnnnnnnnnnnnnnnnnnnnnnnnnnnnnnnnnnnnnnnnnnnnnnnnnnnnnnnnnnnnnnnnnnnnnnnnnnnnnnnnnnnnnnnnnnnnnnnnnnnnnnnnnnnnnnnnnnnnnnnnnnnnnnnnnnnnnnnnnnnnnnnnnnnnnnnnnnnnnnnnnnnnnnnnnnnnnnnnnnnnnnnnnnnnnnnnnnnnnnnnnnnnnnnnnnnnnnnnnnnnnnnnnnnnnnnnnnnnnnnnnnnnnnnnnnnnnnnnnnnnnnnnnnnnnnnnnnnnnnnnnnnnnnnnnnnnnnnnnnnnnnnnnnnnnnnnnnnnnnnnnnnnnnnnnnnnnnnnnnnnnnnnnnnnnnnnnnnnnnnnnnnnnnnnnnnnnnnnnnnnnnnnnnnnnnnnnnnnnnnnnnnnnnnnnnnnnnnnnnnnnnnnnnnnnnnnnnnnnnnnnnnnnnnnnnnnnnnnnnnnnnnnnnnnnnnnnnnnnnnnnnnnnnnnnnnnnnnnnnnnnnnnnnnnnnnnnnnnnnnnnnnnnnnnnnnnnnnnnnnnnnnnnnnnnnnnnnnnnnnnnnnnnnnnnnnnnnnnnnnnnnnnnnnnnnnnnnnnnnnnnnnnnnnnnnnnnnnnnnnnnnnnnnnnnnnnnnnnnnnnnnnnnnnnnnnnnnnnnnnnnnnnnnnnnnnnnnnnnnnnnnnnnnnnnnnnnnnnnnnnnnnnnnnnnnnnnnnnnnnnnnnnnnnnnnnnnnnnnnnnnnnnnnnnnnnnnnnnnnnnnnnnnnnnnnnnnnnnnnnnnnnnnnnnnnnnnnnnnnnnnnnnnnnnnnnnnnnnnnnnnnnnnnnnnnnnnnnnnnnnnnnnnnnnnnnnnnnnnnnnnnnnnnnnnnnnnnnnnnnnnnnnnnnnnnnnnnnnnnnnnnnnnnnnnnnnnnnnnnnnnnnnnnnnnnnnnnnnnnnnnnnnnnnnnnnnnnnnnnnnnnnnnnnnnnnnnnnnnnnnnnnnnnnnnnnnnnnnnnnnnnnnnnnnnnnnnnnnnnnnnnnnnnnnnnnnnnnnnnngatgaaggactgaaccatgaatgcaaactctgcagccagacctttgactctcctgccaaactccagtgccacctgatagagcacagcttcgaagggatgggaggcaccttcaagtgtccagtctgctttacag

SEQ ID NO: 31746 - DNA, 461 bp, Macaca Mulatta
acaacttggagggagttgaaggagtggtggctgccttcctggctcgtgatggggagtctggggaaaagtggcttctccagagccagcatcaaaggatcaagcactgaagacatagctggctctgaggtggggtgggtgcaggatcacagaccgcatgtcatccccttgccccacccccgcaagtctggggtatatctgtgtctagcaatgatgtcctatggtgggacagactagaggatacgcatccctggaatgagagtcaacaggaaagatgggcccccacacctttcagggtgagcagcctctgggtctcctgctctcaagcaggttctccccctcctcttgctgtccaggatgagcagctcaaacaaacaatgggagctggggccagaggctcagagcccagaaagcgggagccttggtgaagaaggggtgatattggaagggaagggggatgtggc

SEQ ID NO: 31747 - DNA, 773 bp, Macaca Mulatta
gggatccaaaaactagagcaatgagagagaatccttatgccaatgcaggaaagaatccagatgaagtgagttatgctggagataattttgttaggtacacaggagataccatttcaatggctcagacacagttgtttgcgtgggaagcctatgacaagggatctgaagtacatctgcaggcagatcctacaaagctagagctgttgtataagtccttcaaagtcaaaaaagaagatttcaaagaacagcagaaagaaagcatcctggaaaagtatggtggccaagaacatttggatgcccctccagctgaattgcttttagcacagactgaagactatgtggagtattcaagacatgggacggtcatcaaaggacaggagcgggctgttgcctgctctaagtatgaggaggatgtgaagatccacaatcacacacatatctggggatcgtactggaaagaaggccgatggggatacaaatgctgtcactcttttttcaagtattcctattgtactggagaagctgggaaagagattgttaactcggaggaatgtattataaatgatataactggggaatgaatctgttgaaaaaacctcaaactctcatgggacctgcatcaagaaaaactgtattgagggaaaggaagacgtaagaaaaagaaagaggaagaagcttcgaaaggagcagtttccaaatgtggatgatgaaagaaaagaaaccatgaaaaaattaaaaaaaggccttggaatgcccaaaggaagccaccgcct

SEQ ID NO: 31748 - DNA, 1550 bp, Macaca Mulatta
  misc_feature (1)...(1550): n = A,T,C or G
acagatgaaagaactcggtgtcatcttctacaactgcagctgcctggtcctagacttacaaaggatatttgctctatatagttcattaaaattcaaaagcagagtgcctcaaacctggtccaaaagactctatggggtctatgacaatgaaaagaaattgcaacttcagttgaatgaaaccgaatctcnnnnnnnnnnnnnnnnnnnnnnnnnnnnnnnnnnnnnnnnnnnnnnnnnnnnnnnnnnnnnnnnnnnnnnnnnnnnnnnnnnnnnnnnnnnnnnnnnnnnnnnnnnnnnnnnnnnnnnnnnnnnnnnnnnnnnnnnnnnnnnnnnnnnnnnnnnnnnnnnnnnnnnnnnnnnnnnnnnnnnnnnnnnnnnnnnnnnnnnnnnnnnnnnnnnnnnnnnnnnnnnnnnnnnnnnnnnnnnnnnnnnnnnnnnnnnnnnnnnnnnnnnnnnnnnnnnnnnnnnnnnnnnnnnnnnnnnnnnnnnnnnnnnnnnnnnnnnnnnnnnnnnnnnnnnnnnnnnnnnnnnnnnnnnnnnnnnnnnnnnnnnnnnnnnnnnnnnnnnnnnnnnnnnnnnnnnnnnnnnnnnnnnnnnnnnnnnnnnnnnnnnnnnnnnnnnnnnnntttgattgggtagggaatgatttcacacagaatgctggaacaggccttgttatcaaccaggcagatgtgagaaacaacagaagcatcattaagcaacttaaagatgtgtttgaaagggactggtattcaccgtatgccaaaaccttacagccaaccaaacagccgaactgctcaagcctgttcaaactcaaaccgccctccaacaaaactgccacagacgatgcaggcggaaaggatccctggaacgtataacgtgaataaacaaactgataggacagttccgtatttcatatttatacataaaggacttgaggagagaaaaaaacactttaatatgtctcttttttttagggaaaaagcacacttataaaaaatattctctgaacgacacataatacctatctaacaatatcttagcgtcgtgtacactgaaattaagatttttgtatttgttacctctgacagagaatgtcattctggcatagaagttagtttttacatttgcatacaaattttaagactttcattcctgcttctttctagtttgagaactttttctgctgacctacccggtcagttgtcaggaagcttagcatgagatgggctctttaacaccattctgagaactgctaatttagagagaaaggtgaggatttttgccttggagaagagactgataaaaccagtgtttatccttgtaaatcgtctccaagacctacacagtcagctaagcgtgaacagcttacatctcatgccagccttcaacacccttgaaaaatatccttttctgtcttgctcattttcttcttataccatggattttatttggtatcattttctcttctcacaaaatgtttctattatattctgtattcaacctcaacattacttctaactatgataacatcttttgaaaacctacaa

SEQ ID NO: 31749 - DNA, 1656 bp, Macaca Mulatta
  misc_feature (1)...(1656): n = A,T,C or G
ccctgcatctggtggaactctgctggtctttcttcacaccaatcattgtggcggngggcgtgttcattttcagtgctgtgcagatgacgcctctcaccatgggaaactatgttttccccaagtggggccagggcgtgggctggctgatggctctgtcttccatggtcctcatccccgggtacatggcctacatgttcctcaccttaaagggctccctgaagcannnnnnnnnnnnnnnnnnnnnnnnnnnnnnnnnnnnnnnnnnnnnnnnnnnnnnnnnnnnnnnnnnnnnnnnnnnnnnnnnnnnnnnnnnnnnnnnnnnnnnnnnnnnnnnnnnnnnnnnnnnnnnnnnnnnnnnnnnnnnnnnnnnnnnnnnnnnnnnnnnnnnnnnnnnnnnnnnnnnnnnnnnnnnnnnnnnnnnnnnnnnnnnnnnnnnnnnnnnnnnnnnnnnnnnnnnnnnnnnnnnnnnnnnnnnnnnnnnnnnnnnnnnnnnnnnnnnnnnnnnnnnnnnnnnnnnnnnnnnnnnnnnnnnnnnnnnnnnnnnnnnnnnnnnnnnnnnnnnnnnnnnnnnnnnnnnnnnnnnnnnnnnnnnnnnnnnnnnnnnnnnnnnnnnnnnnnnnnnnnnnnnnnnnnnnnnnnnnnnnnnnnnnnnnnnnnnnnnnnnnnnnnnnnnnnnnnnnnnnnnnnnnnnnnnnnnnnnnnnnnnnnnnnnnnnnnnnnnnnnnnnnnnnnnnnnnnnnnnnnnnnnnnnnnnnnnnnnnnnnnnnnnnnnnnnnnnnnnnnnnnnnnnnnnnnnnnnnnnnnnnnnnnnnnnnnnnnnnnnnnnnnnnnnnnnnnnnnnnnnnnnnnnnnnnnnnnnnnnnnnnnnnnnnnnnnnnnnnnnnnnnnnnnnnnnnnnnnnnnnnnnnnnnnnnnnnnnnnnnnnnnnnnnnnnnnnnncttctcctgcagtctgtggagtgtccttgtccccgcggcccgaatgaatgagcgttctgcagcccgatgtccctgtcccctccccgccgggccattctgattggacctggcccagtgcaatccatccagacaagccctgcttgctggaaaactgccacaagcacaattgatctctttttatcgccattccaggggcctcaggtcctactggggaaacttcctatactggagctccggtttctcttaagctgcccaatttcacagagtacaaaacagttgtaggggaaatcaaggtgaaggatctgtccgacagtcaagacggatccacagttatctttcggtctccttcttaaactaccaccctcactgccacccaccccaagctgctgccacctcaccttccttgaaattcctcagcgggagtctcctcactgccactaaaacccacccagcccactaactgaggagctagtgttaatccagaggatcccccgcaatgtgcttccgagattcaaaatgcttcattggaaagtatgatttgttcctttctggaactgggctccgtggtggcggcggcacttcaagcgaagacagtttcttgcaagctccagtagctccgcgtgtctcatttgccaggaagatgggttcccacgtagcaaatcatacatcgtgccccgtagctccttagctagttagctcacaagccgtgttttatga

SEQ ID NO: 31750 - DNA, 353 bp, Macaca Mulatta
  misc_feature (1)...(353): n = A,T,C or G
gtcaactccatactcggcatacgacccagaaacatacaccggccactggaagcagctgactgtgcgcaccagccgccgccgtcaggccatggccattgcctacttccacccccagnccagaaactgagcccggaggagctggcagagctgaaagcctccctagcacagcacttcacagcagggccaggcagggccagtggagtgacctgcctctacttcgtggaggagggacagcgngaaagactcccagccaggagggcctgcccctggagcacatggctggggaccggtgcatccatgaggacctgctagggctgaccttccggatctctccgcacgccttcttccaggtn

SEQ ID NO: 31751 - DNA, 2866 bp, Macaca Mulatta
  misc_feature (1)...(2866): n = A,T,C or G
gaattttacaatgaattggctcctctgtcaagaatccctgcaggcaccatctcaagatttttttctgcgattgacacagtcttctttattacctttctatatcctggtgttaatatttgttttctttctatgttgcaagttatttttaggaggattaannnnnnnnnnnnnnnnnnnnnnnnnnnnnnnnnnnnnnnnnnnnnnnnnnnnnnnnnnnnnnnnnnnnnnnnnnnnnnnnnnnnnnnnnnnnnnnnnnnnnnnnnnnnnnnnnnnnnnnnnnnnnnnnnnnnnnnnnnnnnnnnnnnnnnnnnnnnnnnnnnnnnnnnnnnnnnnnnnnnnnnnnnnnnnnnnnnnnnnnnnnnnnnnnnnnnnnnnnnnnnnnnnnnnnnnnnnnnnnnnnnnnnnnnnnnnnnnnnnnnnnnnnnnnnnnnnnnnnnnnnnnnnnnnnnnnnnnnnnnnnnnnnnnnnnnnnnnnnnnnnnnnnnnnnnnnnnnnnnnnnnnnnnnnnnnnnnnnnnnnnnnnnnnnnnnnnnnnnnnnnnnnnnnnnnnnnnnnnnnnnnnnnnnnnnnnnnnnnnnnnnnnnnnnnnnnnnnnnnnnnnnnnnnnnnnnnnnnnnnnnnnnnnnnnnnnnnnnnnnnnnnnnnnnnnnnnnnnnnnnnnnnnnnnnnnnnnnnnnnnnnnnnnnnnnnnnnnnnnnnnnnnnnnnnnnnnnnnnnnnnnnnnnnnnnnnnnnnnnnnnnnnnnnnnnnnnnnnnnnnnnnnnnnnnnnnnnnnnnnnnnnnnnnnnnnnnnnnnnnnnnnnnnnnnnnnnnnnnnnnnnnnnnnnnnnnnnnnnnnnnnnnnnnnnnnnnnnnnnnnnnnnnnnnnnnnnnnnnnnnnnnnnnnnnnnnnnnnnnnnnnnnnnnnnnnnnnnnnnnnnnnnnnnnnnnnnnnnnnnnnnnnnnnnnnnnnnnnnnnnnnnnnnnnnnnnnnnnnnnnnnnnnnnnnnnnnnnnnnnnnnnnnnnnnnnnnnnnnnnnnnnnnnnnnnnnnnnnnnnnnnnnnnnnnnnnnnnnnnnnnnnnnnnnnnnnnnnnnnnnnnnnnnnnnnnnnnnnnnnnnnnnnnnnnnnnnnnnnnnnnnnnnnnnnnnnnnnnnnnnnnnnnnnnnnnnnnnnnnnnnnnnnnnnnnnnnnnnnnnnnnnnnnnnnnnnnnnnnnnnnnnnnnnnnnnnnnnnnnnnnnnnnnnnnnnnnnnnnnnnnnnnnnnnnnnnnnnnnnnnnnnnnnnnnnnnnnnnnnnnnnnnnnnnnnnnnnnnnnnnnnnnnnnnnnnnnnnnnnnnnnnnnnnnnnnnnnnnnnnnnnnnnnnnnnnnnnnnnnnnnnnnnnnnnnnnnnnnnnnnnnnnnnnnnnnnnnnnnnnnnnnnnnnnnnnnnnnnnnnnnnnnnnnnnnnnnnnnnnnnnnnnnnnnnnnnnnnnnnnnnnnnnnnnnnnnnnnnnnnnnnnnnnnnnnnnnnnnnnnnnnnnnnnnnnnnnnnnnnnnnnnnnnnnnnnnnnnnnnnnnnnnnnnnnnnnnnnnnnnnnnnnnnnnnnnnnnnnnnnnnnnnnnnnnnnnnnnnnnnnnnnnnnnnnnnnnnnnnnnnnnnnnnnnnnnnnnnnnnnnnnnnnnnnnnnnnnnnnnnnnnnnnnnnnnnnnnnnnnnnnnnnnnnnnnnnnnnnnnnnnnnnnnnnnnnnnnnnnnnnnnnnnnnnnnnnnnnnnnnnnnnnnnnnnnnnnnnnnnnnnnnnnnnnnnnnnnnnnnnnnnnnnnnnnnnnnnnnnnnnnnnnnnnnnnnnnnnnnnnnnnnnnnnnnnnnnnnnnnnnnnnnnnnnnnnnnnnnnnnnnnnnnnnnnnnnnnnnnnnnnnnnnnnnnnnnnnnnnnnnnnnnnnnnnnnnnnnnnnnnnnnnnnnnnnnnnnnnnnnnnnnnnnnnnnnnnnacatcaagaaaaatgacaactataataacatttacaacacagtttcacagtctaaatgctatgttcctttaagtatttttatatttttaatcatttattaagagaaaattttagaacgttgatttggccttatcaagagattcaggatagatgtagtctatagatgtgtcataagttgggacacatgtttagtttttccttatactccagtgagcagattttcataattctaacttgttaaagcgctgcaaaaattgcattttcagtactctaaattactacattagaagggaacatttctccgttgtctttattttctgttatatatgtgttgtaaaagtacactacattagaagggagctttttccattgtctttattttctgttatacatatgttgtaaaagtacatgaattcttagactaactctcagatgctttgctcttttggagcttaagaattgtttgacgttgatgtcatatatctgatagattagtttcagtggttctcatttcacttttatacataattttttaactatgttaagatagttgcaggcagtgtacttcaggttgactctgtacatctgactagtgagtcactagtattttgcgtcaagccttctgaaaatagaccatagttacctaagcacgcagtgaatagtcacatggtagtacttgtgattagagcatgtaaaacaatgtaatttaaaagtcatcttccatattttgaaggggaaatagaataccctactttttatgtagtgtgaaatatttaatcgaatttttattgatttatattatgtcacctgtgctgaattaggtttggtacttgtgttttgtttgacatattagtaagttgcttttgcttctttatgtccacttatttcttaaataaaatcgatctggaaaaat

SEQ ID NO: 31752 - DNA, 132 bp, Macaca Mulatta
atgtgaaaggaaacgttaccagctgaattttcttctagaaaatgaaggtatcttctcagatgcactcatggttacccaggatgttttaaaaaaactagaagtgtgttcagaaattaaaggtccacagaagga

SEQ ID NO: 31753 - DNA, 104 bp, Macaca Mulatta
gcctgtatgttgaggtagtcactagataaaattctgggcacaacatctgtttagcaattgggcatatattctacagattgagccataacgttttgaagctgata

SEQ ID NO: 31754 - DNA, 131 bp, Macaca Mulatta
gcagaaaaggggccttgctgttcaacaacatattttctatcgtgcctgcgatcttaatgggatgcagcaaagtcgccaagtcatttgagcttatcattatttccagacttttggtgggaatatgtgcaggt

SEQ ID NO: 31755 - DNA, 6406 bp, Macaca Mulatta
  misc_feature (1)...(6406): n = A,T,C or G
aggccagagttacagcaagttactgttgatggactcgaagttctcattccaaaggatccaatgcactttgtagaagaagtaccacactctaggtttattgagtgtagatataaagaagctcgagcattctttcagnnnnnnnnnnnnnnnnnnnnnnnnnnnnnnnnnnnnnnnnnnnnnnnnnnnnnnnnnnnnnnnnnnnnnnnnnnnnnnnnnnnnnnnnnnnnnnnnnnnnnnnnnnnnnnnnnnnnnnnnnnnnnnnaggatggtatcgacaatgcaacattattccttatagcaaagatgtcgacctaggaatttttatacaagattacaaatnnnnnnnnnnnnnnnnnnnnnnnnnnnnnnnnnnnnnnnnnnnnnnnnnnnnnnnnnnnnnnnnnnnnnnnnnnnnnnnnnnnnnnnnnnnnnnnnnnnnnnnnnnnnnnnnnnnnnnnnnnnnnnnnnnnnnnnnnnnnnnnnnnnnnnnnnnnnnnnnnnnnnnnnnnnnnnnnnnnnnnnnnnnnnnnnnnnnnnnnnnnnnnnnnnnnnnnnnnnnnnnnnnnnnnnnnnnnnnnnnnnnnnnnnnnnnnnnnnnnnnnnnnnnnnnnnnnnnnnnnnnnnnnnnnnnnnnnnnnnnnnnnnnnnnnnnnnnnnnnnnnnnnnnnnnnnnnnnnnnnnnnnnnnnnnnnnnnnnnnnnnnnnnnnnnnnnnnnnnnnnnnnnnnnnnnnnnnnnnnnnnnnnnnnnnnnnnnnnnnnnnnnnnnnnnnnnnnnnnnnnnnnnnnnnnnnnnnnnnnnnnnnnnnnnnnnnnnnnnnnnnnnnnnnnnnnnnnnnnnnnnnnnnnnnnnnnnnnnnnnnnnnnnnnnnnnnnnnnnnnnnnnnnnnnnnnnnnnnnnnnnnnnnnnnnnnnnnnnnnnnnnnnnnnnnnnnnnnnnnnnnnnnnnnnnnnnnnnnnnnnnnnnnnnnnnnnnnnnnnnnnnnnnnnnnnnnnnnnnnnnnnnnnnnnnnnnnnnnnnnnnnnnnnnnnnnnnnnnnnnnnnnnnnnnnnnnnnnnnnnnnnnnnnnnnnnnnnnnnnnnnnnnnnnnnnnnnnnnnnnnnnnnnnnnnnnnnnnnnnnnnnnnnnnnnnnnnnnnnnnnnnnnnnnnnnnnnnnnnnnnnnnnnnnnnnnnnnnnnnnnnnnnnnnnnnnnnnnnnnnnnnnnnnnnnnnnnnnnnnnnnnnnnnnnnnnnnnnnnnnnnnnnnnnnnnnnnnnnnnnnnnnnnnnnnnnnnnnnnnnnnnnnnnnnnnnnnnnnnnnnnnnnnnnnnnngcattactcttttagggaaggtgagagctaatttatatcagagcttttattacttgtcaggatatttaaatttctatacctgtactgctttcatatttgaagtgagaagaaagtttatgcttgtataatgcttaaatttcgatccattgtgagaatattttcactgacatctgatggcacttgttgacaaatcattcaagtgagaccatgctactagacatgattttgaaagagtccatgatttcataaaactcatttttattttgttctcagtcactctgttaggtaaaaatatgaggaattcatgtacattttatattttctgaatttataatccttgcactcccaattttaatgacaataaaatattaacagaattgttttaatgtactctaatttttaaaacatactttttattatcttcattcatcaattacagcttcattaatttttggtctatataccaatttaagtggcatgcaaacctacctgtttcttctcctcttcctatatatcgatctccaaaatggaagctaaatggtggtcttggcaactattcaccctacctcaggtcatagaatttgtaaagtttgtgttcatccctagtttttcagtctgttgaatgtcgatggggcaagaactcagacttctactttatcaagtaccacacactctggaacccttcattttccttttcccctcaaggtgtctgagtcagatgggatgctgtttaccccatctcttcaccagtcacttgaatgatatattctaagtgagaggtaaaggaaaatgtaggcacaataaacactgctatttttctctttgtctgggaaaggaagctgaatcttgtattttacctatgctatttaggactacttcctggagcttggcagattttcctctgaaaccagagaacaataggagtctcaaaaatggaaacctgaacatctgagggaatgggctgatagactttcccaaaaacaaattagggaaagtaacttacaaccaccccattccaaatttttaaagcaacatgaaaacgttctttgataaatgataaccaacagtcttcctgacttaagttgcattctcagtgcagaattattgggtttttcttaaagagcatgagcaggtttctggggacctttaagattattagcggactcgtcccaaaatggnnnnnnnnnnnnnnnnntttctctgtgctggaaaatcagcccatagagtacattcccaaattctaaatagctgaccctacattcatttttcatgctcaaacataatataacaaataataacagtatttttgggcaaaatccaccctacttgatgaggaccatttgcttgtgctcagtatctagaaatgcatacactccacatttctgcccatttcaaattgggactcccgttctttgccaggagatcttacccatccgtttacagattaatcttttatccttttctggagtacaaagtcttagagtgtctgaaatctaagacatcttggccccattgacacaaggtctatattcttccctacatagaccgctgtctgctcaaatacttgtcttctggtttcacaggcttcagctcatagattctgccctaactttgggtaacaaaagccttcccctagaatgtgaaggccagacgtacctctgattctgattcatccatacttcatcttatgttttttaacagttggattctgctgagtgtccagagaccttgggttaagtatgtccatcttcagtagctcattggatcacttttctttcctcacttgagtattctagcagtcattctcctaatatgaccactttcaggtttagtttacctggcttacctgaggaaactgacaacttgttggtagttaggcactcatgnnnnnnnnnnnnnnnnnnnnnnnnnnnnnnnnnnnnnnnnnnnnnnnnnnnnnnnnnnnnnnnnnnnnnnnnnnnnnnnnnnnnnnnnnnnnnnnnnnnnnnnnnnnnnnnnnnnnnnnnnnnnnnnnnnnnnnnnnnnnnnnnnnnnnnnnnnnnnnnnnnnnnnnnnnnnnnnnnnnnnnnnnnnnnnnnnnnnnnnnnnnnnnnnnnnnnnnnnnnnnnnnnnnnnnnnnnnnnnnnnnnnnnnnnnnnnnnnnnnnnnnnnnnnnnnnnnnnnnnnnnnnnnnnnnnnnnnnnnnnnnnnnnnnnnnnnnnnnnnnnnnnnnnnnnnnnnnnnnnnnnnnnnnnnnnnnnnnnnnnnnnnnnnnnnnnnnnnnnnnnnnnnnnnnnnnnnnnnnnnnnnnnnnnnnnnnnnnnnnnnnnnnnnnnnnnnnnnnnnnnnnnnnnnnnnnnnnnnnnnnnnnnnnnnnnnnnnnnnnnnnnnnnnnnnnnnnnnnnnnnnnnnnnnnnnnnnnnnnnnnnnnnnnnnnnnnnnnnnnnnnnnnnnnnnnnnnnnnnnnnnnnnnnnnnnnnnnnnnnnnnnnnnnnnnnnnnnnnnnnnnnnnnnnnnnnnnnnnnnnnnnnnnnnnnnnnnnnnnnnnnnnnnnnnnnnnnnnnnnnnnnnnnnnnnnnnnnnnnnnnnnnnnnnnnnnnnnnnnnnnnnnnnnnnnnnnnnnnnnnnnnnnnnnnnnnnnnnnnnnnnnnnnnnnnnnnnnnnnnnnnnnnnnnnnnnnnnnnnnnnnnnnnnnnnnnnnnnnnnnnnnnnnnnnnnnnnnnnnnnnnnnnnnnnnnnnnnnnnnnnnnnnnnnnnnnnnnnnnnnnnnnnnnnnnnnnnnnnnnnnnnnnnnnnnnnnnnnnnnnnnnnnnnnnnnnnnnnnnnnnnnnnnnnnnnnnnnnnnnnnnnnnnnnnnnnnnnnnnnnnnnnnnnnnnnnnnnnnnnnnnnnnnnnnnnnnnnnnnnnnnnnnnnnnnnnnnnnnnnnnnnnnnnnnnnnnnnnnnnnnnnnnnnnnnnnnnnnnnnnnnnnnnnnnnnnnnnnnnnnnnnnnnnnnnnnnnnnnnnnnnnnnnnnnnnnnnnnnnnnnnnnnnnnnnnnnnnnnnnnnnnnnnnnnnnnnnnnnnnnnnnnnnnnnnnnnnnnnnnnnnnnnnnnnnnnnnnnnnnnnnnnnnnnnnnnnnnnnnnnnnnnnnnnnnnnnnnnnnnnnnnnnnnnnnnnnnnnnnnnnnnnnnnnnnnnnnnnnnnnnnnnnnnnnnnnnnnnnnnnnnnnnnnnnnnnnnnnnnnnnnnnnnnnnnnnnnnnnnnnnnnnnnnnnnnnnnnnnnnnnnnnnnnnnnnnnnnnnnnnnnnnnnnnnnnnnnnnnnnnnnnnnnnnnnnnnnnnnnnnnnnnnnnnnnnnnnnnnnnnnnnnnnnnnnnnnnnnnnnnnnnnnnnnnnnnnnnnnnnnnnnnnnnnnnnnnnnnnnnnnnnnnnnnnnnnnnnnnnnnnnnnnnnnnnnnnnnnnnnnnnnnnnnnnnnnnnnnnnnnnnnnnnnnnnnnnnnnnnnnnnnnnnnnnnnnnnnnnnnnnnnnnnnnnnnnnnnnnnnnnnnnnnnnnnnnnnnnnnnnnnnnnnnnnnnnnnnnnnnnnnnnnnnnnnnnnnnnnnnnnnnnnnnnnnnnnnnnnnnnnnnnnnnnnnnnnnnnnnnnnnnnnnnnnnnnnnnnnnnnnnnnnnnnnnnnnnnnnnnnnnnnnnnnnnnnnnnnnnnnnnnnnnnnnnnnnnnnnnnnnnnnnnnnnnnnnnnnnnnnnnnnnnnnnnnnnnnnnnnnnnnnnnnnnnnnnnnnnnnnnnnnnnnnnnnnnnnnnnnnnnnnnnnnnnnnnnnnnnnnnnnnnnnnnnnnnnnnnnnnnnnnnnnnnnnnnnnnnnnnnnnnnnnnnnnnnnnnnnnnnnnnnnnnnnnnnnnnnnnnnnnnnnnnnnnnnnnnnnnnnnnnnnnnnnnnnnnnnnnnnnnnnnnnnnnnnnnnnnnnnnnnnnnnnnnnnnnnnnnnnnnnnnnnnnnnnnnnnnnnnnnnnnnnnnnnnnnnnnnnnnnnnnnnnnnnnnnnnnnnnnnnnnnnnnnnnnnnnnnnnnnnnnnnnnnnnnnnnnnnnnnnnnnnnnnnnnnnnnnnnnnnnnnnnnnnnnnnnnnnnnnnnnnnnnnnnnnnnnnnnnnnnnnnnnnnnnnnnnnnnnnnnnnnnnnnnnnnnnnnnnnnnnnnnnnnnnnnnnnnnnnnnnnnnnnnnnnnnnnnnnnnnnnnnnnnnnnnnnnnnnnnnnnnnnnnnnnnnnnnnnnnnnnnnnnnnnnnnnnnnnnnnnnnnnnnnnnnnnnnnnnnnnnnnnnnnnnnnnnnnnnnnnnnnnnnnnnnnnnnnnnnnnnnnnnnnnnnnnnnnnnnnnnnnnnnnnnnnnnnnnnnnnnnnnnnnnnnnnnnnnnnnnnnnnnnnnnnnnnnnnnnnnnnnnnnnnnnnnnnnnnnnnnnnnnnnnnnnnnnnnnnnnnnnnnnnnnnnnnnnnctgtaataccagcagtttgagaggccaaggcggtggatcacttgaagccaggagttcgagaccagcctggccaacatagcaaaaccccgtctcctttaaaatacaaaaaacttagctaggcttggtggcacgagcctatagtcccagctactcgggaggccgaagcaggagaatcacttgaacccaggaggcagagtctgcagtgagccaagatcgcaccattgtgctgcagcctggggtgatagagcgagactctgtctnnnnnnnnnnnnnnnggaaagaaagaaatctctgcttctgcttctatactatcaaaacttctaccctagaatgccccctggcaccttctaacccaatctaatacagagattatgtaggaacccattaacaagctgctatataattataagcagctctcacagtagggttggaagagagtatgaggaaaactagaagtactgtatttttgctattagaaatgaaatattatttcatgtacctttgaaaaaaataacaggattttacagccttctgatgattcattcaaaacatggggaatagttcatatgtttgttaaatgaaaatcttatgtagctatttgtgtgtccctcccacttcagaactacaaaaacatatatatgaattt

SEQ ID NO: 31756 - DNA, 570 bp, Macaca Mulatta
  misc_feature (1)...(570): n = A,T,C or G
tggccgctgacaggagctctgtcagccttcttaataacatctggcttagtcatgtgatttcacttctactccaccaccctactaatactaggcctactaaccaatacactaaccttataccaatgatgacgcgacattgtacgagaaagcacataccaaggccaccacacaacacccgtccaaaaaagccttcggtacggaataacactattcatcatctcagaagcattcttctttgtcggcttcttctgagcattttaccactcaagccttgctccaacaccctgcttaggaggccattgaccaccaacaggcatcacccctctaaaccccatagaagtacccctcctaaacacctctgtattacttgcatccggagttacaattacctgagctcannnnnnnnnnnnnnnnnnnnnnnnnnnnnnnnnnnnnnnnnnnnnnnnnnnnnnnnnnnnnnnnnnnnnnnnnnnnnnnnccaacaggcattatccccttaaaccccctagaagtacccctcctaaacacctctgaactactcgcatctggggttacaatcacctgagctca

SEQ ID NO: 31757 - DNA, 1074 bp, Macaca Mulatta
  misc_feature (1)...(1074): n = A,T,C or G
ctattatggcgagaatggggcgcttttttacaatattttgcggcgcgcgaataaatgtgcttcaaataggtagaaatattataccaaacaccggatatattttgtcccgcataggaagttggtgccaaaggggcggcgcgggggggggtctataaattttggatatattttgggagggcctccgcggctttgggagactttcccctgggtttgaatataggattcccccgggtaaattgggacccttccaggaaaattccccattcttggggaatttggtttcaagaaaccggtttcggtttgcccggcccgggggcggtttttttttatttgggaggagaattccccaggcaccttagttcatgagaccacaggattttcctatggggaaacaaggctatggacccatgtttccactttaccctaccggggccccgcgcgcccaaaacgaatgtgttctaagaaaagctttctcgaggggccgaaggcggcccgacaaggatagtttttggtggtttggttngnntgttacatgaaagtttttagtttattaatctgcttgtgaaaaatccaaaatggacacaggtagcctttactgcagcacctttactctttcggctgtgatccaatctccagctcactttttgccagcaccaacattggcctttgcagtccccctgactttcttcattctgttcttgcgttcctttcgttgctttcttgaggtctttttcttctcatacaggccatgtcttgcaagtctatgtttgggttcatttttctttgcataatccagggagtcataaatcatgccaaagccagttgtcttgccaccaccaaaatgagttctgaatccaaatacaaagatgacatccggtgtggtcttgtacattttggctagtttttcccgaatttctgtcttaggcactgttgccttcccagggtgaaggacgtcaatgaccatttgtttcctctgaagtagtcggttggtcatgaactttctagtgcggatagttacggtgtcgttcatgatggctgcctatctccggacagtcagggaggaaaagagccccc

SEQ ID NO: 31758 - DNA, 854 bp, Macaca Mulatta
gggctcttggggatctcttcttttcccgtgaatccgtcgccatgaaggtggagctgtgcagttttagcgggtacaagatctaccccggacacgggaggcgctacgccaggaccgacgggaaggttttccagtttcttaatgcaaaatgcgagtcggcgttcctttccaagaggaatcctcggcagataaactggactgtcctctacagaaggaagcacaaaaagggtcagtcggaagaaattcaaaagaaaagaacccgccgagcagtcaaattccagagggccattactggtgcatctcttgctgatataatggccaagaggaatcagaaacctgaagttagaaaggctcaacgagaacaagctatcagggctgctaaggaagcaaaaaaggctaagcaagcatctaaaaagactgcaatggctgctgctaaggcacctacaaaggcagcacctaagcaaaagattgtgaagcctgtgaaagtttcagctccccgagttggtggaaaacgctaaactggcagattcgatttttaaataaagattgcattataacctccggagacaaccgccaaaggatgtatatctactcttccccctttttccgggcccccccccggcgccccctcaaggaaggccttcctagaaacccttctccgttgggggggccgcgggcggccccggccaggttacacggcgcaacctcgggcccattcccctggttttctccccacgcgaaattccctggcgcccctcgacgctccggtgggccccgcgataccccttcgccctgtataacacacacccgctcctgtgttcgacgctacctttacactcctcctctgcttaccatat

SEQ ID NO: 31759 - DNA, 351 bp, Macaca Mulatta
aggtggcaaaaaggtgagtggcaggatggtctctggcccttgaggatgtcttagtctggtaaggacttgagagaggtgagccatgggtctcacccaagccccctcctcgatccatctccctccatagaaatggtgcactgccttagtcttgagcccccacactacacagcagggctggcagcacaaacgtgcagtgagaggagggacgaagcaaacaactcctgaggaggggcaaggtccaagatctggaacacctgcctggggtattgtctcctcgccatccaccccagggttctcccagccctttgatggaaaaggtgtttgctgtctgcgtttagcatgacttagctc

SEQ ID NO: 31760 - DNA, 505 bp, Macaca Mulatta
  misc_feature (1)...(505): n = A,T,C or G
ggttagcggaaaacggaagcggagtggccgagaagcagcttccgttagcactaccttaaaaggaaaagagccagataaagagaaaggttaaaagtatgagaaagtgcagaagccactggtctcagggagacagagaaagacaccaaagaagaagtcactattatgagggaccacacaccagccactcaagnnnnnnnnnccggacacgtgatgaggtagtgacgccgccactgccggaacacgctgctgcaggctccccgatggccatgtcnnnnnnnnnnnnnnnnnnnnnnnnnnnnnnnnnnnnnnnnnnnnnnnnnnnnnnnnnnnnnnnnnnnnnnnnnnnnnnnnnnnnnnnnngcactaaccaggctgtatctggacaaggccaccttaatatggaatggaaatgttgtttcagggctggatgccctaaataatttttttgacacattgccttctagtgagttccaggtcaatatgttagattgccaaccagttcatg

SEQ ID NO: 31761 - DNA, 403 bp, Macaca Mulatta
  misc_feature (1)...(403): n = A,T,C or G
ctcttcgaagcctcccacttgattcaagacttttacaggaaaggcagctgcagctgctatcagcaacgcatgcagctggcccagaaannnnnnnnnnnnnnnnnnnnnnnnnnnnnnnnnnnnnnnnnnnnnnnnnnnnnnnnnnnnnnnnnnnnnnnnnnnnnngtcctggagtacagacaaaccaagctctgggtcctaagccccagggacttctgcctcctagcagccaccaaggcctcctggtccagcagctgtcccctcaaccaccccaggggccccagggcatgctgggccctgcccaggtggctgtgttgcagcagcagcaccctggagctttgggcccccagggccctcacagacaggtgcttatgacccagtcccgggtgctcagttcccccca

SEQ ID NO: 31762 - DNA, 895 bp, Macaca Mulatta
tctcagccttcccatttgtaagttcctccaggccaagttctatcagctgtcccttgaacgacccatggaaaggctgctcctgacctccctgcagagcacaatgtgctcagccacagcaggcaacctgagaaagttgtacacacttctgagcaactgcatccccccagccaagctgcccgagcttcactcacactggctgctcaacgaccgcatctggctggctcaccgctggagaagccgagctgagagcagccgctacttccagagcctcgaggtcaccacccgcatcctcagccagttctttggcaccaccccatctgagaaacaaggtatggcttctctgttccgttacatgcagcagaactctgcagacatggcaaacttcaaccagggcctgtgtgcccagaacaatcatgccccctcagacaccatccccgaaagccccaaagtggagcagctggtagaatcccatatccagcactcccttaatgccatctgcacagggccagcagcccaactctgcctgggcgagcttgctgtggtccagaaatccacacacctcattggctctggctcagaaaagatgaacatacagatcctggaagatacccacaaggtgcagccccagccccctgccagctgcagctgctactttaaccaggccttccacctgccctgccgtcacatcctagccatgctcagcgcccgccgccaggtgctccagcccgacatgctgccggctcagtggacggcaggctgtgccaccagtctagacagcatcctgggcagcaagtggagtgagaccctggataagcacctggcagtgactacacctcactgaggaggtgggtcagctgttgcagcactgcagcaaggaggagtttgagcggaggta

SEQ ID NO: 31763 - DNA, 987 bp, Macaca Mulatta
  misc_feature (1)...(987): n = A,T,C or G
ggtacaatgtttgtgttatggcgtatggacagacgggcagcgggaagagctataccatgttgggaccccattcggacgacggccctgtgttgccgcttgacccacagagtgaattaggaattatccctagagcagctgaggagctcttcagnnnnnnnnnnnnnnnnnnnnnnnnnnnnnnnnnnnnnnnnnnnnnnnnnnnnnnnnnnnnnnnnnnnnnnnnnnnnnnnnnnnnnnnnnnnnnnnnnnnnnnnnnnnnnnnnnnnnnnnnnnnnnnnnnnnnnnnnnnnnnnnnnnnnnnnnnnnnnnnnnnnnnnnnnnnnnnnnnnnnnnnnnnnnnnnnnnnnnnnnnnnnnnnnnnnnnnnnnnnnnnnnnnnnnnnnnnnnnnnnnnnnnnnnnnnnnnnnnnnnnnnnnnnnnnnnnnnnnnnnnnnnnnnnnnnnnnnnnnnnnnnnnnnnnnnnnnnnnnnnnnnnnnnnnnnnnnnnnnnnnnnnnnnnnnnnnnnnnnnnnnnnnnnnnnnnnnnnnnnnnnnnnnnnnnnnnnnnnnnnnnnnnnnnnnnnnnnnnnnnnnnnnnnnnnnnnnnnnnnnnnnnnnnnnnnnnnnnnnnnnnnnnnnnnnnnnnnnnnnnnnnnnnnnnnnnnnnnnnnnnnnnnnnnnnnnnnnnnnnnnnnnnnnnnnnnnnnnnnnnnnnnnnnnnnnnnnnnnnnnnnnnnnnnnnnnnnnnnnnnnnnnnnnnnnnnnnnnnnnnnnnnnnnnnnnnnnnnnnnnnnnnnnnnnnnnnnnnnnnnnnnnnnnnnnnnnnnnnnnnnnnnnnggaggtgacgcgaagttactggtgattctgtgcatttctcccagccagaggcacctggcacagacgttgcagggcctgggtttcgggatccgagctcggcaagtccagcgaggccctgcccgaaagaggccgcccagctcccagatggaggggaagaggaggccggattg

SEQ ID NO: 31764 - DNA, 1165 bp, Macaca Mulatta
  misc_feature (1)...(1165): n = A,T,C or G
cgggtcgcgcgaaaaagaggttttttaattcccccggtgttttttaaaggcnnnnnnnnnnnnnnnnnnnnnnacccatttttaaatattatagttgggggagaattccaatctttctcccaacaaaaaggtggggtggcttggggcaactttttttagaaaggaaaaggaaggttttcccataatggcattggaactaaaaaaattcttcaaaaaccaacttaaggcagcttatggctatagctcagtaaaggtaccattaaaactgttcggggctagtgtacattttcaggttaatagagatctacattttgggttttagaaaggcagcaataattatattttggcttttagtctagatgcttaacatagttaaggcgacagtttaagcatattaaatgaaggtagttaaaatttaagaatcatcacaatctcttgcaacctacatacactgtttaatgcttacatggaatgaaaccagtgttcttaattggcattttatacacacaccgaatttttttaaaaaatcaaaggcaatcattctaaatgtactatggtagcatgttaaaaatgcaaatatgctatagaactaaagtaatatgaacagcactactcattacctaggagaaaggtgactggttttcacacaaagctaagcctgtatcagtcatcctaatcacaatggcttataaaagcatcaggtttccagtagagaaactgttctaggaaagtcagtaaatctcttgaaagtttcacatctgtaaaaccaggataaggctacaactattttgaaatctgaacaaggtatcagatgaaaatagtaagattcccagccataatgtaagatagaaaagtcctcatgcagcatatgcttgctggctccgggaaagcttcatgtgcataatacagaagttgccaaagaaggaaactggagacgttcagctgcatttnccatggtgccgtgaattttaaacctcaggaatggtgtggtccattaggcttttcatgatgcttggtgccatcctacaaaagaggtgcttttattatatactgagattctgtcccccccccccgaaatgctatgtaatccaagaaattcccattccatttagcactgttagcatcaatgtgatggagagaagaaagatcttttaatgagtccaga

SEQ ID NO: 31765 - DNA, 521 bp, Macaca Mulatta
  misc_feature (1)...(521): n = A,T,C or G
gggggggtggaggtcaccatggcagctgcgttggctcggcttggtctgcggcctgtcaaggaggttcgggttcagttctgccccttcgagaaaaacgtggaatcgacgaggaccttcctccaagcagtgagcagcgagaaggtccgctccactaatctcaactgctcagtgattgcggacgtgaggcacgacggctccgatccctgcgtggacgtgctgttcggagacgggcatcgcctgattatgcgcggcgctcatctcaccgctgtggaaatgctcactgccttcgcttcccatatccgggccagggacgcggcgggcagcgcggacaagccgggcgctgatactagtcgctgacagcgtcagagagaccaacaagatgattttagcgtggactaggacacttaacctaagaagagtttcacttaatcattcaaatcactatctggagggccgcggagcgcaaaataaaatgtaaaaccctacannnnannnnnnnnnnnnnnnnnnnnnnnnnnnnn

SEQ ID NO: 31766 - DNA, 702 bp, Macaca Mulatta
ctgaagtcagctatgccatcacctcctggcacaataaaggcttcacattaaaaccacaccataccttgattgagctcatggcagtaaacattgaacattgatatccatgggaataggattagaaaaggattgctttctgcatataataatctgtggactgtgccattttacagcgtaccaaatgagaacgaggtaaaaatgtatgcagtaaggcactctgtaattgctattttttcccagctgacatgatttctcagtgttagaaaacaaacccatagaactttgctttctgcctcttcaatccatcttaccacacagtatttcatgattcagtcaaattcttcaaagtcttataagcaggagtgtttattctgctgtatttctgtgaaattgaaaacttggaagaagcttcaaagctcttggaggctttaaagttctttctgatgggtatgcattacagttaagtgatgtttgcgatttatataattttgacgtattaaatgttatatttacaaagttccaaatgaatcagtatttttaaaaataaaactatgaaagcattaaaatataggtgaattttaaaaaatgtatctgatcatttccctctcctgcttctaaggttataatgataaagtcatgcactgttcagactccaagtgtggttataaaaggcttttaactttgttctactcactccttttt

SEQ ID NO: 31767 - DNA, 4475 bp, Macaca Mulatta
  misc_feature (1)...(4475): n = A,T,C or G
gctttcagtaaaaagttttcctttttccatatatgaaatctggcagtaaaagatgtttgtattaatcctcattctccattgcttcgtgtgaccaaatcttccaagcttgaaaaaggttctttacctggaactgactggacagtttttcagatcaatcattcagcctaccaaccggtaatatttgccaaagtaaagaccccagaaaacctttctccttccatctctaaaggtgctttttatgccactataatacatgacctggggcttcatgatggaattcaaagggttctttttggcaacaacttgaacttttggctgcacaagctcatcttcatagatgccatctccttcttatcagggaagaggctgacattgtccttggacaggtacattcttgtggatattgatgatatatttgtgggaaaagagggaacaagaatgaacaccaatgatgtaaaggnnnnnnnnnnnnnnnnnnnnnnnnnnnnnnnnnnnnnnnnnnnnnnnnnnnnnnnnnnnnnnnnnnnnnnnnnnnnnnnnnnnnnnnnnnnnnnnnnnnnnnnnnnnnnnnnnnnnnnnnnnnnnnnnnnnnnnnnnnnnnnnnnnnnnnnnnnnnnnnnnnnnnnnnnnnnnnnnnnnnnnnnnnnnnnnnnnnnnnnnnnnnnnnnnnnnnnnnnnnnnnnnnnnnnnnnnnnnnnnnnngagcatggcattccgacggacatgggctacgctgtggcccctcaccattcaggcgtctaccctgtacatgttcaactttacgaggcctggaagaaggtctggaacattaaaatcaccagcactgaagaatatccacatctgaaaccagctagataccggaggggttttatccacaaaaacatcatggtnnnnnnnnnnnnnnnnnnnnnnnnnnnnnnnnnnnnnnnnnnnnnnnnnnnnnnnnnnnnnnnnnnnnnnnnnnnnnnnnnnnnnnnnnnnnnnnnnnnnnnnnnnnnnnnnnnnnnnnnnnnnnnnnnnnnnnnnnnnnnnnnnnnnnnnnnnnnnnnnnnnnnnnnnnnnnnnnnnnnnnnnnnnnnnnnnnnnnnnnnnnnnnnnnnnnnnnnnnnnnnnnnnnnnnnnnnnnnnnnnnnnnnnnnnnnnnnnnnnnnnnnnnnnnnnnnnnnnnnnnnnnnnnnnnnnnnnnnnnnnnnnnnnnnnnnnnnnnnnnnnnnnnnnnnnnnnnnnnnnnnnnnnnnnnnnnnnnnnnnnnnnnnnnnnnnnnnnnnnnnnnnnnnnnnnnnnnnnnnnnnnnnnnnnnnnnnnnnnnnnnnnnnnnnnnnnnnnnnnnnnnnnnnnnnnnnnnnnnnnnnnnnnnnnnnnnnnnnnnnnnnnnnnnnnnnnnnnnnnnnnnnnnnnnnnnnnnnnnnnnnnnnnnnnnggtatatggatttcttcccagtcccatctaatgtcaccaccgactttttgtttgagaagagtgccaattacttccactcagaggaagcccctaaaagagctgcttctctggttcccaaagccaagattatcaccattctcattgacccttcagaccgagcatactcctggtaccagnagcatcaacgatcacatgaagaccctgcagctctaaagtttagcttctacgaagtgatctcagcagggccccgtgcaccctcggagctcagagccttgcagaagagatgtttggtcccggggtggtatgccagccacatcgagagatggcttgtttatttccctccatttcagnnnnnnnnnnnnnnnnnnnnnnnnnnnnnnnnnnnnnnnnnnnnnnnnnnnnnnnnnnnnnnnnnnnnnnnnnnnnnnnnnnnnnnnnnnnnnnnnnnnnnnnnnnnnnnnnnnnnnnnnnnnnnnnnnnnnnnnnnnnnnnnnnnnnnnnnnnnnnnnnnnnnnnnnnnnnnnnnnnnnnnnnnnnnnnnnnnnnnnnnnnnnnnnnnnnnnagcaggacatttctgtcaagctactatcgagatcacaatgtggaactctcaaagctgctgcacaaactgggtcagcctctgccatcctggctgagacaggagctgcagaaagtaagatagcactgagagaaaactcgagacttcatcgtccatgtagaacacaccttttccaaagcttccagaagctaccaaaagacagttgaaaaatatacctctttcaatgagaaaaaagaacaaagttttctccatgtgctggcatgtggatgatnnnnnnnnnnnnnnnngtatgtgttaaagccttgaggcctgtggcctttctcttaactcatgtctgagcctgtgggattattgtagactactgtgcactcatgtggaagtcaattgcaaccaacataaatatcaaacacaaatgcagaactgttccatttcatagtaatatttacacttttatatatcaactaagattgtgtctctgtaggtttttagaccactgtttgcctgtacaatgttttcttattcttttattctataaactgtcctatgaaacaagaagcaaaataaacttcacaatgtagcataaaatgtcaaaagcataacacccatgaaaaatgcttgccaaaatttaaatccacttaagtatttagaaataattgtaaattataatttgtgctagatcagagtggaaacgtaatacatgagctttatctgcaccnnnnnnnnnnnnnnnnnnnnnnnnnnnnnnnnnnnnnnnnnnnnnnnnnnnnnnnnnnnnnnnnnnnnnnnnnnnnnnnnnnnnnnnnnnnnnnnnnnnnnnnnnnnnnnnnnnnnnnnnnnnnnnnnnnnnnnnnnnnnnnnnnnnnnnnnnnnnnnnnnnnnnnnnnnnnnnnnnnnnnnnnnnnnnnnnnnnnnnnnnnnnnnnnnnnnnnnnnnnnnnnnnnnnnnnnnnnnnnnnnnnnnnnnnnnnnnnnnnnnnnnnnnnnnnnnnnnnnnnnnnnnnnnnnnnnnnnnnnnnnnnnnnnnnnnnnnnnnnnnnnnnnnnnnnnnnnnnnnnnnnnnnnnnnnnnnnntaagtactatagcaaaagtgattttttcatatacatggtctagtgaatatatgtaaaaattactaactcttccatcacaacataattgttatactgaaatatatactgtaaagctgttggatggtaaatagaaacacactgagtacaccaaaacagtaaataacaatgtaaagtgtactgactgaatcctctgaaggggagaaattatagaggtctaaagacatatcattgagaattctatgtccacttgctgtaagctgtgaatcgatcccagtagtcctcactagttctacagaaatgcatgcctagagtctgaggtatgtgtcatctccagaaacaggttgactttcaaatatgaatagctnnnnnnnnnnnnnnnnnnnnnnnnnnnnnnnnnnnnnnnnnnnnnnnnagtttccctagatgatgtgattagactatttacatttaggttattaaaaaattccattttcccagatagttcaaaataaaattatgtaacgtgaagatttataacaaaaaacaaattaatatattatttgtaatctaatgtctgcagtgatacttttgatataaggcaaagaaacaaaagcagagcagaggctcacttttgaaaatatttcacccatcactctggtggaagataacagttcataggtacaattaaggattagctactaaattaaatgcaggaagtacaaagatgagcaagttatgctcttgcaatatatttacatttaaattgtaaatgatagacatggttaataaagttttcaaaaaagaaaagaatacatcatacttattgtcctgttaacatttacttaannnnnnnnnnnnnnnnggggacagagttttgctatgtcacccaagttggagtgcaatggtgtgatctcggctcactgcaacctccgcctcctgggttcaagtgattctcctgcctcagcctcctgagtagctgggattatagccacgcaccaccacacccgggtaatttttgtatttttagtagcgaccagggtttcaccatgttggccaggctggtcttgaactcctgacctcatgatctacccaccttggcctctcaaagtgctgggattacaagcgtgagccaccatgcccagaatacttaatttttaaatgtactgtacatatacataaaatttaagtagtaaattaattccctgctatgattataagccttcataaaatattatcaaagctatgattagaaaaaaatgagaggaaaacctataggaaaaatattttcattgtcattataatgagtaaaactatcaattactaattagaaaacaaattgtgagatctacttactataaatgtttagatgtacattataattactaacttttttaagttttatgtacctaaagaatatgctaatttttaaatatactattagtagaa

SEQ ID NO: 31768 - DNA, 996 bp, Macaca Mulatta
  misc_feature (1)...(996): n = A,T,C or G
tgcagtgggtttctgtgcagcattgcagaatccacacctagagaacagaagacacagacacgtacgtctactaccctggttagaaggaagctttggatcttcggtgnnnnnnnnnnnnnnnnnnnnnnnnnnnnnnnnnnnnnnnnnnnnnnnnnnnnnnnnnnnnnnnnnnnnnnnnnnnnnnnnnnnnnnnnnnnnnnnnnnnnnnnnnnnnnnnnnnnnnnnnnnnnnnnnnnnnnnnnnnnnnnnnnnnnnnnnnnnnnnnnnnnnnnnnnnnnnnnnnnnnnnnnnnnnnnnnnnnnnnnnnnnnnnnnnnnnnnnnnnnnnnnnnnnnnnnnnnnnnnnnnnnnnnnnnnnnnnnnnnnnnnnnnnnnnnnnnnnnnnnnnnnnnnnnnnnnnnnnnnnnnnnnnnnnnnnnnnnnnnnnnnnnnnnnnnnnnnnnnnnnnnnnnnnnnnnnnnnnnnnnnnnnnnnnnnnnnnnnnnnnnnnnnnnnnnnnnnnnnnnnnnnnnnnnnnnnnnnnnnnnnnnnnnnnnnnnnnnnnnnnnnnnnnnnnnnnnnnnnnnnnnnnnnnnnnnnnnnnnnnnnnnnnnnnnnnnnnnnnnnnnnnnnnnnnnnnnnngtaagaataagtaaggagcaagaccacattataataattcccagaggcctatctttttctgaagctacagcctccaatttggnnnnnnnnnnnnnnnnnnnnnnnnnnnnnnnnnnnnnnnnnnnnnnnnnnnnnnnnnnnnnnnnnnnnnnnnnnnnnnnnnnnnnnnnnnnnnnnnnnnnnnnnnnnnnnnnnnnnnnnnnnnnnnnnnnnnnnnnnnnnnnnnnnnnnnnnnnnnnnnnnnnnnnnnnnnnttcccatttctcaagagtctcttattctgggagatgttgtctattccgactaccaagggtcgcttgaagaacaggaggagagaattcagctgcagaaagttctggggccaagttgtaaggt

SEQ ID NO: 31769 - DNA, 284 bp, Macaca Mulatta
tatttgaagagcttgggatggatttttgactaaatctcccccgaggagggtgaacaagatgatctgagagatcactactgctcttggagctccttttcctaaagctaaggccagcctccgtcacaaatgcccataaaatctggttcatcttcgatgaacaataaatatttgttgaacaaataaataactgccctgcattaagtctgtagtgggctttcttttctgtgtgacctcatttcttccaggctctaattgtctaaattagcaccacagaatccattaac

SEQ ID NO: 31770 - DNA, 1269 bp, Macaca Mulatta
  misc_feature (1)...(1269): n = A,T,C or G
aggttgaacaagatctgtagtggtctctcctttcagaggaaaaaccagtttatgcagcggcttcacaactattggctgttgaagcggcaggcacggaatggtgtacctcttatccggcgcctgcactcccatctgcagtcccaaagagatgctgagcannnnnnnnnnnnnnnnnnnnnnnnnnnnnnnnnnnnnnnnnnnnnnnnnnnnnnnnnnnnnnnnnnnnnnnnnnnnnnnnnnnnnnnnnnnnnnnnnnnnnnnnnnnnnnnnnnnnnnnnnnnnnnnnnnnnnnnnnnnnnnnnnnnnnnnnnnnnnnnnnnnnnnnnnnnnnnnnnnnnnnnnnnnnnnnnnnnnnnnnnnnnnnnnnnnnnnnnnnnnnnnnnnnnnnnnnnnnnnnnnnnnnnnnnnnnnnnnnnnnnnnnngttttatatgtttaggttccagatnnnnnnnnnnnnnnnnnnnnnnnnnnnnnnnnnnnnnnnnnnnnnnnnnnnnnnnnnnnnnnnnnnnnnnnnnnnnnnnnnnnnnnnnnnnnnnnnnnnnnnnnnnnnnnnnnnnnnnnnnnnnnnnnnnnnnnnnnnnnnnnnnnnnnnncgagcagctgtccgcctgcgggacctgtgaggggccatcctacggcatgcccggcggcaggcagagaacatcggctatgaccccgagaggggcactcacctgcccgagtcacccaaattggaagacttttaccgcttctcctgggaagacggtggacaacatcctcatcccagagaaccgggcccatttgtccccagaggtgcagctgaaggagctgctggagaaactggacctggtgagcgccatgcggtccagtggggcccgcacccgccgtgtccgcctgctacgccgggagatcaatgcnnnnnnnnnnnnnnnnnnnnnnnnnnnnnnnnnnnnnnnnnnnnnnnnnnnnnnnnnnnnnnnnnnnnnnnnnnnnnnnnnnnnnnnnnnnnnnnnnnnnnnnnnnnnnnnnnnnnnnnnnnnnnnnnnnnnnnnnnnnnnnnnnnnnnagatgactccaaactgcctcctccaccaaccctggagcccactgggcctgcaccttccttgtctgagcaagaatccccgccggagcccccaactctgaaacccatcaatgatagcaaacctccaagccggttcctaaagcccagaaaggtggaagaagatgagctcttggaaaaatcaccgctgcagctagggagtgagcctttgcaacgcttgctcag

SEQ ID NO: 31771 - DNA, 360 bp, Macaca Mulatta
gggggggcgccaggcgcgatgtccggccgcgaagggggcaagaagaagccactgaaacagcctaagaagcaggccaaggagatggacgaggaagataaggctttcaagcagaaacaaaaagaggagcagaagaaactcgaggagctaaaagcgaaggccgcggggaaggggcccttggccacaggtggaattaagaaatctggcaaaaagtaagctgttccttgtgcctgaggagatggtgaccctttatttcatccttatttaaacgtctatattccctgccataacatcttttgccacctaaagctggaattaagtgttgtcttggagctgttgtacatttaagaataaacttttgta

SEQ ID NO: 31772 - DNA, 599 bp, Macaca Mulatta
  misc_feature (1)...(599): n = A,T,C or G
ggaggtgtttcatagagaactaaggagcaactccatgaagacctggggcctgcgggcagctggctggatggccatgttcatgggcctcaaccttatgacacgcatcctctacaccnnngtggactggtttcctgtctttcgagacttggtcaacattggcctgaaagcctttgccttctgcatggccacctcgctgaccctgttgaccgtggcggctggctggctcttctaccggcccctatgggccctcctcattgccggcctggcgctggtgcccatcattgttgctcggacacgggtgtcggccaaaaagttggagtgaaaagaccctggcacccgcccgacacctgcgtgagccctaggatccaggtcgtccctcacctctgacccagctccatgccagagcaggagctccggttggttttggactctgcaccctctctcctcttcaggggccagacttggcagcatgtgcgctgggttggtgttcaccagctcatgtcttccccacacctcttcttgccagtaagcagctttggtgggcagcagcagctcatgaatggacacctgacagcttctcctgctgtttccttcctctc

SEQ ID NO: 31773 - DNA, 1051 bp, Macaca Mulatta
  misc_feature (1)...(1051): n = A,T,C or G
gcgatcagcagataggggtgcgcgcgaccgctccccggcgggagccagcgaaggnnnnnnnnnnnnnnnnnnnnnnnnnnnnnnnnnnnnnnnnnnnnnnnnnnnnnnnnnnnnnnnnnnnnnnnnnnnnnnnnnnnnnnnnnnnnnnnnnnnnnnnnnnnnnnnnnnnnnnnnnnnnnnnnnnnnnnnnnnnnnnnnnnnnnnnnnnnnnnnnnnnnnnnnnnnnnnnnnnnnnnnnnnnnnnnnnnnnnnnnnnnnnnnnnnnnnnnnnnnnnnnnnnnnnnnnnnnnnnnnnnnnnnnnnnnnnnnnnnnnnnnnnnnnnnnnnnnnnnnnnnnnnnnnnnnnnnnnnnnnnnnnnnnnnnnnnnnnnnnnnnnnnnnnnnnnnnnnnnnnnnnnnnnnnnnnnnnnnnnnnnnnnnnnngatatgtacaagctgacctctgaattgcttggannnnnnnnnnnnnnnnnnnnnnnnnnnnnnnnnnnnnnnnnnnnnnnnnnnnnnnnnnnnnnnnnnnnnnnnnnnnnnnnnnnnnnnnnnnnnnnnnnnnnnnnnnnnnnnnnnnnnnnnnnnnnnnnnnnnnnnnnnnnnnnnnnnnnnnnnnnnnnnnnnnnnnnnnnnnnnnnnnnnnnnnnnnnnnnnnnnnnnnnnnnnnnnnnnnnnnnnnnnnnnnnnnnnnnnnnnnnnnnnnnnnnnnnnnnnnnnnnnnnnnnnnnnnnnnnnnnnnnnnnnnnnnnnnnnnnnnnnnnnnnnnnnnnnnnnnnnnnnnnnnnnnnnnnnnnnnnnnnnnnnnnnnnnnnnnnnnnnnnnnnnnnnnnnnnnnnnnnnnnnnnnnnnnnnnnnnnnnnnnnnnnnnnnnnnnnnnnnnnnnnnnnnnnnnnnnnnnnnnnnnnnnnnnnnnnnnnnnnnnnnnnnnnnnnnnnnnnnnnnnnnnnnnnnnnnnnnnnnnnnnggtgtctccagtgaaaatctgtgactttgacttgggcagtggggtgaaactgaacaactcctgcacccccataaccacaccggagctgaccac

SEQ ID NO: 31774 - DNA, 1069 bp, Macaca Mulatta
  misc_feature (1)...(1069): n = A,T,C or G
ggataacacaatgtacaattcggcttagtctctcaaagagattctaagatgcacctttataactattaatagcaacctggatttttttaaaatttatacttcagaatgctttaagaacctggtgttcctgggtggtcctgaattgtataagttgggaatggaagctgtaatgaccaagtcccctaaacatactgcttctttgccacgtgtgctgtgacttctcagcgggtgttttaatttatttggatccacctctgagtgagcgcacagtgatcaggtgcttcgaagccaacagaccagctcctcttcctccggatcctcttttgatctgcccagagaaagggatgcattgcccactcttcctgcatgccacctaggcgaggaagcccaccttggcaagttcactggtggcttaaaagaaaatttgcgtgggaaggtaacccccaaagaaaccaactgttttaccaaaatcccctttctatggttttttgagacaaaccttcctttatccagnccaaaccctttttataaaaanaaaaacacccnagccgtgggcaaaataaggtttttccaattcggggcgtccgggttaggatttaaaatattttcaagtataaataaggngcgcncaaaaaagtggttaaaaacataggggttccaacacctttggnaaatctccnccccacatataaaagtccccagagatctccatcactacgaataggtgcgaagtgaactccgtttccccccctaatatcccaccgaaagtgggtgtttaacaatttcttgggaatttcaccgcttcttgntaggggcnanacactcatatttggttctataccctccgtctcacgtttttttntggggatagggaattggtaaacaacgttcacaccctacaatttgttatatatgaaatttttcccaccgaaaatattagaacctggggggcgttcttggaagatagatactctagtgagcgaattgagacttcctctataatcccacctccccacacattttcagtgtcttctcccccacgagtgtacgcaaaaaacaaatggtatag

SEQ ID NO: 31775 - DNA, 866 bp, Macaca Mulatta
  misc_feature (1)...(866): n = A,T,C or G
ggagattacaatggtgacatggacttcaaaatagctggcactaataaaggaataactgcattacaggctgatattaaattacctggaataccaataaaaattgtaatggaggctattcaacaagcttcagtggcaaaaaaggagatattacagatcatgaacaaaactatttcaaaacctcgagcatctagaaaagaaaatggacctgttgtagaaactgttcaggttccattatcaaaacgagcaaaatttgttggaccaggtggatataacttaaaaaaacttcaggctgaaacaggtgtaactattagtcaggtggatgaagaaacgttttctgtatttgcaccaacacccagtgctatgcatgaggcaagagacttcattactgaaatctgcaaggatgatcaggagcagcaattagaatttggagcagtgtataccgccacaataactgaaatcagagatactggtgtaatggtaaaattatatccaaatatgactgcagtactgcttcataacacacaacttgatcaacgaaagattaaacatcctactgcctagataagtgcagaatcgaatgaatccagaagatccagtccagatatagtctctannnnnnnnnnnnnnnnnnnnnnnnnnnnnnnnnnnnnnnnnnnnnnnnnnnnnnnnnnnnnnnnnnnnnnnnnnnnnnnnnnnnnnnnnnnnnnnnnnnnnnnnnnnnnnnnnnnnnnnnnnnnnnnnnnnnnnnnnnnnnnnnnnnnnnnnnnnnnnnnnnnnnnnnnnnnnnnnnnnnnnnnnnnnnnnnnnnnnnnnnnnnnnnnnnnnnnnnnnnnnnnnnnnnnnnnnnnnnnnnnnnnnnnnnnnnn

SEQ ID NO: 31776 - DNA, 86 bp, Macaca Mulatta
gaatatattcagatgctaatgcctccactgatccagaaatggaacatgttaaaggatgaagataaagatctcttccctttacttga

SEQ ID NO: 31777 - DNA, 1212 bp, Macaca Mulatta
  misc_feature (1)...(1212): n = A,T,C or G
agttgcagaagaccctgcaaaatctcttacagagatatctacagactttgaccgttcttcaccaccactccagcctcctcctgtgaactcactgtccaccgagaacagattccactctttaccgttcagtctcacaaagatgcctaataccaatggaagtattgggcacgaaacactttctctgtcagcccagtctgtgatggaagagctaaacactnnnnnnnnnnnnnnnnnnnnnnnnnnnnnnnnnnnnnnnnnnnnnnnnnnnnnnnnnnnnnnnnnnnnnnnnnnnnnnnnnnnnnnnnnnnnnnnnnnnnnnnnnnnnnnnnnnnnnnnnnnnnnnnnnnnnnnnnnnnnnnnnnnnnnnnnnnnnnnnnnnnnnnnnnnnnnnnnnnnnnnnnnnnnnnnnnnnnnnnnnnnnnnnnnnnnnnnnnnnnnnnnnnnnnnnnnnnnnnnnnnnnnnnnnnnnnnnnnnnnnnnnnnnnnnnnnnnnnnnnnnnnnnnnnnnnnnnnnnnnnnnnnnnnnnnnnnnnnnnnnnnnnnnnnnnnnnnnnnnnnnnnnnnnnnnnnnnnnnnnnnnnnnnnnnnnnnnnnnnnnnnnnnnnnnnnnnnnnnnnnnnnnnnnnnnnnnnnnnnnnnnnnnnnnnnnnnnnnnnnnnnnnnnnnnnnnnnnnnnnnnnnnnnnnnnnnnnnnnnnnnnnnnnnnnnnnnnnnnnnnnnnnnnnnnnnnnnnnnnnnnnnnnnnnnnnnnnnnnnnnnnnnnnnnnnnnnnnnnnnnnnnnnnnnnnnnnnnnnnnnnnnnnnnnnnnnnnnnnnnnnnnnnnnnnnnnnnnnnnnnnnnnnnnnnnnnnnnnnnnnnnnnnnnnnnnnnnnnnnnnnnnnnnnnnnnnnnnnnnnnnnnnnnnnnnnnnnnnnnnnnnnnnnnnnnnnnnnnnnnnnnnnnnnnnnnnnnnnnnnnnnnnnnnnnnnnnnnnnnnnnnnnnnnnnnnnnnnnnnnnnnnnnnnnnnnnnnnnnnnnnnnnnnnnnnnnnnnnnnnnnnnnnnnnnnnnnnnnnnnnnnnnnnnnnnnnnnnnnnnnnnnnnnnnnnnnnnnnnnnnnnnnaggcaccatcatgtctgattattcagatgcctcgatttggaaaagactttaaactatttaaaaaaatttttccttctctggaattaaatataaccgatttacttgaagac

SEQ ID NO: 31778 - DNA, 484 bp, Macaca Mulatta
  misc_feature (1)...(484): n = A,T,C or G
cagacactgtataaagaaagtcaggaagcacgattttatttggtagattcagaagtactgacacatgatgtcccctaccatgattacttctataccgtgaacagatactgtatcatccgatcttcaaaacagaagtgcaggctaagnnnnnnnnnnnnnnnnnnnnnnnnnnnnnnnnnnnnnnnnnnnnnnnnnnnnnnnnnnnnnnnnnnnnnnnnnnnnnnnnnnnnnnnnnnnnnnnnnnnnnnnnnnnnnnnnnnnnnnnnnnnnnnnnnnnnnnnnnnnnnnnnnnnnnnnnnnnnnnnnnnnnnnnnnnnnnnnnnnnnnnnnnnnnnnnnnnnnnnnnnnnnnnnnnnnnnnnnnnnnnnnnnnnnnnnnnnnnnnnnnnnnnnnnnnnnnnnnnnnnnnnnnnnnnnnnnnnntacaggaaagaaaaaggacatggaaaactataacgtcactcttattgtggtgatgagtattt

SEQ ID NO: 31779 - DNA, 618 bp, Macaca Mulatta
acatctaataagcattatattttattctttcatactaattggttcttgctggaaacatatattctatttatcactttattaaccagttaacatttcgtgtagcaagatgatactggtttttttctactttttgaagctgtaatgtggtgtttctttttcccagaagaagtgatttcctctgaagatattggagctagcattttcaatggacagaagaaggtgctgtattatgctgatgcccttacggaaattgcttttgtggttccttctcctgtggagtccttaagtaagaccattttgcatggtcctgttttaggatctatatttatattcctgggttgtgtgatattactgctttggaagagattttgaagtgatctaaggcattctttagcttctaaggcattataacagaatatgcagaagcacaaggtatcttctcttaactttttaaggaaagtagttaaagacaagcagactgaccctctgataatctttaaatagtgaaggaatcccatttcaactgatatgctttctttaatttaattaatcagtacataggcttattttccagttcatttctttctataattacgagtgatccctcacttacttttt

SEQ ID NO: 31780 - DNA, 404 bp, Macaca Mulatta
  misc_feature (1)...(404): n = A,T,C or G
ccagatttgcagcttcattatacacctgtggcgtctgactctaatacctgagccaagaatggaaccttgtgagnnnnnnnnnnnnnnttgcccaggctgttatggaactcctgagtcaagtgatcctcccaccttggcctccgaaagtgtgtggattagaagaagcgtgacctaccatattcagcctacacgtatttgttaatatctaacataggactaaccagccactgccctctcttaggcccctcatttaaaaatggttatactataaaatgtgcttttcatactgggtgataataacttggacaaattctatgtgtattttttggtttgttttgctttgagacggagtctcgctctatcatccaggctggagtgcagtggcacgctctctgctcactgca

SEQ ID NO: 31781 - DNA, 771 bp, Macaca Mulatta
aatattaagtatctttccaagctgcagctgctctttggaatattttaatttataacatcatgtctttaatcttgtaaattttatttactgtcttaaaatattcttaacattgaaacactaaaatagtcattacaaaattgaaaacctctcttaatagtgattagaattacaaaaaggtctagaaccttttatgttttcttttagtgtaggataattagttggttatacactggtaacctctggtttttcaatgttaaataatggattcttaatctgggagaggatctatgaatttgctatcaggtgtctgtgaacataaaattttgtgttccctgtatttttctggagacagtagtaatagttttcattattctcagagacagaggttggtgaactaaaaaatcaagaactactatcttaaagagcagtaattggtacctagttaagagagattttggaagacaaaaatttaagggttcaatttgcaatgcattttaaatttatgtatttatttccttttagaaagtaatatgtattgcaactcagcaattgggtttacaaaactggtcatctcagaaagagaagatcatacagttttataatcaacttcgggtaagtataaaatgacatgttagcaatcttttgcctgtgtttcaataggaattaacaaaataaagggcaaaaataataataataaaagagagatgttacaggtataatattttttgaattcagtgatttattaatgttagtcaagactttattatttga

SEQ ID NO: 31782 - DNA, 344 bp, Macaca Mulatta
actccttttccatcctcgccacccaaggattcccagaaccactctcattcataagctggttgagtgggcaggcaggagaggggccggagcccctggtcccaggattcctgttgagagagcgccctggcctgtgagaagggggctggaacagggtacctgccctttggggcacccccactcccttgttcccagcaggggcagccagaggtggcttctccagccccactgccatcctggctgcttgagtgtttgcttgggatggcctgactcccaccagctatttctatctttcatgtggcagcctggctctggacctgccatcgctgtttgtactgtttgtgccc

SEQ ID NO: 31783 - DNA, 306 bp, Macaca Mulatta
ggagtctcactctgtcgcccagactggagtgccttttcccctcacagcgtgggagccaatgggtgatgtcacaccctggtttccctccacccgaaggcagtcaccttggtcgccggctcctgcctctgcgatgatccccacgagggctgcagagtggagggcacagcgaggttcggcctcattccccagggagccccaggcgagagcttggtcctggggagctgcccaggtctttgccatctcctggcctccatccagtccctcacaactcggctcctggccctgtgcaccgagcgatgactgcta

SEQ ID NO: 31784 - DNA, 843 bp, Macaca Mulatta
  misc_feature (1)...(843): n = A,T,C or G
ggggagttcctcatcactgttcctgtgctcacggtcatcagttatagaccccacaacatgtgccctgaggacagaatgttccagaccagagctgtgatcttgagaaccctctccttggctttcctgctgagtctccgaggagctggggccatcaaggcggaccatgtatcaacttatgccatgtttgtacagacacatagaccaacaggggagtttatgtttgagtttgatgaagatgagatgttctatgtggatctggacaagaaggagaccgtctggcatctggaggagtttggccgagccttttcctttgaggctcatggcgggctggctaacattgctgacattgaacaacaacttgaataccttgatccagctttccaaccacactccggccgccaatgatccccctgaggtgaccgtgtttcccaaggagcctgtggagctgggccagcccaacaccctcatctgccacattgacaaaattctttcccccccggtgctccaaatgtccacgtgggctggggcaaacgggagagccccggtcacttgaaagggtgatccctgaaaaagacctactttgcctggccccacgaaactgggatttacgggatttaccaccaaggtttgccactttaaccctgaaccttttttgtgtgccctttcacaacccaaaagggaaacatagtaaattgaaacctgacctggggtgtgggagaaacaactgttgaggggtccttgtgtaaacctaaaaccctggcatgtccttagaaaggccgancttggtataaaggggtccccctcttatggagaccgcgtatatctcgccacagtaaatgatcc

SEQ ID NO: 31785 - DNA, 248 bp, Macaca Mulatta
cagggagtcgagctctccggcctatcagccgccatcagccacttcctgaactgcttcctgagctcctaccctaaccccgtggcccacctgcccgccgacgagctggtctccaagaagaggaataagaggaggaaaaaccggccccccggtgctgcagataacacagcctgggctgtcgtgaccccccaggagctctggaaggacatctgccaggaggccaagaactactttgacttccacctcgagtg

SEQ ID NO: 31786 - DNA, 914 bp, Macaca Mulatta
  misc_feature (1)...(914): n = A,T,C or G
gggggggaaacgtgaagaaggtgaagatggcggtggccagggccggggtcctgggagttcagtggctgcaaagggcatcccggaacgtggtgccgctgggcgcacggacagcctcccgcatgaccaaggacatgttgccagggccctatcctaggaccccagaagaacgggccgccgccgccaagaagtataatatgcgtgtggaagactacgagccttacccggatgagggcatggggtatggcgactacccgaagctccctgaccgttcacagcatgagagggatccatggtatagctgggaaccaccggacctgaggttgaacttggggtgaaccgatgcactggcacatagacatgtacaccggggaaccgtgtggattacatcccccacccctgattatcttggaatggccatggtgtatgcaccctactcgggtttcactggcttttcctggacattctatggttctgagggtgggaggaaattgataaacactttccttaactaaacctgatgtgggatctaaaggacatttcatccctgtaactaaataagtgcttgttcacctctgtggaaaataatatgcaatgagcatattcgcaatcacaataatcgtaaacaacgaagtcccggggatggcgatctcacatcatttagaccatctactggatgactaggcaatattctttagggagtcttttttgtacgaattctttcnttcaacggatatgaacataccactcttatatcacacgaagaaaaaaattatacaactcgtcttagtggaaagtatgcctctaatttatggcaccataattatgctcccgcccggatctatccagctaataatataatgattcagattggcagatatacacagccatacacttgtgctccgacagtactagcc

SEQ ID NO: 31787 - DNA, 158 bp, Macaca Mulatta
ggacacactcacggaaatctcggagtggctggagcggcacccgcgtgaggtggtcatcctggcctgcaggaacttcgaggggctgagcgaggacctgcacgagtacctggtcgcctgcatcaagaatattttcggggacatgctgtgtcctcgtgggg

SEQ ID NO: 31788 - DNA, 114 bp, Macaca Mulatta
  misc_feature (1)...(114): n = A,T,C or G
ngagaagacagcccagacaagggagagccatgcgaaggcagacagcgccgtctcccaggagcagctgcgcaaactgcaggaacgggtggaacgctgtgccaaggaggccgagaa

SEQ ID NO: 31789 - DNA, 786 bp, Macaca Mulatta
gtatgtaagaggttctctgaaatgtcagcaaatagttctgaaacatacatcatgcatgagtaggaataaaaccaagttccccacaaggtagctaacttaacgctgcataaaaatatgaaactgtaacccatgaaggacactttttttttccactgcaaagttagtcactttgctgttttccctcttttttaaactttaaaaatagactccaggaattggagcaataatggtgtataccacacacagattaaacatttgtagatattttaagtgacttttgggcaaaactggaatgtatactttgaccttgtttcaaacgcctgagaccagtaacttaaaaattactaaaaggtttactttgttcattaataaagcatttagcaattcaaattatatgcaccttttacctagttgaaaaaaatacacattcctgttttcacattatagcaactgataaagctgaagctataagtcatttttatagatgagtgatccacatctccatcaattagaacactggaaaagatgttttataaaaaaggtatttaattttgtttgtaggattaactcatgcaaataatgaagctatcctgttggttcaatagtacactgtctcctttaaggaaggaagcgtgatgaatgaatgatgtgtagacttgagggatgactatctaaggggaccgtagatgaagagaaagaactacggatgacttcgactgtaactctttttcctctatgttagcgtgtgtcccggggatttccgatcttacaagattcttggctagc

SEQ ID NO: 31790 - DNA, 762 bp, Macaca Mulatta
  misc_feature (1)...(762): n = A,T,C or G
ggggtttccgagcgggagatcttccgagacgcgctggggactgaatgtagaatcctgcttatctgtgaaatgcaattaacacatcagctggacctatttcctgaatgcagggtaacccttctgttatttaaagatgtaaaaaatgcgggagacttgagaagaaaggccatggaaggtaccatcgatggatcactgataaatcctacagtgattgtcgatccatttcagatacttgtggcagcaaacaaagcagttcacctctacaaactgggaaaaatgaagacaagaactctatctactgaaattattttcaacctttccccaaataacaatatttcagaggctttgaaaaaatttggtatctcagcaaatgacacttcaattctaattgtttacattgaagagggagaaaaacaaataaatcaagaatacctaatatctcaagtggaaggtcatcaggtttctctgaaaagtcttcctgagataacaaatattacggaagtccaaaaggtttgtttgccagtccatatttttagaaagagtgtgacagatgagcaataatgctgatactgtttgcttattgatcaccaggggctccttgttttttgaacttttgagaaagttaatctannnnnnnnnnnnnctnnnnnnnnnnnnnnngatacaaagaaactgggnaggtgtggggtttatgtaaaaatataattacaaacctcagctgaatacaaaccatttcctccacatctgagaaaggagaatacc

SEQ ID NO: 31791 - DNA, 124 bp, Macaca Mulatta
acattcataaggtttctctcctgtgtgtattctgtgatgataaataatggctgacatttggcagaaggtttcaccacattcatgacattcatagggcttttcccctgtgtggattctctgatga

SEQ ID NO: 31792 - DNA, 789 bp, Macaca Mulatta
gggccggggggggtgccaactgagatttaaatccaagtgctggtgtctagttctgaacatcaactaaagagttttggaaatgacagcaatttataacaaattcatactgacttcctttctatgacaagaagacattctgtgctgttttgaacagattaaagatttgtgtagtttgtgggaaattgctgtttttgtttaaattccacccgtgtttgtcttttcctaccacctgtggccaggtgctcgctggctatcacagttgagattccatgagtagctgcttcatgactgctttttgtactatctggatgtgcccagagttacttctgtacaagctctatatctatgtccgttgagaacattattttaacaagaggagcaccaacagtagcatgaaatacaataccgttttaaaattctaaagctgctgttaatttatgaggtacataataatctaatgtaaactgcagaagtcagaacaagtgcctacattttgtttatttttggcattactacagagccatgtacaaaagaaagcaatgccaagacttgtaaactctcgccacttcttgtaatatcaaaatgttccccctccggttattttgcctatggtaccccatgaaatgcctctccggaacaagaaaaaattggttccaatattttcctttgaaggattggaaacaacagataagtcaagggctgggaaaaacaaagtttttcaataaaaacctttcaggcttaacaaattaccttctaggacccaaaacaaaaatttggaatccccaagtt

SEQ ID NO: 31793 - DNA, 917 bp, Macaca Mulatta
  misc_feature (1)...(917): n = A,T,C or G
gctgagaagctgagagcacttggccttcataagtgtccccaccatggcctggatgatgcttctcctcggactccttgcttatggctcaggagtggattctgagtctgtggtgacccaggagccatcgttgtcagtgtcccctggaggaacagtcacactcacctgtggcctgagctctggctcagtctctaccaataacttccccagctggtacaagcagaccccgggccaggctccacgcacgctcatctacggcacatatactcgcccttttggggtccctgatcgcttctctggctccatccttgggaacaaagctgccctcaccatcacgggggctcaggcagacgatgaatctgattattactgtatgctctacttgggtagtggcattttcgtcttcggaggagggacccggctgaccgtcctaggtcagcccaaggcttccccctcggtcactctgttcccgccctcctctgaggagctccaagccaacaaggccacactagtgtgtctgatcagtgacttctacccgggagtcgtgaaagtggcctggaaggcagatggcggctctgtcaacgcgggagtggagaccaccacgccctccaaacagagcaacaacaagtatgcggccagcagctacctgagcctgacgtccgaccagtggaagtcccacaagagctacagttgccaggtcacgcacgaagggagcaccgtggagaagacagtggcccctgcagaatgttcataggttcctacccctcaccccacccacaggggcctggagctgcaggatcccaggagaggggtctctgcatcccaagccatccagcccttctccctgcactcaataaaccttcaataaatatctttagtcatccaannnnnnnnnnnnnnnnnnnnnnnnnnnncatgtc

SEQ ID NO: 31794 - DNA, 646 bp, Macaca Mulatta
tgggaagtctggaaggaagcatgggctccagaggttggaatcggtgtctggctctggaattgctactgctgtctctgtcactcctggcgatcagcattcaaggtactttctaccaaccgtctgcctgtgattgtgcactgaaggtcacttggtacatatgaccgtggtctccggcagcaatgttactctgaacatctctgagagcctgcctgagaactacaaacaactaacctggttttatactttcgaccagaagattgtagaatgggattccagaaaatctaagtactttgaatccaaatttaaaggcagggtcagacttgatcctcaaagtggtgcactgtacatctctaaggtccagaaagaggacaacagcacctacgtcatgagggtgttgaaaaaggatgggtatgagcaagaatggaagatcaagctgcaggtgcttgaccctgtacccaagcctgtcatcaaaattgagaagagagaagatgtggatgacaactgttatctgaaactgtcatgtgtcatacctggcgagtctgtaaactacacctggtatggggaactcccgaaggagatccagaacagtgttcttgaaaccaaccttaagccacacaaacactccagggtgtatacttgccaagtc

SEQ ID NO: 31795 - DNA, 132 bp, Macaca Mulatta
  misc_feature (1)...(132): n = A,T,C or G
ggaaagtgctggtgtttcagagtcaatggctagacattccatnnnnnnnnnnnnnnnnnnnnnnnnnnnnnnnnnntattattctctatgtcctttgttgtaataagaaaacatcatctgcagagggtccag

SEQ ID NO: 31796 - DNA, 4178 bp, Macaca Mulatta
  misc_feature (1)...(4178): n = A,T,C or G
cggggtcaggcgtgttggggatgacgcccaggatggtgctctgcagcgacgtgcccttcagcaggcggttccgcaccagctgcaggttacgggccgagtccacgctggtgcgcatggtggagccgggcagcaggacgccctcgtgggtgagcagcagcgggaggcggctggggatctggatggggctcactgatgacatggtggcagccgttcgcactgggggctgtcaaaaggagcaagacagacagctgcccgcgacccgctccgcagcgaccaaacctcagacccgcctccgcgcccccgcttccggctacgcgatacggtccgcccccgggcccagaagccatcgcttcgcgctgctctcttgcagagcctcccgannnnnnnnnnnnnnnnnnnnnnnnnnnnnnnnnnnnnnnnnnnnnnnnnnnnnnnnnnnnnnnnnnnnnnnnnnnnnnnnnnnnnnnnnnnnnnnnnnnnnnnnnnnnnnnnnnnnnnnnnnnnnnnnnnnnnnnnnnnnnnnnnnnnnnnnnnnnnnnnnnnnnnnnnnnnnnnnnnnnnnnnnnnnnnnnnnnnnnnnnnnnnnnnnnnnnnnnnnnnnnnnnnnnnnnnnnnnnnnnnnnnnnnnnnnnnnnnnnnnnnnnnnnnnnnnnnnnnnnnnnnnnnnnnnnnnnnnnnnnnnnnnnnnnnnnnnnnnnnnnnnnnnnnnnnnnnnnnnnnnnnnnnnnnnnnnnnnnnnnnnnnnnnnnnnnnnnnnnnnnnnnnnnnnnnnnnnnnnnnnnnnnnnnnnnnnnnnnnnnnnnnnnnnnnnnnnnnnnnnnnnnnnnnnnnnnnnnnnnnnnnnnnnnnnnnnnnnnnnnnnnnnnnnnnnnnnnnnnnnnnnnnnnnnnnnnnnnnnnnnnnnnnnnnnnnnnnnnnnnnnnnnnnnnnnnnnnnnnnnnnnnnnnnnnnnnnnnnnnnnnnnnnnnnnnnnnnnnnnnnnnnnnnnnnnnnnnnnnnnnnnnnnnnnnnnnnnnnnnnnnnnnnnnnnnnnnnnnnnnnnnnnnnnnnnnnnnnnnnnnnnnnnnnnnnnnnnnnnnnnnnnnnnnnnnnnnnnnnnnnnnnnnnnnnnnnnnnnnnnnnnnnnnnnnnnnnnnnnnnnnnnnnnnnnnnnnnnnnnnnnnnnnnnnnnnggccatcggcttcttcaccagtgacataaactacctgtttgaaggggtgtgttatggacccctattactggtcagctgcgcatcactggtcatctgcagcatttcttcctacttcattattggatacactgcatttgttgccattttatgctttctcctggttttcccactggaggtannnnggtattcgtgacaagaatggctgtgaaggctcagcatgacacatctgaggtcagcgaccagcgcattcgtgtgaccagtgaagttctcacttgcattaagctgattaaaatgtacacatgggagaaaccatttacaaaaatcattgaannnnnnnnnnnnnnnnnnnnnnnnnnnnnnnnnnnnnnnnnnnnnnnnnnnnnnnnnnnnnnnnnnnnnnnnnnnnnnnnnnnnnnnnnnnnnnnnnnnnnnnnnnnnnnnnnnnnnnnnnnnnnnnnnnnnnnnnnnnnnnnnnnnnnnnnnnnnnnnnnnnnnnnnnnnnnnnnnnnnnnnnnnnnnnnnnnnnnnnnnnnnnnnnnnnnnnnnnnnnnnnnnnnnnnnnnnnnnnnnnnnnnnnnnnnnnnnnnnnnnnnnnnnnnnnnnnnnnnnnnnnnnnnnnnnnnnnnnnnnnnnnnnnnnnnnnnnnnnnnnnnnnnnnnnnnnnnnnnnnnnnnnnnnnnnnnnnnnnnnnnnnnnnnnnnnnnnnnnnnnnnnnnnnnnnnnnnnnnnnnnnnnnnnnnnnnnnnnnnnnnnnnnnnnnnnnnnnnnnnnnnnnnnnnnnnnnnnnnnnnnnnnnnnnnnnnnnnnnnnnnnnnnnnnnnnnnnnnnnnnnnnnnnnnnnnnnnnnnnnnnnnnnnnnnnnnnnnnnnnnnnnnnnnnnnnnnnnnnnnnnnnnnnnnnnnnnnnnnngatgaacttgcttgagggctcagtgggggtgcagggaagcctggcctatgtcccccagcaggcctggatcatcagcgggagcatcagggagaacatcctcatgggagatccatatgacaaggcccgnnnnnnnnnnnnnnnnnnnnnnnnnnnnnnnnnnnnnnnnnnnnnnnnnnnnnnnnnnnnnnnnnnnnnnnnnnnnnnnnnnnnnnnnnnnnnnnnnnnnnnnnnnnnnnnnnnnnnnnnnnnnnnnnnnnnnnnnnnnnnnnnnnnnnnnnnnnnnnnnnnnnnnnnnnnnnnnnnnnnnnnnnnnnnnnnnnnnnnnnnnnnnnnnnnnnnnnnnnnnnnnnnnnnnnnnnnnnnnnnnnnnnnnnnnnnnnnnnnnnnnnnnnnnnnnnnnnnnnnnnnnnnnnnnnnnnnnnnnnnnnnnnnnnnnnnnnnnnnnnnnnnnnnnnnnnnnnnnnnnnnnnnnnnnnnnnnnnnnnnnnnnnnnnnnnnnnnnnnnnnnnnnnnnnnnnnnnnnnnnnnnnnnnnnnnnnnnnnnnnnnnnnnnnnnnnnnnnnnnnnnnnnnnnnnnnnnnnnnnnnnnnnnnnnnnnnnnnnnnnnnnnnnnnnnnnnnnnnnnnnnnnnnnnnnnnnnnnnnnnnnnnnnnnnnnnnnnnnnnnnnnnnnnnnnnnnnnnnnnnnnnnnnnnnnnnnnnnnnnnnnnnnnnnnnnnnnnnnnnnnnnnnnnnnnnnnnnnnnnnnnnnnnnnnnnnnnnnnnnnnnnnnnnnnnnnnnnnnnnnnnnnnnnnnnnnnnnnnnnnnnnnnnnnnnnnnnnnnnnnnnnnnnnnnnnnnnnnnnnnnnnnnnnnnnnnnnnnnnnnnnnnnnnnnnnnnnnnnnnnnnnnnnnnnnnnnnnnnnnnnnnnnnnnnnnnnnnnnnnnnnnnnnnnnnnnnnnnnnnnnnnnnnnnnnnnnnnnnnnnnnnnnnnnnnnnnnnnnnnnnnnnnnnnnnnnnnnnnnnnnnnnnnnnnnnnnnnnnnnnnnnnnnnnnnnnnnnnnnnnnnnnnnnnnnnnnnnnnnnnnnnnnnnnnnnnnnnnnnnnnnnnnnnnnnnnnnnnnnnnnnnnnnnnnnnnnnnnnnnnnnnnnnnnnnnnnnnnnnnnnnnnnnnnnnnnnnnnnnnnnnnnnnnnnnnnnnnnnnnnnnnnnnnnnnnnnnnnnnnnnnnnnnnnnnnnnnnnnnnnnnnnnnnnnnnnnnnnnnnnnnnnnnnnnnnnnnnnnnnnnnnnnnnnnnnnnnnnnnnnnnnnnnnnnnnnnnnnnnnnnnnnnnnnnnnnnnnnnnnnnnnnnnnnnnnnnnnnnnnnnnnnnnnnnnnnnnnnnnnnnnnnnnnnnnnnnnnnnnnnnnnnnnnnnnnnnnnnnnnnnnnnnnnnnnnnnnnnnnnnnnnnnnnnnnnnnnnnnnnnnnnnnnnnnnnnnnnnnnnnnnnnnnnnnnnnnnnnnnnnnnnnnnnnnnnnnnnnnnnnnnnnnnnnnnnnnnnnnnnnnnnnnnnnnnnnnnnnnnnnnnnnnnnnnnnnnnnnnnnnnnnnnnnnnnnnnnnnnnnnnnnnnnnnnnnnnnnnnnnnnnnnnnnnnnnnnnnnnnnnnnnnnnnnnnnnnnnnnnnnnnnnnnnnnnnnnnnnnnnnnnnnnnnnnnnnnnnnnnnnnnnnnnnnnnnnnnnnnnnnnnnnnnnnnnnnnnnnnnnnnnnnnnnnnnnnnnnnnnnnnnnnnnnnnnnnnnnnnnnnnnnnnnnnnnnnnnnnnnnnnnnnnnnnnnnnnnnnnnnnnnnnnnnnnnnnnnnnnnnnnnnnnnnnnnnnnnnnnnnnnnnnnnnnnnnnnnnnnnnnnnnnnnnnnnnnnnnnnnnnnnnnnnnnnnnnnnnnnnnnnnnnnnnnnnnnnnnnnnnnnnnnnnnnnnnnnnnnnnnnnnnnnnnnnnnnnnnnnnnnnnnnnnnnnnnnnnnnnnnnnnnnnnnnnnnnnnnnnnnnnnnnnnnnnnnagattcaacctagatccctttgaccgtcacaccgaccatcatatctgggatgccttgaataggacattactgaccaaggc

SEQ ID NO: 31797 - DNA, 1592 bp, Macaca Mulatta
gcgaggaggcgccgccgccattgccgctctctcggtgagcgcagccccgctctccgggccgggccttcgcgggccactggcgccatgggccagtgcggcatcacctcctccaagaccgtgctggtctttctcaacctcatcttctggggggcagctggcattttatgctatgtgggagcctatgtcttcatcacttatgatgactatgaccacttctttgaagatgtgtacacgctcatccctgctgtagtgatcatagctgtaggagccctgcttttcatcattgggctaattggctgctgtgccacaatccgggaaagtcgctgtggacttgccacgtttgtcatcatcctgctcttggtttttgtcacagaagttgttgtagtggttttgggatatgtttacagagcaaaggtggaaaatgaggttgaccgcagcattcagaaagtgtataagacctacaatggaaccagccctgatgctgctagccgggctattgattatgtacagagacagctgcattgttgtggaattcacaactactcagactgggaaaatacagattggttcaaagaaacgaaaaaccagagtgtccctcttagctgctgcagagagactgccagcaattgtaatggcagcctggcccacccttctgacctctatgctgaggggtgtgaggctctagttgtgaagaagctacaagaaatcatgatgcatgtgatctgggctgcactggcatttgcagctattcagctgctgggcatgctgtgtgcctgcatcgtgttgtgcagaaggagtagagatcctgcttatgagctcctcatcactggtggaacctatgcatagttgacaactcaagcctgagctttttggtcttgttctgatttggaaggtgaattgagcaggtctgctgctgttggcctcctgagttcatttagttaaagcacatgtacactggtgttggacagagcagcttggcttttcatgtgcccacctacttacctacctacctgcgacttcctttttccttattctagctgactcttcatgcccctaaaattttaagtacgatggtgaacgttctaatttcagaaccaatcacaagtcatgtagtgtggtagaattaaaggaggacacgagcctgcttctgttacctccaagtggtaacaggactgatgccgaaatgtcaccaggtcctttcagtcttcacagtggagaactcttggccaaaggtttttcggggaaggaggaggaaaccagctatctggttaaggttaacaccagatggtgcccctcatcagtgtccttttaaaaaatatttactgtagtccgataagatagcagctgtacaaaatgactaaaaaatattttaggatcatacgatgtatatcttggttcatcttcaaaatcggaaaactgattctttggaaactagtgggtttttaaatcaaagctgggctttattagggaagggagttatgaagctggttatgccacccttacttggtttttctaaacaagataatttatactggggtgaaaggtgtgtagttatttttttggtaaatgggaaatcggcagcccccccctat

SEQ ID NO: 31798 - DNA, 661 bp, Macaca Mulatta
ctcagctcactcccactatctctacggacacatgctctccgccttccgggactagccacggcccccagggctggcttccttcttctgggtttcacaggctctactggccctgacccctcctgctcgttccccttccttccgcggctcctagtctcgtccgtgactttacggttgccctggatctcagaatatattcgtccaccccctcggcaccccactacccagagtcccaccgtgtgtccattgtaagtctggtgggtgtggctggggtctcctggtattgtggaggcacccaggttgtccacacttgggattctgggggaaggagagaagggcctcccagggtggatgtgaagccacccttcctcttctggacccagcctggtctgcaccgcagcctccaccaagaccaggatcctgggccacgggctgggatgatccttctaagaaagggtcatttcagacgcagccctgtttgggctattcaaccttagggtctctttccacgtctggctgtgccaaatggtttggcagctggttttggcatccctagcatcatcactctcccaacccatctccatgactgcggttcctgtccccattctcttggggacagggagggactgggaagggctactgaagaccccattctcccgcagga

SEQ ID NO: 31799 - DNA, 402 bp, Macaca Mulatta
gtggggctgaatgttttctcctgggagcaatggcttatgaccgatttgatgcaatttgtcatcctctcaactaccaaatgattatgaataaaggagtttttatgaaattagttatattttcatgggcgttaggttttatgttaggtactgtgcaaacgtcatgggtatctagttttccctttggtggccttaatgaaattaaccatatatcttgtgaaaccccagcagtgttagaacttgcatgagcagacacgtttttgtttgaaatgtaagcattcacaggcacctttctgattatttaggttcctttcatgttgatagtcctgtcttacattcgaattctttttgccatcctgaagattccatcaactaagggagacaaaaggccttttcaacctgtgc

SEQ ID NO: 31800 - DNA, 802 bp, Macaca Mulatta
ttcagtggaggacggcagtggcccttttctcaacacctggtaccgggccaagcctgtcccccttcttgttgggccaccgtgtacggggcgagagaaaatccagcttgctcttactgatgacgcaaaaggtcgatgttgcttccggagcccaggtcgttgaagatgccggctgcgatggcttcgctcaccagcttcttggcttcctcctcctccatgtctggcctaaacttatcttcaaatacagccattgctgccaaggagccagaacccatggtgacataaggcaacttatcagttgatccgtgaggatagatgctgtacaggtgaggtccagtaacatctactcctcctaaaactagggctgcaccaatgtaaccttgatacctgaaaagcatctgcttcagcatccgattggctgtcacaactctgggaagacggccagtggagagggagtggagctccaagttggaagaaatgagctgggttgtcatgtctgtgtctgcagctgtcccagcaccacaacaataaatattaggagatatgaagtgtatttttgaacagttcttgtcagcaacaaccattccttcagttgctcttgtatctgctccaagaactatgccatccttatagaccaccccagcgatggtcgtgccagttttccgggcctttggaagcttgtaccccctcttggcaaaatcggcttccaagacggcattcctgcgacagttatcaaaagagaagcctccaaccggcggagcatacaccgacacagccgccatcttcccaagagagcacttccccc

SEQ ID NO: 31801 - DNA, 746 bp, Macaca Mulatta
gggggtcttcctaagccggcgctcggcgagttctcccaggagaagaccatgttcagttcgagcgccaagatcgtgaagcccaatggcgagaagccggacgagttcgagtccggcatctcccaggctcttctggagctggagatgaactcggacctcaaggctcagctcagggagctgaatattacggcagccaaggaaattgaagttggtggtggtcggaaagctatcataatctttgttcctgttcctcaactgaaatctttccagaaaatccaagtccggctagtacgcgagttggagaaaaagttcagtgggaagcatgttgtctttatcgctcagaggagaattctgcctaagccaactcgaaaaagccgtacaaaaaataaacagaagcgtcccaggagccgtactctgacagctgtgcatgatgccatccttgaggacttggtcttcccaagcgaaattgtgggcaagagaatccgcgtgaaactagatggcagccggctcataaaggttcatttggacaaagcacagcagaacaatgtggaacacaaggttgaaactttttctggtgtctataagaagctccagcaggcaaggaattgttaattttgaatttccctagagtttcaattgtaaacaaaaggtgaacctaaagtaaagaatttgtttaatttcccccagttaaaattagaacctattaataattaatctttattagttcgcaccctcactctaaatataac

SEQ ID NO: 31802 - DNA, 2530 bp, Macaca Mulatta
  misc_feature (1)...(2530): n = A,T,C or G
tggcactttcctgggatttttgggacccaagagcgcctttatttggatatcatcaaacggttgttggaccaatgtattcaagatcaagaacatccagcaatcaggacattatccgctagagctgcagctgcatttgtacttgctaatgagaataatattgctcttttcaaagactttgcagacttgcttcctggaatcttacaggctgtgaatgactcatgctaccaggatgatgattcagtgctagaatcccttgtcgagattgcagataccgtacctaagtacttgggtccttatttagaagatactctacagttgagtttgaagttatgtggagactctaggcttagtaatctgcagcgccagctggccctcgaagttatagtgaccttgtctgaaactgccactccgatgttgaaaaaacatacaaatattattgcacaggcagttcctcatatattagcaatgatggttgatctacaagatgatgaggactgggtaaatgctgatgaaatggaagaagatgattttgacagcaatgcagttgctgcggagagtgcactagacagactggcttgtgggcttggtggaaaagttgttttaccaatgaccaaggagcatatcatgcagatgcttcagagccctgactggaagtatcgacatgctggattaatggccttatctgccattggagaaggatgccatcaacaaatggaatcaattctagatgaaacagttaactccgttttgctttttctnnnnnnnnnnnnnnnnnnnnnnnnnnnnnnnnnnnnnnnnnnnnnnnnnnnnnnnnnnnnnnnnnnnnnnnnnnnnnnnnnnnnnnnnnnnnnnnnnnnnnnnnnnnnnnnnnnnnnnnnnnnnnnnnnnnnnnnnnnnnnnnnnnnnnnnnnnnnnnnnnnnnnnnnnnnnnnnnnnnnnnnnnnnnnnnnnnnnnnnnnnnnnnnnnnnnnnnnnnnnnnnnnnnnnnnnnnnnnnnnnnnnnnnnnnnnnnnnnnnnnnnnnnnnnnnnnnnnnnnnnnnnnnnnnnnnnnnnnnnnnnnnnnnnnnnnnnnnnnnnnnnnnnnnnnnnnnnnnnnnnnnnnnnnnnnnnnnnnnnnnnnnnnnnnnnnnnnnnnnnnnnnnnnnnnnnnnnnnnnnnnnnnnnnnnnnnnnnnnnnnnnnnnnnnnnnnnnnnnnnnnnnnnnnnnnnnnnnnnnngttgctctcttagacacacaggatgtggagaatatgagtgatgatgatggctggcaatttgtaaatcttggagaccagcagagttttggaattaaaacttcaggacttgaagcaaaagcaactgcttgccaaatgttggtttactatgctaaggagttaagggaagggtttgtggaatatacagaacaagttgtgaagctgatggttcctttactgaaattttatttccatgacaatgttcgagtggcagcagcggagtccatgccttttctcctggaatgtgcaagaattcgtggcccagagtatcttgcacagatgtggcaattcatatgtgaccccttaatcaaggctattggtactgaaccggatacagatgtgctctcggaaataatgaattcttttgcaaagtccattgaagttatgggagatggttgccttaatgatgaacacttggaagaactgggaggaatactgaaaataaaacttgaagggcactttaaaaaccaagaattgagacaggttaaaagacaggaagaaaactatgatcaacaggttgagatgtctctgcaagatgaggatgaatgtgatgtttatattctgacaaaagtatcagatattttgcattcattatttagtacttataaggaaaagattttaccatggtttgaacaactacatccattaattgtaaatctaatttgttcaagtaggccatggccagacagacagtggggattgtgcatatttgaaggcatcatagagcactgcagtccaacttcatttaaatnnnnnnnnnnnnnnnnnnnnnnnnnnnnnnnnnnnnnnnnnnnnnnnnnnnnnnnnnnnnnnnnnnnnnnnnnnnnnnnnnnnnnnnnnnnnnnnnnnnnnnnnnnnnnnnnnnnnnnnnnnnnnnnnnnnnnnnnnnnnnnnnnnnnnnnnnnnnnnnnnnnnnnnnnnnnnnnnnnnnnnnnnnnnnnnnnnnnnnnnnnnnnnnnnnnnnnnnnnnnnnnnnnnnnnnnnnnnnnnnnnnnnnnnnnnnnnnnnnnnnnnnnnnnnnnnnnnnnnnnnnnnnnnnnnnnnnnnnnnnnnnnaagataaagatgaagctattcagactttgagttttctctgtgacctaattgaaagtaaccacccagttgtaattggtccaaataattccaatcttcccaaaataatcagtataattgcagaaggaaaaattaatgagactattaactatgaagatccttgtgccaaacgtctagctaatgtcgtgcgtcaggtacagacttctgaagatttatggttggaa

SEQ ID NO: 31803 - DNA, 731 bp, Macaca Mulatta
tttgaagaacctgaagatcccagtaacaggtcatttttttccgaaatcatctcctctatttcggatgtaaaattcagccatagtggtcgatatatgatgactagagactatttgtcagtcaaaatttgggacttaaatatggaaaacaggcctgtggaaacataccaggtgcatgaatacctcagaagtaaactctgttcactgtatgaaaatgactgcatatttgacaaatttgaatgttgttggaatggatctgacagcgttgtcatgactggatcttacaataatttcttcagaatgtttgacagaaacacaaagcgagacataaccctagaagcatcgcgggaaaacaataagcctcgcacggttctgaagcctcgcaaagtctgtgcaagtggcaagcgaaagaaagatgaaataagtgttgacagcctagacttcaataagaaaatccttcacacagcctggcaccccaaggaaaatatcattgccgtagctactacaaacaatctgtatatatttcaagacaaagtgaattagggttggcattcctagcagaagaacccacttcctgcttagttgagatagttgaatctagcattcgttcctataaaagagagaggtccattgtggcgcccctttccagtgtctgacagtgtgccattcgacaacacattgttatagctacatggagaaagctcgtggattatcactgtggtgttcccatgtct

SEQ ID NO: 31804 - DNA, 728 bp, Macaca Mulatta
  misc_feature (1)...(728): n = A,T,C or G
gaaggtgcttttgcactcgtatttaaaagtgttcattttcctgggcaagcagttggcacaaggnnnnnnnnnnnnnnnnnnnnnnnnnnnnnnnnnnnnnnnnnnnnnnnnnnnnnnnnnnnnnnnnnnnnnnnnnnnnnnnnnnnnnnnnnnnnnnnnnnnnnnnnnnnnnnnnnnnnnnnnnnnnnnnnnnnnnnnnnnnnnnnnnnnnnnnnnnnnnnnnnnnnnnnnnnnnnnnnnnnnnnngtgctgtcatagaacacaccaatcgcgtcatctnnnnnnnnnnnnnnnnnnnnnnnnnnnnnnnnnnnnnnnnnnnnnnnnnnnnnnnnnnnnnnnnnnnnnnnnnnnnnnnnnnnnnnnnnnnnnnnnnnnnnnnnnnnnnnnnnnnnnnnnnnnnnnnnnnnnnnnnnnnnnnnnnnnnnnnnnnnnnnnnnnnnnnnnnnnnnnnnnnnnnnnnnnnnnnnnnnnnnnnnnnnnnnnnnnnnnnnnnnnnnnnnnnnnnnnnnnnnnnnnnnnnnnnnnnnnnnnnnnnnnnnnnnnnnnnnnnnnnnnnnnnnnnnnnnnnnnnnnnnnnnnnnnnnnnnnnnnnnnnnnnnnnnacacgtcaagttcttgaggagctgactgagttgcccgtgatggtggaactagcaagtgacttcctggacagaaacacaccagtctttcgagatgatgtttgctttttccttagtcaatcaggt

SEQ ID NO: 31805 - DNA, 479 bp, Macaca Mulatta
  misc_feature (1)...(479): n = A,T,C or G
ggcaaagccacaggccaaagcctatggaattgtttttaatcatcaaatttcaccatgtttatagctggttcctggaggtgtgcagtgccctcttgcctcttcaaacctacagcttctctttgccatttgtggatttcacgtcactccacatagaagcgttacagcctggcatccccagtctttgccttcttccagctgcctcgacagcactgcggcctgtccctattgcccaggcacgccatttccaagggcaggaaggagcagtgtcctgaagcccatcttctctgtgactgtcttaggtgatgtgtagccccctccatctttccactcaacaatctctcacccctgtcctgctgcatggtccggagtctgggacctacttcgtttttgttatttatgaccttgtttaaagaaaataaatatctcccaacctttaanaaaannnnnnnnnnnnnnnnnnnnnnnnnnnnnnnnnnnnn

SEQ ID NO: 31806 - DNA, 877 bp, Macaca Mulatta
  misc_feature (1)...(877): n = A,T,C or G
ggggattccagcggcggacagcacccgggccgagatgtctcgctcagtggccttagccgtgctggcgctactctctctttctggcctggaggctatccagcgtactccaaagattcaggtttactcacgccatccaccagagaatggaaagccaaatttcctgaattgctatgtgtctggatttcatccatctgatattgaagttgacttactgaagaatggagagaaaatgggaaaagtggagcattcagacttgtctttcagcaaagacttgtctttctatctcttgtactacactgaattcacccccaatgaaaaagatgagtactgcctgccgtgtgaactatgtgactttggcagggccccacgactctttaagtcgggatctagacatgttatgctcccttctagggagtgaggcatatccctgcatttccgaatcggagagtttcccagattagggtctttggtgtcattttaaaccctcacccctcctgaggctcgtttcaattccttcacgtcccccagtttttccaaaatttgccgggggatttaaagggtgccttttttaaaccacagcccttgggcttaaatctttcttgtatttttgcggtatatacaaatcgttttttagcctttctgttataccccatacgtggtcctattcaaattccgtttatccccgctcagttttctattcgtccctttcaattaggncaattatcaagagtgttctccgccgtattccgttcactagttgttttcttacccagcgtgtttgtgacctcatacgctctgtgcgttctgggcgctttgangcttantcggcngtgtaccctcggggccggtatncattctgttgctggtactcgctggg

SEQ ID NO: 31807 - DNA, 414 bp, Macaca Mulatta
actgtgcccccaggtgctcatatcggagggtctgggcctctttgctcgagacccacgtttcgtggccctggccaagcaggagattgcagatgcatgtcgcctgacactggatgagatggacagtgctgccagtgacctgctggcacagggaaccagctcgctctatagcgacgaggagtccatcctttcccgcttcgacgaggaggacttgggagacgagatggcctgcgtccatgccctctgaattctcacccttccccaactgctcaataaacctcctgccctcccctccccagcaggagacaggcatggaccacacccctggattttgttgtctttgcactgggggacagggctgcctgggggcccccatccatccatcccctgttcctaccctgagccactgcccacaca

SEQ ID NO: 31808 - DNA, 615 bp, Macaca Mulatta
aatccagccgggcacccccgtgggggctgttgagtggttttaactgtctcctggggcctgtgggtgaagctgagacagagaccgaagggaggggctaagccctgctcctggctctggggctcagggaataggctgcacatactgattattccattaccctttatttattggccttattggcttttgtcatttcctcgtctcctgtctggagtgatggctataaatgtgacagattgatacaggatacaggagcaccaattatctctcttaaaccggcttctcttaaacagggagggctcttgggcaagccctccctgccctctgccttccttgccacaagtcctacagtcttccgtacagaagtggcctggttctgccagggagggagtgatgcctgggaggatgagtggcagacatgggccccaaggggagacagctcccaggacaaatactggaggcaagctcggccccctggccagttgcaccaaagatcccagtgcacactccctgatgctctgcctcacacagaggccagcacggagtagggcaagggggatgacaggatatactgctggctgctcagcccacataaggggaagggggctccattctgac

SEQ ID NO: 31809 - DNA, 835 bp, Macaca Mulatta
gcatgaacttcttcggccttctcacttccaggccccctttctgccctgggtgctcatgggcttttccttgttgttggggaactcaatcattgtggaccttttgggtaaggctcttctcactattttttaagtcattttacctgtaaaagtattttaccactatttttcatgtttattctgtttggccttcatgtattacctattgtaaaatactacaatattagttcattaatttttaataattatgttgacattcatcctaaatgtagtcgatttatgttggtaggtctacctgccatctaaattttaattctctccctcatcctttatttctgcttgactctaggtattgcagttggacacatttattttttcttggaagatgtatttcccaatcagcctggtggaataagaattctgaaaacaccatctattttgtgagtattttaacaccaggttacatactcttacaggcaaaccaggacagagggcatgatctgtgttttcttcggctcccctagctcctagtacacatagttcaggtcagtaactatttgcagattgagcagtctggctgcagttgaagagcacttggattgggtaggagcagacagtgccagggttgtggcaagagcaaggttaacaggctcaggatatcttgggagtaacctggtaatcgttgttccagatgaccactagaacttcctattccaggaggagcctgctggttttatgaaagccactgtccacgtttagtgaagtaaggtagcaaaatgggcaaaactgatgaaagtttctgatggtggactttgtggcctgctgagcaggtggttga

SEQ ID NO: 31810 - DNA, 3910 bp, Macaca Mulatta
  misc_feature (1)...(3910): n = A,T,C or G
ggaagcaaaggtgcctaccgataccattggcaaagccacaatgtcaagcacagtggtgtggacgacatggtgctactctccaagatcacagagaattccatcgtggagaatctgaagaagagatacatggacgactacatttttnnnnnnnnnnnnnnnnnnnnnnnnnnnnnnnnnnnnnnnnnnnnnnnnnnnnnnnnnnnnnnnnnnnnnnnnnnnnnnnnnnnnnnnnnnnnnnnnnnnnnnnnnnnnnnnnnnnnnnnnnnnnnnnnnnnnnnnnnnnnnnnnnnnnnnnnnnnnnnnnnnnnnnnnnnnnnnnnnnnnnnnagtggtgaaagtggtgctggaaaaacagtggctgccaaatatatcatgagctacatctccagagtgtctggaggaggccccaaagtccannnnnnnnnnnnnnnnnnnnnnnnnnnnnnnnnnnnnnnnnnnnnnnnnnnnnnnnnnnnnnnnnnnnnnnnnnnnnnnnnnnnnnnnnnnnnnnnnnnnnnnnnnnnnnttcagtccaggtggggacccttttggtggaaagatctccaacttccttctggaaaaatctcgtgtggtgatgaggaacccaggagagcggagttttcacatattttaccagnnncagctcatcgagggcgcctctgcagagcagaagcacggccttggcatcaccagcatggactattattactacctgagcctctcgggctcatacaaggttgatgacattgacgacaggcgggagtttcaggaaactctgnnnnnnnnnnatgtgattgggatcgttgcagaagagcaaacgctggtgttgcagatcgtggcgggtattctccacgtgggaagcatcggcttcaaagaagttggcagctacgcagctgtggagggggaagagnnnnnnnnnnnnnnnnnnnnnnnnnnnnnnnnnnnnnnnnnnnnnnnnnnnnnnnnnnnnnnnnnnnnnnnnnnnnnnnnnnnnnnnnnnnnnnnnnnnnnnnnnnnnnnnnnnnnnnnnnnnnnnnnnnnnnnnnnnnnnnnnnnnnnnnnnnnnnnnnnnnnnnnnnnnnnnnnnnnnnnnnnnnnnnnnnnnnnnnnatcaataaagccatgcagaaagaccatgaagaatacaacattggcgtcctagacatctatggctttgaaatattccannnnnnnnnnnnnnnnnnnnnnnnnnnnnnnnnnnnnnnnnnnnnnnnnnnnnnnnnnnnnnnnnnnnnnnnnnnnnnnnnnnnnnnnnnnnnnnnnnnnnnnnnnnnnnnnnnnnnnnnnnnnnnnnnnnnnnnnnnnnnnnnnnnnnnnnnnnnnnnnnnnnnnnnnnnnnnnnnnnnnnnnnnnnnnnnnnnnnnnnnnnnnnnnnnnnnnnnnnnnnnnnnnnnnnnnnnnnnnnnnnnnnnnnnnnnnnnnnnnnnnnnnnnnnnnnnnnnnnnnnnnnnnnnnnnnnnnnnnnnnnnnnnnnnnnnnnnnnnnnnnnnnnnnnnnnnnnnnnnnnnnnnnnnnnnnnnnnnnnnnnnnnnnnnnnnnnnnnnnnnnnnnnnnnnnnnnnnnnnnnnnnnnnnnnnnnnnnnnnnnnnnnnnnnnnnnnnnnnnnnnnnnnnnnnnnnnnnnnnnnnnnnnnnnnnnnnnnnnnnnnnnnnnnnnnnnnnnnnnnnnnnnnnnnnnnnnnnnnnnnnnnnnnnnnnnnnnnnnnnnnnnnnnnnnnnnnnnnnnnnnnnnnnnnnnnnnnnnnnnnnnnnnnnnnnnnnnnnnnnnnnnnnnnnnnnnnnnnnnnnnnnnnnnnnnnnnnnnnnnnnnnnnnnnnnnnnnnnnnnnnnnnnnnnnnnnnnnnnnnnnnnnnnnnnnnnnnnnnnnnnnnnnnnnnnnnnggtatgccattctgaccaaagccacctggccctcttggcagggagatgagaagcaaggcgtcctgcacctgctgcagtcggtcaacatggacagcgaccagttccagctggggaggagtaaagtgttcatcaaagcccccgagtctnnnnnnnnnnnnnnnnnnnnnnnnnnnnnnnnnnnnnnnnnnnnnnnnnnnnnnnnnnnnnnnnnnnnnnnnnnnnnnnnnnnnnnnnnnnnnnnnnnnnnnnnnnnnnnnnnnnnnnnnnnnnnnnnnnnnnnnnnnnnnnnnnnnnnnnnnnnnnnnnnnnnnnnnnnnnnnnnnnnnnnnnnnnnnnnnnnnnnnnnnnnnnnnnnnnnnnnnnnnnnnnnnnnnnnnnnnnnnnnnnnnnnnnnnnnnnnnnnnnnnnnnnnnnnnnnnnnnnnnnnnnnnnnnnnnnnnnnnnnnnnnnnnnnnnnnnnnnnnnnnnnnnnnnnnnnnnnnnnnnnnnnnnnnnnnnnnnnnnnnnnnnnnnnnnnnnnnnnnnnnnnnnnnnnnnnnnnnnnnnnnnnnnnnnnnnnnnnnnnnnnnnnnnnnnnnnnnnnnnnnnnnnnnnnnnnnnnnnnnnnnnnnnnnnnnnnnnnnnnnnnnnnnnnnnnnnnnnnnnnnnnnnnnnnnnnnnnnnnnnnnnnnnnnnnnnnnnnnnnnnnnnnnnnnnnnnnnnnnnnnnnnnnnnnnnnnnnnnnnnnnnnnnnnnnnnnnnnnnnnnnnnnnnnnnnnnnnnnnnnnnnnnnnnnnnnnnnnnnnnnnnnnnnnnnnnnnnnnnnnnnnnnnnnnnnnnnnnnnnnnnnnnnnnnnnnnnnnnnnnnnnnnnnnnnnnnnnnnnnnnnnnnnnnnnnnnnnntcctaccagaaggaacactacccaaaatagaggttattccggtgggactcaaaatgccaactacccaatgagagcggcccctcctcccccaggnnnnnnnnnnnnnnnnnnnnnnnnnnnnnnnnnnnnnnnnnnnnnnnnnnnnnnnnnnnnnnnnnnnnnnnnnnnnnnnnnnnnnnnnnnnnnnnnnnnnnnnnnnnnnnnnnnnnnnnnnnnnnnnnnnnnnnnnnnnnnnnnnnnnnnnnnnnnnnnnnnnnnnnnnnnnnnnnnnnnnnnnnnnnnnnnnnnnnnnnnnnnnnnnnnnnnnnnnnnnnnnnnnnnnnnnnnnnnnnnnnnnnnnnnnnnnnnnnnnnnnnnnnnnnnnnnnnnnnnnnnnnnnnnnnnnnnnnnnnnnnnnnnnnnnnnnnnnnnnnnnnnnnnnnnnnnnnnnnnnnnnnnnnnnnnnnnnnnnnnnnnnnnnnngatccttctggctggtggacgggtcgactacgaggcaagcagggcctgttccccaacaactatgtgaccaagatctgaggcgcccatgactctgacgcatggggcagaggagctccaggcactgaccaggggaggggatatttaggggctccccttacaatccacaatgagcaactgcttttccaaggcctggagctattctggtaccttccccatggaggacactgaaaagactgggttggggacagggagtgtcactccgtaagtgatcctaaaaggtagcctcttcataggaacccaggagggcaaaaccaccatgcattaagatttatttattgtatttaaacctggtgagaggacaagtgaggtctgctcagaccttataggcttctatcaaaacagcacccggcttgctcaccaggcctagggaatggctgtaggcggtcgctgacaagtgcctttagttgaagagcacatttctttcatctcttttgtccgtacctgatacacacattcctctctgccaccttccctcagggaggacccgccctctgcagactgggctcagcgtgagcaggcacttcccacgcacatgccaagggcaagctggcctgctgagcccagggggacagcggggcactggtttacactttgccgcgaccatc

SEQ ID NO: 31811 - DNA, 664 bp, Macaca Mulatta
  misc_feature (1)...(664): n = A,T,C or G
ttgctgatgctactagccacttggaagagaagaagaggaagaggaaaaagagggagaagctgattctaacattgacttagaagtgaaatgtggnnnnnnnnnnnnnnnnnnntttccttaaaaggactcctaaactaagcacagaagagttggcgtcatcttaaaaataccaaataacagaagatcacattgcagacgatgtcaggatgtggttcccaactttgcctgggggaattccaacatgagattatgggctggctccatttcttggacttaaaatgcatgattagtttaaaaatctttctgtgctctcaaagcttgagccttgcagctcaagcttgttgttccctttatattctagcagggaataaataattgttttaattaggtatatgtttcattggagttgaaattaacatttcaaaaatttttcttatttttttatggcagataatttgccatttatttatattaggttttactgcctattgagacaaccaggtgcataattgattgctctctggccataaaaatgcagtatcatggactcttagaactaaaaaggactgtaaaaagtacccagaatagcctcctcagacttaactttctgcaagttatatttgtatataagaagattctaattgataactgtttatacttttct

SEQ ID NO: 31812 - DNA, 536 bp, Macaca Mulatta
agtgacttaggctcgtctaagtctgtagaagtaaaggaagaagattccagaattaaagatcaggaagacaaaggaggaactgaaccaagtcctctcaatgaaaacagcacagatgagggttcagagaaagctgatgcttcatctggatctgatagtacatcatcgtcatctgaggattcagattctagtaatgaagactgattcccagactctgcacttaaaatatgaactgattttggattttttctttaatagttaattgtaaataccccagtgttgagtgcatcaataacttactgaccgaacatttcagttatttgtttagaagtgcaaactgctttcagagacattttgcatgtaatatttcttaagattcataagtttctgaactcgtatgtactatcaaatacataaaggtgtaaaattacaacaaaaggcattataattttgttgggggttaatattatgaaaattatgctcaataagagttgtatatttaatatatttgcagtgagacaaagaatactttatgcata

SEQ ID NO: 31813 - DNA, 889 bp, Macaca Mulatta
agccaccccttggtgacccacaggggtaaggtcgagcttctcactttccctccagtgaagcttggcggcatgggacagaattttggcagtgtcgaggtctgagttttagtgcgttcccctctctgggcatcagtttctccctggcagcccttcgctggtccctgcaagcccgtggacactgccggagatgtcctcttttggtttcgggaccctgaccgtggccctctttgccctggtctgctgttcaggatctgatgagaaggcattcgaggtacatatgaggctagagaagctgatagtaaagcccaaggagtccttcgaggtcaactgcagcaccacctgtaaccagcctgaagtgggtggtctggagacttctctaaataagattctgctgctcgaacagactcagtggaagcattacttgatctcaaacatctcccatgacacggtcctctggtgccacttcacctgctctgggaagcagaagtcaatgagttccaacgtcagcgtgtaccagcctccaaggcaggtcttcctcacactgcagcccacttgggtggccgtgggcaagtccttcaccatcgagtgcagggtgcccgccgtggagcccctggacagcctcaccctcagcctgctccgtggcagtgagactctgcacagtcagaccttcgggaaggcagcccctgccctgaaggaggccacagacacattcagcagcatggctcacagagaggacggacaccacaacttctcctgcctggctgtgctggacttgatgtctcgcggtggcgaagtcttctgcacacactcagacccgaagatgctggagatctatgagcccgtgccggacagccagatggtcatcatcgtcacagtggtgtcagtgttg

SEQ ID NO: 31814 - DNA, 283 bp, Macaca Mulatta
tctttgtagaatagagcagatgtcttattagagaattagttcctccgttttggctttatgccaaattgcttacagttattaataagccttaacattaccttgtaaaatttaaccttcctgcttttacagggtgacgagacaatcttactgaacagtcccccaaataatacgttttacatcaaattactcctgcaggtagactaattccgggaggcctccgaggcaacacaatagtattttcccattttgcagatgagggtcaggcctcgtaggagtagaactg

SEQ ID NO: 31815 - DNA, 605 bp, Macaca Mulatta
  misc_feature (1)...(605): n = A,T,C or G
aagggaggggttttttctgacaccccatccaatccaagaagaacagagctagacatgctagatccaagaaaggtccacgaacgaattatttttcaaggtgtccctatggagatgggagcagggtttatctttcagccagagcagtcatcccntgagtctgcccctacccancagagcataaaggggaactccacatgtgaggtacatcagaaaggatcccatggagtccgaaaatcatacaaatgtgaagaatgccncaaggtcttanagtatctctgtcacttattagctcaccagagaagacacaggaatgagaggccatttgtttgtcncaagtgtcaaaaaggcttcttccagatatcagacctacgtgtgcatcagataattcacacaggagagaaaccttttacatgcagcatgtgtgaaaagtccttcagccacaaaaccaacctgcggtctcatgagagaatccacacaggagaaaagccttatacatgtccctattgtaagagaagctaccgccagtcatccacataccaccgccatatgaggactcataagaaaattactctgccaactgttccctccacaccagaagcttccta

SEQ ID NO: 31816 - DNA, 137 bp, Macaca Mulatta
agaagagaagctgaatttggacgacagccagtgggaggacatccacgttgtcaccggagcactgaagatgtttttccgggagctgcctgagccgctcttcccttacagtttctttgagcggtttgtggaagcgatca

SEQ ID NO: 31817 - DNA, 1338 bp, Macaca Mulatta
atggatttagagctcgatgaatattataacaagacacttgccacagagaataatactgctgccactcggaattctgatttcccagtctgggatgactataaaagcagtgtagatgacttacagtattttctgattgggctctatacatttgtaagtcttcttggctttatggggaatttacttattttaatggctctcatgaaaaagcgtaatcagaagactacggtaaacttccttataggaaatctggccttttctgatatcttggttgtgctgttttgctcacctttcacactgacatctgtcttgctggatcagtggatgtttggcaaagtcatgtgccatattatgccttttctgcaatgcgtgtcagttttggtttcaactttaattttaatatcaattgccattgtcaggtatcatatgataaaacatcccatctctaataatttaacagcaaaccatggctactttctgatagctactgtctggacactaggttttgccatctgttctccccttccagtgtttcacagtcttgtggaacttcaagaaacatttggttcagcgttgctgagcagcaggtatttatgtgttgagtcatggccatctgattcatacagaattgcctttactatctctttattgctagttcagtatattctgcccttagtttgtcttactgtaagtcatacaagtgtctgcagaagcataagctgtggattgtccaacaaagaaaacagacttgaagaaaatgagatgatcaacttaactcttcatccatccagaaagattgggcctcaggtgaaactctctggcagccataaatggagttattcattcatcaaaaaacacagaaggagatatagcaagaagacagcatgtgtgttacccgctccagaaagaccttctcaagagaaccactccagaatacttccagaaaactttggctctgtaagaagtcagctctcttcatccagtaagttcataccaggggtccccacttgctttgaaataaaacctgaagaaaattcagatgttcatgaattgagagtaaaacgttctgttacaagaataaaaaagagatctcgaagtgttttctacaggctgaccatactgatattagtatttgctgttagttggatgccactacaccttttccatgtggtaactgattttaatgacaatcttatttcaaataggcatttcaagttggtgtattgcatttgtcatttgttgggcatgatgtcctgttgtcttaatccaattctgtatggatttcttaataatgggattaaagctgatttaatgtcccttatacactgtcttcatatgtaa

SEQ ID NO: 31818 - DNA, 552 bp, Macaca Mulatta
ttattgatttaatgatatgaagaggatactctccctctgaatatgaaaggggacagacagaggaggggaggatgaggtggggagaggtttcagagggatgtgaacccaaggggtggtcggggcctgttggagggttcccaggggctgcacctgccggtccacacctccctccaaggccaccctgaccctgatattgccccctccacccagggcactttccagcagatgtggatctccaagcaggaatatgaggagggcgggaagcagtgcgtggagcgaaagtgtccctgacggcgctcctccccacgcacctgctcccaagctcagctggaagtcccttaaccccatgccacatcgccccctcctctttccctcttgtcttcgtaaatggtgatgtttctgggttgaaagaagtaaaaatgttttaagaaaaaaagagtttggcctccgtggggtggggagtgggcggaggggtctggagggagtagaggggagggagggtcactgctacacccatgccgatcccaaaaggggcgctgagacacagcccca

SEQ ID NO: 31819 - DNA, 435 bp, Macaca Mulatta
  misc_feature (1)...(435): n = A,T,C or G
gcccagcccaggaagccgcggagcgcggccgccccaggaagagcaagggcctgagctgaaggcgctgaaaggccccgcgaccggcccgcgtgcacgcgnnnnnnnnnnnnngtgtctgcctcccccgccaggcagaaaggagccctcacctgcgcgcgggaggctggcgcgccgctcacctgtctttttggcctttcccatgattgcctgcccgcttcctgcacttgtttctgctcggcttattgctggactgtgggggaagggcacttgaaggacggaatcaaggacacctctgggtgttctgtacctctttccctcttgcaccttgggaagtggagtacgtgggatggaagaagggcctggacctcgcttcttcctccgccccaccttctcctaaggagactgagctgcagcaagccccaactttcccttcct

SEQ ID NO: 31820 - DNA, 1328 bp, Macaca Mulatta
  misc_feature (1)...(1328): n = A,T,C or G
tcagctgtttctatgggaatacggcgacttgcatctctttggacccaaccagcgcccagccccctgctatgacccttgcgannnnnnnnnnnnnnnnnnnnnnnnnnnnnnnnnnnnnnnnnnnnnnnnnnnnnnnnnnnnnnnnnnnnnnnnnnnnnnnnnnnnnnnnnnnnnnnnnnnnnnnnnnnnnnnnnnnnnnnnnnnnnnnnnnnnnnnnnnnnnnnnnnnnnnnnnnnnnnnnnnnnnnnnnnnnnnnnnnnncagggtgaggaggtcctccggcagctgcagaccctggcacccaagggcgtgaatgtccgcatcgctgtgagcaagcccaacgggccccaaccacagacggacctgcaggccctgctgcagagtggtgnggtgcccaggtccgcatggtggacatgcagaagctgacccatggcgtcctgcataccaagttctgggtggtggaccagacccacttctacctgggcagtgccaacatggactggcgttcactgacccaggtcnnnnnnnnnnnnnnnnnnnnnnnnnnnnnnnnnnnnnnnnnnnnnnnnnnnnnnnnnnnnnnnnnnnnnnnnnnnnnnnnnnnnnnnnnnnnnnnnnnnnnnnnnnnnnnnnnnnnnnnnnnnnnnnnnnnnnnnnnnnnnnnnnnnnnnnnnnnnnnnnnnnnnnnnnnnnnnnnnnnnnnnnnnnnnnnnnnnnnnagtgcgcccccacccctgtgtccaagtggccgcactccagacctgaaggctctactcaacgtggtggacaacgcgcggagtttcatctacgttgcagtcatgaactacctgcccactctggagttctcccaccctcacaggtnnnnnnnntcncaggttctggcctgccattgacgatgggctgcgacgggccgcctatgagcgtggcgtcaaggtgcgcctgctcgtcagctgctggggacactcggagccatccatgcgggccttcctgctctccctggctgccctgcgtgacaaccatacccactccgacatccagnnnnnnnnnnnnnnnnnnnnnnnnnnnnnnnnnnnnnnnnnnnnnnnnnnnnnnnnnnnnnnnnnnnnnnnnnnnnnnnnnnnnnnnnnnnnnnnnnnnnnngaacctccaactggtcgggcaactacttcacggagacggcgggcacctcgctgctggtgatgcagaacgggaggggcagtctacggagccagctggaggccattttcctgagggactgggactccccttacagccatgaccttgatgcctcagccgacagcgtgggcaatgcctgccgcctgctctga

SEQ ID NO: 31821 - DNA, 854 bp, Macaca Mulatta
  misc_feature (1)...(854): n = A,T,C or G
gggcccaaagagggggagttcttcctcccccggcgggtaattcaatggttttttctaacacacctctttgtgggggggggggcctccccttgccgcggggnnnnnnnnnnnnnnnnnntttctcccccttccttctttaaaattaaacccacagcnnnnnnnnnnnnnnnnnnnnnnnnnnnnnnnncgggcgggggacccccccnnnnnnnnnnnnnnnnnnnnnnnncctcagaaaacccccccnnnnnnnnnnnnnnnnnnnnnggttgtcccccnnnnnnnnnnnnnnnnnnnnnnnnnnnnnnnccacnnnnnnnnnnnnnnnnnnnnnnnnnnnnnnnnnnnnatttgtcnnnnnnnnnnnnnnnnnnnnnnnnnncgccggnnnnnnnnnnnnnnnnnnnnnnnnnnnnnnnnnnnnnnnnncggggggccacaannnnnnnnnnnnnnnnnnnnnnnnnnnnnnnnnnnnnnnnnnnnnnnnnnnnnnnnnnnnnnnnnnnnnnnnnnnnnnnnnnnnnnnnnnnnnnnnnnnnnnnnnnnnnnnnnnnnnnnnnnnnnnnnnnnnnnnnnnnnnnnnnnnnctttgcaactcacttttattgtttctttataaacctcctctcccatggaggaatatattgttatagtcattagcttatctctttttttaaaactctatgctaacagcaatggagccaagaggaggaaaaacataagctacaatagaaaggcacttagaacctgttaaaatactgacatcctggaatgtgcaacaacaaaccaatgacaaccacaaaaaatacaccagccctgccgagcctggtccgtcacggagtcgcatgccc

SEQ ID NO: 31822 - DNA, 86 bp, Macaca Mulatta
gttcgcatggactcatgtcactttattgataactgtcactcagtcacaccttgtcatccaaaatctgtttgaaggcatgatatggt

SEQ ID NO: 31823 - DNA, 235 bp, Macaca Mulatta
agaaagttcttcagaaagaactttagcaagtatatatattattgttactttcatagcttgaattaatagttggccaacataaatacaagctcatcaagctttttttcttcttttgaataggttgtcaggcaatgattgaactgtgtaagacaaaagtgaaaatataaagaaattatttcagtgatttcaaaacttaagttgtttgggttccgcttttcattttcatcatgaaatg

SEQ ID NO: 31824 - DNA, 470 bp, Macaca Mulatta
  misc_feature (1)...(470): n = A,T,C or G
gagttcaaggaggccttcgagctgtttgaccgagtgggggatggcaagatcctgtacagccagtgtggggacgtgatgagggccctgggccagaacccgaacaacgccgaggtgctcaaggtnnnnnnnnnnnnnnnnnnnnngagctgaagtcccggcgtgtggactttgaaactttcctgcccatgctccaggcagtggccaagaaccgggaccaaggcacatatgaggactacttggaggggcttcgtgtgtttgacaaggagggggacggcaaagtcatgggagcagagctcagacatgttctcaccaccctngagagaagatgactgaggaggaggtggagactgttctggcaggacatgaggacagcaacggctgcatcaactacgaggngccttcttgaaacacatcctaagcgtctgagtgctncagatccagtggggtccggacactgggccccgcgggcg

SEQ ID NO: 31825 - DNA, 336 bp, Macaca Mulatta
ggcttcccagactgcacaggcaggctgtaggttgcagacagagaggcctcgaaggagctgggtgagggtccgaggtttctgggaaacgcttgaattctcatcatctccagcccaagagttggacttctctctctccgaagaaaaaaagcattagctcttgttgcctaatttttctctgaagagtgtttcacgctccacatcccactacctccctcagccactttctctggaaacctcacactcttggggtcgtgctcagaagccctgattttaccccagtcccatccatgctgagccctgctggttatgccaggctcctctgggttgtgtctgggc

SEQ ID NO: 31826 - DNA, 1835 bp, Macaca Mulatta
  misc_feature (1)...(1835): n = A,T,C or G
agggagcagattttaagagtaaaagaagatgagaatgttccctttctactggttggtaacaaatcagatttagaagataaaaggcaggtttctgtagaagaagcaaaaaacagagctgagcagtggaatgttaactacgtggaaacatctgctaaaacacgagctaatgttgacaaggtannnnnnnnnnnnnnnnnnnnnnnnnnnnnnnnnnnnnnnnnnnnnnnnnnnnnnnnnnnnnnnnnnnnnnnnnnnnnnnnnnnnnnnnnnnnnnnnnnnnnnaagattctgcaacttataatcaaagcccagattcctttcttatcttgatcatacatataaatataatttataagcactgccattgaaggcttaattgactgaaattactttaacattttggaaattgttgtatattgctaaaagcatgaattggaactgcaataaaagtcaaatttacttaaaaaagaaataaatgtggcttcactaagaagcaaagttcaacttatttcattattgcctacatttatcatggtcctgaaggtagcgtatgagcttgtgtttctcgggcagtctttcttgaaatattaaataaagaggtgagatgggggtggggagtgggaggaaaggcgacttcctctggtgtttattataaagcttaaattttatatcattttaaaatgtcttggtcttctgccttgaaaaatgacaattgtgaacatgatagttaaacnnnnnnnnnnnnnnnnnnnnnnnnnnnnnnnnnnnnnnnnnnnnnnnnnnnnnnnnnnnnnnnnnnnnnnnnnnnnnnnnnnnnnnnnnnnnnnnnnnnnnnnnnnnnnnnnnnnnnnnnnnnnnnnnnnnnnnnnnnnnnnnnnnnnnnnnnnnnnnnnnnnnnnnnnnnnnnnnnnnnnnnnnnnnnnnnnnnnnnnnnnnnnnnnnnnnnnnnnnnnnnnnnnnnnnnnnnnnnnnnnnnnnnnnnnnnnnnnnnnnnnnnnnnnnnnnnnnnnnnnnnnnnnnnnnnnnnnnnnnnnngtaactgtctgctaggagtctgtccaaatttaaaatgtgtgccatactctggttcttgaaaataagattccggagctctttgatcgcttttaataaactgcaaggtcattttaagtgaagggccagcctatacttgtaagataattttcaactgcgaggattcagcacgttatgtttgaatgaaccctcctcttcttgaagatgctggtcccgggaaatcactttctgccagtggtgagcatgtaagtgttaagtttttaatctgggagcagggcgcaggaagaaaatgtcagtagtgctaatgcattttgcactagaacacttcgggaaaatattcatgcttgccatctgttcatttctaaatttatactcatgaagttacaatttgatacaggaattattagtagtaattcttgtctgttcatgtacagtgaagaacactagctacattttcagaagttaacatcaagccgtcaaacctgggtatagtgcagaaaacgtgtggcacacactgaccacacattaggctgtgtcaccatggtgtggtgttcctgctggaagaattctggcacactacttggggacataatttcagtcggaaatacgctactgtcagaatttttcccccctctttgcagtggggctaggacagttgattcaacaaagtannnnnnnnnnnnnntcagtcctaatttcaacaggtcaaagatgtgttcaggcattccaggtaacaggtgtgtacgtaaagttannnnnnnnnnnntaggaactcactctttagatattacatccagcttctc

SEQ ID NO: 31827 - DNA, 592 bp, Macaca Mulatta
gagtacagtccctgacatcacacactgcagagatggataaccaaggagtaatctactcagacttgaatctgcccccaaacccaaagaggcagcagcaaaaacctaagggtaatacaagctccattttagtaactgaacaggaaataacctatgcggaattaaaccttcaaaaaacttcgcaggattttcaagggaatgacaaaaccaatcactgcaaagcacgtcactgtggccattgtcctgaggagtggattacatattccaacagttgttattatattggtaaggagaaaagaacttgggcagagagtttgctggcctgtacttcgaagaactccagtctgctttctatagataatgaagaagaaatgaaatttctgaccgccattttaacttcctcatggattgatgtgtttcgtgacagcagtcatcatccatgggtgacaatcaacggtttgactttcaaacatgagataaaagagtcagatcatgctgaacataactgtgcaatgctacatgtacgtggacttttttcagacgagtgtggatcttcaaaaatatatcattgtaagcataagctttagaagtaaag

SEQ ID NO: 31828 - DNA, 758 bp, Macaca Mulatta
  misc_feature (1)...(758): n = A,T,C or G
ggaactttgaagggaagaaagtcattagcttagaatatgaagcgtatctacccatggcgaaaaacgaagtcaaaaagatttgtagtgacattaggcagaaatggccagtcaaacacatagcagtgttccatagacttggcttggttccagtgtcagaagcaagcataatcattgctgtgtcctcagcccacagagctgcatctcttgaagctgtgagctatgccattgatactttaaaagccaaggtgcccatatggaaaaaggaaatttatgaagagtcatcatcttggaaaggaaacaaagagtgcttttgggcttcaggtgatgcagcaccgtctgtccatgggccacactttgaggaacaatgctttctgctgtctcaaaactttgaaggcagtttaagagtcctacaaaacatcctgtggtcactgctagaaacatagactggacaactatggcgaattatagcctcagtcttcttaaattgagtcttggatgtgagcaaagtgaatgtataagataaaaatagtaaaatatataacttgtaaaagtccaaagaaaataactttattttccagacaattgtaacaatattcaataatgtggtatgaaaagagtggcttacaattaaatgaaactttgctggtttgttatacttggtatatggagaaaagcttattaactagttttatgtttgacaacaaattttaattntttggtttctccgtaaaattcaaatgaaattccttgcaaaccta

SEQ ID NO: 31829 - DNA, 607 bp, Macaca Mulatta
cctccatcctccctaacttttcaagccaatcccttcatgtcattcctctctctgtgtatctgtgccagatgttttcctttcttccttctttactggaaggacctccacattcttccctccttggaagaggactttactaaaagtcacgggtggtggccaggggggatttttgaatctccatcaggcgcgttcatagttgtccccattgtctacccacatgaatcctcaggaaaccaaccaccgcccaggtggcctgagggaggcattcacctttatgtgttagaaaaacatgaccagaaatcaaagatgtcagagccccgaagcagctaatgtaataagcactcatgttattaaaggttttgccttgtcgtaaccaaccgagccggagggtgttttgtttcttttgggtgtttcctacacaaactcactcccctgcctccaaagtggctcacatccctcttggaagctgaactttgctcatccacacctgagccactaagaaggctcaccttgtacctttgtaagccagtaaggtattcccacaaatgtccgaatcagtacgcccttctgcttgaattcctggaggctacctgggggtgggtgagtg

SEQ ID NO: 31830 - DNA, 73 bp, Macaca Mulatta
aaaaggattcatctttctaggctcagttgagacctcagttactaaatttcaacctaccaccctcaccttatgt

SEQ ID NO: 31831 - DNA, 161 bp, Macaca Mulatta
ggtctgccgggcccacaacgcttttgggggtgagggtgtctacgccattgccaggtgctgcctgctaccccaggtcaactgcagcgtccacacagctccaccagctggggccagcatggggacccgtgtccactgccatcagcagggccacgtcctcacag

SEQ ID NO: 31832 - DNA, 244 bp, Macaca Mulatta
  misc_feature (1)...(244): n = A,T,C or G
gagccaggctactgccctgtgagactgggaatgacaactggaagacttcagtctggagtgaatactttgcaggggttcaaagaggataaaaggaacaaagtcactccagnnnnnnnnnnnnnnnnnnnnnnnnnnnnnnnnnnngcaccgcattatgactccacatttgcgaatatcagcaaggatgattctgatntaatctattcaacctatggggaagactctgatcttccaagcgatttca

SEQ ID NO: 31833 - DNA, 549 bp, Macaca Mulatta
gactgtctttcacatgtcagaaaatactagaagcctaacaaacaataaaacttgtatttgacagttattgttctaatacagatgataagattccagtattttaatgtgacctctgggagtgggactagagatgctgccagtgaccataaagggtggaaaatcaatcctcctagagatagaaacaactttggtcccacaaatttgccttgtgattgtccctctttttctctcttctagtcaacatccttgggttcatccacacctgtgttttctatgagttctccaatatcaaggagatttaacaatttgtttggtaaaacaggtgagtagtggcctctaggttctccctgctcacccagaacacatttgatcaaatggggagcctcaacacccctactccttcacccagctcatggcatttacctgaaatgtcctcttttggggtagaagttaaatagaggaacttaccttttcacaaatcaccaaaaagtgggtgtagagggcagctgcctttgttgggcaacttttaataactcataaggaataaga

SEQ ID NO: 31834 - DNA, 314 bp, Macaca Mulatta
  misc_feature (1)...(314): n = A,T,C or G
gtgaactcctcgtgcccagggctgatgtgcgtcttccagggctactcatccaaaggcctagtccaacgttctctcttcaacctgcaaatctatggggtcctggggctcttctggacccttaactgggtactggccctgggccagtgcgtcctggccggagcctttgcctctttctactgggccttccacaagccccaggatatccctaccttccccctaatctctgccttcatccgcacactccgngttaccacaccgggtcgttggcatttggagccctcatcctgacccttgtgcagatagcccgggtcatc

SEQ ID NO: 31835 - DNA, 515 bp, Macaca Mulatta
  misc_feature (1)...(515): n = A,T,C or G
ggggcacatccaccctccccacagtgggtttgctttcaattgtgggaagggagccttggcacctgcagcgcagcggcacccccaggtccagtcccctcatgacggagctgcaggtccctgatccactgagtcagttcctcaggaagtctcacgtctactctggcttgagaaccagtgcgcgtggtgtctccaccctggctatttgcagaagtgcctagaagcacccagaaacatcccatcagtctctccagctggtgctcggcaggcagccaggcttgcttggcaccacaggtggcgggctcagagttgcaaacctaggttgttgcgtagcgtcatctctctctgcagagaacatactcaacactgctatgangaagtcctcgtggcacaggcagagcatgcccacagagctggcagacatggtgcagggctttcaagagggaagacacacttttcttgtttgttgcacctactttaatccaactttcgataaggaaaacatccatccacttcta

SEQ ID NO: 31836 - DNA, 2221 bp, Macaca Mulatta
  misc_feature (1)...(2221): n = A,T,C or G
aatactgtgactgatctaacagttcatcgggcaactcctgaagatctggnnnnnnnnnnnnnnnnnnnnnnnnnnnnnnnnnnnnnnnnnnnnnnnnnnnnnnnnnnnnnnnnnnnnnnnnnnnnnnnnnnnnnnnnnnnnnnnnnnnnnnnnnnnnnnnnnnnnnnnnnnnnnnnnnnnnnnnnnnnnnnnnnnnnnnnnnnnnnnnnnnnnnnnnnnnnnnnnnnnnnnnnnnnnnnnnnnnnnnnnnnnnnnnnnnnnnnnnnnnnnnnnnnnnnnnnnnnnnnnnnnnnnnnnnnnnnnnnnnnnnnnnnnnnnnnnnnnnnnnnnnnnnnnnnnnnnnnnnnnnnnnnnnnnnnnnnnnnnnnnnnnnnnnnnnnnnnnnnnnnnnnnnnnnnnnnnnnnnnnnnnnnnnnnnnnnnnnnnnnnnnnnnnnnnnnnnnnnnnnnnnnnnnnnnnnnnnnnnnnnnnnnnnnnnnnnnnnnnnnnnnnnnnnnnnnnnnnnnnnnnnnnnnnnnnnnnnnnnnnnnnnnnnnnnnnnnnnnnnnnnnnnnnnnnnnnnnnnnnnnnnnnnnnnnnnnnnnnnnnnnnnnnnnnnnnnnnnnnnnnnnnnnnnnnnnnnnnnnnnnnnnnnnnnnnnnnnnnnnnnnagctgctctgaatgctaccaatgctgtcaagagactccaaaccaggcttcagcctgaagaatctactgagactctagactcaagctatattgtgggacacgtgctgaactcaaggaagcaaaaacagctgttaaataaannnnnnnnnnnnnnnnnnnnnnnnnnnnnnnnnnnnnnnnnnnnnnnnnnnnnnnnnnnnnnnnnnnnnnnnnnnnnnnnnnnnnnnnnnnnnnnnnnnnnnnnnnnnnnnnnnnnnnnnnnnnnnnnnnnnnnnnnnnnnnnnnnnnnnnnnnnnnnnnnnnnnnnnnnnnnnnnnnnnnnnnnnnnnnnnnnnnnnnnnnnnnnnnnnnnnnnnnnnnnnnnnnnnnnnnnnnnnnnnnnnnnnnnnnnnnnnnnnnnnnnnnnnnnnnnnnnnnnnnnnnnnnnnnnnnnnnnnnnnnnnnnnnnnnnnnnnnnnnnnnnnnnnnnnnnnnnnnnnnnnnnnnnnnnnnnnnnnnnnnnnnnnnnnnnnnnnnnnnnnnnnnnnnnnnnnnnnnnnnnnnnnnnnnnnnnnnnnnnnnnnnnnnnnnnnnnnnnnnnnnnnnnnnnnnnnnnnnnnnnnnnnnnnnnnnnnnnnnnnnnnnnnnnnnnnnnnnnnnnnnnnnnnnnnnnnnnnnnnnnnnnnnnnnnnnnnnnnnnnnnnnnnnnnnnnnnnnnnnnnnnnnnnnnnnnnnnnnnnnnnnnnnnnnnnnnnnnnnnnnnnnnnnnnnnnnnnnnnnnnnnnnnnnnnnnnnnnnnnnnnnnnnnnnnnnnnnnnnnnnnnnnnnnnnnnnnnnnnnnnnnnnnnnnnnnnnnnnnnnnnnnnnnnnnnnnnnnnnnnnnnnnnnnnnnnnnnnnnnnnnnnnnnnnnnnnnnnnnnnnnnnnnngtattgagaaggactgttcaaactcgtcctgctccacgacttcctccaactgtggaaataattgagaaggaacaaaattgggaagagaagaccttacctgttgatacagatattcagaattcaagtnnnnnnnnnnnnnnnnnnnnnnnnnnnnnnnnnnnnnnnnnnnnnnnnnnnnnnnnnnnnnnnnnnnnnnnnnnnnnnnnnnnnnnnnnnnnnnnnnnnnnnnnnnnnnnnnnnnnnnnnnnnnnnnnnnnnnnnnnnnnnnnnnnnnnnnnnnnnnnnnnnnnnnnnnnnnnnnnnnnnnnnnnnnnnnnnnnnnnnnnnnnnnnnnnnnnnnnnnnnnnnnnnnnnnnnnnnnnnnnnnnnnnnnnnnnnnnnnnnnnnnnnnnnnnnnnnnnnnnnnnnnnnnnnnnnnnnnnnnnnnnnnnnnnnnnnnnnnnnnnnnnnnnnnnnnnnnnnnnnnnnnnnnnnnnnnnnnnnnncttttccagtagcacagtctctagcaccaggtagtatggaggaacggattgcagaattgaatcgacaaagtatggaggctcgtggaaaactactgcagttgatagagcagcagaaacttgttggtttgaatctttctccaccaatgttacctgttcagttacctctcagagcatggactg

SEQ ID NO: 31837 - DNA, 2205 bp, Macaca Mulatta
  misc_feature (1)...(2205): n = A,T,C or G
ccagccccacttctcttcctcccgccagcggccccaggtggggaggtcaccagcagtgggggaagtcctgggggcaccacagctgctccttcaggtgctttggatgctgctgctgctgtggctgccaagatcaatgccatgctcatggcaaaaggaaagctgaaaccaacacagaatgcttctgagaannnnnnnnnnnnnnnnnnnnnnnnnnnnnnnnnnnnnnnnnnnnnnnnnnnnnnnnnnnnnnnnnnnnnnnnnnnnnnnnnnnnnnnnnnnnnnnnnnnnnnnnnnnnnnnnnnnnnnnnnnnnnnnnnnnnnnnnnnnnnnnnnnnnnnnnnnnnnnnnnnnnnnnnnnnnnnnnnnnnnnnnnnnnnnnnnnnnnnnnnnnnnnnnnnnnnnnnnnnnnnnnnnnnnnnnnnnnnnnnnnnnnnnnnnnnnnnnnnnnnnnnnnnnnnnnnnnnnnnnnnnnnnnnnnnnnnnnnnnnnnnnnnnnnnnnnnnnnnnnnnnnnnnnnnnnnnnnnnnnnnnnnnnnnnnnnnnnnnnnnnnnnnnnnnnnnnnnnnnnnnnnnnnnnnnnnnnnnnnnnnnnnnnnnnnnnnnnnnnnnnnnnnnnnnnnnnnnnnnnnnnnnnnnnnnnnnnnnnnnnnnnnnnnnnnnnnnnnnnnnnnnnnnnnnnnnnnnnnnnnnnnnnnnnnnnnnnnnnnnnnnnnnnnnnnnnnnnnnnnnnnnnnnnnnnnnnnnnnnnnnnnnnnnnnnnnnnnnnnnnnnnnnnnnnnnnnnnnnnnnnnnnnnnnnnnnnnnnnnnnnnnnnnnnnnnnnnnnnnnnnnnnnnnnnnnnnnnnnnnnnnnnnnnnnnnnnnnnnnnnnnnnnnnnnnnnnnnnnnnnnnnnnnnnnnnnnnnnnnnnnnnnnnnnnnnnnnnnnnnnnnnnnnnnnnnnncaggctatacacaaccctctgctataagtagtgtccctcctcaaccaccatattatccatccaatggctatcagtctggttaccctgttgttccccctcctcagcagccagttcaacctccctacggagtaccaagcatagtgccaccagctgtttcattagcacctggagtcttgccggcattacctactggagttccacctgtgccaacacaatacccgataacacaagtgcagcctccagctagcactggacannnnnnnnnnnnnnnnnnnnnnnnnnnnnnnnnnnnnnnnnnnnnnnnnnnnnnnnnnnnnnnnnnnnnnnnnnnnnnnnnnnnnnnnnnnnnnnnnnnnnnnnnnnnnnnnnnnnnnnnnnnnnnnnnnnnnnnnnnnnnnnnnnnnnnnnnnnnnnnnnnnnnnnnnnnnnnnnnnnnnnnnnnnnnnnnnnnnnnnnnnnnnnnnnnnnnnnnnnnnnnnnnnnnnnnnnnnnnnnnnnnnnnnnnnnnnnnnnnnnnnnnnnnnnnnnnnnnnnnnnnnnnnnnnnnnnnnnnnnnnnnnnnnnnnnnnnnnnnnnnnnnnnnnnnnnnnnnnnnnnnnnnnnnnnnnnnnnnnnnnnnnnnnnnnnnnnnnnnnnnnnnnnnnnnnnnnnnnnnnnnnnnnnnnnnnnnnnnnnnnnnnnnnnnnnnnnnnnnnnnnnnnnnnnnnnnnnnaaaaatacaaaaactagtgggcatggtggtgggcccctgtaatcccagctacttgggggttgaggcaggagaatcgcttcagcctgggaggcagaggttgcagtgagccaagatcagaccactgccctccagcctgggcaatagagcaagactccatctcataaataaataaatacatacataaataaagctattagttttctaacctgatgttcattcaggtgtttaatccaacctctctaatctattagccagtgaaaatacttttgggctgggcatggtggctcacgcctgtaatcccagcactttgggaggccaaggtgggcggatcagctgaggtcaggagtttgagaccagcatggctaacacggtgaaaccccatctctattaaaaatagaaaaattaagctggacatggtagtgcatgcctgtaatcccagcgacttggaaggctgaggcaggagaaacgcttgaacttgggaggtggaggttgtagtgagctgagatcacaccactgctttccagcctgggcaatagagtgagactctgtct

SEQ ID NO: 31838 - DNA, 1430 bp, Macaca Mulatta
tttacccggagacagggagaggctcttctgggtgtagtggttgtgcagagcctcatgcatcacggagcatgagaaggtgttcccctgctgccacctgctcttgtccacggtgagcttgctgtagaggaagtaggagccgtcggagtccagcacaggcggcgtggtcttgtaggtgttctccggctgcccgttgctcgcccactccacgacgatgtcgctggggtagaagcctttgaccaggcaggtcaggctgacctggttcttggtcagctccttccggggcgggggcagggtgtacacctgtggctctcggggctgccctttggttttggagacagttttctgctttggggccgggagggctttgttggagaccttgcacgtgtactccttgccgttcagccagtcctggtgtgtgacggtgaggacgctgaccacgcggtacgtgctgttgaactgctcctcccgtggcttcgtctgggcattgtgcacctccacgccgtccacgtaccagttgaacttgacatcgggttcttcctggctcacgtctaccaccacgcacgtgacctcaggggtccgggaaatcatgagggtgtccttgggttttggggggaagaggaagactgatggtccccccaggagttcagctgggcacggtgggcacgtggaacgacatgggagcccaactgtcttgtccaccttggtgttgctgggctcatgaacgacgttgcagacgtaggtctgggtgcccaagctgctggagggcacggtcaccacgctgctgagggagtagagccctgaggactgtaggacagcctggaaggtgtgcacgccgctggtcagggagcctgagttccacgacacggtcacgggttcagggaagtagtccttgaccaggcagcccagggcccctgtgctctcggaggtgctcctggaggagggcgccagggggaagaccgatgggcccttggtggaggctgaagagacgatgaccctgagtccttggccccagaaatcaaaagcatcaggaacgggaatgctttgtgtaatactgaggccaaccctcctcgagcgacatcgcgcacagtaatagacggccgtgtccgcggcggacacagacctcagcctcagggagaaccggttcttggacgtgtctcttccagtagtgacgcgactcttgagggacggcttgtaggtggccctgttatcagaagagatggaggcaatccactccagtccctttcctggggcctggcggatccagttccagtagtaggaagtagtggtgatagagtcaccagagacaacgcaggtgagggacagggtctccgaagggctcaccagtcctgggcccgactcctgcagctgcacctgggacaggacccatctgggagctgccaccaggaggtacgaccgacagtgcttcatgt

SEQ ID NO: 31839 - DNA, 255 bp, Macaca Mulatta
gtatgagcgtcaagtcctgctttctcagtagccccattgctgggccccaccattcatcctgtctgaaggtcctgggtttggtgtgaccggttggcggctggtgggtgggatttccaagtgggggacggcactctccagcagcctggggatggccgtgtccacaccgaccaggcctgtggagagtgctcagcctaaccttagaacacatttgtaactgaatacagtgttttcaatttgtacagaatagttagaata

SEQ ID NO: 31840 - DNA, 97 bp, Macaca Mulatta
agctgaatgagtatgtggctaagggtctgaccgacagcatccaccgttaccactcagacaatagcaccaaggcagcgtgggactccatccagtcatt

SEQ ID NO: 31841 - DNA, 610 bp, Macaca Mulatta
taggctcttccatctactcagtattcttgggtaaggtgtggttatttttcttggactaatattaggaagttgcttaacaaattttaacacaaagccaacatttatgtacttgctgtatacgtgaattgttttccttctttataggttccctggcttcaaggaagtgcgtctggtaccagggaggcatgacattgcttttgttgaatttgaaaatgatgggcaggctggagctgccagggatgctttacagggatttaagatcacaccgtcccatgctatgaagatcacctatgccaagaaataacatttgggacagtcgtctttaaaggacttggtgttatttatagtgtttgttttgataacatttggctgggtcattttaatagttagagattagggggagtaaaagtgaaatttttgtgaaggacttaaattatccagtgtttctttagccttggtgaactatgaaatacgaagaccttaattttgtacaataaactttgtattctgtgtatataatgctttctttattgactcattgccctatcatcaaatgactattctggtctagaacacacttaaggtttataaaattgtgtaataggatgct

SEQ ID NO: 31842 - DNA, 521 bp, Macaca Mulatta
agttctgtggctcctgatggatctgagaagatggacgtggaggatgaaaatctctctgattattttgaactgatgtttgttgctgtggagatgctgcccatatgttcatattgtggatgttaagtcagtagcccacagccttgtattccatattctagagaccctgctacttgacatctcaacttgaaagtccaataaatatgcacttcaaacttaaataagcttcaatttctttcattatgtctgcaaaacagcttctcccatcatcttgaaattagtgaacagcattttactgttttagctggagtcatttctgtcgtttcctttcacatcctacataacaatccatcagtaagttctatgagctctttgaaaacagaatccaactgtttctcattcccacttctggtcaaaccactgccaacgctcacctttattgttgtagcaccctcattgcctagttctgttccacagatttccagtaaagggtgagtaaaatcaggtcactcttctactgaaaa

SEQ ID NO: 31843 - DNA, 1658 bp, Macaca Mulatta
  misc_feature (1)...(1658): n = A,T,C or G
agacctctacgagcataagttcatcaactgtcggtttatcaactccacctttctggagcagaaggagggctgccacatggacttggagcaagataatgacttcctgatttacctcgtcagcttcctgggcagcctgtctgtcttacccggaaacatcatttctgccctgctcatggatagaatcggaaggctcaagatgattggtnnnnnnnnnnnnnnnnnnnnnnnnnnnnnnnnnnnnnnnnnnnnnnnnnnnnnnnnnnnnnnnnnnnnnnnnnnnnnnnnnnnnnnnnnnnnnnnnnnnnnnnnnnnnnnnnnnnnnnnnnnnnnnnnnnnnnnnnnnnnnnnnnnnnnnnnnnnnnnnnnnnnnnnnnnnnnnnnnnnnnnnnnnnnnnnnnnnnnnnnnnnnnnnnnnnnnnnnnnnnnnnnnnnnnnnnnnnnnnnnnnnnnnnnnnnnnnnnnnnnnnnnnnnnnnnnnnnnnnnnnnnnnnnnnnnnnnnnnnnnnnnnnnnnnnnnnnnnnnnnnnnnnnnnnnnnnnnnnnnnnnnnnnnnnnnnnnnnnnnnnnnnnnnnnnnnnnnnnnnnnnnnnnnnnnnnnnnnnnnnnnnnnnnnnnnnnnnnnnnnnnnnnnnnnnnnnnnnnnnnnnnnnnnnnnnnnnnnnnnnnnnnnnnnnnnnnnnnnnnnnnnnnnnnnnnnnnnnnnnnnnnnnnnnnnnnnnnnnnnnnnnnnnnnnnnnnnnnnnnnnnnnnnnnnnnnnnnnnnnnnnnnnnnnnnnnnnnnnnnnnnnnnnnnnnnnnnnnnnnnnnnnnnnnnnnnnnnnnnnnnnnnnnnnnnnnnnnnnnnnnnnnnnnnnnnnnnnnnnnnnnnnnnnnnnnnnnnnnnnnnnnnnnnnnnnnnnnnnnnnnnnnnnnnnnnnnnnnnnnnnnnnnnnnnnnnnnnnnnnnnnnnnnnnnnnnnnnnnnnnnnnnnnnnnnnnnnnnnnnnnnnnnnnnnnnnnnnnnnnnnnnnnnnnnnnnnnnnnnnnnnnnnnnnnnnnnnnnnnnnnnnnnnnnnnnnnnnnnnnnnnnnnnnnnnnnnnnnnnnnnnnnnnnnnnnnnnnnnnnnnnnnnnnnnnnnnnnnnnnnnnnnnnnnnnnnnnnnnnnnnnnnnnnnnnnnnnnnnnnnnnnnnnnnnnnnnnnnnnnnnnnnnnnnnnnnnnnnnnnnnnnnnnnnnnnnnnnnnnnnnnnnnnnnnnnnnnnnnnnnnnnnnnnnnnnnnnnnnnnnnnnnnnnnnnnnnnnnnnnnnnnnnnnnnnnnnnnnnnnnnnnnnnnnnnnnnnnnnnnnnnnnnnnnnnnnnnnnnnnnnnnnnnnnnnnnnnnnnnnnnnnnnnnnnnnnnnnnnnnnnnnnnnnnnnnnnnnnnnnnnnnnnnnnnnnnnnnnnnnnnnnnnnnnnnnnnnnnnnnnnnnnnaatccaggcactttgtttgtgcacttggagtgagtagttacttctctgtcttacacagatgacttgtgaaactcaagcttaccatcttcagtgctggcattttactttgccactcaccccaaaacaacgtgagatgtgttcagtggcctctggtactctttctggcaagaatcaaacaacatggggactgagggagggatggggaagt

SEQ ID NO: 31844 - DNA, 514 bp, Macaca Mulatta
  misc_feature (1)...(514): n = A,T,C or G
gggggaagttccggtccaggtctcctacctgggggttgttcgctggcggcgtcggagccgagccggactggtcaggatgatcaccgacgtgcagctcgccatcttcgccaacatgctgggcgtgtcgctcttcttgcttgttgttctctatcactacgtggccgtcaacaatcccaagaagcaggaatgaaagtggcgctttctccgccccagggttccaggacatagtctgaggcaagatggagggtatgaggggccttcacacttcacttcatcccttctacccatcacaacatacaaagcaactacacctggatttttccaaacaacttttatttcctcaaagtcttccttaatcctatggaacaagaagctgccactgaatagggcccagtataggggcttgcttttctactccctccccccaatataaaaatatagattttttttgtgggcccgaacatcgactccagaaaaaaaaaataccttgtcnnnnnnnnnnnnnnnnnnnngg

SEQ ID NO: 31845 - DNA, 725 bp, Macaca Mulatta
  misc_feature (1)...(725): n = A,T,C or G
cccaatttttaaaaaaccccccggtttacacctttttttttggggaattgcaaaaacctttccaaccccctagggttttttttccaattcccaggaaaaacttaaaatttgtttggnnnnnnnnnnnnnnnnnnntttttaggacaaaggcccttgcctggaatttttaattacaggcatattccataattcctatgtaatctatcccaaatccaaaaaaatgaaactgtccaaaaccaaaagttttgcaaaatcatgatttaacagtgtgcccagcttgtttgaagctaaaatgaagcctgaaaccataaaagcattgtaatccccagaataagggaactctgcaagcccaataatgtccaagagcatttatgaaaagaggaaaaataaaaagacttgagtatatacacaatagtgatttcttcagcccaatacaaatggcagcaaaatgctacttaaagatgaaacagttaagnnnnnnnnnnnnnnnnnngaatgtagatctagagccaatcgtatcttgccagtatcattttcaagcccttacttgtctacttccactgttgcccataagtatcctgataaaattcctggttgtcattattgtaaccatagttaccagaatagtcaccaccttgctgaagcggctgctgagcgatgggttgggaaccccagttctgttggttgttggtctgacgacgcttggaatcaggttggttgtaccc

SEQ ID NO: 31846 - DNA, 262 bp, Macaca Mulatta
acgcgggagatgcgtccttgttttccgggaaatgttcttagaacttggactactgattattaattgactctgccttggaaagcagtgggaagtaagttggtgctgcactggggtattgttggcttcttgtgttggaaacttggtaatccaaaaggaaaaaccgcaaatccctacgccctgtttccctttatctagtcttgtagttggactggttcaatttgtttaactccaattcttgctcctggccgtggttaagctgtgt

SEQ ID NO: 31847 - DNA, 1517 bp, Macaca Mulatta
  misc_feature (1)...(1517): n = A,T,C or G
agcctaaatttccttgtaaagaatgggacccaaatttaccttcattgtgtcttccaaatcctgaatatttggctcctgaatacatactttctgtgagctgtgaaacagccagtgatatgtattctttaggaactgttatgtatgctgtatttaataaagggaaacctatatttgaagtcaacaagcaagatatttacaagagtttcagtaggcagttggatcagnnnnnnnnnnnnnnnnnnnnnnnnnnnnnnnnnnnnnnnnnnnnnnnnnnnnnnnnnnnnnnnnnnnnnnnnnnnnnnnnnnnnnnnnnnnnnnnnnnnnnnnnnnnnnnnnnnnnnnnnnnnnnnnnnnnnnnnnnnnnnnnnnnnnnnnnnnnnnnnnnnnnnnnnnnnnnnnnnnnnnnnnnnnnnnnnnnnnnnnnnnnnnnnnnnnnnnnnnnnnnnnnnnnnnnnnnnnnnnnnnnnnnnnnnnnnnnnnnnnnnnnnnnnnnnnnnnnnnnnnnnnnnnnnnnnnnnnnnnnnnnnnnnnnnnnnnnnnnnnnnnnnnnnnnnnnnnnnnnnnnnnnnnnnnnnnnnnnnnnnnnnnnnnnnnnnnnnnnnnnnnnnnnnnnnnnnnnnnnnnnnnnnnnnnnnnnnnnnnnnnnnnnnnnnnnnnnnnnnnnnnnnnnnnnnnnnnnnnnnnnnnnnnnnnnnnnnnnnnnnnnnnnnnnnnnnnnnnnnnnnnnnnnnnnnnnnnnnnnnnnnnnnnnnnnnnnnnnnnnnnnnnnnnnnnnnnnnnnnnnnnnnnnnnnnnnnnnnnnnnnnnnnnnnnnnnnnnnnnnnnnnnnnnnnnnnnnnnnnnnnnnnnnnnnnnnnnnnnnnnnnnnnnnnnnnnnnnnnnnnnnnnnnnnnnnnnnnnnnnnnnnnnnnnnnnnnnnnnnnnnnnnnnnnnnnnnnnnnnnnnnnnnnnnnnnnnnnnnnnnnnnnnnnnnnnnnnnnnnnnnnnnnnnnnnnnnnnnnnnnnnnnnnnnnnnnnnnnnnnnnnnnnnnnnnnnnnnnnnnnnnnnnnnnnnnnnnnnnnnnnnnnnnnnnnnnnnnnnnnnnnnnnnnnnnnnnnnnnnnnnnnnnnnnnnnnnnnnnnnnnnnnnnnnnnnnnnnnnnnnnnnnnnnnnnnnnnnnnnnnnnnnnnnnnnnnnnnnnnnnnnnnnnnnnnnnnnnnnnnnnnnnnnnnnnnnnnnnnnnnnnnnnnnnnnnnnnnnnnnnnnnnnnnnnnnnnnnnnnnnnnnnnnnnnnnnnnnnnnnnnnnnnnnnnnnnnnnnnnnnnnnnnnnnnnnnnnnnnnnnnnnnnnnnnnnnnnnnnnnnnnnnnnnnnnnnnnnnnnnnnnnnnnnnnnnnnnnnnnnnnnnnnnnnnnnnngcatcacttacacttgaagaaaaacaaaaattagcaaaagaacaagagcaggcacagaagttgaaaagccagcagcctcttaaaccccaagtgcacacacctgttgctactgttaaacag

SEQ ID NO: 31848 - DNA, 248 bp, Macaca Mulatta
aattttatctttatttaacaaagagtaacaaaggatggattctatcctcaaattccttaccatttgttagagaaaatcagacatatatagaaatgacaataaattaaaggttaatatgttgattactataaaagtgttgaagtgggtgatgtggttcaaaggaagagtgatcatttctggctgaggtgatcaggaaaaaatccatgaaggcagtatacatataagattggtgaagttaagtaaattct

SEQ ID NO: 31849 - DNA, 586 bp, Macaca Mulatta
  misc_feature (1)...(586): n = A,T,C or G
ggtgtatcctgatcatcagaaattcactcctcgtgcctcggaaaagacagccagcatttccatcacagaccccttcttcgggaacgcccagccctggatcgcagccctggcagggaccctgcctatctcactgctgcttctcgcaggagccagttacttcttgtggagacaacagaaggaaaaaattgccctgtccagggagacagaaagagagcgagagatgaaagaaatgggatatgctgcaacaaagcaggaaataagcctaagaggtatccaaagcgaacagagaatctaagccccaggcttgcatgcccagcctgaagatctcacccccatacccgtcctggcgctgcatcatgtttaaggtttattttcccgaaatccccctcacccataactgnnnnnnnnnnnnnnnnnnnnnnnnnnnnnnntggcttatttttcagagaagctccaggaggaactcagtaagttcccattcccccagagatccaggcatgtcttcttatccccactttgagcaccttgataaactgtaccttccctgttcattccattgcagagtggagaaaaatccagtacatgg

SEQ ID NO: 31850 - DNA, 259 bp, Macaca Mulatta
ccagcgctgctgcttggggcccgccccaagggaggtcttgcagggccccggcatccctggtgagcccgcggcctgggcgtcctgcagcagttgggggccctgcacttggctgggctggctcggggatcttcgcaggtgcggggctcccagtctcacagcctctgaacctagcctgactggtctctggggaacagtggccgcccgggtggctcaggaggccgcctgcaccccggctccaggtcccgggcggactgtcccc

SEQ ID NO: 31851 - DNA, 103 bp, Macaca Mulatta
agattacagccacaaccttcaggagtgaccatagatgaatcctttatcacagaaaacaagagtacccagaaacgcaagcttcttcagaaacgaaggacgctgg

SEQ ID NO: 31852 - DNA, 642 bp, Macaca Mulatta
  misc_feature (1)...(642): n = A,T,C or G
tgtcattgaggccagcatcaaccatgagaagggctatgtccaatccaaggagatgattgacatctattccacccgagagccccagctggccttccaccagcgcatctccttctgcctagatatccacaacatgtctgtcaaggnnnnnnnnnnnnnnnnnnnnnnnnnnnnnnnnnnnnnnnnnnnnnnnnnnnnnnnnnnnnnnnnnnnnnnnnnnnnnnnnnnnnnnnnnnnnnnnnnnnnnnnnnnnnnnnnnnnnnnnnnnnnnnnnnnnnnnnnnnnnnnnnnnnnnnnnnnnnnnnnnnnnnnnnnnnnnnnnnnnnnnnnnnnnnnnnnnnnnnnnnnnnnnnnnnnnnnnnnnnnnnnnnnnnnnnnnnnnnnnnnnnnnnnnnnnnnnnnnnnnnnnnnnnnnnnnnnnnnnnnnnnnnnnnnnnnnnnnnnnnnnnnnnnnnnnnnnnnnnnnnnnnnnnnnnnnnnnnnnnnnnnnnnnnnccgggcagggtcctggccagtggtgtgggagcaggaggggaaggatagttctgtgtgctcctcttgggagtaggggactgaactgggatgtcttggcttgtatgttttttgaagcttcgattatgatttttaaacaataaaaagttatcc

SEQ ID NO: 31853 - DNA, 1860 bp, Macaca Mulatta
  misc_feature (1)...(1860): n = A,T,C or G
gggcccagcactagaagatttcagtcatctgccaccagaacagagacgtaaaaatctacagcagcacattgatgaacttaacagagaactacagaaggagtcagaccaaannnnnnnnnnnnnnnnnnnnnnnnnnnnnnnnnnnnnnnnnnnnnnnnnnnnnnnnnnnnnnnnnnnnnnnnnnnnnnnnnnnnnnnnnnnnnnnnnnnnnnnnnnnnnnnnnnnnnnnnnnnnnnnnnnnaggcttggctctctgaagttgaaggcaaaacaggtggagaggagacagaagacatagcagtgacataaatcatcttgtaacacagggacgagaaanagtcctgagggaagttacactgatgatgcaaaccaggaagtccgtgggccaccccaacagcatggtcaccacagtgagtttgatgatgaatttgaggatgatgatcccttacctgctattggacactgcaaagctatctacccttttgatgnnnnnnnnnnnnnnnnnnnnnnnnnnnnnnnnnnnnnnnnnnnnnnnnnnnnnnnnnnnnnnnnnnnnnnnnnnnnnnnnnnnnnnnnnnnnnnnnnnnnnnnnnnnnnnnnnnnnnnnnnnnnnnnnnnnnnnnnnnnnnnnnnnnnnnnnnnnnnnnnnnnnnnnnnnnnnnnnnnnnnnnnnnnnnnnnnnnnnnnnnnnnnnnnnnnnnnnnnnnnnnnnnnnnnnnnnnnnnnnnnnnnnnnnnnnnnnnnnnnnnnnnnnnnnnnnnnnnnnnnnnnnnnnnnnnnnnnnnnnnnnnnnnnnnnnnnnnnnnnnnnnnnnnnnnnnnnnnnnnnnnnnnnnnnnnnnnnnnnnnnnnnnnnnnnnnnnnnnnnnnnnnnnnnnnnnnnnnnnnnnnnnnnnnnnnnnnnnnnnnnnnnnnnnnnnnnnnnnnnnnnnnnnnnnnnnnnnnnnnnnnnnnnnnnnnnnnnnnnnnnnnnnnnnnnnnnnnnnnnnnnnnnnnnnccctcccagctctgttttaattggcttttagacccactatctgtcagatccttgccatctgtcagtgtctgcctgtgccacctccgtgcttgcttaacatcctgttgcatgtctagagtgactgagctagatttttcaggcatgtctttagattcccttgttcttgtcaaagcctttgttttgttttacatttgtagtgcaaatcactttgtcaaacatctccagcacgaatgtttccatcctagtatttgtgcacactgctataacctccccactgcaaacattccagttttggcattacgaagaagtagcctgtgaagctgaggtatttatgataagaaaaagaaaacatctctgctgtagcctgcagcccagttgaaagaactctttgaaacgtgacacatcttcagcacctcagtctgggaagaatctatagtcagcactgaaatcctggcataataaacacggaagatactcaccacctcaagacaaaggactgttgtcaaaagtcagctgcttccattcaaatgctgccttaaactagagtgcctaaatctgttgattgccaacactaccactacagtatcccacaaagggctttatgtgtcagctcagtgcgacctcctttaactctgcagcactgctgcagctaccgacgtagcctcggtaggtggctattagagctctaccatatacaatggtgcatcttcaaatttatgcatcaaactaaagacatgtccaagtccattttactttcctcagtgtttttatgagaagttttatggacctcccccaattgtctttttatttggggttatgacgatcatgtttgataattacaatgatagtctgtttccacgtga

SEQ ID NO: 31854 - DNA, 410 bp, Macaca Mulatta
  misc_feature (1)...(410): n = A,T,C or G
ggtgatgacagagggtggccacagcaaggggtttggctttgtgtgtttttcctccccagaagaggcgacaaaggccgtgacagagatgaacgggcgcatcgtgggcaccaagccactctacgtggcactggcccagcgcaaagaggagcggaaggccatcttgaccaaccagtacatgcaacgcctctccaccatgcggaccctgagcaacccgctcctgggctcctttcagcagccctccagctacttcctgcctgccgttccccagnnnnnnnnnnnnnnnnnnnnnnnnnnnnnnnnnnnnnnnnnnnnnnnnnnnnnnnnnnnnnnnnnnnnnnnnnnnnnnnnnnnnnnnnnnntgcctcaatggtccggccaccagtcatgcctcgtcgccccccagcccacat

SEQ ID NO: 31855 - DNA, 153 bp, Macaca Mulatta
atgagctccttcaggagcagcgtgcagacgtggaccagttcactgcctccatctcagagacccctgtggacgtccgggtgagctctgaggagagtgaggagatccctccgttccaccccttccaccccttcccagccttacctgagaacgaag

SEQ ID NO: 31856 - DNA, 96 bp, Macaca Mulatta
taatgtgtctactgacgtcacagaaaggagacacaaatgctgccctccagagccagacccacagccctccggtgcccagggggtctgagagaccac

SEQ ID NO: 31857 - DNA, 295 bp, Macaca Mulatta
  misc_feature (1)...(295): n = A,T,C or G
gaaattcttgtgggaaaatgtccatgactcatggaaaaaagaagacactttttaaatgataaaaacctcttcagtttaagaaaggcaaaaagaatttatatttgtttaaagcttgtttttgtgacgaactttactgctctgtggtgagatttcatctttgcaataagatatctgatgacagagtccagttttaataacattttgggaaattaaactttattttgtttataagattgacaaaatgtgatgtgtccaanatatcttataatttgagattggctgtcactttttaacc

SEQ ID NO: 31858 - DNA, 492 bp, Macaca Mulatta
gttttcaaatagtccctctgctcccaagatcccagccaggaaggctggggccctactgtttgtcccctctgggctggggtgggggcagggaggaggttccatcagcagctggcagtagccctcctttctggctgccccactggccagatctctggcctgctggattaaagctgtaaagacgtaactcatatcagtcgcatcattggacccatccacactttccaggaacaccgccttcagctgggcccagactgttgcccactccatataccaaaagtaggggagggccagcaccagcactggagcacagcaccatcctcccccccatccacacgcagaccaaggcagactattcctgggctgcttcctaaagacaatgaggtaaatttcgccatggctctgaagagatgctcgtttgcactacagatattccctgctagggatcaacagctctacagcagctgaggcactgctaactgtacaaaggcagtt

SEQ ID NO: 31859 - DNA, 268 bp, Macaca Mulatta
gcttatttactggtctgggacactggatgtgtttcctttttttaaaagccaattgacagactttcctaaatactcctcctttttgtatcattcagccttttgttttagtttggtaagttttaagaaatttcatcagcaaagttgttattcagtgggcacgatggactccaaatgcctcaaattatgtatacctgtcccagatgtaaacttcattgtcctttgttggatgatattttaaatggatataaaataaattggtctaaagggc

SEQ ID NO: 31860 - DNA, 303 bp, Macaca Mulatta
agttctggacacagaaagaactgaactattacacagacactaagtaaccagtttagagaacactccaacttggtttgaaaaaggatgtcttttagagctgggaatggttattggattttgacttggttatataaggattgccaaccttgtgaatgcacataaccccactcttgtcttttcatctttaaactttcccttcccacttccttctattttcattattcctgaaaaaactgtcagtcagaaagcgttaggtcacaaccctaaacagctttgagattcctcagtccaccactgcttgat

SEQ ID NO: 31861 - DNA, 436 bp, Macaca Mulatta
  misc_feature (1)...(436): n = A,T,C or G
gaatgcagcagctgaaggtgggaggctggaggttcaggggaagtggctcagcctcagagccatcttgctacagacatcagagatgggcgtctgggcttagaggcttctaattaagagatttccagtgccaactgccagtgaaagcaccctctgagaccctgagtagcctgagagtggagcaggccttagaaactgttagaccagtgcaacagatggtttccctatccagagtatggactaaatgagtttctagagtacaaagagttggaatggagaaggcagtagtgccaggcggggtcaatctaggcacagctgtactcagtaggtggacgtgaagcacgggtccagagccctgcacaaactttcccttgctctgggatggngtagaggacaggtttgtaatgttgctgaggaagggacagacattccacagtgg

SEQ ID NO: 31862 - DNA, 621 bp, Macaca Mulatta
cacaactactgcgcactccatggtctatgtgccacagatgcagcagcagcttcatgtagagaatatccagtctatactgagccacctctggtagatccaaccattcctcaattttacagtgaggtgaggagagaagatggcacacaggcggaagcatcagcaaatgatacttttccgaatgctgatccttcatctgtccctcatggagcagtctattatccagtaatgtcagatccctatgggcagccacctttgccaggttttgactcctgcctcccagttgtgccagattattcctgtgttcccccctggcatccagttggtacagcatatggtggttcttctcaaattcatggtgctataaatcctgggccaattggctatcttgctccatctcccccagcttctcactatgtacctcagggtatgtaagatccagcagtatgaagtattcttgcactgccattttcttgctgtaaatgtctttagaaagtttataatgttagtggttcactgatttaggtgattcgtgtttactatcgtatttgtctttcaaattatttcaccttttgatctaaaatagtactctcaaataacgggatataataccgggctgtgact

SEQ ID NO: 31863 - DNA, 1406 bp, Macaca Mulatta
  misc_feature (1)...(1406): n = A,T,C or G
nggcaaagtgattggaaagaacgggaaagtgatccaggagattgtggataaatctggtgtggtgagggttcgagtggaaggggataatgacaagaagaaccccagggaggagnnnnnnnnnnnnnnnnnnnnnnnnnnnnnnnnnnnnnnnnnnnnnnnnnnnnnnnnnnnnnnnnnnnnnnnnnnnnnnnnnnnaggaggtagagcagcttcgcttggagaggttgcaaattgatgagcagcttcggcagattgggctgggctttcgccctcctgggagtgggcggggcagcggtggcagtgacaaggctggatatagcaccgatgagagctcctcctcctccctccatgcgactcgaacctatgggggcagctatgggggccgtggccgtggccggaggacaggcggtcctgcctatggnnnnnnnnnnnnnnnnnnnnnnnnnnnnnnnnnnnnnnnnnnnnnnnnnnnnnnnnnnnnnnnnnnnnnnnnnnnnnnnnnnnnnnnnnnnnnnnnnnnnnnnnnnnnnnnnnnnnnnnnnnnnnnnnnnnnnnnnnnnnnnnnnnnnnnnnnnnnnnnnnnnnnnnnnnnnnnnnnnnnnnnnnnnnnnnnnnnnnnnnnnnnnnnnnnnnnnnnnnnnnnnnnnnnnnnnnnnnnnnnnnnnnnnnnnnnnnnnnnnnnnnnnnnnnnnnnnnnnnnnnnnnnnnnnnnnnnnnnnnnnnnnnnnnnnnnnnnnnnnnnnnnnnnnnnnnnnnnnnnnnnnnnnnnnnnnnnnnnnnnnnnnnnnnnnnnnnnnnnnnnnnnnnnnnnnnnnnnnnnnnnnnnnnnnnnnnnnnnnnnnnnnnnnnnnnnnnnnnnnnnnnnnnnnnnnnnnnnnnnnnnnnnnnnnnnnnnnnnnnnnnnnnnnnnnnnnnnnnnnnnnnnnnnnnnnnnnnnnnnnnnnnnnnnnnnnnnnnnnnnnnnnnnnnnnnnnnnnnnnnnnnnnnnnnnnnnnnnnnnnnnnnnnnnnnnnnagggtgactctgtcagcaagcttcctaagggcccctcggagaatggggagctctccgcccccttggagttgggtagtatggtgaatggggtttcataaaacctccagcctgcacccctcccttctccatctcgcttgctgcccaacaccatggccctcacaggcccaactgacctgcgctggagctgctcttatctnnnnnnnnnnnnntggcacagcagcttgggtaccccccaacctccaggagctagtggaggggtgtgtaacagggtcataccccctccctcttgtccaccctacccccagggtaaggggagcctctctccttccccatcagactggatgtgccttttcctctaatgccgccaatctctctctgaacacccccattct

SEQ ID NO: 31864 - DNA, 1012 bp, Macaca Mulatta
gggattccagcggctgacagcacccgggccgagatgtctccctcagtggccttagccgtgctggcgctactctctctttctggcctggaggctatccagcgtactccaaagattcaggtttactcacgccatccaccagagaatggaaagccaaatttcctgaattgctatgtgtctggatttcatccatctgatattgaagttgacttactgaagaatggagagaaaatgggaaaagtggagcattcagacttgtctttcagcaaagactggtctttctatctcttgtactacactgaattcaccccccatgaaaaagatgagtatgcctgccgtgtgaaccatgtgactttgtccgggcccacgaaaagttaaatagggatcgaagacatgtaaagcaagcataatgggaaagtttgaaagaatccccacattttgggaatctggaatgaaattttcgcgaaatttcctgcctttcccctttgcctttttttcaaagtattcggacttataggccctttaataacaagcgtatttcatcgtcaaataacaaaaaatgcgaccacggaagaattttctttccactctacacagtgtgattgtataaatacccatcaccgaggggcctccatgtggaataacccatatttcccttattctcattaaaacattattacattcacccttgttttggcacaaattgggctttagcttatccttcccaacacgtgtttctttgacagggggttaatatctgtgggggacctcagcccctaaatatccctttttagacgcgctagggggcacttgggagctcaaacctcttttgttaagtaatgtgggaggcaaccccccgcagaagaaattaccattccgagtcgtccccccaacataagcacacacactattatgtggtgtcgcgtagattctccaacccatcaattccacattccttccattttgccacccctacccatcacttgcgataaaaaactttatactccggatgtaa

SEQ ID NO: 31865 - DNA, 715 bp, Macaca Mulatta
  misc_feature (1)...(715): n = A,T,C or G
ccaatagtgctatcttcctttgtgggtgttaatttcatatacaatggaatgagatagaaattctcttatttttctgaattaacagttttaacataagcatatctggaactatgtttgctctaatttaggttcaattttaatctgtcttgggccacaaaaacatataccattgaatgcttcccaatttagccaagatctcattagaaacttgattcatgaaaatcaatggacttatcagttgtctaaatatcaccatcaggttattggagtcaagacacaaaaagcctaagcaagagctaaaagtataagttcaggaaaatacggataaactcactagcccttcctctatcacctcacaagaatctcattcagaaagggataatagatccggttttgattcattaagaattgagtttaaatacaatctaaacattgatccgttaagcactgattcattaagaagtgggtttaaatacaatgtgaactttggataaagaatttagactcacaaaacattgcctgagcttattagcattttcttacttagctctggatggaataggaaaatgcattaaggtctggtatttaaaccttaataaaagtattagacagtaccagtagtttatctaatattaaacacgatgaaaatatgaagatttagattagttttctatctaaaancaaagtttaaattcaccatgtgtcaaattttaca

SEQ ID NO: 31866 - DNA, 632 bp, Macaca Mulatta
gaatccctaccctcctccttcaacccttccagcttccactccccacccccaggctttcagacggccttcagaccccccagcaaaacccccacagatttactacagagttcaacactggaccgccattaggcaaagaggagcaaccattagaaaatgcaggatttgtcccactctgttttctccctctcagcccaccacccacagctcccttctcatctcttatgttctgaagaatccagtacctgatcaattttttttctccctacccccagatgcaatgcgatcacagggtcattaccatctctttattaattgtaaaagtttttgttgatccagcatttgagtgacactgttgaatgtttctaaaaatgcctttttaaggagagaaaaaaaaatcaaagggcagtctcaatacttagaaaattattgtttgtctgttgcgcataataatgacataatctgcttagcagaaaatggcgattaatctataggaaaggtcaagtaaatgcattatcaactgcagaagtttgaaaaccaggttcatttacgtgagattgctaaatgcatgggggaaaacagtggtcctagcatccatcttgtattcagcttatcattattgcagggaaaatgct

SEQ ID NO: 31867 - DNA, 771 bp, Macaca Mulatta
cccccgcctaccagcactacacgcagcaggccacgcaggaggcgcccaggcccggcacccaccccggcggcagctctggcaggggcaggaagagccggagcctggagaagcggatgctcatcccctcggaggacctgtagggggaccttggccactggtgctttagggacccaggttgcccacgcctgtggggaagaacagggccccccacccatcaaccctgccaaaggtgggggcctctcctgagagccctcctgcgaggccctcggagcccatttcccatcctccctccagcccgggggtcagggcacctgatggccctgccaggcacccaggtgggcccgccgcccaaggagagggcacctgagccaatcggaagagcctggggaccctgggatcacctggccatcagccccaggggccaccgtggggcagggagtcagcgtggctgccgggccttggctgtatgggccccacgggagctatgagtgggccagactccctgactcgggagacagacagcgcacggatcccaggctgggcagctggagggaggggcgccggggtgctgggcagccgggccctgacacagtcagcagctccgggtgccgaagaccggtgaggtccacacaagctggccagggctgggcctcctcggagcctgctgtggccatcgtgggcaagtggagaagggcccacatgtcttcacacaccagccacaggggagccttggccaggcgcccacccaggggagcgtgtgcctggaatggg

SEQ ID NO: 31868 - DNA, 731 bp, Macaca Mulatta
  misc_feature (1)...(731): n = A,T,C or G
aggccgagtgtttgtccacgaatgggcccatctccgttggggtgtgtttgatgagtataacaatgacaaacctttctatataaatgggcgaaatcaaattaaagtgacaaggnnnnnnnnnnnnnnnnnnnnnnnnnnnnnnnnnnnnnnnnnnnnnnnnnnnnnnnnnnnnnnnnnnnnnnnnnnnnnnnnnnnnnnnnnnnnnnnnnnnnnnnnnnnnnnnnnnnnnnnnnnnnnnnnnnnnnnnnnnnnnnnnnnnnnnnnnnnnnnnnnnnnnnnnnnnnnnnnnnnnnnnnnnnnnnnnnnnnnnnnnnnnnnnnnnnnnnnnnnnnnnnnnnnnnnnnnnnnnnnnnnnnnnnnnnnnnnnnnnnnnnnnnnnnnnnnnnnnnnnnnnnnnnnnnnnnnnnnnnnnnnnnnnnnnnnnnnnnnnnnnnnnnnnnnnnnnnnnnnnnnnnnnnnnnnnnnnnnnnnnnnnnnnnnnnnnnnnnnnnnnnnnggctgacagactccttcaactacaacaagccgcagaattttatttgatgcagattgttgaaattcataccttcgtgggcattgccagtttcgatagcaaaggagagatcagagctcagctacaccaaattaacagcaatgatgatcgaaagttgctggtttcatatctgcccaccactgtatcagctaaaacagaagtcagcatttgttcagggcttaagaaaggatttgaggtn

SEQ ID NO: 31869 - DNA, 683 bp, Macaca Mulatta
  misc_feature (1)...(683): n = A,T,C or G
gactgggagacaagacttgaaaatagtgtgtcagccccagagcctgacatttctgaagaagagctatctccagaggtaatagtggaaaaacacaaaagagatgattcttggagttccaacttgctagaaagttgggaatgtgaaggcagtttagagaggcagcaagcaaaccaacagacactgccaaaggnnnnnnnnnnnnnnnnnnnnnnnnnnnnnnnnnnnnnnnnnnnnnnnnnnnnnnnnnnnnnnnnnnnnnnnnnnnnnnnnnnnnnnnnnnnnnnnnnnnnnnnnnnnnnnnnnnnnnnnnnnnnnnnnnnnnnnnnnnnnnnnnnnnnnnnnnnnnnnnnnnnnnnnnnnnnnnnnnnnnnnnnnnnnnnnnnnnnnnnngaaaattcatactggagaaaaaccttacaaatgcaatgaatgtggaaaggccttcannnnnnnnnnnnnnnnnnnnnnnnnnnnnnnnnnnnnnnnnnnnnnnnnnnnnnnnnnnnnnnnnnnnnnnnnnnnnnnnnnnnnnnnnnnnnnnnnnnnnnnnnnnnnnnnnnnnnnnnnnnnnnnnnnnnnnnnnnnnnnnnnnnnnnnnnnnnnnnnnnnnnnnnnnnnnnnnnnnnnnnnnnnnnnnnnnnnnnnnnnnnnnnaaagaattcatactggagagaaaccctatc

SEQ ID NO: 31870 - DNA, 727 bp, Macaca Mulatta
tggctgtggtgacccaacgcgaagtctgccgaggaagacttctggggcccaactgctactatgacaaatccaagtcgttctttgacaacatctcttctgaactcaagaccagctccaggcggacgacgtgggctgaagagaggaagctcaacacggagacctttggggtgtcaggcaggtttcttcgtggacgcagttctcggggtggattccgaggaggcaggggcaatgggaccacccgtcgcaatcccacttcccacagggccgggactggcagggtgtgagggtgcagccaaaggctcctactcaagtggcgcagaaatgacgctgtgtgtcaggacgcgaggaaaacgctgcacttacagggagaagtggtcgctttgtttctggagtttggaagagtcccatactgctacttatgttttggacttaactgaacttggacatggtctgagttagaaccacttgtatcggggaagtattcatgggtaacctctttgaggtctctttacctatgtttcctttttagttgcgcatagcctaattctaaggttcaggtattttgcaaagaggtttctatagtgaaagctgaatccttactttgtgactttcacccactaaacatgacccacttggccttcaacagtggacccaaactttcattgtggaaatgtggcaccacacttcgcatctactgaatcagttaccctgtgtgtgtctggacccc

SEQ ID NO: 31871 - DNA, 514 bp, Macaca Mulatta
taatattcataatgtcgtgtgcttaaaagtgggctttgaagtgtgtgctgcttactcctttcatcttcccggctccccagtctttaaacattggacgctatttactcggctacccagtagagctttgaagctggcctttctgagaagttggtatgatgtaacactaaagtaggtggttcgtgtgtgttctcattacctggttataatagatatgcacatcaaagcctttaccagtatctcctgtattccgtatcagattgcaaagatggaatgttactattttatcagtaaggtattaaaatgcatttataaattcttcttggcttcattcctgaataaacgtgttagcaatttaaaacatggccttatttgaaataactcgaaagtgcttaatatgtaaatctaaagattctgactgcccacaagtattgcttgactggcaaatttgattctgtgagtttagcccccagcattttagtgatgtttggtaacagctgtagaagtgcttatgcta

SEQ ID NO: 31872 - DNA, 804 bp, Macaca Mulatta
gggtagaagcactggggtgggggcggaatcggggttactcaatgtaagggattccttgtggttgtgttgggatccagtgcagttgtgatttctgtggatcccagcttggttccaggaattttgtgtgattgggttacatccagttttcaatcttcgacagctgggctagaacgtgaactcagtagctgaacctacctgaccgagtcacgttcttggatcctcagaactctttactcttgtgggggtgggggtgggaactcatgtggggagcggtggctgagaaaatgtaaggattctggaatacgcattccatgggactttccttccctcttctgcttcctcttttcctgctccctaacctttcgccgaatggggcagcaccactgacgtttctgggcagccagcgtggctgccaggctcctgtactactgccttgtacttttcattttggctcacagtggattttctcataggaagtttggtcagagtgaattgaacattgtaagtcagccgctggggcccgaggatttctgggaccccgcggttgggagaagggagtagtcccgccttccaggtggcatgagaagcaatgactcgttacctgccgcccatcaccttggaggcctttccctggccttgcgcagaaaaatccggggatcggggcaagagaggccgagttacaaatggggaactattgtgcccaattcttttccaaaggaatttccttaatgaaaaaatttggtattttatttcccgaaccaataaatttgtttaacttggagaaaacaaaaataactcgtgaat

SEQ ID NO: 31873 - DNA, 721 bp, Macaca Mulatta
aactagtctgagtgcaaaactataactttgtttaaaatatctctataaatagttaacatttaccttttttaggttttcagatttgactttctgctggtcatcttttcaaagaaaatgaaacgtttaaaagttcatctgataatgctgctaccatagttttgttttcactgctcatctcttattaaggtttttaaccataaaactgaagcaatttctgtaaagacacaaattgataacttagtatagaattaaaattcattaagttatcataatcttgattatatccttgttaatgtactgatttttgaaatattttatttgccataatccatatatttctaacatgagtattttgacagtatttactgtaataaatcagaaagctgtttgaatggaagtaaactattgaagcttttaattttgctttttcatgaaattctacattggggcatcattcagaaaatgtttgtggatacagattttggagatctgtgagcctatgcctaatacagctttagagaattttaatggcgtcttaaggagccatagattcacggtatactaaatatttatgtctaagaagggggctcttccctgtccacaaaatgtgggtttatttgttggtctccctggttggtttgtttgtttctgatgtagggcacgtgaagcactcaggcagtgcctccctgaccagctgaaagacacaaccttcgcccaggtg

SEQ ID NO: 31874 - DNA, 633 bp, Macaca Mulatta
taacctccatttctgactcccactggtattccagttcacctagaagctggccagtatgaccaacagggagctcatgagcagcattgtgcatcagcaggtctttcctgcggtgacttctcttgggctgaatgaacaggagctgttatttctcacccagtcggcatctggacctcactcttctctctcttcgtggaacggtgttcctgatgtgggcatggtcagtgacatcctcttctggatcttgaaagaacacgggaggagtaaaagcagagcctcggatctcaccaggatccatttccacacactggtctaccacatcctggcaactgtggatggacactgggccaaccagctggcagccgtggctgcaggagctcgtgtggctgggacacaggcctgcgccacagaaaccatagacactagccgagtgtctctgagggcaccccaagagttcatgacttcccattcggaggcaggctccaggattgtattaaacccaaacaagccagtagtagaatggcacagggagggaatatccttccacttcacaccagtgttggtgtgtaaagaccccattcgaactgtaggccttggagatgccatttcagccgaaggactcttctattcagaagt

SEQ ID NO: 31875 - DNA, 707 bp, Macaca Mulatta
cctggtctcagcatccggctcttttctcgctccggcccgctgccctgctgcgccagcaccatgctcttctattcttttttcaagtcccgttgtgggcaaggatgtggtcgtggaactcaagaatgacctgagcatctgtggaaccctccattctgtggatcagtatctcaacatcaaactaactgacatcagtgtcacagaccctgagaaatatcctcacatgttatcagtgaagaactgcttcattcggggctcagtggtccgatatgtgcagctgccagcagacgaggtcgacacacagttgctgcaggatgcggcaaggaaagaagccctgcagcagaaacagtgatggctcctcctcctcttcccctccctcttttattggtgacctgtaaacccaagtcccagcacagaacccctaaccccgaatacttgaaggggttttgtttttttactaatgatggttttgtgggttttttttaagggatgagtggatgagaggaataatagggaacagctatcctctcttgagaaggggaggataagtaggctgggaaacttcaaagccttcccagtacccagcaactgcctttctcactacttccctggagatggtaggagagtttcctaggtctttccaggtcagcatgtgattcatttggggatggaaggaatctgtcccgcatcggaataaattatgatgcaaa

SEQ ID NO: 31876 - DNA, 303 bp, Macaca Mulatta
ggaaaccagggaaggggcggggatccagggagggcttcccatgagaaagcatgagaaactacatctgcggggctctgaggctcccctcccagcctggagggtctgtgcagagggactcgggtgggcctcacaccctgcagtgactcctctcttggctggaccccaccccagcccgggtcacaaaggggctcctctgggaagggtgggggtagatgagagtggggacttggatttgcctgccaggccgtcctgggtgctgcaggaagcaacaagacttaggtaactgcccagaggtaagtccca

SEQ ID NO: 31877 - DNA, 658 bp, Macaca Mulatta
  misc_feature (1)...(658): n = A,T,C or G
tggggaccagcatcatgaagtggttggtggtggtcttgctctgcctccagctcttggaggcagcagtggtcannnnnnnnnnnnnnnnnnnnnnnnnnnnnnnnnnnnnnnnnnnnnnnnnnnnnnnnnnnnnnnnnnnnnnnnnnnnnnnnnnnnnnnnnnnnnnnnnnnnnnnnnnnnnnnnnnnnnnnnnnnnnnnnnnnnnnnnnnnnnnnnnnnnnnnnnnnnnnnnnnnnnnnnnnnnnnnnnnnnnnnnnnnnnnnnnnnnnnnnnnnnnnnnnnnnnnnnnnnnnnnnnnnnnnnnnnnnnnnnnnnnnnnnnnnnnnnnnnnnnnnnnnnnnnnnnnnnnnnnnnnnnnnnnnnnnnnnnnnnnnnnnnnnnnnnnnnnnnnnnnnnnnnnnnnnnnnnnnnnnnnnnnnnnnnnnnnnnnnnnnnnnnnnnnnnnnnnnnnnnnnnnnnntccagagcatccaggtccccaaccaggagttcggcttgagtgagaatgagcctggtaccaatttcgtctatgctcagtttgatggcatcatgggcctggcctaccctactctgtccgtggacggggctaccacagctatgcagggcatggtgcaggagggcgccctcaccagccccatcttcagcgtctacctcagcn

SEQ ID NO: 31878 - DNA, 3423 bp, Macaca Mulatta
  misc_feature (1)...(3423): n = A,T,C or G
agcaaaacgactcagaggaacaaacagatagccatgggaagaaagaaattcaacatggatcccaaaaagnnnnnnnnnnnnnnnnnnnnnnnnnnnnnnnnnnnnnnnnnnnnnnnnnnnnnnnnnnnnnnnnnnnnnnnnnnnnnnnnnnnnnnnnnnnnnnnnnnnnnnnnnnnnnnnnnnnnnnnnnnnnnnnnnnnnnnnnnnnnnnnnnnnnnnnnnnnnnnnnnnnnnnnnnnnnnnnnnnnnnnnnnnnnnnnnnnnnnnnnnnnnnnnnnnnnnnnnnnnnnnnnnnnnnnnnnnnnnnnnnnnnnnnnnnnnnnnnnnnnnnnnnnnnnnnnnnnnnnnnnnnnnnnnnnnnnnnnnnnnnnnnnnnnnnnnnnnnnnnnnnnnnnnnnnnnnnnnnnnnnnnnnnnnnnnnnnnnnnnnnnnnnnnnnnnnnnnnnnnnnnnnnnnnnnnnnnnnnnnnnnnnnnnnnnnnnnnnnnnnnnnnnnnnnnnnnnnnnnnnnnnnnnnnnnnnnnnnnnnnnnnnnnnnnnnnnnnnnnnnnnnnnnnnnnnnnnnnnnnnnnnnnnnnnnnnnnnnnnnnnnnnnnnnnnnnnnnnnnnnnnnnnnnnnnnnnnnnnnnnnnnnnnnnnnnnnnnnnnnnnnnnnnnnnnnnnnnnnnnnnnnnnnnnnnnnnnnnnnnnnnnnnnnnnnnnnnnnnnnnnnnnnnnnnnnnnnnnnnnnnnnnnnnnnnnnnnnnnnnnnnnnnnnnnnnnnnnnnnnnnnnnnnnnnnnnnnnnnnnnnnnnnnnnnnnnnnnnnnnnnnnnnnnnnnnnnnnnnnnnnnnnnnnnnnnnnnnnnnnnnnnnnnnnnnnnnnnnnnnnnnnnnnnnnnnnnnnnnnnnnnnnnnnnnnnnnnnnnnnnnnnnnnnnnnnnnnnnnnnnnnnnnnnnnnnnnnnnnnnnnnnnnnnnnnnnnnnnnnnnnnnnnnnnnnnnnnnnnnnnnnnnnnnnnnnnnnnnnnnnnnnnnnnnnnnnnnnnnnnnnnnnnnnnnnnnnnnnnnnnnnnnnnnnnnnnnnnnnnnnnnnnnnnnnnnnnnnnnnnnnnnnnnnnnnnnnnnnnnnnnnnnnnnnnnnnnnnnnnnnnnnnnnnnnnnnnnnnnnnnnnnnnnnnnnnnnnnnnnnnnnnnnnnnnnnnnnnnnnnnnnnnnnnnnnnnnnnnnnnnnnnnnnnnnnnnnnnnnnnnnnnnnnnnnnnnnnnnnnnnnnnnnnnnnnnnnnnnnnnnnnnnnnnnnnnnnnnnnnnnnnnnnnnnnnnnnnnnnnnnnnnnnnnnnnnnnnnnnnnnnnnnnnnnnnnnnnnnnnnnnnnnnnnnnnnnnnnnnnnnnnnnnnnnnnnnnnnnnnnnnnnnnnnnnnnnnnnnnnnnnnnnnnnnnnnnnnnnnnnnnnnnnnnnnnnnnnnnnnnnnnnnnnnnnnnnnnnnnnnnnnnnnnnnnnnnnnnnnnnnnnnnnnnnnnnnnnnnnnnnnnnnnnnnnnnnnnnnnnnnnnnnnnnnnnnnnnnnnnnnnnnnnnnnnnnnnnnnnnnnnnnnnnnnnnnnnnnnnnnnnnnnnnnnnnnnnnnnnnnnnnnnnnnnnnnnnnnnnnnnnnnnnnnnnnnnnnnnnnnnnnnnnnnnnnnnnnnnnnnnnnnnnnnnnnnnnnnnnnnnnnnnnnnnnnnnnnnnnnnnnnnnnnnnnnnnnnnnnnnnnnnnnnnnnnnnnnnnnnnnnnnnnnnnnnnnnnnnnnnnnnnnnnnnnnnnnnnnnnnnnnnnnnnnnnnnnnnnnnnnnnnnnnnnnnnnnnnnnnnnnnnnnnnnnnnnnnnnnnnnnnnnnnnnnnnnnnnnnnnnnnnnnnnnnnnnnnnnnnnnnnnnnnnnnnnnnnnnnnnnnnnnnnnnnnnnnnnnnnnnnnnnnnnnnnnnnnnnnnnnnnnnnnnnnnnnnnnnnnnnnnnnnnnnnnnnnnnnnnnnnnnnnnnnnnnnnnnnnnnnnnnnnnnnnnnnnnnnnnnnnnnnnnnnnnnnnnnnnnnnnnnnnnnnnnnnnnnnnnnnnnnnnnnnnnnnnnnnnnnnnnnnnnnnnnnnnnnnnnnnnnnnnnnnnnnnnnnnnnnnnnnnnnnnnnnnnnnnnnnnnnnnnnnnnnnnnnnnnnnnnnnnnnnnnnnnnnnnnnnnnnnnnnnnnnnnnnnnnnnnnnnnnnnnnnnnnnnnnnnnnnnnnnnnnnnnnnnnnnnnnnnnnnnnnnnnnnnnnnnnnnnnnnnnnnnnnnnnnnnnnnnnnnnnnnnnnnnnnnnnnnnnnnnnnnnnnnnnnnnnnnnnnnnnnnnnnnnnnnnnnnnnnnnnnnnnnnnnnnnnnnnnnnnnnnnnnnnnnnnnnnnnnnnnnnnnnnnnnnnnnnnnnnnnnnnnnnnnnnnnnnnnnnnnnnnnnnnnnnnnnnnnnnnnnnnnnnnnnnnnnnnnnnnnnnnnnnnnnnnnnnnnnnnnnnnnnnnnnnnnnnnnnnnnnnnnnnnnnnnnnnnnnnnnnnnnnnnnnnnnnnnnnnnnnnnnnnnnnnnnnnnnnnnnnnnnnnnnnnnnnnnnnnnnnnnnnnnnnnnnnnnnnnnnnnnnnnnnnnnnnnnnnnnnnnnnnnnnnnnnnnnnnnnnnnnnnnnnnnnnnnnnnnnnnnnnnnnnnnnnnnnnnnnnnnnnnnnnnnnnnnnnnnnnnnnnnnnnnnnnnnnnnnnnnnnnnnnnnnnnnnnnnnnnnnnnnnnnnnnnnnnnnnnnnnnnnnnnnnnnnnnnnnnnnnnnnnnnnnnnnnnnnnnnnnnnnnnnnnnnnnnnnnnnnnnnnnnnnnnnnnnnnnnnnnnnnnnnnnnnnnnnnnntgatacctcaaattggaaactttagttctgagaaaggcaagtcagcgttcttgaaacctgctctggtagatatgcaattctggcctccagtcttccatgaaaataaacgctgcctggacaccccccccagaccacacactgacggccagccccggcggtgcccacccctcaggctggccccgcacccaggactggccacagccagctttgtcagcatgtcgtgctcagacgagccgtttccttctgaccaacccaggtgtgacctggggatgcggagctttctgttttgggtgttgggagccgcggcaggaaggagtctccagatcaagctcctctgctgctgtcgtctgggaatgatcttcaccgggtggtgggcacccggtagccgcgcagaggctgtggtgctgacttagactccaggtactttgtggtcagagtgctacaggaaatcacctatctccaggctgtgtaatgacaatattagcatagaggccgtgcagccatcatgcctgctgaaccttgaggcaagactgatccaaaaaactct

SEQ ID NO: 31879 - DNA, 373 bp, Macaca Mulatta
  misc_feature (1)...(373): n = A,T,C or G
tcagagtcttgctgtggagatacacttcaattcctacttcagtggaagagttgggaaagaaagagaannnnnnnnnnnnnnnnnnnnnnnnnnnnnnnnnnnnnnnnnnnnnnnnnnnnnnnnnnnnnnnnnnnnnnnnnnnnnnnnnnnnnnnnnnnnnnnnnnnnnnnnnnnnnnnnnnnnnnnnnnnnnnnnnnnnnnnnnnnnnnnnnnnnnnnnnnnnnnnnnnnnnnnnnnnnnnnnnnnnnnnnnntcagaggtccttgttgaatttacttagcagccaagaggaagattttaatagcaaagaagccctcctgctagtcactgttcttaccagtttgtccaagctactggagccctcctctcctca

SEQ ID NO: 31880 - DNA, 749 bp, Macaca Mulatta
gggacgacgcccgcgcagctgcggtcgccgccgtcgcacgagtctttccttagtaacctgggcgatagctgtggatgtttccaaggatcgtcttcagtcatggccttgggattaaagtgcttccgcatgttccaccctgcctttcgcaattatcttgcagcctctatcaaaccagtttcagaagttacactgaagacagtgcatgaaagacagcatggccataggcagtacgtggcctattcagctgtaccagtccgccatttcgctaccaagaaagccaaaggtagagacatgtgatgttctctcctacttcgcccctttcttaaatttggcccttgaattatagctggcaggtatctcagatgtactgaatttctccccttgctaacatgaggaaaggggcctcagctatttcatttgattaacttaaaaggttacagtggcagagatggggttacaacccagtgcctgttttcttattaccatgctgcctcatttgttttcctagtagctcaagatgtggctaatttctttctttgaaatttagaattaaaaggataagtgccaagcgaaccagaaatgctttggtaccagggatcaatatagtggtcccccctttaagaagagaaacgtggtggggaaacgttctattgaagaacgcctaggggggtggtggggatgaaacgaggaggcatttaagaagacccagcgggaatttacgaggggggagaggctcctgctcgtgccgg

SEQ ID NO: 31881 - DNA, 782 bp, Macaca Mulatta
ttctgatcgagagaagtagatgtttaatcaggacatcgaaaagttaatagaaggagaagaagttgtaagggagaacgagacccgtttatacaacaaaatcagagaggattttaaaaactggataggcatacttgcaactaatacccaaaaagttaaaaatattatccatgaagaagttgaaaaatatgaaaagcagtatcgaggcaaggaacttctgggatttgtcaactacaagacatttgagaccatcgtgcatcagtacatccagcacctggtggagcccgcccttagcatgctccagaaagccgtggaaattatccggcaagctttcgttaacatggccaaaaaacattttggtgaattcttcaaccttaaccatactgttcagagcaagattgaagacataaaagtgagacacacagaaaaggcagaaaacatgatccaacttcagttcagaatggagcagattgttttttgtcaagatcagatttacagtgttgttgtgaagaaagtccgagaagagatttttaaccctctggggaagccttcacagaatatgaagttgaactctcatgttcccattaatgagtcttcagtttcctcctttaatgaaataggcgtccacctgaacgcctacttctccgaaaacagcacacgtctcggcaaacagatcccattataattcagcatgtatgctccagagaatgggaatcttgagaaagcctgatgcgatctacagacaaaacgcataccggcgctcacacaaatggacgcacagagaa

SEQ ID NO: 31882 - DNA, 1416 bp, Macaca Mulatta
  misc_feature (1)...(1416): n = A,T,C or G
actactactgtcctgagctgatgcacaaggcctacatgttcatactgcacaacttcgaggagatggtgaaagtctctgcagaatttttagagctctcggtcactgaacttaaggatatcatcgagaaagatgagctcaatgtcaaacaggaagatgctgtatttgaggccattttnaagtggatttctcatgaccccccaaatagaaagcagcacatttcaattttgcttcnnnnnnnnnnnnnnnnnnnnnnnnnnnnnnnnnnnnnnnnnnnnnnnnnnnnnnnnnnnnnnnnnnnnnnnnnnnnnnnnnnnnnnnnnnnnnnnnnnnnnnnnnnnnnnnnnnnnnnnnnnnnnnnnnnnnnnnnnnnnnnnnnnnnnnnnnnnnnnnnnnnnnnnnnnnnnnnnnnnnnnnnnnnnnnnnnnnnnnnnnnnnnnnnnnnnnnnnnnnnnnnnnnnnnnnnnnnnnnnnnnnnnnnnnnnnnnnnnnnnnnnnnnnnnnnnnnnnnnnnnnnnnnnnnnnnnnnnnnnnnnnnnnnnnnnnnnnnnnnnnnnnnnnnnnnnnnnnnnnnnnnnnnnnnnnnnnnnnnnnnnnnnnnnnnnnnnnnnnnnnnnnnnnnnnnnnnnnnnnnnnnnnnnnnnnnnnnnnnnnnnnnnnnnnnnnnnnnnnnnnnnnnnnnnnnnnnnnnnnnnnnnnnnnnnnnnnnnnnnnnnnnnnnnnnnnnnnnnnnnnnnnnnnnnnnnnnnnnnnnnnnnnnnnnnnnnnnnnnnnnnnnnnnnnnnnnnnnnnnnnnnnnnnnnnnnnnnnnnnnnnnnnnnnnnnnnnnnnnnnnnnnnnnnnnnnnnnnnnnnnnnnnnnnnnnnnnnnnnnnnnnnnnnnnnnnnnnnnnnnnnnnnnnnnnnnnnnnnnnnnnnnnnnnnnnnnnnnnnnnnnnnnnnnnnnnnnnnnnnnnnnnnnnnnnnnnnnnnnnnnnnnnnnnnnnnnnnnnnnnnnnnnnnnnnnnggtaggtggctttgacggagctaatcgacttaggagtgcagaagcctacagccctgtggctaacacttggcgcacaatccccactatgtttaaccctcgtagcaattttggcatcgaggtggtggacgacctcttgttcgtggtgggtggctttaatggttttaccaccacctttaatgttgagtgctatgacgaaaagaccgatgagtggtatgatgctcacgacatgagcatataccgcagtgctctgagctgctgtgtagtaccagggctggccaatgttggggaatatgcagctagacgggacaacttcccaggattagcactgcgagatgaagtaaaatattctgcttcaacaagtaccctacctgtatgagcctcttcatttagctaataaaaagtctaagcaataa

SEQ ID NO: 31883 - DNA, 1385 bp, Macaca Mulatta
  misc_feature (1)...(1385): n = A,T,C or G
aggtttcacaagctgatctgggggagctttggcagtgggcttctggaaagctccggggttattgcaggcggcggggacaatggcatgcttattctatacaatgtgacccacatcctgtcttcggggaaggagacggtgattgcccagaaacagaagcacacgggggctgtcagagcgctcgactttaatcctttccagnnnnnnnnnnnnnnnnnnnnnnnnnnnnnnnnnnnnnnnnnnnnnnnnnnnnnnnnnnnnnnnnnnnnnnnnnnnnnnnnnnnnnnnnnnnnnagcagcccccagaggacgtcaaggcactgtcttggaaccggcaagcccaacacattctgtcttctgctcaacccagtggcaaggcagttgtgtgggatctcaggaagaatgaacctatcatgaaannnnnnnnnnnnnnnnnnnnnnnnnnnnnnnnnnnnnnnnnnnnnnnnnnnnnnnnnnnnnnnnnnnnnnnnnnnnnnnnnnnnnnnnnnnnnnnnnnnnnnnnnnnnnnnnnnnnnnnnnnnnnnnnnnnnnnnnnnnnnnnnnnnnnnnnnnnnnnnnnnnnnnnnnnnnnnnnnnnnnnnnnnnnnnnnnnnnnnnnnnnnnnnnnnnnnnnnnnnnnnnnnnnnnnnnnnnnnnnnnnnnnnnnnnnnnnnnnnnnnnnnnnnnnnnnnnnnnnnnnnnnnnnnnnnnnnnnnnnnnnnnnnnnnnnnnnnnnnnnnnnnnnnnnnnnnnnnnnnnnnnnnnnnnnnnnnnnnnnnnnnnnnnnnnnnnnnnnnnnnnnnnnnnnnnnnnnnnnnnnnnnnnnnnnnnnnnnnnnnnnngatctcgtcttccttcagcaaaggccagcctctcccaccactgcaggtgccagagcaagtggcacaagcatcactgatacctcccctgaaaaaaccccccaaatggattagaagaccaacaggtgtttcatttgctnnnnnnnnnnnnnnnnnnnnnnnnnnnnnnnnnnnnnnnnnnnnnnnnnnnnnnnnnnnnnnnnnnnnnnnnnnnnnnnnnnnnnnnnnnnnnnnnnnnnnnnnnnnnnnnnnnnnnnnnnnnnnnnnnnnnnnnnnnnnnnnnnnnnnnnnnnnnnnnnnnnnnnnnnnnnnnnnnnnnnnnnnnnnnnnnnnnnnnnnnnnnnnnnnnnnnnnnnnnnnnnnnnnnnggtgaccttagagcaagactccagaatgaaattcctaaagcttttaggatacagtaaagatgagcttcagaagaaggtnaggtggccacatggttgaagagtgacgtggggctaggtgagggtcctcagcccaaaggaaatgacctcaacagtgacagacagcaggccttctgcagtcagg

SEQ ID NO: 31884 - DNA, 751 bp, Macaca Mulatta
  misc_feature (1)...(751): n = A,T,C or G
gcgggcaagatggaggcgactacggccggtgtgggccggctagaggaagaggcgttgcggcgaaaggaacggctgaaggccctacgggagaaaaccggccgcaaggnaggacaaggaagatggggagccaaggaccaagcatctcagagaagaggaggaagaaggcgagaagcacaggnnnnnnnnnnnnnnnnnnnnnnnnnnnnnnnnnnnnnnnnnnnnnnnnnnnnnnnnnnnnnnnnnnnnnnnnnnnnnnngggacctcaagagagaaggggccaagaagctggagaactaaaaaagcggactcagagggccattgccgagctgatccgtngtgaaaggctgaaaggccaggacgacagcctagcctctgcagtggatgctgccaccgaacaaaaggcctgtgactctgactgaggcgtgccctgccccaccactcgcccatcaggcctgtcctgcaggggatggtcttgggcagggatgggggctcggcttgccgtcacctccagtttggcttctgagcagagactccctgcccgtcacgtctgaaacccctatcggtgaggtcagctccgtgtctcctgggtggcccctgccattctgaatggaggcagaaccagcaacaactctgggcatgcctgtgtctgcccatgtgaatgtaaatatgtctgtatatatgtatatattttgaactttnnnnnnnnnnntctggaaatagagacaagtaaatccctgtctgtggcagaaa

SEQ ID NO: 31885 - DNA, 140 bp, Macaca Mulatta
aggactttgagtacccagactatgatgactacagagcagaggctttccttcaccagcagaagaggatggagtgctacagcaaggccaaagaagcatatcggatagggaagaaaaatgtcgccaccttttatgcccagcag

SEQ ID NO: 31886 - DNA, 874 bp, Macaca Mulatta
aggctaaggctatccttgcagaatggggctgtgctgttaggagcacaggcagaccgtagctgagcagacttgggttatgggtgggaaatggggcccagggaccctcaggacacagggaccggctcaaggtaccactcagcccggccaggatccccagccttgcttttgttcttggtctctttgtgatagagaagcttagaacattgaattttgagccccaaaatgtgtgagtctttggaaaaaccattccagcctttctgtcaaatgctcttattttcaatattatgaagtatgtatttgaaatattcacatttctgttatttcttgtttttaagctctgaattattccagttttctgtcctgcatgctttcaacagtgtgcttttacagaggcagtttagcacagtgaatgtccctgccccacactccatatggtcctgttgtcctgaaaatacactccaggtagcacagacttgttattttgcctggctggttacacacatgctgtcttgctttgctgctcagccgcctccctctgaggccaacttaggccaacctacctgggactccatctgaagtcagacgccagagaaactgagtggtgaccacgggtctgcttttctctctgatcctaggggacttgttgacctgggagtttctgttcccacctggaacgcagtgtgtttctctctccactcggaatcgatttatgtatgaccagcctgggttcccggtttacaagtggcttgaggaattcccaccgtttacaaaagtgctcttcaatatacggattagatgtttccctactaacatcacatacgtccgggattaacgaatctggagatctgaccaccaatattgtgcaccatgaaac

SEQ ID NO: 31887 - DNA, 409 bp, Macaca Mulatta
  misc_feature (1)...(409): n = A,T,C or G
ttggaagaggctgaaaagtttgccaaaactgtcgttgatgtgggagagaaaacgtcagagttcaaggccaaaggctacttagctctggggctcacgtacagtctgcaggccactgacgnnnnnnnnnnnnnnnnnnnnnnnnnnnnnnnnnnnnnnnnnnnnnnnnnnnnnnnnnnnnnnnnnnnnnnnnnnnnnnnnnnnnnnnnnnnnnnnnnnnnnnnnnnnnnnnnnnnnnnnnnnnnnnnnagatcccagaggctctggggtatgtccgccaagctcttcagcttcaaggtgacgatgccaactccctgcacctccttgccctcctgctgtcagcacagaagcattaccatgacgctctgaacatcattgacatggccctgagcgaatacccagaaaatttcat

SEQ ID NO: 31888 - DNA, 667 bp, Macaca Mulatta
  misc_feature (1)...(667): n = A,T,C or G
tgtggatgggcctcatccagtcagttgaaggtgttaagagaaaacaccaagttttctgggaaaaggaattctaccacaagactagcataaaaatgctgtgtgagtttccacctgctggcctgccttcactgtcctgggggaggcagggggagaccaggtggactggagtagattgttgagagatgctggtgtggtgaacatgtccaggaaactacgagcctccagcccattgtccaacaaccacccaccaacaccaaagaggcgaggaaggggaaagcatcctctcaaccctggccgaagagccctatcaaagtngttcccaagacaacgcggaagggaaaagggacccgccaaggaagttccaggaacaaaagtctctccctgaaagaccaccatttcaaaaaaccctgaggaatggagtgggccaacactatccagccactctgaccagccaaatgaggaactcaatcaaaatgagccacagcaggaccacaaggacatggagacttccaccgtctccagcaactccttgggcaaccagtaattcctgggcaaggccagagacctcaagtctatctgtaaagtctccagaggtctaaccccaaataagtagccaacagggtgtagagtacattttacaccccacagggtatgccccatggtgatg

SEQ ID NO: 31889 - DNA, 734 bp, Macaca Mulatta
ccaaaatatctcagtactatctgccttaagcattgcgtgttctcattcgggtggtcacaatgtatttttaatatttttttcctagtgattttgacagtttaaatgtttaacaacttaaaacattaaaaatgcttattaataactttggtcatttaaaaaatgctacaatgacttcctattaaaggttcaatatttacacattcttattggtcaatattaccacatgaaatattgccaaaccaagatacctaaactcatgatgtttgtggtgctgtaaaatttatacaacaatgtggatgattttgaaattataaccatttttgatgccctgaatcttgaggtgacttattttgcatggaggatattattagaccaacagtaagggttgtgggttatatcagcatagagaaaagaagaaaactagaattcaaacaactgtgtcttagacatttgtttgaaaaagcttcatcaggccttggagcagtcagtgctttattcagcaaaaattatttggtaggaaatttttgggagatctgattttcttatcaaagttttgtaaatagttcttatttctatatttggattggtgaaagacctcaagtttatatgtaaagacataactgcccttagtcatgaaattgttgtgacctctactttttgtcactaatagcctatattcaagtgcctgtgttttttcatcttgtttaggaatgttttgagattaatgtgcttaa

SEQ ID NO: 31890 - DNA, 116 bp, Macaca Mulatta
atgaagaactggaagacaaccccaattttagtgacctgattgagcaggctgccgagatgctttatggattgatccacgcccgctacatccttaccaaccgtggcattgcccagatg

SEQ ID NO: 31891 - DNA, 332 bp, Macaca Mulatta
aactagttgagatagtagttttgaacagtcgtaaccgtggctggtgtttgtagttgatgtaaagcattaagaccgcaaactgtccttcatgggtagagtcaggaagcccggtggcgtggcacaacacacgttggtcatttctcaaaaaacacagccctcaccacagcttattgatttcaaattgtctggtactattgaaacaaatatttagaataaaaaaatttctcagtcggaagtgtatctgtgttaatcacgcacacttgcaagcagatcactatgcctttatctcgcacaatccctatggaaggccccaaaacagactgacactttga

SEQ ID NO: 31892 - DNA, 685 bp, Macaca Mulatta
ttttccatgatactgaaaatgggggtgagcatgggagtggatttccaaaaacactggcagggctggtgctgggtgctctgtcctcacgtgtatgtgtgcctctgctgcagcacgcgatgcccttctggaggatctccagccactcagacctcatggccctgcaccacgccttggaactggagtacctgtaacagcgctcggcactttgacaccacacagctgctctgtgaccagggacagttccagcaggccccagtctcacatcagcgccggcctccagaacttagcaatttccacctgctgatgcgcagctgctgtcagtcttgacctctgcccttgtggtgaatggaggaccacgtctatttcttcagaacagctgttgactctagtactgtgaatccaatgaaaataagccatgagaatgttctagcacagcgtaatgtgtctgccacattaactacacggttcaaacctgtgaagaaaggacctgcaaacgcttcagttgttagcattttcaatgtgatataaacagcttctccaatacagcaaacccagttgcacaacagagactgaaatgtgtttcctgaatactagtggaggaattttcttgtaaagaaagtttactttttggtgtctcatacccagggtaatctgtacatctctacttatttatgaacagactttt

SEQ ID NO: 31893 - DNA, 120 bp, Macaca Mulatta
gagttcctgtggggtccacgagcccatgctgaaaccaccaagatgaaagtcctgcgtgttttggccaagagcaataacaccagccctggtttatacccccatctgtatgaagacgctttg

SEQ ID NO: 31894 - DNA, 766 bp, Macaca Mulatta
  misc_feature (1)...(766): n = A,T,C or G
tgtcccgcagacatgtctttccgcaaagtggtccggcagagcaaattcctggcatgtgttcgggcagccggtcaagaacgaccagtgctatgaggacattcgcgtgtcnnnnnnnnnnnnnnnngcaccttctgcgctgtcaaccccaagttcctggcagtgattgtgtagttccgtaacgggggtcctttctggtgctccccctannnnnnnnnnnnnnnnnnnnnnnnnnnnnnnnnnnnnnnnnnnnnnnnnnnnnnnnnnnnnnnnnnnnnnnnnnnnnnnnnnnnnnnnnnnnnnnnnnnnnnnnnnnnnnnnnnnnnnnnnnnnnnnnggtgtggcagatcccagagaatgggctgacctccccactgacagagccggtggtggtactggaggggcacaccaagcgagtgggcatcatcgcctggcaccccacggcccgaaacgtgctgcttagtgcagnnnnnnnnnnnnnnnnnnnnnnnnnnnnnnnnnnnnnnnnnnnnnnnnnnnnnnnnnnnnnnnnnnnnnnnnnnnnnnnnnnnnnnnnnnnnnnnnnnnnnnnnnnnnnnnnnnnnnnnnnnnnnnnnnnnnnnnnnnnnnnnnnnnnnnnnnnnnnnnnnnnnnnnnnnnnnnnnnnnnnagcgggagaaggctcatgagggggcccggcccatgcgagccatcttcctggcagatggcaaggtgttcaccacgggcttcagccgaatgagtgagcggcagctggcactctgggacccag

SEQ ID NO: 31895 - DNA, 426 bp, Macaca Mulatta
  misc_feature (1)...(426): n = A,T,C or G
atgagtaagaagcagtgcgttaactatctatttaatacaatgcgctcttcatgcgagtggcctgctctctgctacctggactttcattcttatgtattaggagggcggctgctgtccttcagacttgctgcagagtcattttgtgtcatatatcgtctgtgtctccccagtcccctcagaaccatgccccttggatggtgactgctgggctctgtcacctcgtcaaactggatgtgacccgtgccgcctcgttggattgccggaatgtagacggaaatgtactgttcnnnnnnnnnnnnnnnnnnnnnnnnnnnnnnnnnnnnnnnnnnnnnnnnnnnnnnnnnnnnnnnnnnnnnnnnnaaacaatgtaattgctacttgataaggaccgaacattattctagtttcatgtttaatttgaattaa

SEQ ID NO: 31896 - DNA, 935 bp, Macaca Mulatta
ccgtcggcactgatgccacacttggagaactttccctacagccagcagccgctcagcaccggggccttccgtgcggggatcactgaccacagccacttcatgctcctgctcaatccctccccaacggatgccaccagctccgcagacacacaggctggcaactgcaagccccttcagaaggacaagctccccgagaacctgctgtcggatctcagcctgcagagcctcacggcgctgacctcacaggtggagaacatctccaacaccgtccagcagctgctactctccaaggctgctgtgccgcaaaagaaaagtgtcaagaatctcgtgtccaggaccccggagcagcacaaaagccagcactgcagccccgaaggcagtggctactcggccgagcccgcaggcacaccgctgtcagagccgctgagcagcacgccacagtccacgcatgcagagccccaggaggccgactacctgagcggctccgaggacccactggagcgcagctttctttactgcaaccaggcccgtggcagccctgccagggtcaacagcaactcgaaggccaagcccgaatctgtgtccacctgttccgtgacctctcctgatgacatgtccaccaaatctgacgactccttccagagcctgcacagcagtctcccactcgacagcttctcgaagttcgtggcgggtgagcgggactgtccgcggctgctgctcagcgccctggcacaggaggacctggcctccgagatcctggggctgcaggaagccatcggtgagaaggcggacaaagcttgggttgaagcacccagcctggccaaggacagcagcaagccacccttctcactggagaaccacagcgcctgcctggactctgtggccaatgggtgcgtggccccggcctggggagccagaagccctgcctgactcct

SEQ ID NO: 31897 - DNA, 101 bp, Macaca Mulatta
tcactcatcattggttaaagctgagctcacagcagaataagccaccatgaggctgttggtgtgtctcgtgctgctcacgctggccctttgctgctaccggg

SEQ ID NO: 31898 - DNA, 437 bp, Macaca Mulatta
  misc_feature (1)...(437): n = A,T,C or G
ctgggggacagcgagcgctgggaagtgtgcgggatttcactccggggctcgggtcgcgctaccccgtgctccaggcggccctgcgcctcttctccccaagacccttcggggannnnnnnnnnngacccgccggagacaacttgtgtggaagcccggagtcctcggaataacccttggtnggtctcctgatagccgtcagcgcctccgtggataaaatcatctcgcatttcggggccgcccggaacttggtgcagaaggnnaggcccagttgggtgatagccggctgagcccggatgtggggcacctggtgctgaccaccctctgcccggccctccatgccctggtggcggatgggctgaagcctttccggaaggacctcatcaccgggcagcgcaggagcagcccctggagcgtggtggaggcgtcggtgaagccag

SEQ ID NO: 31899 - DNA, 347 bp, Macaca Mulatta
  misc_feature (1)...(347): n = A,T,C or G
gatctggaggtcaacactataattaaaaatagctttcaccatcccatgccttcttaagtcttggtgaccttagattttcatctctacctctgcgaccttcagaattttcaggaaaattgagagaggaaaatgagaaaacgtgacaagcagagcctgttcccttgctctgagattcccgtcgcttgattgattggagccctggacacaagctgttttggttttgcttctttaatgcttgaataacagtaattttaaaaaacagttanttcagataaagtttgaattctctgttactacagcgctgtaagtatcctataagtaagaatgtaggggcaggtaaaagcaat

SEQ ID NO: 31900 - DNA, 844 bp, Macaca Mulatta
  misc_feature (1)...(844): n = A,T,C or G
cagagctgacatagcgctgatcggattggccgtcatgggccagaacttaattctgaacatgaatgaccatggctttgtggnnnnnnnnnnnnnnnnnnnnnnnnnnnnnnnnnnnnnnnnnnnnnnnnnnnnnnnnnnnnnnnnnnnnnnnnnnnnnnnnnnnnnnnnnnnnnnnnnnnnnnnnnnnnnnnnnnnnnnnnnnnnnnnnnnnnnnnnnnnnnnnnnnnnnnnnnnnnnnnnnnnnnnnnnnnnnnnnnnnnnnnnnnnnnnnnnnnnnnnnnnnnnnnnnnnnnnnnnnnnnnnnnnnnnnnnnnnnnnnnnnnnnnnnnnnnnnnnnnnnnnnnnnnnnnnnnnnnnnnnnnnnnnnnnnnnnnnnnnnnnnnnnnnnnnnnnnnnnnnnnnnnnnnnnnnnnnnnnnnnnnnnnnnnnnnnnnnnnnnnnnnnnnnnnnnnnnnnnnnnnnnnnnnnnnnnnnnnnnnnnnnnnnnnnnnnnnnnnnnnnnnnnnnnnnnnnnnnnnnnnnnnnnnnnnnnnnnnnnnnnnnnnnnnnnnnnnnnnnnnnnnnnnnnnnnnnnnnnnnnnnnnnnnnnnnnnnnnnnnnnnnnnnnnnnnnnnnnnnnnnnnnnnnnnnnnnnnnnnnnnnnnnnnnnnnnggcctttgaggattggaataagacagagctagactcattcctgattgaaatcacagccaatatactcaagttccaagacaccgatggcaaacacctgctgccaaagatcagggacagcgcggggcagaagggcacggggaagtggaccgccatctccgccctgnagtacggcgtacccgtcaccctcattgg

SEQ ID NO: 31901 - DNA, 160 bp, Macaca Mulatta
gggacttatgtacagcatttgggaaggatgtactgaaattagtagaagctaggccaatgatccatgaattgttaactgaagggcggagatcgaagactaacaaagcaaaaacccttgctacatgggcaacaaaagaactgaggaaactgaagaaccaagc

SEQ ID NO: 31902 - DNA, 497 bp, Macaca Mulatta
cgtggtgtacaaaatgcttcgagaactcagaacctgttcgagaaacttcagagtatcccagggacagcaaacaagtgtgaccctagtacaccagcacctgctggctcagctgccctgaaccgcagcagagctcccacttctgtcacccctgcagctccaggaaagggtctgactcagccaccacaggcctatttcaatggctcccttccacctcacacagtaggacgtcaggctcatggaagagaacagtccacactcccaagacaaacactccccatctctggtaatcagactggcagttctggagtgatctcccctcaagagctactgaagaagcttcagattgtgcagcaggagcagcagctgcatgcctctaaccggccggccttggccgctaagtttcctgtgctcactcagagctctggaacagggaaacccttggaatcctggatcaacaagacatccagcacagaacagcagactcctcttttccaggt

SEQ ID NO: 31903 - DNA, 381 bp, Macaca Mulatta
atcttcaactcttactgaacataagataattcatactggagagaagccctataaatgtgaagaatgtggcaaagcctttagccaatcctcaaccctaactagacataagaggatgcacactggggagaaaccctacaaatgtgaagaatgtggcaaagcttttaatcgatcctcaaagcttactacacataagataattcatactggagagaaaccttacaagtgtgaagaatgtggcaaagcatttatatcatcctcaacccttactggacataagagaattcatactagagagaaaccctacaaatgtgaagaatgtggcaaagcatttagccaatcctcaaccctaactagacataagaggatgcacactggagagaa

SEQ ID NO: 31904 - DNA, 1838 bp, Macaca Mulatta
  misc_feature (1)...(1838): n = A,T,C or G
agttccatggaccaaagacagaggagaatcctgggccagcccctttccatccctacttcccagcccaagcagaaaaggacatcactgatatctttcttttccaaggtcnnnnnnnnnnnnnnnnnnnnnnnnnnnnnnnnnnnnnnnnnnnnnnnnnnnnnnnnnnnnnnnnnnnnnnnnnnnnnnnnnnnnnnnnnnnnnnnnnnnnnnnnnnnnnnnnnnnnnnnnnnnnnnnnnnnnnnnnnnnnnnnnnnnnnnnnnnnnnnnnnnnnnnnnnnnnnnnnnnnnnnnnnnnnnnnnnnnnnnnnnnnnnnnnnnnnnnnnnnnnnnnnnnnnnnnnnnnnnnnnnnnnnnnnnnnnnnnnnnnnnnnnnnnnnnnnnnnnnnnnnnnnnnnnnnnnnnnnnnnnnnnnnnnnnnnnnnnnnnnnnnnnnnnnnnnnnnnnnnnnnnnnnnnnnnnnnnnnnnnnnnnnnnnnnnnnnnnnnnnnnnnnnnnnnnnnnnnnnnnnnnnnnnnnnnnnnnnnnnnnnnnnnnnnnnnnnnnnnnnnnnnnnnnnnnnnnnnnnnnnnnnnnnnnnnnnnnnnnnnnnnnnnnnnnnnnnnnnnnnnnnnnnnnnnnnnnnnnnnnnnnnnnnnnnnnnnnnnnnnnnnnnnnnnnnnnnnnnnnnnnnnnnnnnnnnnnnnnnnnnnnnnnnnnnnnnnnnnnnnnnnnnnnnnnnnnnnnnnnnnnnnnnnnnnnnnnnnnnnnnnnnnnnnnnnnnnnnnnnnnnnnnnnnnnnnnnnnnnnnnnnnnnnnnnnnnnnnnnnnnnnnnnnnnnnnnnnnnnnnnnnnnnnnnnnnnnnnnnnnnnnnnnnnnnnnnnnnnnnnnnnnnnnnnnnnnnnnnnnnnnnnnnnnnnnnnnnnnnnnnnnnnnnnnnnnnnnnnnnnnnnnnnnnnnnnnnnnnnnnnnnnnnnnnnnnnnnnnnnnnnnnnnnnnnnnnnnnnnnnnnnnnnnnnnnnnnttctttaaaacattccaagtgtatgtagattcagtgcttatttctcagctttttcttccttaggttcatctctgtcacctagcttttatttttaatactcaatttctgaggcttaggacaatacttgttaccttaagnnnnnnnnnnnnnnnnnnnnnnnnnnnnnnnnnnnnnnnnnnnnnnnnnnnnnnnnnnnnnttgctattgataccttttcttgccaagatttatttaaagttggccaagataccaagaaggtggcttgcaggggtatctttagcgtctcataagtgtaaacagtcattgctttcaagatcatccgaaacaagaattaatagagagaaaaaaatatataaagcatgtgttgaaaatcctcacgctcatgataacttaagggataacaatagtaggtaacacttactgagtgcttacaatttagtggacgcggtcaaagtgctttttgtaagttctatttaatacttgcgacaaccctatgagatagtaagtactactattgttctcattttatagatagaaagctaagacacagggaaattaggtaacttgccccagataactcagtgaacaatggagctggaattcaaatgcgtatggtctgatttcttgagcccatactcaataaccatgccatcctgcctgtccgtggaataactgatggatggttagaaatattaaaaacaaaacaaacgcaaacgtctctgcttctgcttctctactaagcccagttaacttttgcttttataggtactaagtatacattttcgttaatttatgtgagctgagtgtatgtttttattaattactttttggctatta

SEQ ID NO: 31905 - DNA, 203 bp, Macaca Mulatta
  misc_feature (1)...(203): n = A,T,C or G
aaagccgcaaaagtttatttcaatatttttaagtcaaatatcttagatagaaacagtttgtgttgtttcggcttgtcttcatttaaacctgtggttgcttgtcacctccttctggcattttaaattccctctgaatttggcagcatcttgcccctggtcatccaggaccatctcncgcattcatccccagtctttgactgaga

SEQ ID NO: 31906 - DNA, 600 bp, Macaca Mulatta
acttttttggaaaaaatatccatagtcttagatattataaaggtatttttcattacaaattttaaaacatataaataatgacctatttattttaaatgcctttttctagattgcagagatattgtgtaacattggtgtcaagctttctgatgaagaatttgaaaatgtatggaatcttgcatcaaaaaagcatcacagaggagaagtttgtgttgagaacatcagaaatgttctagatgagctgcggcatgcagacaggatcaagtgtaaaacacccatgtgatatttttggacttcattcaagcaaaagaattattaactgtgtttatctaaaatgttcagtccattctggctttagatattacgttagagttcagcaatcacagtggtaagactcatatgcctgtatgtgttgctaataaattagattttggattttaaaatttattgttttccataaagcacctaagagcttgacaagtgattgaagggttaacatgcagccccagcgaagacatagttcagaatgatattagaagttttgtaggcctaagaattccatccattttagtgggccgtccgaattcgtagtgtgatttg

SEQ ID NO: 31907 - DNA, 601 bp, Macaca Mulatta
ccagacagcccagctccgcctccccgcggccgggcggcgaggcctccacagccgcgccatcatggccgcgcctgcacctggagcagccctgcccggaaccctccgagccacccacagcagccaagggctgaggagcggcccggagacaccttgaggccgtctggtggcagcggcgtttaagagaccagcgctcttccaggctgctcagccctcagccctgacgctggagccggcccctccgctgaggtaaggccgccctccgcgccgcgcgcgcctgccccgtctgtggtaaactcctctcccctctgtccctgctgcctcccctgcccgcttgaccacactggttctggctttttctgaccgttctttatcctgttttccgccggtacccacaaaattgtattccatcttctggtagacgccccacccccagaagttttaacctgtaaggtgactgtcacaggactttccaattgtttacaagtcagcgtagtcaggatccaacccggcaatcttgtttaaattaattatcacatctaaattagagattttgtcacccagtgttgggactgaaattcagacacggtaacttgtctgagat

SEQ ID NO: 31908 - DNA, 795 bp, Macaca Mulatta
  misc_feature (1)...(795): n = A,T,C or G
gggnnnnnnnnnnnnngnnnnnnnnnnnnnatttcgccatgttggccaggctgttcttgnnnnnnnnnnnnnnnnnnnnnacccgccttggccttccaaagtgctaggattacaggcgtgagtcactgctcctggcctaggtgttcttataaataactgtaacagcaatgacaatgcagtttattagtcatcagtttcctgattatcatgaccccactatagaagatgcttataagacccaggtcaggattgacaatgagccagcttacttggacatcttggacactgctggccaggcagaattcacagccatgcgggagcagtacatgcgaggtggggaaggcttcattatctgctactccgtcactgaccgtcaatcatttcaggaggctggccagtttaaagagctcatttttcaggtccgcccatacctatgaaattcccctggtgttggtgggtaacaaaattgaacctggaacagttcccgcccgctttgaaaaatgataaagctaagaggctcaactggaagtcatcaggaacctgctttactctatttctggatcacacttcctctgggatgactgaattttttttgtgttttgactggcaccccattatatgaaggccaagtatggaaattttccacttgggggcaccacggttggaacatccaaaatgttcaaaagtttgggacccttttgaattttagaattttcggaatttaggaaagcctcaacctggaacggaactttatcctccactttgacagggacggaagacccccaaattgttggc

SEQ ID NO: 31909 - DNA, 120 bp, Macaca Mulatta
agagaggagaagcagcttgaggcatcattagatgcactgctgagtcaagtggctgatctgaagaactcactgggaagtttcatttgcaagttggagaacgagtatggccggctgacctgg

SEQ ID NO: 31910 - DNA, 375 bp, Macaca Mulatta
gcagactacaagtggcagaagcatagaaataaaagacgaactaaagaaaaagaagaatctcaaccgatctggtaagcgtggccggccttcgggaaccaccaaatcagcaggataccggaccagcacaggcagacccctgggaaccaccaaagcagctggatttaagacaagtccaggcagacctttggggacaactaaagctgcgggatacaaagtcagcccagggagacctccaggtagcattaaagctctatcccgtcttgccgatcttggttatggctgtggcactgctgcttttccttaccctatgatgcatggcagagcagttcacggggtagaggaaactagcagtgaagtcaaaccacccaatgagtg

SEQ ID NO: 31911 - DNA, 334 bp, Macaca Mulatta
  misc_feature (1)...(334): n = A,T,C or G
aggccaagttttcgtcgcacaaactggtttgagcctgtgggctcagagtataaacaggttatgcaaagagtaggggtaactgacctatcaccgtttggcaagtttaatatcaaaggccaagattccattagactactggaccatctctttgcaaatgtcattccaaaggtnnnnnnnnnnnnnnnnnnnnnnnnnnnnnnnnnnnnnnnnnnnnnnnnnnnnnnnnnnnnnnnnnnnnnnnnnnnnnnnnnnnnnnnnnnnnnnnnnnnnnnnnnnnnnnnnnnnnnnnnnnnnnnnnnnnnnnntgaagaagaagcagtcaaaggcggatatg

SEQ ID NO: 31912 - DNA, 390 bp, Macaca Mulatta
taaacaaaatcgttcttgttggattttattcagcagtatctatcatgtagataaattcccaggtgtagcattacagcttctgactaatatagctgctattcaaacaattaatgttcaaatagttttctgaagtgatgaaaccaaagaagagcatgtggaaaagcagaagcttagaaagttgtggtcactgaatacactccctagtttttatttgtcagtgaaatctttacgcattcattgttaatattttaattccatggcttctcaggctgtactgtgtctgaaggggtaacacctagggaagcatgaggccccttatgggaccccccaaatggatcaacttcactttctcttttatgtattgagccctgtgttaacatttcacttaag

SEQ ID NO: 31913 - DNA, 306 bp, Macaca Mulatta
gagcacttaaacccctctcttttggagggggccccccaaagcgtcaggctgggggcagtctggtacggaacatatttattgcctccatgcatgtgtgtgagaaaaagtgaggactggtgtgcgtggacacgtcaggagcaggcgtgtggggctctttcagggaccacagaggagggtgcagttggcagtacccagccaccctgaaatccccagtaatggtgcctcagtgggccccagagttccagtgggagagtacagttccctcctgtctccctcttcttttccgcacctccatctttgtggata

SEQ ID NO: 31914 - DNA, 850 bp, Macaca Mulatta
  misc_feature (1)...(850): n = A,T,C or G
ttgtcgttcaggtctcaggataccacagtcctggataccctatccaatgatttcagcatggacaacatcagtgacagtggggcctccaatgagacaaccaatgccctccaggaaaattcactggctgatttttctctgccgcagacgccacaaactgacaacccctcagagggccgaggagaaggcgtctccaagtcatttagcgatcatggtttctattccccttcctccacgctgggggactctccgtcggttgatgatcccttggagtatcaggctggcctcctggtgcagaatgccattcaacaagccatagccgagcaggtggataaagctgtgtctaaaaccagcagggatggagcagagcaacagggacctgaagcaactgtagaggaagctgaagctggggctttcggctcagaaaagcctcagagcatgtttgagccacctcaggtgtcttctcctgttcaagagaaaagggatgtattaccaaagattctgcctgctgaagacagggcactcagggaaagggggcccccccagccactgccagctgtgcaacccagtggcccgattaacatggaggagaccaggcccgaaggaagctatttcagcaagtactcggaggcagctgagctgagaagcacagcctccctcctggccactcaagaatccgacgtgatggttggacccttcaagctgaggtccaggaaacagcggactttgtccatgattgaggaagagatccgagcagctcagganagggaagaggagctgaagaagcagagacnagtcttgcagagtacacagagccccaggacaaagaacgccccatcgctgccctccagac

SEQ ID NO: 31915 - DNA, 650 bp, Macaca Mulatta
tggagttcatgaaggtgtaatagcatttttattaaactgagtagaatggtatagcagtgacctcttaattacaatttgatttgactgcaaaactttttcctcctctaagaggagataatgtctgctttaagctgtaatgttttgccatgttgcaaaaagccataataataagtataaaaaagctttttccttttcaatttcatgttaatctggtttgtctgtccaccagagacagatcttctaactgtgacagcctctttatgcaggtctatcattatttgatagaatgtcttctaaaatacttcactcacattataattcaaattagaaagtcattccaaaaggatcatctcatgttgacctcatttcatcggaactgcagtgtatttttgttggttaattatattagtgttttctattttgtaaatgtgtcctttaattttactttactgccctgtgtcaattctgaattatatactggttaatttcttccattccctactacacagagaggtgagctctcaaattttgcagagctctgctatcactgaattacatttttctaaagaaaatagtataatttaatggattagcttttgtgtttaactgaatatatgaagaaattgggtctctctaaagagaaggtgttt

SEQ ID NO: 31916 - DNA, 236 bp, Macaca Mulatta
aggccctgaaagcagcagatcttgccattggaggatgagaagccacatgaagaagaaagaagacgccccagacagcagtgcagtaccaccttccagagatgcgagtgtgaccgtctttggtcttctagcccaactgctttccctgaatgcaatgcataagcaggccaggcaaaactagaaggggaagctgcccagctaacccacagaattatgagagataaaaaatcattgtctta

SEQ ID NO: 31917 - DNA, 297 bp, Macaca Mulatta
  misc_feature (1)...(297): n = A,T,C or G
tggacctaatgaacgggcaggcaagcaatgtcaatattgcagctactgcttctgagnnnnnnnnnnnnnnnnnnnnnnnnnnnnnnnnnnnnnnnnnnnnnnnnnnnnnnnnnnnnnnnnnnnnnnnnnnnnnnnnnnnnnnnnnnnnnnnnnnnnnnnnnnnnnnnnnnnnnnnnnnnnnnnnnnnnnnnnnnnnnnnnnnnnnnnnnnnnagctttcaagttgtggatggaataaaaaagaaaagtacagttctgcaccaaatgcagttgccttcacaagaagattcaatcatgt

SEQ ID NO: 31918 - DNA, 210 bp, Macaca Mulatta
ggaactcgtgaagtccctgtgtctggggccagcactgatccacacagctaagtctgcactcgtcttccctctcacgtatcacacctggaatgggatccgacacttgatgtgggacctaggaaaaggcctcaagattccccacgtataccagtctggagtggctgtcctggttcttactgtgttgtcttctgtggggctggcagccatgtg

SEQ ID NO: 31919 - DNA, 804 bp, Macaca Mulatta
  misc_feature (1)...(804): n = A,T,C or G
ggggcacccggggcaggagcaagccccaggttgtgacaggtgcaggtagacaacgcccataagcagagatggtcctgagctctggagagatccttccctgatcctttcggacgactacttggagccataagtaacctcagcaaaaacgaggcctctgcaagccacttttccatgccaagcatccacctggccggcccacaggcatgtttctgccacccactcctcaagatggacagggagccagcaggcaggcgggaagggccaagtacaggcaatcacccccatcttcttggtttgaagctttatccatgtatcatgttccctgtagccattttattttttaagaaactgctaatactttctccctaatggaagccctgaccccccagagagctacaggtctgctcccgacgggcctcgggcctgacccgtccacacagggccgtgtcagcggcagcgactcaagggacgtgtgtacatatgtaaatgagaaatagagacgtgtcaacagatgcaattcatttctcttggaatgtgtattgtttttattttgcgaaacanaacaacaacaaanaaagtttggaactccatcacgtggaaaaactagatcctgttggttatagcatttgtgagttctccacgtctgtctctctcgcgcatgtaatatactctgaccctgcgtggaaagggatttttggtctggtttttattttaccaacatgtactattttaagcttcagtggtactaggtcctgccaccctggtgtatttttttagggtgcctatgggaaataaatgaaaaag

SEQ ID NO: 31920 - DNA, 785 bp, Macaca Mulatta
  misc_feature (1)...(785): n = A,T,C or G
aggaacatctgcaggaacacctgatgagggtgcaccctttggcggaaagaacacctgccacagctgaaagcttggtggaaaaaacacctgacgaggccgcacccttggtggaggcaacacctgacaaaattcaatgtttgggggaaagcgacatctggaaagttggaacagttagcagaagaaacacctagaaaaattacgaggcctgcaaaagaaacatatggacaatttatatgtccagtaacaggaagacttaggaagatcgcatgggagaaaaagccaagacctgtaaagactgaacgcgtggcagtagtaacatctaataaaactaaagttttggaaaaaggagcatctaagatgattgcatgtcctacaaaagaaacatctacaaaagcaagtaccaatgnnnnnnnnnnnnnnnnnnnnnnnnnnnnnnnnnnnnnnnnnnnnnnnnnnnnnnnnnnnnnnnnnnnnnnnnnnnnnnnnnnnnnnnnnnnnnnnnnnnnnnnnnnnnnnnnnnnnnnnnnnnnnnnnnnnnnnnnnnnnnnnnnnnnnnnnnnnnnnnnnnnnnnnnnnnnnnnnnnnnnnnnnnnnnnnnnnnnnnnnnnnnnnnnnnnnnnnnnnnnngataagatgcccacatcagagtcagcacaaaaagaagatacgacatcaccttcagtttctgaggtngtcacagctgtggatgtgaaagagataggaatggccttaccacttagaagcagcagctgcgtagtggtaacaacaatgagtggatgtcaaaa

SEQ ID NO: 31921 - DNA, 910 bp, Macaca Mulatta
  misc_feature (1)...(910): n = A,T,C or G
gagttgaaggccacaggcactgcccacttcttcaacttcctgctcaacacaaccgactaccgaatcttgctcaaggatgaggaccacgaccgcatgtatgtgggcagcaaggactacgtgctgtccctggacctgcacgacatcaaccgcgagcccctcattnatacactgggcagcctccccacagcgcattgaggaatgcgtgctctcaggcaaggatggcaacgnggcgagtgtgggaacttcgtcaggctcatccagccctggaaccgaacacatctgtatgtgtgcgggacaggtgcctacaaccccatgtgcacctatgtgaaccgcggacgccgnnnnnnnnnnnnnnnnnnnnnnnnnnnnnnnnnnnnnnnnnnnnnnnnnnnnnnnnnnnnnnnnnnnnnnnnnnnnnnnnnnnnnnnnnnnnnnnnnnnnnnnnnnnnnnnnnnnnnnnnnnnnnnnnnnnnnnnnnnnnnnnnnnnnnnnnnnnnnnnnnnnnnnnnnnnnnnnnnnnnnnnnnnnnnnnnnnnnnnnnnnnnnnnnnnnnnnnnnnnnnnnnnnnnnnnnnnnnnnnnnnnnnnnnnnnnnnnnnnnnnnnnnnnnnnnnnnnnnnnnnnnnnnnnnnnnnnnnnnnnnnnnnnnnnnnnnnnnnnnnnnnnnnnnnnnnnnnnnnnnnnnnnnnnnnnnnnnnnnnnnnnnnnnnnnnnnnnnnnnnnnnnnnnnnnnnnnnnnnnnnnnnnnnnnnnnnnnnnnnnnnnnnnnnnnnnnnnnnnnnnnnnnnnnnnnnnnnnnnnnnnnnnnnnnnnnnnnnnnnnnngtcaacaagtggagcacattcctgaaggcgcggctcgtctgctccgtcccgggcgaggatggcattgagactcactttgatgagctc

SEQ ID NO: 31922 - DNA, 457 bp, Macaca Mulatta
ggcttccttctatgagaatggacctccttccacaggctctggggaggatagtagcactgaggcttttgttgttgcccccatttaatttaattatggatattattaaatacccgcaatcatgcacatttagctgagaagttccaaggctaaccgctgacgaatgacctgggggaaggggcaggtatgtgaattttgattggttaagacttgattttccaattctacattggcaccgaaatttaaatgatgtgtagaggcacttttttaaagtaaaacttttcaagttccccaattgctgtggagacccaaactgccatcgtggcgtcgattagggagtccaaggctctgaacgctattgccttcctggcgacgtggcttcctttctccaccctgtggttgcaggttgcaccgtgaatcccagcccgtgtgcctagctcagtcctgtcgatcacagggt

SEQ ID NO: 31923 - DNA, 696 bp, Macaca Mulatta
  misc_feature (1)...(696): n = A,T,C or G
tggtgatatttatcacgggagggctgattcttgtcatcccattcctactcatccttggtcctacgcacggatngtctcctccatcctcnaaggtcccttcgtctaagggtatctgcaaggccttctctacttgtggctcccacctctctgtggtgtcactgttctatgggacccttattggtctctacttctgcccatcagctaatagttctactctaaaggagactgtcatggctatgatgtacactgtggtgacccccatgctgaaccccttcatctacagcctgaggaacagagacatgaagggagccctgggcagaatcattcatcaaaagaaaactttcttatctctctgatgataacacttggagctattacatagtttatccagtaaaatattgacattaatattggaatattattctagattatttcctcaccataaatacttttgttgaaatggcatcttgcataatgtttcaatatgtagtggagatgaagtatagctgagtagttgaactagggaagggggtcttggtgacctggctaagacttcctgtttgtcttcccaaggtgatcctggaaaaacatagtttaagaatgattgttttagatggtcttcgtgccccacattcttaaattatcacaggattttgttatgttactcagagttttgctttgactgtagaatcattt

SEQ ID NO: 31924 - DNA, 716 bp, Macaca Mulatta
agtggttgcagatagggtgcaagataacacttgccctgtgattgtctcatctacagcccattactcaaagtttgcacctgctatcatgcaggctttaaagattaaagaaatcaatgagacttcatcaagtcagctgtatttactgggttcatacaatgcattacctccactgcatgaggctttattagagagaacaaaacagcaagagaagatggagtaccaggtctgtgcagctgatatgaatgtcttgaagagtcatgtggaaaaacttatccaaaatcaattcatatgaaagctttcagagtaaaattttttttctggctataagcatgcaataataaatctcaaacactgatttggagtacagtagcattttgtcttttatgtaaatatctttatatctgtttggaatttcaatagtctggtctctagggctgacattagacctccatggcacctcctcagatctttaatctagaagtgacaaaaggtaacacagtgcacggacctttgagctgtcatgctttgccttgtgctcatgtggggtatatcagtttccactcgcacaccctcactgttacgtggaccaaaatgtctgctacactatttggcaattacaatatttaagcctagttttcaggtactacatctgtaactagtgaatagttctctattagaaagttaatttaccactcaaaatggctaacttgaatggg

SEQ ID NO: 31925 - DNA, 397 bp, Macaca Mulatta
  misc_feature (1)...(397): n = A,T,C or G
gggagagaggtgattacttttgttgaaggacaccagctgcggaatttttggctttggcagattgaaatcatggcaggtccagaaagtgatgcgcaataccagttcactggtattaaaaaatatttcaactcttacactctcacaggtagaaggaattgtgtactggccacatatggaagcattgctttgattgtcttatatttcaagttaaggtccaaaaaaactccagctgtgaaagcaacataaatggattttaaactgtctagagttcttaacctcatctgttaagttcccatgcctggagaagctaatcccaactcatcatgtgataattcaatttgtacaataaattatgaacctggacnnnnnnnnnnnnnnnnnnnnnnnnnnnnnnnnn

SEQ ID NO: 31926 - DNA, 704 bp, Macaca Mulatta
ccaggaacaagtcaatgccgccctgctggactacacaatgtgtaactacccgcagcagacagagaaatttggacagctacttcttcgactacccgaaatccgggccatcagcatgcaggctgaagaatacctctactacaagcacctgaacggggatgtgccctataataaccttctcattgaaatgttgcatgcaaaaagagcataagttacaacccctaggagctctgctttcaaaacaaaaagagactgggggagtggggagggggaagaacaggaagaaaaaaagtactctgaactgctccaagcaacactaattaaaaacttgctttaaagatattgaatttaaaaaggcataataatcaaatacttaatagcaaataaatgatgtatcagggtatttgtattgcaaactgtgaatcaaaggcttcacatccccagaggattccatagaaaagacattgtaatggagtggattgaactcacagatggatagcaacaccgtcagaataaaaacggacagaacaattcttgtatatttaaactgatctccgctatgaagaaatttaggaactaatcttattaattaggctgatacagcgggggatttgagcttacaggattcctccatggtaaagctgaactgaaacaattctcaagaatgcatcagctgtacctacaatagcccctccctcctgctttga

SEQ ID NO: 31927 - DNA, 2965 bp, Macaca Mulatta
tcttggttgctctcaccatgtgatacaccagctctccctttgccttctgctgtgactgtaagtttccggaggcctctccagaagcggattctagcaccatgctgcttgtacagccttcaaaacttaggttctgacagttggaagtgtcgtgtacaacatgcggcgattaagtctttcacccaccttttcaatgggatttcatctgttagttattgtggctctcttattttcccatgtggactacgtaattgctgagacagaaatggaaggagaaggaaatgaaactggtgaatgtactggctcatattactgtaagaaaggggtgattttgcccatttgggaaccccaagacccttcttttggggacaaaattgctagagctactgtgtattttgtggccatggtctacatgtttcttggagtctctatcatagctgatcggttcatgtcctctatagaagtcatcacatctcaagaaaaagaaataaccataaagaaacccaatggagagaccaccaagacaactgtgaggatctggaatgagacagtttctaacctgaccttgatggccctgggatcttctgctcctgagattctcctttcagtaattgaagtgtgtggccataacttcactgcaggagacctcggtcctagcaccatcgtgggaagtgctgcattcaacatgttcatcattattgcactctgtgtttacgtggtccctgatggagagacaaggaagattaagcatttgcgtgtgttctttgtgacggcagcctggagcatctttgcctacacctggctttacattattttgtctgtcatctctcctggtgttgtggaggtctgggaaggtttgcttactttcttcttctttcccatctgtgttgtgttcgcttgggtagcggataggagacttctgttttacaagtatgtctacaagaggtatcgagctggcaagcagagggggatgattattgaacatgaaggagacaggccatcttccaagactgaaattgaaatggatgggaaagtggtcaattctcatgttgaaaatttcttagatggtgctctggttctggaggtggatgagagggaccaagatgatgaagaagctaggcgagaaatggctaggattctgaaggaacttaagcagaaacatccagagaaagaaatagagcaattaatagaattagctaactaccaagtcctaagtcagcagcaaaaaagtagagcattttatcgcatccaagctactcgcctgatgactggagctggcaacattttaaagaggcatgcagctgaccaagcaaggaaggctgtcagcatgcacgaggtcaacactgaagtgactgaaaatgaccccgttagtaagatcttctttgaacaagggacatatcagtgtctggagaactgtggtactgtggcccttaccattatccgcagaggtggtgatttgaccaacactgtgtttgttgacttcagaacagaggacggcacagcaaatgctgggtctgattatgaatttactgaaggaactgtggtgtttaagcctggtgagacccagaaggaaatcagagtgggtatcatagatgatgatatatttgaggaggatgaaaatttccttgtgcatctcagcaatgtcaaagtatcttctgaagcttcagaagatggcatactggaagccaatcatgtttctacacttgcttgcctcggatctccctccactgccactgtaactatttttgatgatgaccacgcaggcatttttacttttgaggaacctgtgactcatgtgagtgagagcattggcatcatggaggtgaaagtattgagaacatctggagctcgaggaaatgttatcgttccatataaaaccatcgaagggactgccagaggtggaggggaggattttgaggacacttgtggagagctcgaattccagaatgatgaaattgtgaagatcattaccattagaatatttgaccgtgaggaatatgagaaagagtgcagtttctcccttgtgcttgaggaaccaaaatggataagaagaggaatgaaaggtggcttcacaataacagatgaatatgatgacaagcagccactgaccagcaaagaggaagaggagagacgcattgcggaaatgggacgccccatcctgggagagcacaccaagttggaagtgatcattgaagaatcctatgaattcaagagtaccgtggacaagctcattaagaagacaaacctggcccttgtggttgggacaaacagctggagagaacagttcattgaagctatcactgtcagtgctggggaagatgacgatgacgacgaatgtggggaagagaagctgccctcctgtttcgattacgtgatgcactttctgactgtgttctggaaggtcctctttgccttcgtcccccctactgaatactggaatggctgggcatgtttcattgtctccatcctcatgattggcctactgacagctttcattggagacctggcttcccactttggctgcaccattggcctgaaagattctgtgactgcagtcgtgtttgtcgcacttggaacatcagtgccagacacgtttgccagcaaagtggcagccacccaggaccagtatgcagacgcctccataggtaacgtcacgggcagcaacgcggtgaacgtcttcctgggaatcggtgtggcctggtccatcgctgccatctaccatgcagccaatggggaacagttcaaagtgtcccctggcacgctagctttctctgtcactctcttcaccatttttgctttcatcaatgtgggggtgctgctgtatcggcggaggccagaaatcggaggtgagctgggtgggccccggactgccaagctcctcacatcctgcctctttgtgctcctatggctcttgtacattttcttctcctccctggaggcctactgccacataaaaggcttctaaagg

SEQ ID NO: 31928 - DNA, 471 bp, Macaca Mulatta
  misc_feature (1)...(471): n = A,T,C or G
gatgctttatcagaagatctgctgagcatcattgcaaacatgtccgggtgtctcccttacatgctgcccccaaaatgcccaaacacgtgcctggcgaacaaatacagactcatcacaggagcttgcaacaacagnnnnnnnnnnnnnnnnnnnnnnnnnnnnnnnnnnnnnnnnnnnnnnnnnnnnnnnnnnnnnnnnnnnnnnnnnnnnnnnnnnnnnnnnnnnnnnnnnnnnnnnnnnnnnnnnnnnnnnnnnnnnnnnnnggtccgggaggtgacacgacatgtcattcaagtttcaaatgaggttgtcacagatgatgaccgctattctgacctcctgatggcatggggacaatacatcgaccatgacatcgcgttcacaccgcagagcaccagcaaagctgccttcaggggaggggctgactgccaggtgacttgtgagaaccaaaacccatgttttcccatacaa

SEQ ID NO: 31929 - DNA, 298 bp, Macaca Mulatta
  misc_feature (1)...(298): n = A,T,C or G
tttgctggcccacgagaaactctctgttcctgtcacgtgcaaaatccgtgtcttcccggagattgacaagaccgtgaggtacgcccagatgctggagaaggccggttgccagnnnnnnnnnnnnnnnnnnnnnnnnnnnnnnnnnnnnnnnnnnnnnnnnnnnnnnnnnnnnnnnnnnnnnnnnnnnnnnnnnnggaaggctgtggccatccctgtgtttgctaatgggaacatccagtgcctgcaggatgtggagcgctgcctccgggacacgggtgtgcagggcgtcatgagtgca

SEQ ID NO: 31930 - DNA, 151 bp, Macaca Mulatta
gcatactggaatgccacccgggccttcatgatcctgtctgccctatgcgccacttccggcatcatcatgggcatcatggccttcactcatcagcctaccttctcccgcatctcccggcccttctctgctggcatcatgttttttgcctcaa

SEQ ID NO: 31931 - DNA, 218 bp, Macaca Mulatta
tccagcctcactgtcttgctcctgccagctacttcccctaggagtgaagggtggcatggaactgggcacgtgccagcaccgcccctagcttccttcgctgtcccccaccccctgaccctccagctcctcctggccctctcacgtgcccccttctgctgggcctttagccctagaagctgcaggtagtgggggtggctaccaagaaggaacagaggtct

SEQ ID NO: 31932 - DNA, 175 bp, Macaca Mulatta
ggtccctttcattcttctattctccccattaacctgctttctttctcaaccccccacgacgagaactgagctaagccaaagacatttcagttcatcttaccctttgagctctatctgcatgatttggactctggagcctggaaaaacccctaacaattctaaataaaataaagtg

SEQ ID NO: 31933 - DNA, 2756 bp, Macaca Mulatta
  misc_feature (1)...(2756): n = A,T,C or G
agatgcatgctattcctttgaggtcctcctgggtgatgacctgtgcttatgctccctctggtaattatgttgcctgtggaggcttggacaacatctgctctatatataacttaaagaccagagagggaaatgtgagagtgagccgagagttgccgggtcacacagnnnnnnnnnnnnnnnnnnnnnnnnnnnnnnnnnnnnnnnnnnnnnnnnnnnnnnnnnnnnnnnnnnnnnnnnnnnnnnnnnnnnnnnnnnnnnnnnnnnnnnnnnnnnnnnnnnnnnnnnnnnnnnnnnnnnnnnnnnnnnnnnnnnnnnnnnnnnnnnnnnnnnnnnnnnnnnnnnnnnnnnnnnnnnnnnnnnnnnnnnnnnnnnnnnnnnnnnnnnnnnnnnnnnnnnnnnnnnnnnnnnnnnnnnnnnnnnnnnnnnnnnnnnntttttcccaaatggatatgccttcgccactggctctgatgatgccacttgccggctctttgaccttcgtgcagatcaagagttattattgtattctcatgacaatatcatctgtggaatcacttccgtagccttctcaaaaagtgggcgtctcttgttggctggttacgatgactttaattgtaacgtatgggacacgctaaaaggagatcgtgcaggnnnnnnnnnnnnnnnnnnnnnnnnnnnnnnnnnnnnnnnnnnnnnnnnnnnnnnnnnnnnnnnnnnnnnnnnnnnnnnnnnnnnnnnnnnnnnnnnnnnnnnnnnnnnnnnnnnnnnnnnnnnnnnnnnnnnnnnnnnnnnnnnnnnnnnnnnnnnnnnnnnnnnnnnnnnnaaaaaattctaccttatatttgcaggtgaagatttttctatgagattatatacaaaaacaagctttcagtatactaccnnnnnnnnnnnnnnnnnnnnnnnnaaaaggcaaaggcgccttctgagatcaaaaggaccagtgtattaatttgaggagttgggttaatttaaccttaatgaattgttgtgtgtactcaagagtctattttctttgtgtagaacataatgtacacattatagcaggtcgccattgtgtttgcattttttaagaagtacatatttttaactttgtatacacaagaaatgtcacgttttttagttttgtaatggaagaaccaggtacagaaatagacagaaatgatactgtgtgtatatttatgtctgaagaaagtccccttgaattctgatatctctttgaatctaagagatcctgatggcttcatgtttaagagcattgacaggaggggcacctctaaggggagtccttcgtttctcatgcatcatttgccatatactattaatctaagtgctcgctttcagtcctttgaggggacagataatctgaaggccagagattagagatttcactgatattttggacatacataagaaacttctttagaatttattaataaaaagtagataatagcatataaatggttcttcacattttaaaagcctggttatgatctggttatgatttagtacccccctaaatggctgaactttcctattcatttcatatttggaactaagtttgtagtgtatattcatctttcagaagtttggtaaacattgggattgtccctgcatctgaacatctttcccagtgctatcagtatacatttagagaggaaatgcagtgtgacagtgttacatttggagagaagtgtgaaatctaaccaatcactaagacatatttgttgtaatatggtggtttatttcacgtttgcatactataaaatctgaatcgatgtgaaatatctgtgcctttacatttcttaaaatgaaacccttaagctttttgttctgttttgcaatattttgtaatattcccttccttagcacaaaatactggtttctaagtggttnnnnnnnnnnnnnnnnnnnnnnnnnnnnnnnnnnnnnnnnnnnnnnnnnnnnnnnnnnnnnnnnnnnnnnnnnnnnnnnnnnnnnnnnnnnnnnnnnnnnnnnnnnnnnnnnnnnnnnnnnnnnnnnnnnnnnnnnnnnnnnnnnnnnnnnnnnnnnnnnnnnnnnnnnnnnnnnnnnnnnnnnnnnnnnnnnnnnnnnnnnnnnnnnnnnnnnnnnnnnnnnnnnnnnnnnnnnnnnnnnnnnnnnnnnnnnnnnnnnnnnnnnnnnnnnnnnnnnnnnnnnnnnnnnnnnnnnnnnnnnnnnnnnnnnnnnnnnnnnnnnnnnnnnnnnnnnnnnnnnnnnnnnnnnnnnnnnnnnnnnnnnnnnnnnnnnnnnnnnnnnnnnnnnnnnnnnnnnnnnnnnnnnnnnnnnnnnnnnnnnnnnnnnnnnnnnnnnnnnnnnnnnagaataataaaatagataaaggcaaattaagatataggaccaaaacagaatatcgtagatggcagttatgaatgtatatttatattttggttaagatttctattaactttttggctgggtgcagtggctcacacctgtaatcccagcactttgggaggccaaggtgggcggatcacttgaggtcaggagttcacgaccagcctagccaacatggtgaaaccccatctcttctaaaaatacaaaaattagctgggtgtggtggcacattcctgtaatcccacctacttgggaggctgaggcaggagaatcgcctgaactcaggaggcagaggttgcagtgagccgagattgtgccacggtactccagcctagacgacagagtgagactccgtctcaaat

SEQ ID NO: 31934 - DNA, 677 bp, Macaca Mulatta
  misc_feature (1)...(677): n = A,T,C or G
ttcagaaaagttgcagccatatcttcatctacctaggaagacaaatgcctagggagagctgtgaaaagtcatcatcctgccagcagcactccttccgttcctccagcatagactacattttgtgaggatcaatgaagactaaatataaacacattttcttgaatggcatgctagtagcagtgagcagaggtgtgggtgtgaaaggtttccaaaaaaagttcagcatgaagaatgccatatatgttgttgccaacacttggaacacaatgactaaagacatagttgtgcatgtctggcacaacctcaagcctgtgattgtgtttattgatgatgctgaacaagtggtaactttaaaggattctgtgtgccaagtgaaaagaaaagatgtctgacctccttacatatgcaaaaatatacctccagagcctgtcggtaggctggaagaagtggatattgannnnnnnnnnnnnnnnnnnnnnntccagttgtctattcattgactgatggtgaaacagctgaagtgattctgaatcaaggtgattgtgattatagtgacaatgaagatgatgctgttaatactgcataaaaagtgcctgtcgatgacatggtgaaaatatttgacaggcttatggaaggactagagcagcatacattcataacagaagaagaaattatgt

SEQ ID NO: 31935 - DNA, 3003 bp, Macaca Mulatta
  misc_feature (1)...(3003): n = A,T,C or G
caacagcccagccgtagcttgggggcggacccannnnnnnnnnnnnnnnnnnnnnnnnnnnnnnnnnnnnnnnnnnnnnnnnnnnnnnnnnnnnnnnnnnnnnnnnnnnnnnnnnnnnnnnnnnnnnnnnnnnnnnnnnnnnnnnnnnnnnnnnnnnnnnnnnnnnnnnnnnnnnnnnnnnnnnccacacttgtggcaaagcaagctgcgaggaggnnnnnnnnnnnnnnnnnnnnnnnnnnnnnnnnnnnnnnnnnnnnnnnnnnnnnnnnnnnnnnnnnnnnnnnnnnnnnnnnnnnnnnnnnnnnnnnnnnnnnnnnnnnnnnnnnnnnnnnnnnnnnnnnnnnnnnnnnnnnnnnnnnnnnnnnnnnnnnnnnnnnnnnnnnnnnnnnnnnnnnnnnnnnnnnnnnnnnnnnnnnnnnnnnnnnnnnnnnnnnnnnnnnnnnnnnnnnnnnnnnnnnnnnnnnnnnnnnnnnnnnnnnnnnnnnnnnnnnnnnnnnnnnnnnnnnnnnnnnnnnnnnnnnnnnnnnnnnnnnnnnnnnnnnnnnnnnnnnnnnnnnnnnnnnnnnnnnnnnnnnnnnnnnnnnnnnnnnnnnnnnnnnnnnnnnnnnnnnnnnnnnnnnnnnnnnnnnnnnnnnnnnnnnnnnnnnnnnnnnnnnnnnnnnnnnnnnnnnnnnnnnnnnnnnnnnnnnnnnnnnnnnnnnnnnnnnnnnnnnnnnnnnnnnnnnnnnnnnnnnnnnnnnnnnnnnnnnnnnnnnnnnnnnnnnnnnnnnnnnnnnnnnnnnnnnnnnnnnnnnnnnnnnnnnnnnnnnnnnnnnnnnnnnnnnnnnnnnnnnnnnnnnnnnnnnnnnnnnnnngtagagggggcaagaaagcaaagcagcggttgacagcactcttttgttgcaatgcctcagggactgaaaaaatgagaccattgatcgttggtaggtcagccagcccacgctgcctcaagaacatccattccctcccttgtgattaccgagccaaccagtgggcttggatgacaagggatctgtttaatgagtggctgatgcaagtggatgccaggatgaagagggcggaacgccggatcctcttgctgatcgacaactgctctgctcataacatgcttccacgcttggaaaggattcaggttgggtatctgccctccaactgtactgctgtcctgcagccactgaatcttggcataattcacaccatgaaagtactataccggagccaccttctcaaacagatcctcctcaagctcagcagcagggaggatcaagaaaaggtggacatcaagcaggccatcgacatgattgctgcagcatggtggtcagtcaagccatccacagtgctcaaatgttggcagaaggcaggcatcatccctatggaatttgcacaatgtgacatagaatcagcagccagtgaaccagacactgccattgaacccttgtggcacacagtggctattgccacctgtgtcccaaacgaagcaaatttnnnnnnnnnnnnnnnnnnnnnnnnnnnnnnnnnnnnnnnnnnnnnnnnnnnnnnnnnnnnnnnnnnnnnnnnnnnnnnnnnnnnnnnnnnnnnnnnnnnnnnnnnnnnnnnnnnnnnnnnnnnnnnnnnnnnnnnnnnnnnnnnnnnnnnnnnnnnnnnnnnnnnnnnnnnnnnnnnnnnnnnnnnnnnnnnnnnnnnnnnnnnnnnnnnnnnnnnnnnnnnnnnnnnnnnnnnnnnnnnnnnnnnnnnnnnnnnnnnnnnnnnnnnnnnnnnnnnnnnnnnnnnnnnnnnnnnnnnnnnnnnnnnnnnnnnnnnnnnnnnnnnnnnnnnnnnnnnnnnnnnnnnnnnnnnnnnnnnnnnnnnnnnnnnnnnnnnnnnnnnnnnnnnnnnnnnnnnnnnnnnnnnnnnnnnnnnnnnnnnnnnnnnnnnnnnnnnnnnnnnnnnnnnnnnnnnnnnnnnnnnnnnnnnnnnnnnnnnnnnnnnnnnnnnnnnnnnnnnnnnnnnnnnnnnnnnnnnnnnnnnnnnnnnnnnnnnnnnnnnnnnnnnnnnnnnnnnnnnnnnnnnnnnnnnnnnnnnnnnnnnnnnnnnnnnnnnnnnnnnnnnnnnnnnnnnnnnnnnnnnnnnnnnnnnnnnnnnnnnnnnnnnnnnnnnnnnnnnnnnnnnnnnnnnnnnnnnnnnnnnnnnnnnnnnnnnnnnnnnnnnnnnnnnnnnnnnnnnnnnnnnnnnnnnnnnnnnnnnnnnnnnnnnnnnnnnnnnnnnnnnnnnnnnnnnnnnnnnnnnnnnnnnnnnnnnnnnnnnnnnnnnnnnnnnnnnnnnnnnnnnnnnnnnnnnnnnnnnnnnnnnnnnnnnnnnnnnnnnnnnnnnnnnnnnnnnnnnnnnnnnnnnnnnnnnnnnnnnnnnnnnnnnnnnnnnnnnnnnnnnnnnnnnnnnnnnnnnnnnnnnnnnnnnnnnnnnnnnnnnnnnnnnnnnnnnnnnnnnnnnnnnnnnnnnnnnnnnnnnnnnnnnnnnnnnnnnnnnnnnnnnnnnnnnnnnnnnnnnnnnnnnnnnnnnnnnnnnnnnnnnnnnnnnnnnnnnnnnnnnnnnnnnnnnnnnnnnnnnnnnnnnnnnnnnnnnnnnnnnnnnnnnnnnnnnnnnnnnnnnnnnnnnnnnnnnnnnnnnnnnnnnnnnnnnnntttgtttttaaagatggggtcttgttatattgcatcccaggcgggaatgccgtggctattcacaggcatgattataacacatgtctctaactcctggcctcaagccatcctcccaaatagatgggactactgatgcatactgccacgctggccttagaaaatgttttaataggcatttcactaatagggagctggagtacaaggaaatacagtgcatttaagacataggcttggcatggtggctcatgcctgtaatcccagcactttgggaggatcacttgaggcaaggagtttgagaccagtttggccaacacagcgagac

SEQ ID NO: 31936 - DNA, 522 bp, Macaca Mulatta
ctcaagttcaaatcattctagtggtaatattcagttgtttgttaggatgttagtgaattcatctgctgatttgtattggatccagcagtgccgatgctttatttaatcatgctgagtcttatttatcactattttctttgtgattgtgctttttttcttttttatccataggatgcagaaaatgcgattgtgcatatgggaggtcagtggttgggtggtcgtcaaatccgaaccaactgggccacacgtaaaccacctgcacctaaaagtacacaagaaaacaacactaagcagttgagatttgaagatgttgtaaaccagtcaagtccaaaaaattgtactgtgtactgtggaggaattgcgtctgggttaacacgatccgcttatgagacagacattctcaccatttggacaaattatggaaataagagttttcccagaaaagggctattcatttgtcaggtaacactctacttgaaatatcattattactcttacatttgattcgttcatttcacttac

SEQ ID NO: 31937 - DNA, 1421 bp, Macaca Mulatta
  misc_feature (1)...(1421): n = A,T,C or G
gggctacaggacaacccctgggcatgtgactgccaactctatgacctggttcatcttttggatggctgggcccnnnnnnnnnnnnnnnnnnnnnnnnnnnnnnnnnnnnnnnnnnnnnnnnnnnnnnnnnnnnnnnnnnnnnnnnnnnnnnnnnnnnnnnnnnnnnnnnnnnnnnnnnnnnnnnnnnnnnnnnnnnnnnnnnnnnnnnnnnnnnnnnnnnnnnnnnnnnnnnnnnnnnnnnnnnnnnnnnnnnnnnnnnnnnnnnnnnnnnnnnnnnnnnnnnnnnnnnnnnnnnnnnnnnnnnnnnnnnnnnaggaagtctccagtgacggcacgagctggactctgctgggcctgcctgcagtgtcccaccttgactccggagactacatctgccaagccaagaacttcctgggagcctctgagactgttatctccctgattgtcactgagccgcagacttccacagaacacagcgggagcccaggggcactatgggcaaggacaggtggtggaggggaagccgctgcttacaacaacaagctggtggccaggcatgtcccccagattcccaaacctgctgtcctggccactggaccctctgtgcccagctcaaaggaggagctgaccctccagcacttccagatggatgccctgggagagctctctgatgggcgggtgggaccctcagaggcacgagtggtgaggtctgtgaaggtggtgggagacacttaccacagcgtgtccttggtgtggaaggcacccaaggctaagaacacaactgccttcaatgtcctctaagcggtctttgggcagcacagcatgcggcgggtgattgtgcagcctgggaagaccagagtgactattattgaagggtgcccaagaccaagtatgtggcgtgtgtctgcgtgaagggcctggtgccnnnnnnnnnnnnnnnnnnnnnnnnnnnnnnnnnnnnnnnnnnnnnnnnnnnnnnnnnnnnnnnnnnnnnnnnnnnnnnnnnnnnnnnnnnnnnnnnnnnnnnnnnnnnnnnnnnnnnnnnnnnnnnnnnnnnnnnctcttcaaaggcgctgccgaaagtgcttcaacagggactccactgaggccacagttacctacatcaacctagagagactaggccacagcgaggatggcttggaggagctgtcccggcacagtgtcagcgaggccgacaggcttctctcagctcgttccagtgtggactnnnnnnnnnnnnnnnnnnnnnnnnnnnnnnnnnnnnnnnnnnnnnnnnnnnnnnnnnnnnnnnnnnnnnnnnnnnnnnnnnnnnnnnnnnnnnnnnnnnnnnnnnnnnnnnnnnnnnnnnnnnnnnnnnnnnnnnnnnnnnctcaggtacctgcttacacagatacttacacacaacaacagcagcagcagct

SEQ ID NO: 31938 - DNA, 712 bp, Macaca Mulatta
gatgtcctatgataggtttgtgacgatctgccattccctgcattacactatcatgaactggagagtgtgcacagtcctggctgttacttcctgggcatgtggattttccctggccctcataaatctaatactccttctaaggctgcccttctgtggaccccaggaggtgaaccgcttcttctgtgaaattctatctgtcctcaaactggcctgtgcagatacctggattaatgaaatttttgtctttgctggtcgtgtgtttgtcttagtcaggcccctttccttgatgctgatctcctacatgcgcatcctcttggccatcctgaagatacagtcagaggaccgcagaaaagccttttccacctgctcctcccacctctgtgtggttgggctctactttggcatagacatggtggtttacctggtcccagataacagtcaacgacaggagcaggagaaaatcctcaccttgttttacagccttttcaacccattgctgaaccccctcatctacagcctgcggaacgctcaggtgaagggtgccttatacagagcactgcagaaaaagaggaccatgtgaatgaggagagaattttggttcagttgatctacctttatgagatgtggtttgcttgcacaatacaactcagaaaaagtccacaagaagaggcttcatttaagaatgaaattacctaaattttggccctgaaaa

SEQ ID NO: 31939 - DNA, 238 bp, Macaca Mulatta
agagctagagtctagtatttataggaatctgtgagagatattttggtctcactgcaatgaacaaaaagtggctgagtttggtttttaattgtagccatgtattgaaggcatctttttgaccaactcttgttggttctgtcttgaaccattgttaatcactgtgctgtaattagtatagctaaatcttttccttccttgctcctgccccagcccaccccatcttcccttaacatttttt

SEQ ID NO: 31940 - DNA, 567 bp, Macaca Mulatta
ttcctttttcctctcttctcctgccgagagtggaacacgcatgtcctggaagctgcgtcttgtgcggggcccagctgctctcgggggctgcatgaatcatctcccctgggccctggactcagactggggcctccccacctccctctcggctgtgccttacagagccccggtccaggcctcctgcggctgttgggttccagatgctgcagctccatgtgacttcccagcaggccctccaccctccctgctgaatggaggagctgggggtcccccaggccaactggaaacatctcccaggctaggccaattgccttttgcacttccctgttcctgtcacatttccccagccccaccttcccctcctgatgccctgaaagcttccggaattgactgtgaccgcttggatgtcgccactgtcagccgctgccttgatgtccccatttagccatctccatggagctcctgctgggagtccctgaaacctgcacttcgtggctgctcagctggctgcttcctgtcctgggagggagcctcctgggtatcttcatctgctgtggctaccggaga

SEQ ID NO: 31941 - DNA, 784 bp, Macaca Mulatta
gggtgggtttagagttctttttatgtaggtttttaaatgattttactttgaactgaatctccatttgcacagcacagcagacacacaagaactacagcgcattaaaaacagcatgtgtgctggtgggggcctggctttctcattagaaaaaaatatgtccgacaggttatgaagggtaaaacaaaaataattgcaagaactactgtgcccttctgaccccatgggggccttccctatcccatgattccattttggggagtagaggtagggagggggcagcagttacaagtgctttgagctgtcaactcacattttactttgacctggttgggcaagaaaggagagagaaccttccctagtcaggtatctgggaagaagccccagctactgtttctgtttaaggtctctggggtagctcttggagccaatagagaatagacggggtaggaatagggatcctggccctatccctttggattttgagttatacctgggtataggaagtaccttcttagcaatgtctgtgggatctgaggatgacaaaaaaacctaatctgtggggaggggcaaatgctattaagtaccagtaggtttctggccatcaatgtgggttctccctcctctctaaattattaaccccttaaggtgaagcaatgggagaggaaaatttattaacctggaactgttttgggacaaaaaccccttccttttcctttatcaattaagattcaaggctttattaagtaccccaatggtcaaacacatgggccccatttccccttgc

SEQ ID NO: 31942 - DNA, 1759 bp, Macaca Mulatta
  misc_feature (1)...(1759): n = A,T,C or G
tttaaattctctgctcaaagttttcattgagtttagcagtacctcagaaaatatagacagaaaatgtagattcgataaatgacttnnnnnnnnnnnnnnnnnnnnnnnnnnnnnnnnnnnnnnnnnnnnnnnnnnnnnnnnnnnnnnnnnnnnnnnnnnnnnnnnnnnnnnnnnnnnnnnnnnnnnnnnnnnnnnnnnnnnnnnnnnnnnnnnnnnnnnnnnnnnnnnnnnnnnnnnnnnnnggctttctatatgtaaatacctcacagaggatgttacgtattctagacatgataaaatccacattttcctctgagagcacaattagcaggctgaaaggatgcattgtgtggttagatgtcataaaccatttgtatttggtgtctaactccagtttttcacaaaggccatcttcaaaaatatttgggggaatttcagacatatagaaaagaaagtgaactctatattgaaaattataacttgggtgttaaatnnnnnnnnnnnnnnnnaagatacctaaatttgagattttattagctcttttaaatgattccacaaagcaagtaaggatgagcatcaacaatttaacaacagactttgattttgcatctcaatccaattggaaatattttactgaattaattctaagaccaatggaaatgtcagatgaaattcctaatcagtttcaaaatatttggcttcatttaataacactggggaaggaatttcagaagcttgtaagaggtatttactctaacatcctggaaaataattcctcttctaaaactggaaacttgttaaacatatttgccaccagtccaaaagaaaaagatgtaaacagtgtaggcaattccatttatcatttagctagttaccttgccttcaacttatctcatgacctccaaaatccaccaaaaataatttcacctgaaataatgaaagccatgggtcttgggattcaactgatgagggatgtgttcacctccttaatgcctgcagttcatcacattagtccacaaaatacaggttatatgcaagttttgaagaaggtaacttctgtcatgcgtactcttaagaaggcagacatagacattttggtggatcaacttgaacaaattagtgcaagcctaatggatttctttaggaatatcagtagtgtgagaactggcaagttagaggtcaacttgcttgttgacttgatgaaaaaatttgtagacagctcgcattcttggaatgttaatcacctgctgcaactctcacgcctgtttcctaaagatgctgtggatgctgtggtagatgtatactatgtgcttcctcatgctgtaaggctcctacagggagtacttggtaaaaacatcactgaaggcctcaaggatgtctacagcttcatactccttcatggcataaccatttcagatatcaccaaggaagacttcacaattgtgttaaaaattcttttggatataattgaattaatatcagataagccagatattatttcagagactttaacttgttttcctgtggtttggtgctggaatcatacaaattctggatttcagcagaattcaaaggtagacccctgcagtgtccatgggctcatgtcttcttccttttatggcaaagtggccagtatactcgatcatctccacctgtctccccaaggtgaagattcaccatgttcaaatgaaagctcccgaatggaaataaataggaaagtggtctgcataattcatgaattagtggactggaatgctat

SEQ ID NO: 31943 - DNA, 1226 bp, Macaca Mulatta
  misc_feature (1)...(1226): n = A,T,C or G
gggcatcgcagggaccgacgtggccaaggaggcctccgacatcatcctgaccgatgacaacttcaccagcatcgtcaaggccgtcatgtggggccgtaacgtctatgacagcatctccaagttcctgcagtttcaactgacggtcaatgtggtggccgtgatcgtggccttcacaggcgcctgcattactcagnnnnnnnnnnnnnnnnnnnnnnnnnnnnnnnnnnnnnnnnnnnnnnnnnnnnnnnnnnnnnnnnnnnnnnnnnnnnnnnnnnnnnnnnnnnnnnnnnnnnnnnnnnnnnnnnnnnnnnnnnnnnnnnnnnnnnnnnnnnnnnnnnnnnnnnnnnnnnnnnnnnnnnnnnnnnnnnnnnnnnnnnnnnnnnnnnnnnnnnnnnnnnnnnnnnnnnnnnnnnnnnnnnnnnnnnnnnnnnnnnnnnnnnnnnnnnnnnnnnnnnnnnnnnnnnnnnnnnnnnnnnnnnnnnnnnnnnnnnnnnnnnnnnnnnnnnnnnnnnnnnnnnnnnnnnnnnnnnnnnnnnnnnnnnnnnnnnnnnnnnnnnnnnnnnnnnnnnnnnnnnnnnnnnnnnnnnnnnnnnnnnnnnnnnnnnnnnnnnnnnnnnnnnnnnnnnnnnnnnnnnnnnnnnnnnnnnnnnnnnnnnnnnnnnnnnnnnnnnnnnnnnnnnnnnnnnnnnnnnnnnnnnnnnnnnnnnnnnnnnnnnnnnnnnnaggtcattgccaccatcctcaccagtcagctcaagtgcctgaaggaagctgggcatgggcctgggaaggacgagatgaccaacgaggagctggccggaggcgaggaagagatcgaccacgccgagcaggagctccgcaggggccagatcctctggttctggggcctgaaccggattcagnnncagatccgggtggtgaaagcgttccgtagctcactctatgaaggcctggagaaaccagaatccaagacctccattcacaacttnnnccacgcccgagtttctgatcaatgactacacccacaacatcccgctcatcgacgacacggacgtggacgagaacgaggagcgcctccgggnnnnnnnnnnnnnnnnnnnnaccagaacaacaacgccatagacagcggcatctacctgaccacgcatgtcaccaagtcagctacctcttcagtgttttcctccagtcccgggagcccgctccacagtgtggagacatccctctaa

SEQ ID NO: 31944 - DNA, 1937 bp, Macaca Mulatta
  misc_feature (1)...(1937): n = A,T,C or G
agggtagaagtggcaaccagagtaagccagttcgtcgaagcaaatgatggctgcagcaaagagtcccgaggcacacccatcctcaaacaaggatcccacacagggccagaaatcagccctccaggttaacagtcctgactcggaagcctcccgtcagcgcttcaggcagttttgctaccaggaagtaactggcccccatgaagcttttagcaaactctgggaactctgttgtcagtggctgaagccgaagacgcactcgaaagaggaaatcctggagctgctggttttggagcagtttctgactatcttgccagaggagatccagacctgggtgagggagcagcatccagaaaatggggaggaagctgtggctctggttgaggatgtacagagagctcctggacaacannnnnnnnnnnnnnnnnnnnnnnnnnnnnnnnnnnnnnnnnnnnnnnnnnnnnnnnnnnnnnnnnnnnnnnnnnnnnnnnnnnnnnnnnnnnnnnnnnnnnnnnnnnnnnnnnnnnnnnnnnnnnnnnnnnnnnnnnnnnnnnnnnnnnnnnnnnnnnnnnnnnnnnnnnnnnnnnnnnnnnnnnnnnnnnnnnnnnnnnnnnnnnnnnnnnnnnnnnnnnnnnnnnnnnnnnnnnnnnnnnnnnnnnnnnnnnnnnnnnnnnnnnnnnnnnnnnnnnnnnnnnnnnnnnnnnnnnnnnnnnnnnnnnnnnnnnnnnnnnnnnnnnnnnnnnnnnnnnnnnnnnnnnnnnnnnnnnnnnnnnnnnnnnnnnnnnnnnnnnnnnnnnnnnnnnnnnnnnnnnnnnnnnnnnnnnnnnnnnnnnnnnnnnnnnnnnnnnnnnnnnnnnnnnnnnnnnnnnnnnnnnnnnnnnnnnnnnnnnnnnnnnnnnnnnnnnnnnnnnnnnnnnnnnnnnnnnnnnnnnnnnnnnnnnnnnnnnnnnnnnnnnnnnnnnnnnnnnnnnnnnnnnnnnnnnnnnnnnnnnnnnnnnnnnnnnnnnnnnnnnnnnnnnnnnnnnnnnnnnnnnnnnnnnnnnnnnnnnnnnnnnnnnnnnnnnnnnnnnnnnnnnnnnnnnnnnnnnnnnnnnnnnnnnnnnnnnnnnnnnnnnnnnnnnnnnnnnnnnnnnnnnnnnnnnnnnnnnnnnnnnnnnnnnnnnntttgagatcaagaatgagattaaaaaagaaaatctaaaatgggatgactcagaggaaggagaaatacacaaggctttacagagaaagtccagaggagttttttggcactctgagctacaaaaaggcttggagagcgagccaacatcaagaaggcaatgtagaaattctccaggggagagtgaggagaaaaccccatcccaggagaagatgagtcaccagagtttttgtgccagggacaaagcctgtacacatatcctctgtgggaaaaactgctctcagagtgtgcattctccccacaagccagcactcgaactggaaaaagtatctcaatgtccagaatgtgggaaaacctttagccgaagttcttatcttgttcggcatcagagaatccacacaggcgagaagcctcacaagtgcagtgagtgcgggaaaggctttagtgagcgctcnnnnnnnnnnnnnnnnnnnnnnnnnnnnnnnnnnnnnnnnnnnnnnnnnnnnnnnnnnnnnnnnnnnnnnnnnnnnnnnnnnnnnnnnnnnnnnnnnnnnnnnnnnnnnnnnnnnnnnnnnnnnnnnnnnnnnnnnnnnnnnnnnnnnnnnnnnnnnnnnnnnnnnnnnnnnnnnnnnnnnnnnnnnnnnnnnnnnnnnnnnnnnnnccatacaagtgtgcacagtgtgggaaaagcttcaacaatagctcccacttcagtgcccactgaaaaacccacactggtgaacagtcttacaggtgttctcactgtgagagaggcttcact

SEQ ID NO: 31945 - DNA, 903 bp, Macaca Mulatta
gggctgacaatgaattgtcgcctgagtgcctggatggagcccagcacttcctaaaagatgacggtgtgagcatccccggagaatatacttccttcctggctcccatctcctcctccaagctgtacaatgaagtccgggcctgtagggagaaggaccgtgaccctgaggcccagttcgagatgccttatgtggtacggctgcacaacttccaccagctctctgcgccccagccctgtttcaccttcagccatcccaacagagatcctatgattgacaacagccgctattgtaccttggagtttcccgtggaggtgaacacagtactgcatggctttgcaggctactttgagactgtgctttatcaggacatcactctgagtatccgtccagagactcactctcctgggatgttctcatggcttcccatcctcttccctattaagcagcccataacgggacgtgaaaggcccaaccatctgtgtgcgttttctcgcggctgcagcaattccaagaaagtgtgggtaataagtggggctgtggacaagccccaaacctggttctggctatttacaaaccccaaagcggccgcctcaatattccccttgggccccccaaacccctggcggtgccaagtgtttcccaaaaccctttgggagaaacagctttcatggttcccgccccccgggtagataaaagaaagggggggcctggaaaatccaggggggcgtttggaaatccccccctttggtccccatcccaagaaaggaaccccttttcaaggcccggttttctcgtgggcgtgttaacacaacagggggcggcgcccagggcgatctcataaacttatatttcgcccgaggaatcctccatcttctcccaattgttgcgggagagagcacctcg

SEQ ID NO: 31946 - DNA, 727 bp, Macaca Mulatta
  misc_feature (1)...(727): n = A,T,C or G
ggactctgaagtctctcaacaaccagattgagacccttcttactcctgaaggctctagaaagaacccagctcgcacatgccgtgacttgagactcagccacccagagtggagcagcggttactactggattgaccctaaccaaggatgcactatggatgctatcaaagtatactgtgatttctctactggcgaaaactgtatccngggcccaacctgaaaacatcccagcccaaaaactggtatagggagctcctaaggacaaaaaaacacgtctgggctagggagaaaactaatcaatgctgggcagcccaggtttgaaatacatgggtaaaagggattggactttccaagggaaaaggggctaccccaaaatttgccctttcagggccccttggctggggccaaactaatggcccctcttcaaaaaaatttccccccttcccccnnnnnnnnnnnnnnnnnnnctttgggccaaaaaattgggggataaaaaggaaaaattggggaaacactctgaaaaaaaaggggggttaatttttcttaaaggggggcccccaaaaggaggggttgnnnnnnnnnnnnnnnnnnnnaaggggggccaaaaaacccggggggtcccccttataaaacgggggttnnnnnnnnnnnnnnnnnnnnnnnnncnnnnnnnnnnnnnnnnnnnnnnnnnnnnnnnnnnnnnnnnnnnnnnnnnnnnnnnnnttcttt

SEQ ID NO: 31947 - DNA, 196 bp, Macaca Mulatta
ttcagatcaataacccgatcttattaccgcaactcagttggtggatttttagtatttgacattaccaaccggcgatctttttgacatgtgaaagattggctagaagaagcaaaaatgtatgtacagccgtttcggattgtatttctgctagtgggacataatgtgatttagcttcacacgtcaagttacaagggaa

SEQ ID NO: 31948 - DNA, 4399 bp, Macaca Mulatta
  misc_feature (1)...(4399): n = A,T,C or G
tagctggtgatggagttctgtggtgctggttcagtgactgacctggtgaagaacacgaaaggaaacgccctgaaggaggactgtatcgcctacatctgcagggagatcctcagggnnnnnnnnnnnnnnnnnnnnnnnnnnnnnnnnnnnnnnnnnnnnnnnnnnnnnnnnnnnnnnnnnnnnnnnnnnnnnnnnnnnnnnnngtggattttggggtgagtgctcagctggaccgcaccgtgggcagacggaacactttcattgggactccctactggatggctccagaggtcatcgcctgtgatgagaaccccgatgccacctacgattacaggngagtgacatttggtctctaggaatcacagccatcgagatggcagagggagccccccnnnnnnnnnnnnnnnnnnnnnnnnnnnnnnnnnnnnnnnnnnnnnnnnnnnnnnnnnnnnnnnnnnnnnnnnnnnnnnnnnnnnnnnnnnnnnnnnnnnnnnnnnnnnnnnnnnnnnnnnnnnnnnnnnnnnnnnnnnnnnnnnnnnnnnnnnnnnnnnnnnnnnnnnnnnnnnnnnnnnnnnnnnnnnnnnnnnnnnnnnnnnnnnnnnnnnnnnnnnnnnnnnnnnnnnnnnnnnnnnnnnnnnnnnnnnnnnnnnnnnnnnnnnnnnnnnnnnnnnnnnnnnnnnnnnnnnnnnnnnnnnnnnnnnnnnnnnnnnnnnnnnnnnnnnnnnnnnnnnnnnnnnnnnnnnnnnnnnnnnnnnnnnnnnnnnnnnnnnnnnnnnnnnnnnnnnnnnnnnnnnnnnnnnnnnnnnnnnnnnnnnnnnnnnnnnnnnnnnnnnnnnnnnnnnnnnnnnnnnnnnnnnnnnnnnnnnnnnnnnnnnnnnnnnnnnnnnnnnnnnnnnnnnnnnnnnnnnnnnnnnnnnnnnnnnnnnnnnnnnnnnnnnnnnnnnnnnnnnnnnnnnnnnnnnnnnnnnnnnnnnnnnnnnnnnnnnnnnnnnnnnnnnnnnnnnnnnnnnnnnnnnnnnnnnnnnnnnnnnnnnnnnnnnnnaggaatacaagcggaagcagctggaggagcagcggcagtcagagcgtctccagaggcagctgcagcaggagcatgcctacctcaagtccctnnnnnnnnnnnnnnnnnnnnnnnnnnnnnnnnnnnnnnnnnnnnnnnnnncctgcccggggacaggaagcccctgtaccattatggtcggggcatgaatcccgctgacaaaccagcctgggcccgagaggtannnnnnnnnnnnnnnnnnnnnnnnnnnnnnnnnnnnnnnnnnnnnnnnnnnnnnnnnnnnnnnnnnnnnnnnnnnnnnnnnnnnnnnnnnnnnnnnnnnnnnnnnnnnnnnnnnnnnnnnnnnnnnnnnnnnnnnnnnnnnnnnnnnnnnnnnnnnnnnnnnnnnnnnnnnnnnnnnnnnnnnnnnnnnnnnnnnnnnnnnnnnnnnnnnnnnnnnnnnnnnnnnnnnnnnnnnnnnnnnnnnnnnnnnnnnnnnnnnnnnnnnnnnnnnnnnnnnnnnnnnnnnnnnnnnnnnnnnnnnnnnnnnnnnnnnnnnnnnnnnnnnnnnnnnnnnnnnnnnnnnnnnnnnnnnnnnnnnnnnnnnnnnnnnnnnnnnnnnnnnnnnnnnnnnnnnnnnnnnnnnnnnnnnnnnnnnnnnnnnnnnnnnnnnnnnnnnnnnnnnnnnnnnnnnnnnnnnnnnnnnnnnnnnnnnnnnnnnnnnnnnnnnnnnnnnnnnnnnnnnnnnnnnnnnnnnnnagacctcgcagcaactccgcctggcaaatctatctgcaaaggcgggcagagcggggcaccccaaagcctccagggccccctgctcagccccctggcccgcccaacgcctctagnnnnnnnnnnnnnnnnnnnnnnnnnnnnnnnnnnnnnnnnnnnnnnnnnnnnnnnnnnnnnnnnnnnnnnnnnnnnnnnnnnnnnnnnnnnnnnnnnnnnnnnnnnnnnnnnnnnnnnnnnnnnnnnnnnnnnnnnnnnnnnnnnnnnnnnnnnnnnnnnnnnnnnnnnnnnnnnnnnnnnnnnnnnnnnnnnnnnnnnnnnnnnnnnnnnnnnnnnnnnnnnnnnnnnnnnnnnnnnnnnnnnnnnnnnnnnnnnnnnnnnnnnnnnnnnnnnnnnnnnnnnnnnnnnnnnnnnnnnnnnnnnnnnnnnnnnnnnnnnnnnnnnnnnnnnnnnnnnnnnnnnnnnnnnnnnnnnnnnnnnnnnnnnnnnnnnnnnnnnnnnnnnnnnnnnnnnnnnnnnnnnnnnnnnnnnnnnnnnnnnnnnnnnnnnnnnnnnnnnnnnnnnnnnnnnnnnnnnnnnnnnnnnnnnnnnacccctgaagaggagcggaacctgctgcatgctgacagcaacgggtatacaaacctgcctgacgtggtgcagcccagccactcacccaccgagaacagcaaaggccaaagcccgccctcgaaggatgggannnnnnnnnnnnnnnnnnnnnnnnnnnnnnnnnnnnnnnnnnnnnnnnnnnnnnnnnnnnnnnnnnnnnnnnnnnnnnnnnnnnnnnnnnnnnnnnnnnnnnnnnnnnnnnnnncagccctagtgggtggagagggcactcggctcgaccagctgcagtacgacgtgaggaagggctctgtggtcaacgtgaatcccaccaacacccgggcccacagtgagacccctgagatccggaagtacaagaagcgattcaactctgagatcctgtgtgcagccctttgggnnnnnnnnnnnnnnnnnnnnnnnnnnnnnnnnnnnnnnnnnnnnnnnnnnnnnnnnnnnnnnnnnnnnnnnnnnnnnnnnnnnnnnnnnnnnnnnnnnnnnnnnnnnnnnnnnnnnnnnnnnnnnnnnnnnnnnnnnnnnnnnnnnnnnnnnnnnnnnnnnnnnnnnnnnnnnnnnnnnnnnnnnnnnnnnnnnnnnnnnnnnnnnnnnnnnnnnnnnnnnnnnnnnnnnnnnnnnnnnnnnnnnnnnnnnnnnnnnnnnnnnnnnnnnnnnnnnnnnnnnnnnnnnnnnnnnnnnnnnnnnnnnnnnnnnnnnnnnnnnnnnnnnnnnnnnnnnnnnnnnnnnnnnnnnnnnnnnnnnnnnnnnnnnnnnnnnnnnnnnnnnnnnnnnnnnnnnnnnnnnnnnnnnnnnnnnnnnnnnnnnnnnnnnnnnnnnnnnnnnnnnnnnnnnnnnnnnnnnnnnnnnnnnnnnnnnnnnnnnnnnnnnnnnnnnnnnnnnnnnnnnnnnnnnnnnnnnnnnnnnnnnnnnnnnnnnnnnnnnnnnnnnnnnnnnnnnnnnnnnnnnnnnnnnnnnnnnnnnnnnnnnnnnnnnnnnnnnnnnnnnnnnnnnnnnnnnnnnnnnnnnnnnnnnnnnnnnnnnnnnnnnnnnnnnnnnnnnnnnnnnnnnnnnnnnnnnnnnnnnnnnnnnnnnnnnnnnnnnnnnnnnnnnnnnnnnnnnnnnnnnnnnnnnnnnnnnnnnnnnnnnnnnnnnnnnnnnnnnnnnnnnnnnnnnnnnnnnnnnnnnnnnnnnnnnnnnnnnnnnnnnnnnnnnnnnnnnnnnnnnnnnnnnaggtgttttttgcctcagtccgctctgggggcagcagccaagtttacttcatgactctgaaccgtaactgcatcatgaactggtgacggggccctgggctggggctgtcccacactggacccagctctccccctgcagccaggcttcctgggccgcccctctttcccctccctgggcttttgcttttactggtttgattcactggagcctgctgggaacgtgacctctgacccctgatgctttcgtgatcacgtgaccatcctcttccccaacatgtcctcttcccaaaactgtgcctgtccccagcttccggggagggacacagcttccccttcccaggaattgagtgggcatagccccttcccccttttctccatttaagaggagagtgcttggggcttgaaccccttaccccattgctgctgactgggcagggccctggacccctttatttgcacgtcaggggagccggctccccccttgaatgtaccagaccctggggggggtcactgggccctagatttttggggggtcaccagccactccaggggcagggaccatttcttcattttctgaaagcactttaatgattcccctttccccaaactccagggaatggaggggggaccccgccagccaaaacgttcccccctttcccaacccccatctcctcctcttctagcccatgcccttccccgtggagggagggagcagggagccctcactctccacgccccttgcttgcatctgtatatagtgtgagcagcaagtaaccctcctcctccctccccc

SEQ ID NO: 31949 - DNA, 978 bp, Macaca Mulatta
  misc_feature (1)...(978): n = A,T,C or G
gacgaggctggttcattatcccgaactcaggttatccgcccacctctgcccctgnnnnnnnnnnnnnnnnnnnnnnntccaccgtacctggccagttactctctacagatagctgtagacatcattttgggaagttttgcagtctggcatttgtgctgttgttcattctctgtgaaggttgttcatagttgctgtagcctctgtctggttttgtgatttcatcaatcccatctttctgtgtgagtaacgcatcctaaacatcctaccccactttagaaactgacttggggaaagcttggtcatttaagccaacaataaatttgggtgaatgtccctaagtgtttactgtttttacccagtcaaggatttgcttttccttgaacatttggtttaaattctggggccaaaatgcaaaggagaagttctattcaaaggcagttgtcgaaatctattattttagttagcctacttggcatttactacatcggtcacttctccaggctgccctaaattaggttggtggagtgagacatgccaaacatccacctttgggaccacagcatagttaaaattaaatgtagttggaatagctagcattgcagctgtctagttccctacagaaaacccaaggagtgaagggacaggattttgcttaggcaaaaatctaagactcatgttcttaccctcctggtacatgtggttttgagactgaatgtgtaataggagcactggctttgccaaatcaatgactgacaggttactagaaatgtgacattccttttctcttagtcaatattcgttttccaattnagcttgtaaatctgggacggggcgaaaacgtgtctcggcgacagtttccgaagaaaaggcgaatcttagttggcaatagaaggaaacagtccgactgttatcggcgactcataagtttctttctttttcctctgcttcgtatattttctctcttctgtctgatacaac

SEQ ID NO: 31950 - DNA, 322 bp, Macaca Mulatta
aaaatttactttactagggtaacatgttcactttccagaagtgattggaatttggacaacatttaacttaagcttcaagcagctttttatgagtttgtagcaatccggtgcagtaactgagccatttcctattttaaatggcttctatagaaaattaacaactcagttattaaactagcaggatcctacaatgatacatctagtgaaagtagacttagttaacttatttatttctattttatgtttcactgagagaagtttccatctcattccagctgctttatttatctttttcatggaactttgcatggatttctttttt

SEQ ID NO: 31951 - DNA, 313 bp, Macaca Mulatta
caggcggctgcagcaagcagaccttcgcatcaacacagcagacaccaaaaaggagttagggccccgctctctaccacacggccctggcactcgctagctttcctgacatctggaactatgcacctggcaccaagcggaaaataaactccaagcagccagtacccgatggtgtgttcctgaactgtgcggcccgaggttccgtttgagtgtgagaaatggctgaatccctcctgacctcactccctgatgggggctggccctgctcccaggccttcctgggcctcctcactctgtgaggccgctgctgggactg

SEQ ID NO: 31952 - DNA, 850 bp, Macaca Mulatta
  misc_feature (1)...(850): n = A,T,C or G
gggaaaccaagaaggatttctatgaacccactcatgggggcaaggtcttgagcatggcccctggcctcacctctgtggaaatcattccattccgagtggctgcctacaacaaagccaaaaaagccatggacttctatgatccagcaaggcacaatgagtttgacttcatctcaggaactcgtatgaggaagctcgcccgggaaggagagaatcctccagacggcttcatggcccccaaagcatggaaggtcctgacagattattacaggtccctggagaagaactaatgcctttggctccagagtttctttctgaagtgctctttgattaccttttctatttttatgattagatgctttgtattaaattgcttctcaatgatgcattttaatcttttataatgaagtaaaagttgtgtctataatttaaatacacacacatacacacatacacaaagtcaaactgaagaccaaatcttagcaggtgaaagcaatattcttatacatttcagaataaaaatagctccatggaattttcaactggatctgaaccaggcaggtcccaaattttcttaaagcttttgaccatgtggtctaggttacttggatgaaaaaattgaatatatttttcccagcatgggctttggcccaacctgccactctttaaccaatgtccattttatccagttaataaaaacctattcagaattaagcatccctctttctgggacaatttgnnnnnnnnnnnnnnnnnnncacggcccaaagaagcngaaacaatgggtggggcgcccttcgggccccttcgagaaaactttttcttaaaacatttcctttttgggcccccgcgg

SEQ ID NO: 31953 - DNA, 474 bp, Macaca Mulatta
ccctggtgtttctagcactggcctgcacggtaggccttgctggggatggggagccccagtcggcctctctcccagtctacccagagaagccccttccccatgggaagatgaggccctcgggcccagcccccacagtgctgtctgatctgtgctttccagctcaccccccacactcactcctgagacctctggcctccggcatcagcctccagcctctgttcccctagtaagtgccttccttgtcggcctctaaccccaggccctgaggacccagacccggtggggagatgtacgttccagctggcatggctgggagctgcagacctgccctggtgggtccaggggccccttcagcttgtggaccccaccctggggtgctgcctgcccgtctctctcccagggagccccagccctctttgggcccagggacgccggccaggctctgtgctgaccgtcctgttccacccagccctg

SEQ ID NO: 31954 - DNA, 875 bp, Macaca Mulatta
  misc_feature (1)...(875): n = A,T,C or G
ggggctttgcagacgctgccgccgaggaaagtcctgtactactagccatgggcaaccctaccgtgttcttcgacattgccgtcgacggcgagcctttgggccgcgtctccttcgagctgtttgcagacaaggttccaaagacagcagaaaattttcgtgctctgagcactggagagaaaggatttggttataagggttcctgctttcacagaattattccagggtttatgtgtcagggtggtgacttcacacgccataatggcactggtggcaagtccatctatggggagaaatttgaagatgagaacttcattctaaagcatacaggtcctggcatcttgtccatggcaaatgctggacccaacacaaatggttcccagtttttcatctgccctgccaagactgagtggttggatggcaagcatgtggcctttggcaaggggaagaaaggcatgagtattgtggaggggcctgaccgctcctgggcccggaatggcgcgacccgcggagaaaaccacctttggtcactgcggaccgcccggagtaattcccgctgtgcggtgttccccgcgccggcccgtaccgccccgccccttggtgggtgcgccaggacccggcgtggccgggtccgatttgcgctccgcgccatccctaccccccgctcccgtggcccggtgcccttgcgccgccgcctgtttgcgggtgccggagcgccgttgtgcggtggcccgccgtgcgcggtggccagccagggtgcgggtgccgcgcgcctgccggagccgcgcccgtgggcttgtgcgcgcgcagcagcggtgccttgccgctggcccccggcntggtgccacgtgtgtcgctgtcgcgccggctgtcccgtc

SEQ ID NO: 31955 - DNA, 1229 bp, Macaca Mulatta
  misc_feature (1)...(1229): n = A,T,C or G
ggtgttcttctctatgggcctccaggctgtggtaaaacgttgattgccaaggccactgccaaagaagcaggctgtcgatttattaaccttcagccttcgacactgaccgacaagtggtnnnnnnnnnnnnnnnnnnnnnnnnnnnnnnnnnnnnnnnnnnnnnnnnnnnnnnnnnnnnnnnnnnnnnnnnnnnnnnnnnnnnnnnnnnnnnnnnnnnnnnnnnnnnnnnnnnnnnnnnnnnnnnnnnnnnnnnnnnnnnnnnnnnnnnnnnnnnnnnnnnnnnnnnnnnnnnnnnnnnnnnnnnnnnnnnnnnnnnnnnnnnnnnnnnnnnnnnnnnnnnnnnnnnnnnnnnnnnnnnnnnnnnnnnnnnnnnnnnnnnnnnnnnnnnnnnnnnnnnnnnnnnnnnnnnnnnnnnnnnnnnnnnnnnnnnnnnnnnnnnnnnnnnnnnnnnnnnnnnnnnnnnnnnnnnnnnnnnnnnnnnnnnnnnnnnnnnnnnnnnnnnnnnnnnnnnnnnnnnnnnnnnnnnnnnnnnnnnnnnnnnnnnnnnnnnnnnnnnnnnnnnnnnnnnnnnnnnnnnnnnnnagccatgatgaagatgaaattcggcctgttcaacagcaggacctgcatcgggcaattgaaaagatgaagaaatcaaagtgatgcagcaatttcagaatgttttaacacatgtttgtttagattaagagtaaagatcatttgtacagttcagtgatctagtttggtgtgtcctcttatcagtcagtggaaatagaatggaaagagtgctcttgaaacaatgagggagctcaatgtttatggttttatactctgaattctaagttattgagatatagttgttacataagtggtattactgtttgtcaaaaatcatgaggaggaacagttgaatccagcctgaatgtgggtgcttgtgtttgacctcttcagccatatattgtacagccttataaaatctaagctggtcttacagtcataaatgattcattgggtcattagtgagaaatggggatgtggttaggtgctggttcctagacatgtgagtatgnnnnnnnnnnnnnnnnnnnnnnnnnnnnatattaaatgtatatatccacacattttatattgacattctgtagatacgtttgaatacagaaaccttttttaccccaactactgaatccaggagtaccaaataatatatagtaaaactaagatttaaggtt

SEQ ID NO: 31956 - DNA, 871 bp, Macaca Mulatta
  misc_feature (1)...(871): n = A,T,C or G
ggttgttgcttacttgcctttcccaggcagaagtggccagtgtttgggttgaaaggatccgggaacattcagcgatttatgatagcatttgcttcattatgtcaagttcaacaaatgnnnnnnnnnnnnnnnnnnnnnnnnnnnnnnnnnnnnnnnnnnnnnnnnnnnnnnnnnnnnnnnnnnnnnnnnnnnnnnnnnnnnnnnnnnnnnnnnnnnnnnnnnnnnnnnnnnnnnnnnnnnnnnnnnnnnnnnnnnnnnnnnnnnnnnnnnnnnnnnnnnnnnnnnnnnnnnnnnnnnnnnnnnnnnnnnnnnnnnnnnnnnnnnnnnnnnnnnnnnnnnnnnnnnnnnnnnnnnnnnnnnnnnnnnnnnnnnnnnnnnnnnnnnnnnnnnnnnnnnnnnnnnnnnnnnnnnnnnnnnnnnnnnnnnnnnnnnnnnnnnnnnnnnnnnnnnnnnnnnnnnnnnnnnnnnnnnnnnnnnnnnnnnnnnnnnnnnnnnnnnnnnnnnnnnnnnnnnnnnnnnnnnnnnnnnnnnnnnnnnnnnnnnnnnnnnnnnnnnnnnnnnnnnnnnnnnnnnnnnnnnnnnnnnnnnnnnnnnnnnnnnnnnnnnnnnnnnnnnnnnnnnnnnnnnnnnnnnnnnnnnnnnnnnnnnnnnnnnnnnnnnnnnnnnnnnnnnnnnnnnnnnnnnnnnnnnnnnnnnnnnnnnnnnnnnnnnnnnnnnnnnnnnnnnnnnnnnnnnnnnnnnnnnnnnnnnnnnnnnnnnnnnnnnnnnnnnnnnaggagacggtggctcagggagtaaaggaaggccaattgagcaaacagaagtgttcctctgcatttcaaaaccttcttcctttctatagccctgtggt

SEQ ID NO: 31957 - DNA, 181 bp, Macaca Mulatta
gattgtctgtgattggacagactatgatgaacgaatgaagaagttggtcagtattgtggctgaccagttagagaagaataggttgccttctgtgcatcctcatcatagtatgctatatcctctttctcatggcttcaggaaggctattgctgagaggcatggcaacctgtgcttagataag

SEQ ID NO: 31958 - DNA, 623 bp, Macaca Mulatta
tactggcagaaatcccaccctccttttttaagggaagggaaaccagactttcctaagaaagtaataagaacctacttcaagataattcctaactcaagttacactcaagcttacaactttcctgagcttaaaaggacttagttaccttcccacttaaactaaagacaaacaatctttctttggtaaggaaaggagtactaaagtgccagagtcctaagacccaattataacattccaagaatcagactccaccattcaactgagcctagagtgagttttccactacctgtatttgatcttgaccctctcctgagtccttcttcctgagggtagccagtcttattctaagcaattatgtcatcaacatgactagtgtctgttttatattgcagctcttagagaccttcaagatatatggaaactcacttgtattctagaaaacttgagtctaaaatttttgccaggaaatacttcaaatctacatatggcaggaagaataaaagtgatgaaagcttctagtggttggatttaaatgtcagctcagtcatactcttgggtttctcaaaatctaaccttgaggttgaatattgtgatgcctatctagtcatcttgtggttttctat

SEQ ID NO: 31959 - DNA, 252 bp, Macaca Mulatta
agaagaagcgctgcaagtacaaaattgaaaaaattgagaccataaagcctgcagaaccattgcaccccatagccaatggagacataaaaggaagaaagccctttacgaaccagagagatttttctaatataggagaagtttatcactcttcttataaaggtcctccatctgaaggaagctcagaaacttcatcacagtcagaagagtcctatttttgtggcatttcagcgaacacaagtctgtgcaatggac

SEQ ID NO: 31960 - DNA, 120 bp, Macaca Mulatta
gggttgataacagcagaagatagaagagttggtacaacaaatcttcatttagatgtgtctgatgctgttaatgtgatggtgtatgttgggattcccatcggggagggtgctcatgatgaa

SEQ ID NO: 31961 - DNA, 128 bp, Macaca Mulatta
gaggaaggtacaaagcctgagaagctgaaggtatttcagtgtgttgtatattactcacttgaaaaagcaggctcatcaaacacaggtgagtttcaacacatcttgaatatggcaacatttaaaagtct

SEQ ID NO: 31962 - DNA, 1539 bp, Macaca Mulatta
  misc_feature (1)...(1539): n = A,T,C or G
agtgtttgagaacagcagcaagatcgtgatcgtcatggagtatgccagccggggcgacctttatgactacatcnnnnnnnnnnnnnnnnnnnnnnnnnnnnnnnnnnnnnnnnnnnnnnnnnnnnnnnnnnnnnnnnnnnnnnnnnnnnnnnnnnnnnnnnnnnnnnnnnnnnnnnnnnnnnnnnnnnnnnnnnnnnnnnnnnnnnnnnnnnnnnnnnnnnnnnnnnnnnnnnnnnnnnnnnnnnnnnnnnnnnnnnnnnnnnnnnnnnnnnnnnnnnnnnnnnnnnnnnnnnnnnnnnnnnnnnnnnnnnnnnnnnnnnnnnnnnnnnnnnnnnnnnnnnnnnnnnnnnnnnnnnnnnnnnnnnnnnnnnnnnnnnnnnnnnnnnnnnnnnnnnnnnnnnnnnnnnnnnnnnnnnnnnnnnnnnnnnnnnnnnnnnnnnnnnnnnnnnnnnnnnnnnnnnnnnnnnnnnnnnnnnnnnnnnnnnnnnnnnnnnnnnnnnnnnnnnnnnnnnnnnnnnnnnnnnnnnnnnnnnnnnnnnnnnnnnnnnnnnnnnnnnnnnnnnnnnnnnnnnnnnnnnnnnnnnnnnnnnnnnnnnnnnnnnnnnnnnnnnnnnnnnnnnnnnnnnnnnnnnnnnnnnnnnnnnnnnnnnnnnnnnnnnnnnnnnnnnnnnnnnnnnnnnnnnnnnnnnnnnnnnnnnnnnnnnnnnnnnnnnnnnnnnnnnnnnnnnnnnnnnnnnnnnnnnnnnnnnnnnnnnnnnnnnnnnnnnnnnnnnnnnnnnnnnnnnnnnnnnnnnnnnnnnnnnnnnnnnnnnnnnnnnnnnnnnnnnnnnnnnngcccctcgccctggcaagagcatcctcaagctgccgaagggcattctcaagaagaaggtgtcagcctctgcagagggggcacagggggaccttcaggagctcagcccgatccttgcgagcccagggcaggctccccccctgctccccaagaagggcatcctcaagaaaccccgacagcgcgagtctggctactactcctcccccgagcccagtgaatctggggagctcttggatgcaggtgacgtgtttgtgagcggggatcccaaggagcagaagcccccgcaagcctcagggctgctcctccatcgcaaaggtatcctcaaactcaacggcaagttctcccgggcaaccttggagctcgcggccccctccaccttcggctccttggatgaactcgccccacctcgccccctggcccaggccagccgaccctcaggggctgtgagcgaggacagcatcctgtcctctgagtcctttgaacagctggacttgcctgaacggctcccagagcccccgctgcggggctgtgtgtctgtggacaacctcatggggcttgaggagcccccctctgagggccctggaagctgcctgaggcgctggcggcaggatcctttgggggacagctgcttttccctgacggactgccaggaggtgacagcgacctaccgacaggcactgagggtctggtcaaagctcacctgagtg

SEQ ID NO: 31963 - DNA, 1097 bp, Macaca Mulatta
  misc_feature (1)...(1097): n = A,T,C or G
ttccgcaaggcagcggctggggagcttcaggaggacagcgggctgtgcgtgctggcccgcctctctgtgatcgatgtctccagtgagggcgtcaagggagccaagagtttcttcgaggccaaggnnnnnnnnnnnnnnnnnnnnnnnnnnnnnnnnnnnnnnnnnnnnnnnnnnnnnnnnnnnnnnnnnnnnnnnnnnnnnnnnnnnnnnnnnnnnnnnnnnnnnnnnnnnnnnnnnnnnnnnnnnnnnnnnnnnnnnnnnnnnnnnnnnnnnnnnnnnnnnnnnnnnnnnnnnnnnnnnnnnnnnnnnnnnnnnnnnnnnnnnnnnnnnnnnnnnnnnnnnnnnnnnnnnnnnnnnnnnnnnnnnnnnnnnnnnnnnnnnnnnnnnnnnnnnnnnnnnnnnnnnnnnnnnnnnnnnnnnnnnnnnnnnnnnnnnnnnnnnnnnnnnnnnnnnnnnnnnnnnnnnnnnnnnnnnnnnnnnnnnnnnnnnnnnnnnnnnnnnnnnnnnnnnnnnnnnnnnnnnnnnnnnnnnnnnnnnnnnnnnnnnnnnnnnnnnnnnnnnnnnnnnnnnnnnnnnnnnnnnnnnnnnnnnnnnnnnnnnnnnnnnnnnnnnnnnnnnnnnnnnnnnnnnnnnnnnnnnnnnnnnnnnnnnnnnnnnnnnnnnnnnnnncctggggccccctgccagccccttcccagactgagagacagcaggagagagaatcagggctgccctcacagagtgggacccaaggggcttattggaggcacgaggggacccctccccaggggctcttcctccgcctctgcctcttccatctactgaaatgggagagggggtggggagcttctgttctggtgaagggacctaggcccccagcaccccatgctgacttggagacccccagatctctggggccagccagacagcgtgtgggggcagctgtgccaatctacttcttacgcccaccccctgccgggcatgccgtgggatcctgggcagggaaggctctgggggtcggagacaccgctccttagcacccacgcagaacaccctgagggtcccagggggctctggagagagtggggtgggaggaa

SEQ ID NO: 31964 - DNA, 433 bp, Macaca Mulatta
  misc_feature (1)...(433): n = A,T,C or G
acctgtcactggagttcccaatgggtcccgctgcccctacagcacgacaacccctgcccgccccaccctcctgatcctgctgtggacgtggcncttttaacacacccatggctctgccccgctgctcagagatggtgcccggcacggccgactgcaacatcactgccgactccgatgtgtacccacaggcagacgcggtcatcgtgcaccaccgggatatcatgtacgaccccagtgccgacctcccgccccccaccaggccgcaggggcagcgctggatctggttaagcatggagtctcccagcaactgccggcatctgcaagccctagacgtattcttcaatctcaccatgtcctaccgcagcgactccgacatcttcacgccctacggctggctggagccgtggtccgtccagcctgcccacccaccgct

SEQ ID NO: 31965 - DNA, 344 bp, Macaca Mulatta
  misc_feature (1)...(344): n = A,T,C or G
cttgccacgatgagcgagtcatttgactgtgcaacatgtaacgagtccctgtatggacgcaagtacatccagacagacagcggcccctactgtgtgccctgctatgacaatacctttgccaacacctgcgccgagtgccagcagcttatcgggcatgactcgagggnggagctgttctatgaagaccgccatttccacgaaggctgcttccgctgctgccgctgccagcgttcactagccgatgaacccttcacctgccaggacagtgagctgctctgcaatgactgctactgcagtgcgttttcctcgcagtgctccgcctgtggggaaactgtcatgcctgg

SEQ ID NO: 31966 - DNA, 616 bp, Macaca Mulatta
tggccaaacccaaaaataaatatagtgttattgctctgcagggcttagaggcagtgctctcctaccccctgaggaggctggatgggagctgatggggaagctctggccaccccaggggtccaggggctggagcctgcttggagttattgcttcaaggggggggcactaatgcccaatgcaaatgatgagaggaggagcgaaggggtatgggcctttgctctccaagtcccactctgctctgaagagggggtaggattaagcagcagcaaaagcatcacccactgggagactgtggcctccatccccttccctccctgagataggcttctgcctcccacacatcccctgcagccccctatggcttccgcaaggccccctacactctgggggcacgttatggcttgcaaggggcagcactgtgcccagagtctggacacacgttcccagcttctgacaccccctaggaggggggaggggagggcgtggggcctgttcccaggggctgatggcattgccctggccttgccagcaggctgtggcactgaccagaccccagctccgccccagcccttggggctgaccccatggtaggcaggtcctgccagaacccccacca

SEQ ID NO: 31967 - DNA, 677 bp, Macaca Mulatta
gaatgaacctagtgatcgagaagatggcctcaccaaaggacatcatgtgacagactctgagaatgatgagcccataaatcttaatgctagtgactctgaaagtgaggaccttcataggcaaaaggacagcgactctgaatctgaggaacgtgcagagcctcccgcaagcgattctgaaaatgaggatgtcaatcagcacgggagcgactctgagagtgaagagaccaggaaattgcctgggagtgactctgaaaatgaggagcttcttaatgggcatgcaagtgactcagaaaatgaagatgttgggaagcaccccgccagtgattctgagattgaggagctccagaagagtcctgctagtgactctgaaacagaagatgctctaaaacctcaaatcagtgactctgagagtgaggaacccccaaggcaccaagccagtgactccgaaaatgaggagcctcccaaacctcgaatgagtgattctgaaagtgaggagcttcctaaacctcaggtcagtgattcggaaagtgaggaaccccccaggcaccaggccagtgactctgaaaacgaggagctccccaaacctcgtatcagtgactccgaaagtgaaaagctccgaggcaccaggccactgactcagaaaatgaagagcttcccaaaccccgaatcagtgattc

SEQ ID NO: 31968 - DNA, 136 bp, Macaca Mulatta
gatcgctgtcgttctgcccttgggagtaggatgtggtgaaaggatggggcttctcccttacggggctcacaatggccagagaagattcggtgaagtgtctgcgctgcctgctctacgccctcaatctgctcttttg

SEQ ID NO: 31969 - DNA, 488 bp, Macaca Mulatta
  misc_feature (1)...(488): n = A,T,C or G
tcttatcatttatagtgtagggataattgcagcatccttcagactggcagaaggatgacataagttatgagtaaaatgtcagaaaacatctagtgatctaagattcacaaggagaataaaaatgactggctggttccctttggttaaaacgaactggccagatgctgcaaggctccttgctgggattggccctctgcagccaccgtcctcacgctagggcctcaggtctcctagcaacaagttgtagcgtacgaggacggccgcggaggtgagtacctaagagtcaaattcagaatttgcaggtgcaatccagaaagtccccgcggacccagaggccctgctttccaattaggcctgaccctatgcacagagaggtccctgcgggacagggtcgcttcacagaggcagccgaccgaggctgctcacgccccgctgtagtggtgtgtggttgcccanccagtcaccgccccctcgagctcccaccacca

SEQ ID NO: 31970 - DNA, 873 bp, Macaca Mulatta
  misc_feature (1)...(873): n = A,T,C or G
ggggctgtaggcctgagtggttgctgccgaaatgggcaagttcatgaaacctgggaaggtggtgcttgtcctggctggacgctactctggacgcaaagccgtcatcgtgaagaacattgatgatggcacctcagatcgcccctacagccatgctctggtggctggaattgaccgctacccccgcaaagtgacagctgccatgggcaagaagaagatcgccaagaggtcaaagatcaagtcttttgtgaaagtttataactacaatcacctaatgcccacaaggtactctgtggatatccccttggacaaaactgttgtcaataaagatgtcttcagagatcctgctcttaaacgcaaggcccgacgagaggccaaggtcaagtttgaagagagatacaagacaggcaagaacaagtggttcttccagaagctgcggttttagatgctttgttttggtccttaacgatgngagggacgacgcagggaggaaaagccgtgtcgggccgcctccggccctcannnnnnnnnnnnnnnnnnncttccgttttggccccgcgggccccataaggtaagggaaacctgggcccttacctggtttccctaggaaaatcctgggccatgaattaaggccttgggattctccccccactaaaaaacacgccccgggcgggcaaaaccggaaaggcttcttaagacacaatccaaaaatggaaagttcctgaagggccattaacctgggaatcgtttacaacccggggaactcccagccgcgaccctccaattttccgcaatctacacccccccgcccctgtggccaattctaattccgaaagtaaattggctcggaagctcgccctctaacgcatttcgcca

SEQ ID NO: 31971 - DNA, 282 bp, Macaca Mulatta
cttgccacacaagctaatattctaatggtaaatttctctgtatttggtggggaaatgtgctgaaggacagtatgtatcccttgcttcatttttaggtcgtaggtttggaatgttttgtcccagttcttcaaacactcttaaatttttcctaagtaatgtaaaaatggaactgccaattttatttctcttgcaaaaatagtaaatacttggtgttacattattcccaggtttaatgaaagaacccaacttagtttttcagtgagtttgacacctgttttttaa

SEQ ID NO: 31972 - DNA, 574 bp, Macaca Mulatta
  misc_feature (1)...(574): n = A,T,C or G
gtccatgtacttttatttgcatatcataagtctcctgataatactatttctgccaatgaaaccacaagctcatacgcaaaggcggcctcagactgtgaactctatcaataagagaaaaacagattgatacctccaagagaagcggacaagcagaactgcagaactttcgaaagatgagatgacaaggctcaaagggtcctccggtgacttagaggcgatgtttacatgcatctatggtttgttcttttttaaagtgcaggnnnnnnnnnnnnnnnnnnnnnnnnnnnnnnnnnnngagacggagtctcgctctgtcgcccaggctggagtgcagtggccggatctcagctcactgcaagctccgcctcccgggttcgggccattctcctgtctcagcctcctgagtagctgggactacaggcgcccgccaccactcccggctaatttttttgtatttttagtagagacggggtttcaccatgttagccaggatggtctcgatctcctgacctcacgatccgcctgcctcggcctcccaaagtgctgggattacaggcgtgagccaccacgcccg

SEQ ID NO: 31973 - DNA, 719 bp, Macaca Mulatta
  misc_feature (1)...(719): n = A,T,C or G
caagtggtagtgactccagcagattaattacattttaaggaacactctttccttttttttcctcttcccnnnnnnnnnnnnnnnnnnnnnnnnnnnncttnnnnnnnnnnnnnnnnnnnnnnnatttttctccccaaccatcgtgatttgtcttttcatgcagattagctagaattcactgccaggtttcttctgcccgccaaaatgatccagtctgtaataacatnnnnnnnnnnnnnnnnnnnnnnnnnnnnnnnnnnnnnnnnnnnnnnnnnnnnnnnnnnnnnnnnnnnnnnnnnnnnnnnnnnnnnnnnnnnnnnnnnnnnnnnnnnnnnnnnnnnnnnnnnnnnnnnnnnnnnnnnnnnnnnnnnnnnnnnnnnnnnnnnnnnnnnnnnnnnnnnnnnnnnnnnnnnnnnnnnnnnnnnnnnnnnnnnnnnnnnnnnnnnnnnnnnnnnnnnnnnnnnnnnnnnnnnnnnnnnnnnnnnnnnnnnnnnnnnnnnnnnnnnnnnnnnnnnnnnnnnnnnnnnnnnnnnnnnnnnnnnnnnnnnnnnnnnnnnnnnnnnnnnnnnnnnnnnnnnnnnnnnnnnnnnnnnnnnnnnnnnnnnnnnnnnnnnnnnnnnnnnnnnnnnnnnnnnnnnnnnnnnnnnnnnnnnnnnnnnnnnnnnnnnnnnnnnnnnnnnnnnnnnnnnnnnnnnnnnnnnnnnnnnnnnnnnnnnnnc

SEQ ID NO: 31974 - DNA, 632 bp, Macaca Mulatta
tggtggtgggtagcatcacaagaaaccagcctgaaaatcaggtccagccagtccaagcacatggcctcccatctgggagagcccactgtcccactccacatgtctgggcacctgccctgggctgaggccaggctgctccaggggcctcttgagccctcacctgccacacagcaacccaggttaaatacagcccatgcacaaagccacaggccaaagcctatggaattgtttttaatcatcaaatttcaccatgtttatagctggttcctggaggtgtgcagtgccctcttgcctcttcaaacctacagcttctctttgccatttgtggatttcacgtcactccacatagaagcgttacagcctggcatccccagtctttgccttcttccagctgcctcgacagcactgcggcctgtccctattgcccaggcacgccatttccaagggcaggaaggagcagtgtcctgaagcccatcttctctgtgactgtcttaggtgatgtgtagccccctccatctttccactcaacaatttctcacccctgtcctgctgcatggtccggagtctgggacctacttcgttttttgttatttatgaccttgtttaaagaaaataaatatctcccaaccttt

SEQ ID NO: 31975 - DNA, 763 bp, Macaca Mulatta
  misc_feature (1)...(763): n = A,T,C or G
ggaagcatggcnnnnnnnnnnnnnnnnnnnnnnnnnnnnnncacttttaaataatccattgaggtttggggactgttatctacattgattctattaggattagtggacagaatgactccaaagattctcagaaccctgtcacttgaagctcagtcttatttgggttcatcactgaaaacttagaacaagtcagtaaagagtcctgtattgaagaattaagtttgagtttaagcccactcactgcagggctggtttttgcatgtaatactcccatgacatctggggaaatgacagtttctgttgaattataatactccggtttgagggtctccttcccctggtgtctgatgacgagaggtctgaagagcatttgtcagcatgcattaccctttctcaacctgcttcgtgctttacgagagctcagaaatcagatgcaccagcctttcttattatatatgccacatctgttgagtatttttaaaatacctagaagaggacttgtttatttcataaaccacttcttccctctctttcaaagaaaatacattattaccatactttttacatttagtctcagaaattttttgcttaaatatgaattaaattatttccaaaataataaattggccatccgtcaatttaattccttttttttagaagaataaataccatcctgaaaggaattggtgtttaagtttcctccaaaaaccaaaggggaattcatttctaaaccccccccctggccaaccccacagaaaaagat

SEQ ID NO: 31976 - DNA, 271 bp, Macaca Mulatta
  misc_feature (1)...(271): n = A,T,C or G
gcagtctgttcctgagagcgccgtgttaaagaaagtctctggtgttcttcgtgggaactgggccatgctggaagnnaggctctgctggtgcggacgccaacttcagcagtctctacaaggccacgttcgacaacatgacctcctacctgaagaagaaagaggagagactgcagcagcagctggagaagaagcagcggcgccggagtcccccgcccgggcccaacggacaggccaagaagatgaggcccggggaggcgaccttgagttgctg

SEQ ID NO: 31977 - DNA, 276 bp, Macaca Mulatta
ttcctctccttgacgagcaaagggaaatatgtgctctccatgtgaaggaggcggacctggtgacaatgcccagttcattcttcccaaacagacctgtcagattaatcccaccaggagaagaagtcccaaggacagggagaagccaggagtactctgttcaaggggctttcttaccacagagggcacagcagccatgggaggaagcatcccccaactccatagcctgattcaagatctcagatgatgttgccgggctcaccccactccacttcctcc

SEQ ID NO: 31978 - DNA, 432 bp, Macaca Mulatta
  misc_feature (1)...(432): n = A,T,C or G
gcagggcatggagggaatcaaagtgtttctccatgaaagagaactgtggctgaaattccacgaagtgggcacggaaatgatcataaccaaggctgnnnnnnnnnnnnnnnnnnnnnnnnnnnnnnnnnnnnnnnnnnnnnnnnnnnnnnnnnnnnnnnnnnnnnnnnnnnnnnnnnnnnnnnnnnnnnnnnnnnnnnnnnnnnnnnnnnnnnnnnnnnnnnnnnnnnnnnnnnnnnnnnnnnnnnnnnnnnnnnnnnnnnnnnnnnnnnnnnnnnnnnnnnnnnnnnnnnnnnnnnnnnnnnnnnnnnnnnnnnnnnnnnnnnnnnnnnnnnnnnnnnnnnnnnnnnnnnnnnnnnnnnnnnnnnnnattattctaaattccatgcacaaataccagcccagattacacatcggaaagcggagaaaataatg

SEQ ID NO: 31979 - DNA, 814 bp, Macaca Mulatta
  misc_feature (1)...(814): n = A,T,C or G
aaagagaagtggagtttctttgctttcggtttcggttccattaagaagaggctggttgtttaaaaaaagagccttgggccaggccccgggcgccagtgggcttcatgttctgtaattcccagccactttggaaagggctgaacgcaagttgaatcaccttgaggtttgggagtttcaagaacagccttganccaacatggagaaaaccccacgnnnnnnnnnnnnnnnnnnnnnnnnnnnnnnntgtggtggcannnnnnnnnnnnnnnnnnnnnnnnnaggctgagggcatgagaattgcttgaacnnnnnnnnnnnnnnnnnnnnnnnnnnnnnnnnggnnnnnnnnnnnnnnccctgggcaacacagcaatgctctatctcagnnnnnnnnnnnnnnnnnngagctggaatctcctcccctctctcttgctccctttctcaccatgcgactgcctccccttccccttctgacataagtgaaagcttcctgaggcctcaccagaggcagatgctggcaccatgcttattgtacagtctgcagaacagtgagccaaaataaacctcttttctttataaattacccagtctcagatattcctttatagcaatgcaaaatggactaacagtacataagtttgggagtgttaattagaatagaaattaaatatgctgaaactcaaaggaagatgaaattgttagggaagacatatgcgttaatgtagtgaggcttgaattagatgtttggaagaaatgagggaggtttctgaggctgctggtgaccttaccattgagaacacctacgcttctcccc

SEQ ID NO: 31980 - DNA, 339 bp, Macaca Mulatta
gggggtctgactgcatagtcccagccattatgtgatatttcacgttattgatgatagtgaactgtgggtctgaagctgattcaacggagacaggaaacaaagtctctgtggtctgttgggtcatacttcctggtttcactgagtggcccaacactgggactgggttggtgtcccctccgctgacaggacctactcctaggagcagagtggttgattgtgaaggcagtgttcccttctctccgttgactaggagagagctgggggacacgcatgcggaagaagcccgtggggagaaggtggcttgctagtgtgctggctggtttttcagggctgttggag

SEQ ID NO: 31981 - DNA, 796 bp, Macaca Mulatta
  misc_feature (1)...(796): n = A,T,C or G
ggggccatttatgctgacacgccatccttccacaaacatacaggaatgtgctttcaattgatggactactctgttttttgcaaatttgtaaactttgcttctccaaataccagtactaggttggccatttatgatacctatttggtgctagtaaattttcaaactagatttataaatgcactgtaatatttacacaacttagaaaccaaattacaagtattcagttccaatacttcattaatttcaatcaaccaaagttagttcagtagcttatctcagttatgagtataatacattacatgtaaattaagtgtgtgtatactgtaatcgtgctattttttatcattgaaacatttataaactagaataataatgcccttaatgtgagggtttgtaatggtgcttattaagaccaaagacttgttaaatgtatacaccaaatggtaatgaaatttctgtgactggcccacgcgtgcatagaggtctgggaggaccaggaaacagcctcagtggccagaggatcaccagtgcatccttcatcacagcatgtgcaatatgccaagattaccctcggtcattcctgtcaacaaggggtcaatgtcataaatgtcacaatanaacaatctcttnctttttttttagtttacccccttggctttgtgttcttgcatggatttggggttggaagggccattctggatgctaaataaagtctcctgggannnnnnnnnnnnnnnnnnnnnnnnnnnnnnnnnnnnnnnnnnnnnnnnnnnnnnnnnnnnnnnnnnnnnttaan

SEQ ID NO: 31982 - DNA, 773 bp, Macaca Mulatta
  misc_feature (1)...(773): n = A,T,C or G
gggaggagaatggcgtgaaccccggaggcannnnnnnnnnnnnnnnnnnnnngcgccatggaactccagcctggataaggcgccttcaccccagaagttccaacctgtgccttatatcctgaagaaaattttccaggatcgcgaggcagcagcgaccactggggtctcccgagacttatgctacgtaaaggagctgggcgtccgtgggaatgtacttcgctttctcccagaccaaggtttctttctttacccaaagaaattttcccaagcttcctcctgcctgcaaaagctgctctactttaacctgtctgccatcaaagaaagagaacagttgacactggcccagctgggcctggacttggggcccaattcttactataacctgggaccagagctggaactggctctgttcctggttcaagagcctcatgtgtggggccagaccacccctaagccgggtaaaatgtttgtgttgcggtcagtcccatggccacaaggtgctgttcacttcaacctgctggatgtagctaaggattggaatgacaacccccagaaaaactttgggttattcctggagatactggtcaaagaagacagagactctggggtgaattttcagcctgaggacacctgtgccagactgagacgctcccttcatgcttccctgctggtggtggccctcaaccctgatgagtggccccccttctcgnganaaggganagcagccattccctgtcccccaaggttttcnttgtangaaacctcctgcccac

SEQ ID NO: 31983 - DNA, 239 bp, Macaca Mulatta
tcttcaatgggcaacctgctcggcggggtcagcttccgcgagcccaccaccgtggaggactgcgactccacctggcagaccgactcggagcccgagcccgaggagccagggccgggcggcggcagcgagggcccggggcaggagcccgagcagcccgcgcagcccccggagcgagccggcgggcggtcccactccagccccgcgccggacgaggacgccgaggcggcgggcgccgagca

SEQ ID NO: 31984 - DNA, 987 bp, Macaca Mulatta
  misc_feature (1)...(987): n = A,T,C or G
atccgcacggtccctggccacgagttcctgctgcagtccgaccacgagacagagctgcgagcctggcaccgcgcgctgcggactgtcatcgagcggctggttagaggagtgcaggctgggagggaggctcgggccggccgggaccaagggagtggggnggatcgggagaaccccctggagctgcgtctgtcgggctctggacccgcggagctggcggagctgagcgccggggaggacgaagaagaggagtcggagccggtgtccaaaccgctgctgcgcctcagcagccgccggagctccanttcgggggcccgaaggcaccgagcagaaccgcgtgcgcaacaaactaaagcggctcatcgcaaagagaccgcccttacaaagcctgcaggagcggggtctgctccgagnnnnnnnnnnnnnnnnnnnnnnnnnnnnnnnnnnnnnnnnnnnnnnnnnnnnnnnnnnnnnnnnnnnnnnnnnnnnnnnnnnnnnnnnnnnnnnnnnnnnnnnnnnnnnnnnnnnnnnnnnnnnnnnnnnnnnnnnnnnnnnnnnnnnnnnnnnnnnnnnnnnnnnnnnnnnnnnnnnnnnnnnnnnnnnnnnnnnnnnnnnnnnnnnnnnnnnnnnnnnnnnnnnnnnnnnnnnnnnnnnnnnnnnnnnnnnnnnnnnnnnnnnnnnnnnnnnnnnnnnnnnnnnnnnnnnnnnnnnnnnnnnnnnnnnnnnnnnnnnnnnnnnnnnnnnnnnnnnnnnnnnnnnnnnnnnnnnnnnnnnnnnnnnnnnnnnnnnnnnnnnnnnnnnnnnnnnnnnnnnnnnnnnnnnnnnnnnnnnnnnnnnnnnnnnnnnnnnnnnnnnnnnnnnnnnnnnnnnnnnnnnnnnnnnagggtgatagcacactcagataagaatcgcatgactccccacaaactgggaattgtgtttggaccaaccctgtttcggccagagcaggagacatctgacccagcagcc

SEQ ID NO: 31985 - DNA, 235 bp, Macaca Mulatta
  misc_feature (1)...(235): n = A,T,C or G
gagacagctgaaggtgtagacttgacaactgaaagggaaatcttcatcctctgacaaaagatacgtgattctccaaaaacgcatctggaaaataactgaagagattctgtagattctcccagtgctgttagactctcagttccttctgtgaaggacagcgtatggtgatgaggaaatcagaagctttgagaccctctatacctagatatgaatccccctgctaatacttaccagn

SEQ ID NO: 31986 - DNA, 178 bp, Macaca Mulatta
agaaagtaactcatgacatggacatgtgctatgggatgatgggaagcctgtttcgcagtggctcccggcagaccctttttgccagtcaagtgatgcgttacgctgacctctatgcagcatctttcatcaacctgctgtattacccattcagctacctcttcagggctgcccatgtctt

SEQ ID NO: 31987 - DNA, 658 bp, Macaca Mulatta
tgtattggaagcaaagcctcaaagcacgatgaacacctgtagaggagcaggcaacccagttgcagatttgaagaggcatgtggaattccttgtggcagagaaagaaaggttgaggaaagaaagtgtgaacaggtaaaggctgaaaagaccagacttctaaaaggtccagtagaaaaggagctgaatgcgggtgctgattttgtagaaaagtcagttacggagcgtgcctctgcattcggaaaccgctacaccctcttcagccttgcagaggtttgcagcagatgccaggaaagtcaagtacgttccagtacccgatcttctccctcggattttccatctccagagcgtccccttacagagctctctcaggatattctgaaaggatttatgagtaattaaaatggaaggccatagaagaagggagaagaggaaatagtactaaataatacagttaatgcagcaacaaacaatgaaaagggaaagccacaggccaagggtaatgctggaaatgcctcgtcatctggcgtactgtgggagaagaggcattgccaggacatggggaacagtcactgtgaagcgtgtcgcatatcggattcactgacttgagctaatgatgccgacgtggcagacactaaactcatggagggtcagtttctcc

SEQ ID NO: 31988 - DNA, 1197 bp, Macaca Mulatta
  misc_feature (1)...(1197): n = A,T,C or G
ngcgtatagctggcattacagccatgttacagcagtcactggaaggcctcctattagaaggccttcagacgtctgatgtcgacataatacggcactgcttgcggacttacgccacgattgacaagacacgggacgcggaggccttagttggccaagtactagtgaaaccatacatagacgaggnnnnnnnnnnnnnnnnnnnnnnnnnnnnnnnnnnnnnnnnnnnnnnnnnnnnnnnnnnnnnnnnnnnnnnnnnnnnnnnnnnnnnnnnnnnnnnnnnnnnnnnnnnnnnnnnnnnnnnnnnnnnnnnnnnnnnnnnnnnnnnnnnnnnnnnnnnnnnnnnnnnnnnnnnnnnnnnnnnnnnnnnnnnnnnnnnnnnnnnnnnnnnnnnnnnnnnnnnnnnnnnnnnnnnnnnnnnnnnnnnnnnnnnnnnnnnnnnnnnnnnnnnnnnnnnnnnnnnnnnnnnnnnnnnnnnnnnnnnnnnnnnnnnnnnnnnnnnnnnnnnnnnnnnnnnnnnnnnnnnnnnnnnnnnnnnnnnnnnnnnnnnnnnnnnnnnnnnnnnnnnnnnnnnnnnnnnnnnnnnnnnnnnnnnnnnnnnnnnnnnnnnnnnnnnnnnnnnnnnnnnnnnnnnnnnnnnnnnnnnnnnnnnnnnnnnnnnnnnnnnnnnnnnnnnnnnnnnnnnnnnnnnnnnnnnnnnnnnnnnnnnnnnnnnnnnnnnnnnnnnnnnnnnnnnnnnnnnnnnnnnnnnnnnnnnnnnnnnnnnnnnnnnnnnnnnnnnnnnnnnngctttcactcaggcccatttctaatgaaagtcccaaggagatcaagaaacctttggtaactggtagcaaagaaccttccatcacccaaggaaacactgaagaccaaggaagtggtccttcagaaacaaagcctgtggtttccatttcccgcactcagctcctgtatgtggttgcagacctggacaagcttcaggagcagnnnnnnnnnnnnnnnnnnnnnnnnnnnnnnnnnnnnnnnnnnnnnnnnnnnnnnnnnnnnnnnnnnnnnncagcagccctggaggactcccagagctctttgtcagcctgtgtgccctccttgagtagcaagatcatccaggatttaagtgactcttgcttcagtttcctaaaaagcgcgctggaggttcccaggctttaccgaagaaccaat

SEQ ID NO: 31989 - DNA, 503 bp, Macaca Mulatta
  misc_feature (1)...(503): n = A,T,C or G
cgaggggagcgagaggcgcggagagtttggaagctagacccagaaatccccggagcgcggcagactcggcggccggaggggcgaccccgcccgatgtaacgcaccccgcccgagccccggcccctgcannnnnnnnnnnnnnnnnnnnnnnnnnnnnnnnnnnnnnnnnnnnnnnnnnnnnnnnnnnnnnnnnnnnnnnnnnnnnnnnnnnnnnnnnnnnnnnnnnnnnnnnnnnnnnnnnnnnnnnnnnnnnnnnnnnnnnnnnnnnnnnnnnnnnnnnnnnnnnnnnnnnnnnnnnnnnnnnnnnnnnnnnnnnnnnnnnnnnnnnnnnnnnnnnnnnnnnnnnnnnnnnnnnnnnnnnnnnnnnnnnnnnnnnnnnnnnnnnnnnnnnnnnnnnnnnnnngttatcaatgccctgtctcagagatatttccttcaagccaatgaccagaaagatatgaaggactgggttgaagccctgaaccaagctagcaagatcaccg

SEQ ID NO: 31990 - DNA, 417 bp, Macaca Mulatta
  misc_feature (1)...(417): n = A,T,C or G
taggcgcgcaaggccggagacgctgcagacccgcgacccggagcagctcagaggcggtgaaatagttcttcaagtctgcaataaaaaatggcctccaataaaactacattgnnnnnnnnnnnnnnnnnnnnnnnnnnnnnnnnnnnnnnnnnnnnnnnnnnnnnnnnnnnnnnnnnnnnnnnnnnnnnnnnnnnnnnnnnnnnnnnnnnnnnnnnnnnnnnnnnnnnnnnnnnnnnnnnnnnnnnnnnnnnnnntgctgacaatacttgggaacctgaagaaaatttagattgtccagagttgattgaagcatttcttaactctcagaaagctggcaaagaaaaagatggtacaaaaagaaaatctttatctgacagtgaatctgatgacagcaaatcaaagaagaaaagagatgct

SEQ ID NO: 31991 - DNA, 350 bp, Macaca Mulatta
ccgtccggtgtatcaggtgagggggcagtagtgctgcccacaattcatgaccatattaactacaacacctacaaaccagcacatggggcccactggacagaaaacagcctggggaactctctgcaccccacagtcaccactatctctgaaccttatataattcagacccataccaaggacaaggtacaggaaactcaaatatgactcccctcccccaaaaacttataaaatgcaatagaatgcacacaaagacagcaacttttgtacagagtggggagagactttttcttgtatatgcttatatattaaatctatgggctggttaaaacagattatattaaaatttaaaa

SEQ ID NO: 31992 - DNA, 294 bp, Macaca Mulatta
ctattgttagaaatatcacctcctcctatgagtcataggtaagcctccacctggcacctgcccccaaacccaaacatgaagaatatgaaaggctctgaccacccactccatgcccacacacacccctagggtctgccacatacccaagccacgtacccaattccttccatttctagtttaagtgattcatgccttgattccacacacattcattaattacccactaagtggtcaagacatgctcaaattctgactccataatctcacccccattatatattgcttttgatatag

SEQ ID NO: 31993 - DNA, 338 bp, Macaca Mulatta
  misc_feature (1)...(338): n = A,T,C or G
agggcataacacaaatgtaggagcaattgtattccatcccaaatctactgtctccttggaccaaaaagatgtcaacctggcctcttgtgcggctgatggctctgtgaagctttggagtctcgacannnnnnnnnnnnnnnnnnnnnnnnnnnnnnnnnnnnnnnnnnnnnnnnnnnnnnnnnnnnnnnnnnnnnnnnnnnnnnnnnnnnnnnnngctatgaccgttcatggcgattatgggatttggaggctcaagaggagatcctgcatcaggaaggccacagcatgggtgtgtatgacattgccttccatcaagatggctctttggctggcactgg

SEQ ID NO: 31994 - DNA, 802 bp, Macaca Mulatta
ccaaaggagcagaaaaaactttttgttctgttcttgttcttctacattttgaccatggtgggcaacctgctcattgtagtgacggtcactgtcagtgagaccctgggctcaccaatgtacttctttcttactggcttgtcatttatagatatcatttattcttcatccatttcccccagactgatttcagacttgttctttgggaataattccatatctttccaatcttgcatggcccagctctttacagagcacctttttggcgggtcagaggtctttctcctgttggtgatggcctatgaccgctatgtggccatctgtaagcccttgcattatttggttatcatgagacaatgggtgtgtgttgtgctgctggtagtgtcctgggttggaggatttctgcactcagtatttcaactaagcattatttatgggctcccattctgtggccctaatgtcattgatcattttttctgtgatatgtaccctttattgaaactggtctgtactgacacccatgttattggccttttagtggtggccaatggaggactggcttgcactattgtgtttctgctcttactcatctcttatggtgtcatctttcactctctcaagaacgttagtcagaaagggaggcgaaaggccctctcaacctgcagttcccacatcactgtggttgtcttcttctttgttccctgtatttttatatatgctagacctgctgggaccttccccattgataaatcagtgagtgtgttttatacagtcataactccaatgctaaaccccttaatctaca

SEQ ID NO: 31995 - DNA, 229 bp, Macaca Mulatta
gagatattcatggacaatatacggatttactgagattatttgaatatggaggtttcccaccagaagccaactatcttttcttaggagactatgtggacagaggaaagcagtctttggaaaccatttgtttgctattggcttataaaatcaaatatccagagaacttctttctcttaagaggaaaccatgagtgtgctagcatcaatcgcatttatggattctatgatga

SEQ ID NO: 31996 - DNA, 2603 bp, Macaca Mulatta
  misc_feature (1)...(2603): n = A,T,C or G
agatctcttgtggaagaggaagaccaacacatgaaattgtcccttggaggcagtgaaatgggcctctcatcccatttgcagtcttccaaggcaggacctacacgcatctttaccagcaatacccacagttctgtggtgttacagnnnnnnnnnnnnnnnnnnnnnnnnnnnnnnnnnnnnnnnnnnnnnnnnnnnnnnnnnnnnnnnnnnnnnnnnnnnnnnnnnnnnnnnnnnnnnnnnnnnnnnnnnnnnnnnnnnnnnnnnnnnnnnnnnnggtggaatgaaagaacaagatttaatgtgcattaaacttcatggtgtgagcaaagttggtctaaggaaaattattgatttcatttatactgcaaaactttctcttaatatggacaaccttcaagacacgctggaagctgccagttttctacagattctgccagttttggacttctgtaaagtatttctcatatctggggtnnnnnnnnnnnnnnnnnnnnnnnnnnnnnnnnnnnnnnnnnnnnnnnnnnnnnnnnnnnnnnnnnnnnnnnnnnnnnnnnnnnnnnnnnnnnnnnnnnnnnnnnnnnnnnnnnnnnnnnnnnnnnnnnnnnnnnnnnnnnnnnnnnnnnnnnnnnnnnnnnnnnnnnnnnnnnnnnnnnnnnnnnnnnnnnnnnnnnnnnnnnnnnnnnnnnnnnnnnnnnnnnnnnnnnnnnnnnnnnnnnnnnnnnnnnnnnnnnnnnnnnnnnnnnnnnnnnnnnnnnnnnnnnnnnnnnnnnnnnnnnnnnnnnnnnnnnnnnnnnnnnnnnnnnnnnnnnnnnnnnnnnnnnnnnnnnnnnnnnnnnnnnnnnnnnnnnnnnnnnnnnnnnnnnnnnnnnnnnnnnnnnnnnnnnnnnnnnnnnnnnnnnnnnnnnnnnnnnnnnnnnnnnnnnnnnnnnnnnnnnnnnnnnnnnnnnnnnnnnnnnnnnnnnnnnnnnnnnnnnnnnnnnnnnnnnnnnnnnnnnnnnnnnnnnnnnnnnnnnnnnnnnnnnnnnnnnnnnnnnnnnnnnnnnnnnnnnnnnnnnnnnnnnnnnnnnnnnnnnnnnnnnnnnnnnnnnnnnnnnnnnnnnnnnnnnnnnnnnnnnnnnnnnnnnnnnnnnnnnnnnnnnnnnnnnnnnnnnnnnnnnnnnnnnnnnnnnnnnnnnnnnnnnnnnnnnnnnnnnnnnnnnnnnnnnnnnnnnnnnnnnnnnnnnnnnnnnnnnnnnnnnnnnnnnnnnnnnnnnnnnnnnnnnnnnnnnnnnnnnnnnnnnnnnnnnnnnnnnnnnnnnnnnnnnnnnnnnnnnnnnnnnnnnnnnnnnnnnnnnnnnnnnnnnnnnnnnnnnnnnnnnnnnnnnnnnnnnnnnnnnnnnnnnnnnnnnnnnnnnnnnnnnnnnnnnnnnnnnnnnnnnnnnnnnnnnnnnnnnnnnnnnnnnnnnnnnnnnnnnnnnnnnnnnnnnnnnnnnnnnnnnnnnnnnnnnnnnnnnnnnnnnnnnnnnnnnnnnnnnnnnnnnnnnnnnnnnnnnnnnnnnnnnnnnnnnnnnnnnnnnnnnnnnnnnnnnnnnnnnnnnnnnnnnnnnnnnnnnnnnnnnnnnnnnnnnnnnnnnnnnnnnnnnnnnnnnnnnnnnnnnnnnnnnnnnnnnnnnnnnnnnnnnnnnnnnnnnnnnnnnnnnnnnnnnnnnnnnnnnnnnnnnnnnnnnnnnnnnnnnnnnnnnnnnnnnnnnngtgatgttggggtcgctgtctttgaaaataaaatctatgtggttggggggtattcttggaataatcgttgtatggtagagatagtgcagaaatatgatccagataaagatgaatggcataaggtttttgatctcccagaatcccttggcggcattcgtgcttgcacactcacagtttttccaccagaagaaaccacaccatcaccttctagagagtcccctctttctgcaccttaagatcatctctacaactaagatgctgtagttctatctttgcaatgtgtcataaattctcttctttttcccccttaagtagtatatatgttaggattagcctccagtaattgatacagatattggaaaaaagacaacattgatgttatttgtgctgtttgtttggcctagagtgtttataaagtggtaacacaaccattctggaaatgtatcccatagaagctgatgtttaacatatgaaaaaaaagtatcgtctataaaatgtttcttcagtactttttaaatgctgtgtattgggtgtaaggtatttgtcatcttgcattagtaaacccaataagccaagttgaaggtggattatagtaaatgtacaactgtgctcactaggcttcaaagtaaaagttttcctttcatctttgactgtaagatgtcaaagggaggcagcctgcttgaacaggaaacaatacacaaaaggttgccaactcgcatgagctacctccctcttttcataaagtatttttgacatatctgtcaacccacttgactgtgtgggtgcattgggaacacaaagtttcttagacacacaggagaaatagcttaaattcactaatattaatttaaaaagcagcatgaaccctctac

SEQ ID NO: 31997 - DNA, 2022 bp, Macaca Mulatta
  misc_feature (1)...(2022): n = A,T,C or G
ggttcccagcaggatgccccggctctgcaggaagctgaagtgagaggcccggagagggcccnnnnnnnnnnnnnnnnnnnnnnnnnnnnnnnnnnnnnnnnnnnnnnnnnnnnnnnnnnnnnnnnnnnnnnnnnnnnnnnnnnnnnnnnnnnnnnnnnnnnnnnnnnnnnnnnnnnnnnnnnnnnnnnnnnnnnnnnnnnnnnnnnnnnnnnnnnnnnnnnnnnnnnnnnnnnnnnnnnnnnnnnnnnnnnnnnnnnnnnnnnnnnnnnnnnnnnnnnnnnnnnnnnnnnnnnnnnnnnnnnnnnnnnnnnnnnnnnnnnnnnnnnnnnnnnnnnnnnnnnnnnnnnnnnnnnnnnnnnnnnnnnnnnnnnnnnnnnnnnnnnnnnnnnnnnnnnnnnnnnnnnnnnnnnnnnnnnnnnnnnnnnnnnnnnnnnnnnnnnnnnnnnnnnnnnnnnnnnnnnnnnnnnnnnnnnnnnnnnnnnnnnnnnnnnnnnnnnnnnnnnnnnnnnnnnnnnnnnnnnnnnnnnnnnnnnnnnnnnnnnnnnnnnnnnnnnnnnnnnnnnnnnnnnnnnnnnnnnnnnnnnnnnnnnnnnnnnnnnnnnnnnnnnnnnnnnnnnnnnnnnnnnnnnnnnnnnnnnnnnnnnnnnnnnnnnnnnnnnnnnnnnnnnnnnnnnnnnnnnnnnnnnnnnnnnnnnnnnnnnnnnnnnnnnnnnnnnnnnnnnnnnnnnnnnnnnnnnnnnnnnnnnnnnnnnnnnnnnnnnnnnnnnnnnnnnnnnnnnnnnnnnnnnnnnnnnnnnnnnnnnnnnnnnnnnnnnnnnnnnnnnnnnnnnnnnnnnnnnnnnnnnnnnnnnnnnnnnnnnnnnnnnnnnnnnnnnnnnnnnnnnnnnnnnnnnnnnnnnnnnnnnnnnnnnnnnnnnnnnnnnnnnnnnnnnnnnnnnnnnnnnnnnnnnnnnnnnnnnnnnnnnnnnnnnnnnnnnnnnnnnnnnnnnnnnnnnnnnnnnnnnnnnnnnnnnnnnnnnnnnnnnnnnnnnnnnnnnnnnnnnnnnnnnnnnnnnnnnnnnnnnnnnnnnnnnnnnnnnnnnnnnnnnnnnnnnnnnnnnnnnnnnnnnnnnnnnnnnnnnnnnnnnnnnnnnnnnnnnnnnnnnnnnnnnnnnnnnnnnnnnnnnnnnnnnnnnnnnnnnnnnnnnnnnnnnnnnnnnnnnnnnnnnnnnnnnnnnnnnnnnnnnnnnnnnnnnnnnnnnnnnnnnnnnnnnnnnnnnnnnnnnnnnnnnnnnnnnnnnnnnnnnnnnnnnnnnnnnnnnnnnnnnnnnnnnnnnnnnnnnnnnnnnnnnnnnnnnnnnnnnnnnnnnnnnnnnnnnnnnnnnnnnnnnnnnnnnnnnnnnnnnnnnnnnnnnnnnnnnnnnnnnnnnnnnnnnnnnnnnnnnnnnnnnnnnnnnnnnnnnnnnnnnnnnnnnnnnnnnnnnnnnnnnnnnnnnnnnnnnnnnnnnnnnnnnnnnnnnnnnnnnnnnnnnnnnnnnnnnnnnnnnnnnnnnnnnnnnnnnnnnnnnnnnnnnnnnnnnnnnnnnnnnnnnnnnnnnnnnnnnnnnnnnnnnnnnnnnnnnnnnnnnnnnnnnnnnnnnnnnnnnnnnnnnnnnnnnnnnnnnnnnnnnnnnnnnnnnnnnnnnnnnnnnnnnnnnnnnnnnnnnnnnnnnnnnnnnnnnnnnnnnnnnnnnnnnnnnnnnnnnnnnnnnnnnnnnnnnnnnnnnnnnnnnnnnnnnnnnnnnnnnnnnnnnnnnnnnnnnnnnnnnnnnnnnnnnnnnnnnnnnnnnnnnnnnnnnnnnnnnnnnnnnnnnnnnnnnnnnnnnnnnnnnnnnnnnnnnnnnnnnnnnnnnnnnnnnnnnnnnnnnnnnnnnnnnnnnnnnnaggccgggtgggtgattcaggcaggtaattgtagcactttgggaggcgcaggcaggaagatcgcttgacgtcaggaatttgagacctggccaacatggtgaaaccctgtttctactaaaa

SEQ ID NO: 31998 - DNA, 828 bp, Macaca Mulatta
  misc_feature (1)...(828): n = A,T,C or G
ggggaactcggtggtggccactgctcagaccagacttcgctcgttttcgtgcgcctcgctccgcttttcctccgcaaccatgtctgacaaacccgatatggctgagatcgagaaattcgataagtcgaaactgaagaagacagagacgcaagagaaaaatccactgccttccaaagaaacgattgaacaggagaagcaagcaggcgaatcgtaatgaggcgtgcgccgccaatatgcactgtacattccacaagcattgccttcttattttacttcttttagctgtttaactttgtaagatgcaaagaggttggatcaagtttaaatgactgtgctgcccctttcacatcaaagaactactgacaacgaaggccgcgcctgcctttcccatctgtctatctggctggcagggaaggaaagaacttgcatgttggtgaaggaagaagtggggtggaagaagtgggggtgggacgacagtgaaatctagagtaaaaccaagctggcccaaggtgtcctgcaggctgtaatgcagtttaatcagagtgccattttttttttgttcaaatgattttaattatcggaatgcacaatttttttaatatgcaaattaaaaagtttaaaaacccttctaacacaaaatataaaaaaataatataaaataacctggtcggcccgccctcggcccctccaagaaacttttctaaaacccatttcttttttggggcccgccgggcccccattagggtaaatgaaacattggttagacggttttcctaggaaaatccctggtcgtggactagggnnnnnnnnnnnnnnnnnnnnntaaac

SEQ ID NO: 31999 - DNA, 764 bp, Macaca Mulatta
ccaataaccaccccgtgggcatattccaccttttttgtttattgaaggaaattcccaatttttaaaaagggacattccccttttttttatggccaccaattaaataaaaaagaattccttcaatttggccaaggagtattttggcaggggagggaggtcacccacatatagtactaattagggagagaaattgtacaattaaagccctgtgaaccagtcaaatcaatcattccacttttagaaactgtctcaagaacataattaagcatgtacctcaaaatgtacaaggacattcactctgccactgcttgtagtaataagctgcagataatcaaaatgtctaacagaaaaaaatgagtaaattatggcaaacttttcttatgggaaggcagtgggcttccaattccattctccacacctagcttagcttttcttttcaacagagtccacttctaacagactaaaaatgtcagacattgcctttctctgtaatctgatctaagtcaatggaaactgaggggaaatcttccggaggtttttgttaaaagtcttcttcatggataaaacaaatgagagaatggccttttctgcctttgagatacaattttacgaagatgtaaaagtgaagtaatagcagcagctcttgtgattgagaggtggattagcctaaggcaaaacaaaccaactgaggtcaaggcaaaaaaaagtgtgtctttaatgacaccactgaaccctgtgttatgttaaacaatgtcctaggttcc

SEQ ID NO: 32000 - DNA, 1034 bp, Macaca Mulatta
  misc_feature (1)...(1034): n = A,T,C or G
tcttatctttgtcaacaagtgttcgtttgggtgcaaagtggaactcgaggttctgaaggggctcatgcagagcccccagcccatgctgctgggcctcctgggccagtttctggtcatgcccttgtacgctttcctcatggccaaagtcttcatgctgcccaaggccctggctctgggcctcatcattacctgctcatcgcctggcggcggagggagctacctcttcagcctccttcttggaggggacgtcaccctggccatctccatgactttcatctctacggtggctgccactggtttcttgcctctgtcttcagccatctacagccacctgctcagcatccatgaaacactccacgtgcccatctccaaaatcctgggcaccctgctgttcatcgccatccccatagcagtgggcgtgctgatcaagtccaagctccccaagttctcccagctgctgctgcaggtcatcaagcccttcagctttgtgtaatcctgggcggccnnnnnnnnnnnnnnnnnnnnnnnnnnnnnnnnnnnnnnnnnnnnnnnnnnnnnnnnnnnnnnnnnnnnnnnnnnnnnnnnnnnnnnnnnnnnnnnnnnnnnnnnnnnnnnnnnnnnnnnnnnnnnnnnnnnnnnnnnnnnnnnnnnnnnnnnnnnnnnnnnnnnnnnnnnnnnnnnnnnnnnnnnnnnnnnnnnnnnnnnnnnnnnnnnnnnnnnnnnnnnnnnnnnnnnnnnnnnnnnnnnnnnnnnnnnnnnnnnnnnnnnnnnnnnnnnnnnnnnnnnnnnnnnnnnnnnnnnnnnnnnnnnnnnnnnnnnnnnnnnnnnnnnnnnnnnnnnnnnnnnnnnnnnnnnnnnnnnnnnnnnnnnnnnnnnnnnnnnnnnnnnnnnnnnnnnnnnnnnnnnnnnnnnnnnnnnnnnnnnnnnnnnnnnnnnnnnnnnnnnnnnnnnnnnnnnnnnnnnnnnnagaggccatgctgagttaggtaggtgggcgctgcccagaaaatatatttcaataaaacagagaagca

SEQ ID NO: 32001 - DNA, 2743 bp, Macaca Mulatta
  misc_feature (1)...(2743): n = A,T,C or G
gtgatgtcttggcattgcccattttcaagcaggaagattccagccttccattggatggtgaaacagagcacccaccctttcagtatgtgatgtgtgccgcaacgtcgccagcagtaaaactgcatgatgaaacgcttacttatttgaaccaaggtnnnnnnnnnnnnnnnnnnnnnnnnnnnnnnnnnnnnnnnnnnnnnnnnnnnnnnnnnnnnnnnnnnnnnnnnnnnnnnnnnnnnnnnnnnnnnnnnnnnnnnnnnnnnnnnnnnnnnnnnnnnnnnnnnnnnnnnnnnnnnnnnnnnnnnnnnnnnnnnnnnnnnnnnnnnnnnnnnnnnnnnnnnnnnnnnnnnnnnnnnnnnnnnnnnnnnnnnnnnnnnnnnnnnnnnnnnnnnnnnnnnnnnnnnnnnnnnnnnnnnnnnnnnnnnnnnnnnnnnnnnnnnnnnnnnnnnnnnnnnnnnnnnnnnnnnnnnnnnnnnnnnnnnnnnnnnnnnnnnnnnnnnnnnnnnnnnnnnnnnnnnnnnnnnnnnnnnnnnnnnnnnnnnnnnnnnnnnnnnnnnnnnnnnnnnnnnnnnnnnnnnnnnnnnnnnnnnnnnnnnnnnnnnnnnnnnnnnnnnnnnnnnnnnnnnnnnnnnnnnnnnnnnnnnnnnnnnnnnnnnnnnnnnnnnnnnnnnnnnnnnnnnnnnnnnnnnnnnnnnnnnnnnnnnnnnnnnnnnnnnnnnnnnnnnnnnnnnnnnnnnnnnnnnnnnnnnnnnnnnnnnnnnnnnnnnnnnnnnnnnnnnnnnnnnnnnnnnnnnnnnnnnnnnnnnnnnnnnnnnnnnnnnnnnnnnnnnnnnnnnnnnnnnnnnnnnnnnnnnnnnnnnnnnnnnnnnnnnnnnnnnnnnnnnnnnnnnnnnnnnnnnnnnnnnnnnnnnnnnnnnnnnnnnnnnnnnnnnnnnnnnnnnnnnnnnnnnnnnnnnnnnnnnnnnnnnnnnnnnnnnnnnnnnnnnnnnnnnnnnnnnnnnnnnnnnnnnnnnnnnnnnnnnnnnnnnnnnnnnnnnnnnnnnnnnnnnnnnnnnnnnnnnnnnnnnnnnnnnnnnnnnnnnnnnnnnnnnnnnnnnnnnnnnnnnnnnnnnnnnnnnnnnnnnnnnnnnnnnnnnnnnnnnnnnnnnnnnnnnnnnnnnnnnnnnnnnnnnnnnnnnnnnnnnnnnnnnnnnnnnnnnnnnnnnnnnnnnnnnnnnnnnnnnnnnnnnnnnnnnnnnnnnnnnnnnnnnnnnnnnnnnnnnnnnnnnnnnnnnnnnnnnnnnnnnnnnnnnnnnnnnnnnnnnnnnnnnnnnnnnnnnnnnnnnnnnnnnnnnnnnnnnnnnnnnnnnnnnnnnnnnnnnnnnnnnnnnnnnnnnnnnnnnnnnnnnnnnnnnnnnnnnnnnnnnnnnnnnnnnnnnnnnnnnnnnnnnnnnnnnnnnnnnnnnnnnnnnnnnnnnnnnnnnnnnnnnnnagctgaaaatagtgatggcatccacataattttgaagtgatgtcttatatagactgaactatattcagtactaaatagtcacgcttaaaagtgtgtgaagactgaatccaagaagtcttgggattggattttaccatatgaaatgtttcatattgaaaacacaagatgacctttctaacgagctgtatgagaggtgaatctcctcactgtcactgccatagccaagcaccctcatgagagtgagcacatcggcacagcatgcatccagctctggaggccacagtgcaggcatagctgcccgctgctctggcagaggccagtaaatacagttcctagaagcagcctttgctgtctttttacactgtatgcggtttggaaatgaatgtagaaacttactgtgggcatttacctttctgtgccagtttggcttttattgcctgaaccttatgctgacctggagaggagatgggggacagtgctgttttggggccagcagtgaatctgtatgcggaaagatgtgttgtgctgatgtggccgttggtggtcaggtaaaaggctcggcaccttcttggaagaaatcatgtctaagggtgtacgtttgatatgatcatgccagattggagaagatccaagccaggaagatgggcttgaagcaaactgacagtatcaggagtaccttggtgagaggatcagtgtaaatcatagtaggtacaaagacttttgtgttnnnnnnnnnnnnnnnnnnnnnnnnnnnnnnnnnnnnnnnnnnnnnnnnnnnnnnnnnnnnnnnnnnnnnnnnnnnnnnnnnnnnnnnnnnnnnnnnnnnnnnnnnnnnnnnnnnnnnnnnnnnnnnnnnnnnnnnnnnnnnnnnnnnnnnnnnnnnnnnnnnnnnnnnnnnncccaccatcctgttaaacattttttaaagccctaccccagacattggaaataggtgacccaagtagggggagaaagtattattgttgatagcttctgaataggtgttaaggaatcttcattatgaacaagatgaatttttttgtggaaacactagatgttatcaaacactaaaatgtaccatacaaatcccttaagcctctcctcaaatattgagctttagtacaatcatggatagacattctggtgatgatttaggggctttttatacaccacataatagcttctttctctataaaaagagtgcctctttcataaaaccaaatgcttgtctgctagcatacttttcaaagggaatccactgtttcctcactt

SEQ ID NO: 32002 - DNA, 535 bp, Macaca Mulatta
  misc_feature (1)...(535): n = A,T,C or G
ggagccccgcgcccacagctttggcctccgtttccatcgctgccctgtggggaatcctcctcgctgtgggctctgtgtacctgtacaagtgcctacctatgaaatcccaggcgtaaagggggatgttctatgccggctgagcaagacaaaagaggaatatggaaccatttggggaatcggccagacatggtggctgacgcctgcaatcccagcactttgggaggctgaggcaggagaatcgcttgagcccaggagttcgagaccagcctggacaacatagtgagaccccgtctatgcaaaaaatacaaaaattagccgggtgtggcggcccgcacctgtggtcccagctacccgggaggctaagttgggaggatcgcttgagccctgaaagtccaggttgcagtgagccttgatggtgccactgcactccagcctggggtacagagcaagaccctatctccnnnnnnnnnnnnnnnnnnnnnnnnnntattggcggggggaccctccagaatcaataaagacttccttaaccagc

SEQ ID NO: 32003 - DNA, 242 bp, Macaca Mulatta
aggtgcagcagctggccgacaagtaccacttccgcggccaccttttggaccaggacttcttcaccatgattggcatggagcaccccaggctcttccatgtgctggactgtacctggaaccggcagctgtgcacctggtggagggaccatggctacagtgacgtcttcgaggcctatttccggtgtgaaggccacgtcaagatctaccacgggaactgcaacactcccatcccggaggactag

SEQ ID NO: 32004 - DNA, 642 bp, Macaca Mulatta
  misc_feature (1)...(642): n = A,T,C or G
gggactcacagcagggccccatcactgtctgcttcctataccagattgttcttgatcctgaacattgctattttctttgtcatgttggcaatgcaactgacttatttccagagggcccagagcctacatggccaaagatgtctgtatgcagttcttctaatagatagctgtattttattgtggttgtactcttcttgttcccaatcacagtgttagcactgaagatataaattacctggtcattttgtgatcacaagaagctatacaaaataaaatgtctttaccccagattatcagatttttttccccttagattcattttaacaaattaagggaagatattttgacacaaaaaagcaggaacatggagaaattggagcaggcaaagaatttatcaaagcagtagaaatagcttggtggtcctatggtgtttctggaagtgtttgtcattgctaattgagcaatccatgtaggactacttttagaagaaacaaaaagtctgttttttaaagtaatgttttttcttatgagaaaaaggtttagatagaattgggttttattaatattattttatgctattagcaattcccttatactatattatggaaaagactgaagaantacattcctgagaatataaan

SEQ ID NO: 32005 - DNA, 259 bp, Macaca Mulatta
  misc_feature (1)...(259): n = A,T,C or G
aacgaagagtttcagcaccatggagagctcccgcgtgcggctgcagcccctcctgggcgccgccctgctgctgatgctacctctgttgggtacccggcaaaggaggacgccgagctccagcccnnnnnnnnnnnnnnnnnnnnnnnnnnnnnnnnnnnnnnnnnnnnnnnnnnnngatcgaagcgctgcaggaagtcttgaagaagctcaagagtaaacgtattcccatctatgagaagaagtatggccaagtccccat

SEQ ID NO: 32006 - DNA, 919 bp, Macaca Mulatta
  misc_feature (1)...(919): n = A,T,C or G
tggtgcacagggtgaccgggaccctggccgcctccagcacggccgcacagagggtctacaccacgggcaccatccgctacgcgccctccgaggtgaccctggccatgcagggcaacctgctgcccaacgcgcacgctgttaacttcgtggacgttaacagccctggcttcggcctcgaccccaagacgcccatggagatgctctaccaccacgtgcaccggctcaacatgtcaggaccgttcggcggcgcagtgagcgcagccagcctgacgcagatgcccgccggcaacgtgttcaccacggccgagggactcttctccacgctgcccttccccgtctacagcaacggcatccatgcggcacagactctggagcgcaaggaggactgaggcgccgcccgtcctgggcccggccaggccccgctcggaggaggcatcgtcggcattttcgtttagacctttaattctagcactttgaattcgagcaggtcagcgtcttctctcgccacgacggtccccattccaccccctctttctttcacctgacttattctttcgtgtaaagatatgtttattttttgccttcagagggtcagacgaccagttgcctgccgttttgtcttcttctaagatgtgtgttgggttgttttgctttcctttgcatctttattaagatgtctttcatgtgtatatgcctctgccatagaatactcagtcttgtggtcaagagagttctcaagtgacaaccattgnggtttcttcataaagatcttgatatgatcaagatgngaagagaaagcatanacaatgtgccctgtttgactagtcaaatgaatggggtggntttttgtttctggtcctaatcctttaaaaaatagggggatagtatttagaatttatgcagatttaattctctttta

SEQ ID NO: 32007 - DNA, 254 bp, Macaca Mulatta
caaaggagtttgggggaattactgtctaacgaggcagacaattcattgcaaaatgtagtggtattctgaaaggggatggaggttaagaaataacactggagattactaggatacaactggaccaattttagaatcttgctggagaatgtggctttatgatgccacttgaagaagggaggggttgggtggcatggacagatgaagtcaggtaggtccaaatcagttgggaagcttggacaaaaacctagaggtag

SEQ ID NO: 32008 - DNA, 697 bp, Macaca Mulatta
  misc_feature (1)...(697): n = A,T,C or G
ggatagttgttcattcagtgagttaatatttaacaatctgcaatatttgaagcactgtgcttcttcgacatcataacagtttgcctctgaaagctcacggcctgatcatcaaggcaaggctaattatatttgttcattatgttctgtttaagaaatctgggaagtatgtgaccatgttgtacatttttcatccaaaatgagtgcatttttacttggtacttaaaagtgtattatttggttatttgggaaatcagttttgtggaacatctcatttgctgataatgaatgccaatgacttgttaccttggnnnnnnnnnnnnnnnnnnntgtgtgttaggaagtactgtcattttacccaaaatacacagatttgaaagtttgtcactgtttctgttctcaattgtcctttctccacatctagctcaagactgcagtgcagatgacgacaacttccttgtgcccatagcagtgggagcagccttggcaggagtacttattctagtgttgctggcttattttattggtctcaagcgccatcatgctggatatgagcaattttagaatctggcaacctgatttgattattataaaaataccatgcaaaataaccaaagggtttttcttaccctcctccagtttgtttggaaaccaccttttaacttttcccttaaaaaattggaataattggtttgaaaaa

SEQ ID NO: 32009 - DNA, 2181 bp, Macaca Mulatta
  misc_feature (1)...(2181): n = A,T,C or G
tgagcccaacaaatttgtctcaatttaaccttcctgggcccagcatgatgcgctcaaacagcatcccagcccaagactcttccttcgatctctatgatgactcccagctttgtgggagtgccacttctctggaggaaagacctcgtgccatcagtcattcaggctcattcagagacagcatggaagaagnnnnnnnnnnnnnnnnnnnnnnnnnnnnnnnnnnnnnnnnnnnnnnnnnnnnnnnnnnnnnnnnnnnnnnnnnnnnnnnnnnnnnnnnnnnnnnnnnnnnnnnnnnnnnnnnnnnnnnnnnnnnnnnnnnnnnnnnnnnnnnnnnnnnnnnnnnnnnnnnnnnnnnnnnnnnnnnnnnnnnnnnnnnnnnnnnnnnnnnnnnnnnnnnnnnnnnnnnnnnnnnnnnnnnnnnnnnnnnnnnnnnnnnnnnnnnnnnnnnnnnnnnnnnnnnnnnnnnnnnnnnnnnnnnnnnnnnnnnnnnnnnnnnnnnnnnnnnnnnnnnnnnnnnnnnnnnnnnnnnnnnnngcattcctctgaaagtgtttctagtatcaacagtgccctagccattccagtattggcagtggtaatgatgctgattctaagaagaagaaaaagaagaactgggtnnnnnnnnnnnnnnnnnagctgagaagttctttcaaacaagcctttgggaagaaaaagtccaccaagcctccttcatcacattccgacattgaagagcttactgattcatcccttccagcatcacgcaagttgccccataacgctggtgactgtagctcagcaaccgtgaagccctcacaatctgcttnnnnnnnnnnnnnnnnnnnnnnnnnnnnnnnnnnnnnnnnnnnnnnnnnnnnnnnnnnnnnnnnnnnnnnnnnnnnnnnnnnnnnnnnnnnnnnnnnnnnnnnnnnnnnnnnnnnnnnnnnnnnnnnnnnnnnnnnnnnnnnnnnnnnnnnnnnnnnnnnnnnnnnnnnnnnnnnnnnnnnnnnnnnnnnnnnnnnnnnnnnnnnnnnnnnnnnnnnnnnnnnnnnnnnnnnnnnnnnnnnnnnnnnnnnnnnnnnnnnnnnnnnnnnnnnnnnnnnnnnnnnnnnnnnnnnnnnnnnnnnnnnnnnnnnnnnnnnnnnnnnnnnnnnnnnnnnnnnnnnnnnnnnnnnnnnnnnnnnnnnnnnnnnnnnnnnnnnnnnnnnnnnnnnnnnnnnnnnnnnnnnnnnnnnnnnnnnnnnnnnnnnnnnnnnnnnnnnnnnnnnnnnnnnnnnnnnnnnnnnnnnnnnnnnnnnnnnnnnnnnnnnnnnnnnnnnnnnnnnnnnnnnnnnnnnnnnnnnnnnnnnnnnnnnnnnnnnnnnnnnnnnnnnnnnnnnnnnnnnnnnnnnnnnnnnnnnnnnnnnnnnnnnnnnnnnnnnnnnnnnnnnnnnnnnnnnnnnnnnnnnnnnnnnnnnnnnnnnnnnnnnnnnnnnnnnnnnttgttggagataataacgtcatcactgtgaacctcaaaggnnnnnnnnnnnnnnnnnnnnnnnnnnnnnnnnnnnnnnnnnnnnnnnnnnnnnnnnnnnnnnnnnnnnnnnnnnnnnnnnnnnnnnnnnnnnnnnnnnnnnnnnnnnnnnnnnnnnnnnnnnnnnnnnnnnnnnnnnnnnnnnnnnnnnnnnnnnnnnnnnnnnnnnnnnnnnnnnnnnnnnnnnnnnnnnnnnnnnnnnnnnnnnnnnnnnnnnnnnnnnnnnnnnnnnnnnnnnnnnnnnnnnnnnnnnnnnnnnnnnnnnnnnnnnnnnnnnnnnnnnnnnnnnnnnnnnnnnnnnnnnnnnnnnnnnnnnnnnnnnnnnnnnnnnnnnnnnnnnnnnnnnnnnnnnnnnnnnnnnnnnnnnnnnnnnnnnnnnnnnnnnnnnnnnnnnnnnnnnnnnnnnnnnnnnnnnnnnnnnnnnnnnnnnnnnnnnnnnnnnnnnnnnnnnnnnnnnnnnnnaggtgggtattatgtgcaaatcatacagaaccagtgaaaggctttttaggcagatatcttcgaagaaaactcatagagatagaaattgaaaggaacattcgcaataatgacctagtcaaaattatagattggattcctaagacgtggcatcatctcaacagttttttggaaacacacagttcttctgacgttaccattgg

SEQ ID NO: 32010 - DNA, 957 bp, Macaca Mulatta
  misc_feature (1)...(957): n = A,T,C or G
gatttcttgcccaggggtgttcctgcctggcaagcaagatgtgtacctcggggtctacctcctgaatcagtacctggagacaaacagctttccctctgcgttccccattatgattcagcagagcatgagatttgataaggnnnnnnnnnnnnnnnnnnnnnnnnnnnnnnnnnnnnnnnnnnnnnnnnnnnnnnnnnnnnnnnnnnnnnnnnnnnnnnnnnnnnnnnnnnnnnnnnnnnnnnnnnnnnnnnnnnnnnnnnnnnnnnnnnnnnnnnnnnnnnnnnnnnnnnnnnnnnnnnnnnnnnnnnnnnnnnnnnnnnnnnnnnnnnnnnnnnnnnnnnnnnnnnnnnnnnnnnnnnnnnnnnnnnnnnnnnnnnnnnnnnnnnnnnnnnnnnnnnnnnnnnnnnnnnnnnnnnnnnnnnnnnnnnnnnnnnnnnnnnnnnnnnnnnnnnnnnnnnnnnnnnnnnnnnnnnnnnnnnnnnnnnnnnnnnnnnnnnnnnnnnnnnnnnnnnnnnnnnnnnnnnnnnnnnnnnnnnnnnnnnnnnnnnnnnnnnnnnnnnnnnnnnnnnnnnnnnnnnnnnnnnnnnnnnnnnnnnnnnnnnnnnnnnnnnnnnnnnnnnnnnnnnnnnnnnnnnnnnnnnnnnnnnnnnnnnnnnnnnnnnnnnnnnnnnnnnnnnnnnnnnnnnnnnnnnnnnnnnnnnnnnnnnnnnnnnnnnnnnnnnnnnnnnnnnnnnnnnnnnnnnnnnnnnnnnnnnnnnnnnnnnnnggttatcagagagccagatgaacggattattttaaggagtgactcatcatcacgtttagattcaagtcagtttggaaagtcctcgtccagtaaacaaggtgatgccgatttccaccggaaagcttcatttgccacctcccagcattccagctctctcggacccttggatcagccccttctcagagaaaggt

SEQ ID NO: 32011 - DNA, 514 bp, Macaca Mulatta
ccacagtgtgcttagaatttgttgttagaacatctcactttttggatggtaaggtcattcaattctaaatcaataatgagaatgcatctttgaggttttattacattatgatttcctgttttatgtttagtaaaaagcaatcagaattattgatagaaaacaatgcccacaaaaaattttgcgtgacaagcatatgtagagtaaatttcgtctatgtctaccataaagagtactgaggaatattagatttaatacaagtatgtgaatagcttagaaaaaaatctctttggtaataaagggatgaaaattcatgatcatgatcttgattgctattatcattttccatatgcagttagaaacgtcatttcttccagcttttgaattaaagaaaaactgtttttgaattgagatctgatgcaaattgttttagtatgttttctaaagcacttctaagcccccgatttgctaaatatatccttatcttccatttataaaattccttctaaacttcaga

SEQ ID NO: 32012 - DNA, 276 bp, Macaca Mulatta
ggagactcccaagccctccatttccagcagcaacttaaaccccagggaggccatggagactgtgatcttatcctgtgatcctgacactcaggacgtaagctacctgtggtggataaacggtcagagcctccctatcagtcacaagttgcagctgtccaaaaccaacaggaccctcattatatttggtgtcacaaaggatactgcaggaccctatgaatgtgaaatgaagaacccagtgagttccagccgcagtgacccagtcaccctgaatctcct

SEQ ID NO: 32013 - DNA, 97 bp, Macaca Mulatta
agattctcacggctctggatcgagatgcctcttgtcggaagcataagttacggcagaaactggaacagatcatcaacctcgtgtccagtgacagcta

SEQ ID NO: 32014 - DNA, 1675 bp, Macaca Mulatta
  misc_feature (1)...(1675): n = A,T,C or G
agagagctgtttactaggcacaactgtgaatgcgagagggcaccagctcaggactgcatcctcctgccatttcccttccactcctcctttctggagtctgacattagaaagccagcgagaaggaagattcaaataaccaaccctaatttcctgcttctccttttcattgttcctgtgggctcttcacctgctttctgnnnnnnnnnnnnnnnnnnnnnnnnnnnnnnnnnnnnnnnnnnnnnnnnnnnnnnnnnnnnnnnnnnnnnnnnnnnnnnnnnnnnnnnnnnnnnnnnnnnnnnnnnnnnnnnnnnnnnnnnnnnnnnnnnnnnnnnnnnnnnnnnnnnnnnnnnnnnnnnnnnnnnnnnnnnnnnnnnnnnnnnnnnnnnnnnnnnnnnnnnnnnnnnnnnnnnnnnnnnnnnnnnnnnnnnnnnnnnnnnnnnnnnnnnnnnnnnnnnnnnnnnnnnnnnnnnnnnnnnnnnnnnnnnnnnnnnnnnnnnnnnnnnnnnnnnnnnnnnnnnnnnnnnnnnnnnnnnnnnnnnnnnnnnnnnnnnnnnnnnnnnnnnnnnnnnnnnnnnnnnnnnnnnnnnnnnnnnnnnnnnnnnnnnnnnnnnnnnnnnnnnnnnnnnnnnnnnnnnnnnnnnnnnnnnnnnnnnnnnnnnnnnnnnnnnnnnnnnnnnnnnnnnnnnnnnnnnnnnnnnnnnnnnnnnnnnnnnnnnnnnnnnnnnnnnnnnnnnnnnnnnnnnnnnnnnnnnnnnnnnnnnnnnnnnnnnnnnnnnnnnnnnnnnnnnnnnnnnnnnnnnnnnnnnnnnnnnnnnnnnnnnnnnnnnnnnnnnnnnnnnnnnnnnnnnnnnnnnnnnnnnnnnnnnnnnnnnnnnnnnnnnnnnnnnnnnnnnnnnnnnnnnnnnnnnnnnnnnnnnnnnnnnnnnnnnnnnnnnnnnnnnnnnnnnnnnnnnnnnnnnnnnnnnnnnnnnnnnnnnnnnnnnnnnnnnnnnnnnnnnnnnnnnnnnnnnnnnnnnnnnnnnnnnnnnnnnnnnnnnnnnnnnnnnnnnnnnnnnnnnnnnnnnnnnnnnnnnnnnnnnnnnnnnnnnnnnnnnnnnnnnnnnnnnnnnnnnnnnnnnnnnnnnnnnnnnnnnnnnnnnnnnnnnnnnnnnnnnnnnnnnnnnnnnnnnnnnnnnnnnnnnnnnnnnnnnnnnnnnnnnnnnnnnnnnnnnnnnnnnnnnnnnnnnnnnnnnnnnnnnnnnnnnnnnnnnnnnnnnnnnnngtgagtgggacgccataagtcgtcactgggattccaaccccagaggtccaggagtgatctctgagtgactcaacaaagacaggacacatggagcacaaagacaagccttggttgcttcnnnnnnnnnnnnnnnnnnnnnnnnncagggcagaggcatccgctggcaaatcactcccatgatgagaccctggaggacaccaaatcctcggtgtgatcaggactggacggttgcacacatacaaatgctgccaccctccacttctcagcccggaactgggaaagacattagcacaacttaagcactggggaattgtgtgtattttccagcacctgcacattggaaaacctgtatggcaaatgattcactcatttattcctgtccaaagccacactgaaaacaaaggcagaaacatg

SEQ ID NO: 32015 - DNA, 502 bp, Macaca Mulatta
tctgcactagcctaaggccctgaccctacttccaaaacatccaagatcatggagcagggggatttcttagaaaaatcaacttaccccagctaactctccattcccgggaactaaccttcatgccgggtggccgatgtataaattcctgactcggttctttggcaatttccttccacccatatttctcctgttcacccatgtaccccaaaagtccctgaataagaatgatgctttgggggcagaataaaaaccactgccccaaaatcgcttctttctccaaacagtcccagatgacaggcacatacttcatgtctcaaagctactttcccaacccctttaatactctgggatctatgtgtttgtcacattccaagttatctttcacaagccttttaagaacaatatgcacaaaataaatggacaagaactacaaagttattctagccaatgacagtgtttatttgttaggtcctggggcctcaaggtcgaaaatccctctcaa

SEQ ID NO: 32016 - DNA, 3142 bp, Macaca Mulatta
  misc_feature (1)...(3142): n = A,T,C or G
ggctgataaagaaaatatgaagagacctgcagagagcaaaaataatacaacagtggagaaaaattgcattcctttaaaaccttcaaatgaactaaccaattcaactgtagtaattgacacgcataaatctaaggataataatcagactccgcatttgttactaactgaaggtgatccccaaagtcaacatatgacattaagtcaggcatttcaccttaaaaacaatggtaaaaagaacaaaatgactacagaaaaaccaaagcaagatgctaacgtacccaagaaacctgtgcttggtaatatcgtggccagannnnnnnnnnnnnnnnnnnnnnnnnnnnnnnnnnnnnnnnnnnnnnnnnnnnnnnnnnnnnnnnnnnnnnnnnnnnnnnnnnnnnnnnnnnnnnnnnnnnnnnnnnnnnnnnnnnnnnnnnnnnnnnnnnnnnnnnaaaagtaatagatcctccaatatggctgccactactaaatttgtgagcactacatctcagaacacgccacttgtgcgacctcctattagaagtcatcacagtaatacccaggacactgtgaaacaaggcatcagtagaacctctgccaatgttacaatccggaaagggcctcgtgaaaaagaagtattacaatcaaaaacagctttatctagtgtcaaaaccagttcttctcaaaatataataagaaataagacactatcaagatgcatagcatctgaagttgtaaccaggcctgtttcattgtctaatgataaactgatggaaaagtcaaagcctgttgaccagcgaagacatactacaggaaaagcaactgttgatagtagatcagctcagcccaaagaaacctcagaagagagaaaagctcgtctgagtgagtggaaagctggcaaaggaagagttctgaaaaggccccctaactcagtagttactcagcatgagcctgaaggacaaaatgaaaaaccagttgggtctttttggactaccatggcagaagaagatgaacaaagattatttactgaaaaagtaaacaacacattttctgaatgcctgaacttgattaatgagggatgtccaaaagaagacatactggtcacactgaaagacctgattaaaaatattccagatgccaaaaagcttgttaagtattnnnnnnnnnnnnnnnnnnnnnnnnnnnnnnnnnnnnnnnnnnnnnnnnnnnnnnnnnnnnnnnnnnnnnnnnnnnnnnnnnnnnnnnnnnnnnnnnnnnnnnnnnnnnnnnnnnnnnnnnnnnnnnnnnnnnnnnnnnnnnnnnnnnnnnnnnnnnnnnnnnnnnnnnnnnnnnnnnnnnnnnnnnnnnnnnnnnnnnnnnnnnnnnnnnnnnnnnnnnnnnnnnnnnnnnnnnnnnnnnnnnnnnnnnnnnnnnnnnnnnnnnnnnnnnnnnnnnnnnnnnnnnnnnnnnnnnnnnnnnnnnnnnnnnnnnnnnnnnnnnnnnnnnnnnnnnnnnnnnnnnnnnnnnnnnnnnnnnnnnnnnnnnnnnnnnnnnnnnnnnnnnnnnnnnnnnnnnnnnnnnnnnnnnnnnnnnnnnnnnnnnnnnnnnnnnnnnnnnnnnnnnnnnnnnnnnnnnnnnnnnnnnnnnnnnnnnnnnnnnnnnnnnnnnnnnnnnnnnnnnnnnnnnnnnnnnnnnnnnnnnnnnnnnnnnnnnnnnnnnnnnnnnnnnnnnnnnnnnnnnnnnnnnnnnnnnnnnnnnnnnnnnnnnnnnnnnnnnnnnnnnnnnnnnnnnnnnnnnnnnnnnnnnnnnnnnnnnnnnnnnnnnnnnnnnnnnnnnnnnnnnnnnnnnnnnnnnnnnnnnnnnnnnnnnnnnnnnnnnnnnnnnnnnnnnnnnnnnnnnnnnnnnnnnnnnnnnnnnnnnnnnnnnnnnnnnnnnnnnnnnnnnnnnnnnnnnnnnnnnnnnnnnnnnnnnnnnnnnnnnnnnnnnnnnnnnnnnnnnnnnnnnnnnnnnnnnnnnnnnnnnnnnnnnnnnnnnnnnnnnnnnnnnnnnnnnnnnnnnnnnntttaagataggtaaattttgtcagctagtttactatgttccttgaatataaacaggttataatactaccctgttcactttactaaatataagtacagtaatgatgcatcattaccaaatgaggtatgctaggtaaaatgtgtatgtttgccttgacatgtttttaaaagtgatgatgtacctctgcctttaaacagaatnnnnnnnnnnnnnnnnnagtctgtggtctcgtggcctctttagattataattggggtcaccaagaaggatacttaattaaatatcccatttctaagagaagatactttgtgtgagaaaggaaagatgccagatttagtggtttaacttctgtaacttcacttgatagattttaaacaattagaatggagttagggaaagaatatatcatactgaataaatgtcattctagtttagacagcatttctaaaatacctgatactaatacttgttttgttccctgtaacataaaaacttcactgttaagtcatgtcccctgaaacatgatagttacatacacagttttctctccacacataaataacactactaaagttgttttgtaaggttccaaactgataattatatggcacatatctgtcaactctgcagtttcaaataaatgactttttaattgtannnnnnnnnnnnnnnnnnnnnnnnnnnnnnnnnnnnnnnnnnnnnnnnnnnnnnnnnnnnnnnnnnnnnnnnnnnnnnnnnnnnnnnnnnnnnnnnnnnnnnnnnnnnnnnnnnnnnnnnnnnnnnnnnnnnnnnnnnnnnnnnnnnnnnnnnnnnnnnnnaatgatgtttcaattaactttatttcaacaattattttatgaaatgcagtttaaccacagtgaatgaattttagctttccttttgaaatatgaaatacattgtaagattcgacttgaggtttttgacactgaagtacatgcttaatggtatattttcaaaaatcatcagtctacttatataaactttacctaatttttttcactttaacaaaaacataactatgcctttttttcatactttgacccaaaataatgccattttgaaataaagttcaagctttgataca

SEQ ID NO: 32017 - DNA, 699 bp, Macaca Mulatta
cggatctagtgacagcggggctctgtgctggtaggcaaagccatccagaaggtggtagcagatggagctggacttcctggagaggactgggtgtttgtctcctccaaagacgccgatctcacggatgcagcacagacccgcgccctgtttgagaaggtccgacccacgcatgtcatccatcttgctgcaatggtggggggcctgttccggaatatcaaatacaatttggacttctggaggaaaaatgtgcacatcaacgacaacgtcctgcactcggccttcgaggtgggcgcctgcaaggtggtgtcctgcctgtccacctgtatcttccctgacaagacgaactaccccatagatgagaccatgatccacaatgggccgccccacagcagcaattttgggtactcgtatgccaagaggatgatcgacgtgcagaacagggcctacttccagcagtacggctgcaccttcaccgctgtcatccccaccaacgtctttgggccccacgacaacttcaacatcgaggatggccatgtgctgcctggcctcatccacaaggtgcacctggccaagagcagcagctcggccctgacggtgtggggtaccgggaagcccgggaggcagttctttactcgctggacctggcccagctctttatctgggtcctacgggagtacaatgaagtggagcccatcatcc

SEQ ID NO: 32018 - DNA, 363 bp, Macaca Mulatta
gtgaggatctgtggcgctggcagaagcagaatccttcaggctttggcgcgcaggcctgaggaccctcccctaccaaggaccaggaaaagcagcagctgcttgctctctagcctctggcaggaacccagggccctggagctgctggggccaagccacggcctcccctacctcaaaccccagctgggcccactcatcccaccaggcatgaggccaagggctccactgaccaggaggccgaggtctctaactcttatcttccacagggtccaagagttcatcaggacccccaagagcgagtgagggggcaaggctctggaacaaaacctcctcctcccaggcactcatttatactgctctgaaaga

SEQ ID NO: 32019 - DNA, 4085 bp, Macaca Mulatta
  misc_feature (1)...(4085): n = A,T,C or G
caaaaacagggggatggagggagcagcagcagtagcaacatcatcattaacagcagataatgattttaaacctatgggtattggtctaccccattcagaaaacaaccaagataaaggcctgcctcggccagataatagagataatagattagaaggcaatagaggcagtagctcatcttacagaggtcctgggcaaagcagaatagaagacacacgggataaaggtctagtaaacagaggtcgcggccaggcaatcagtcgaggcccaggattggtcaagcaagaagactttcgggataagatgatgggtagaagagaagacagtagagagaagatgaacagaggagaaggtagccgggacagagggttggtgagacctggaagcagtcgggagaaagtgccaggtggtctgcaagggagccaggacaggggtggagctggcagtcgagaaaggggaccacctcggagggctggcagtcaggagagaggacctcttcgaagggctgggagtagagagagagtaccaccccgaagagctgggagcagggagagaggaccacctcgagggcctggcagtcgagaaaggggactgggaagatcagagtttggtcgtgatagaggtccattcagaccagaaccaggagatggtggggaaaaaatgtatccatatcaccgagatgagcctcctagggctccatggaaccatggagaagagcgagggcatgaagnnnnnnnnnnnnnnnnnnnnnnnnnnnnnnnnnnnnnnnnnnnnnnnnnnnnnnnnnnnnnnnnnnnnnnnnnnnnnnnnnnnnnnnnnnnnnnnnnnnnnnnnnnnnnnnnnnnnnnnnnnnnnnnnnnnnnnnnnnnnnnnnnnnnnnnnnnnnnnnnnnnnnnnnnnnnnnnnnnnnnnnnnnnnnnnnnnnnnnnnnnnnnnnnnnnnnnnnnnnnnnnnnnnnnnnnnnnnnnnnnnnnnnnnnnnnnnnnnnnnnnnnnnnnnnnnnnnnnnnnnnnnnnnnnnnnnnnnnnnnnnnnnnnnnnnnnnnnnnnnnnnnnnnnnnnnnnnnnnnnnnnnnnnnnnnnnnnnnnnnnnnnnnnnnnnnnnnnnnnnnnnnnnnnnnnnnnnnnnnnnnnnnnnnnnnnnnnnnnnnnnnnnnnnnnnnnnnnnnnnnnnnnnnnnnnnnnnnnnnnnnnnnnnnnnnnnnnnnnnnnnnnnnnnnnnnnnnnnnnnnnnnnnnnnnnnnnnnnnnnnnnnnnnnnnnnnnnnnnnnnnnnnnnnnnnnnnnnnnnnnnnnnnnnnnnnnnnnnnnnnnnnnnnnnnnnnnnnnnnnnnnnnnnnnnnnnnnnnnnnnnnnnnnnnnnnnnnnnnnnnnnnnnnnnnnnnnnnnnnnnnnnnnnnnnnnnnnnnnnnnnnnnnnnnnnnnnnnnnnnnnnnnnnnnnnnnnnnnnnnnnnnnnnnnnnnnnnnnnnnnnnnnnnnnnnnnnnnnnnnnnnnnnnnnnnnnnnnnnnnnnnnnnnnnnnnnnnnnnnnnnnnnnnnnnnnnnnnnnnnnnnnnnnnnnnnnnnnnnnnnnnnnnnnnnnnnnnnnnnnnnnnnnnnnnnnnnnnnnnnnnnnnnnnnnnnnnnnnnnnnnnnnnnnnnnnnnnnnnnnnnnnnnnnnnnnnnnnnnnnnnnnnnnnnnnnnnnnnnnnnnnnnnnnnnnnnnnnnnnnnnnnnnnnnnnnnnnnnnnnnnnnnnnnnnnnnnnnnnnnnnnnnnnnnnnnnnnnnnnnnnnnnnnnnnnnnnnnnnnnnnnnnnnnnnnnnnnnnnnnnnnnnnnnnnnnnnnnnnnnnnnnnnnnnnnnnnnnnnnnnnnnnnnnnnnnnnnnnnnnnnnnnnnnnnnnnnnnnnnnnnnnnnnnnnnnnnnnnnnnnnnnnnnnnnnnnnnnnnnnnnnnnnnnnnnnnnnnnnnnnnnnnnnnnnnnnnnnnnnnnnnnnnnnnnnnnnnnnnnnnnnnnnnnnnnnnnnnnnnnnnnnnnnnnnnnnnnnnnnnnnnnnnnnnnnnnnnnnnnnnnnnnnnnnnnnnnnnnnnnnnnnnnnnnnnnnnnnnnnnnnnnnnnnnnnnnnnnnnnnnnnnnnnnnnnnnnnnnnnnnnnnnnnnnnnnnnnnnnnnnnnnnnnnnnnnnnnnnnnnnnnnnnnnnnnnnnnnnnnnnnnnnnnnnnnnnnnnnnnnnnnnnnnnnnnnnnnnnnnnnnnnnnnnnnnnnnnnnnnnnnnnnnnnnnnnnnnnnnnnnnnnnnnnnnnnnnnnnnnnnnnnnnnnnnnnnnnnnnnnnnnnnnnnnnnnnnnnnnnnnnnnnnnnnnnnnnnnnnnnnnnnnnnnnnnnnnnnnnnnnnnnnnnnnnnnnnnnnnnnnnnnnnnnnnnnnnnnnnnnnnnnnnnnnnnnnnnnnnnnnnnnnnnnnnnnnnnnnnnnnnnnnnnnnnnnnnnnnnnnnnnnnnnnnnnnnnnnnnnnnnnnnnnnnnnnnnnnnnnnnnnnnnnnnnnnnnnnnnnnnnnnnnnnnnnnnnnnnnnnnnnnnnnnnnnnnnnnnnnnnnnnnnnnnnnnnnnnnnnnnnnnnnnnnnnnnnnnnnnnnnnnnnnnnnnnnnnnnnnnnnnnnnnnnnnnnnnnnnnnnnnnnnnnnnnnnnnnnnnnnnnnnnnnnnnnnnnnnnnnnnnnnnnnnnnnnnnnnnnnnnnnnnnnnnnnnnnnnnnnnnnnnnnnnnnnnnnnnnnnnnnnnnnnnnnnnnnnnnnnnnnnnnnnnnnnnnnnnnnnnnnnnnnnnnnnnnnnnnnnnnnnnnnnnnnnnnnnnnnnnnnnnnnnnnnnnnnnnnnnnnnnnnnnnnnnnnnnnnnnnnnnnnnnnnnnnnnnnnnnnnnnnnnnnnnnnnnnnnnnnnnnnnnnnnnnnnnnnnnnnnnnnnnnnnnnnnnnnnnnnnnnnnnnnnnnnnnnnnnnnnnnnnnnnnnnnnnnnnnnnnnnnnnnnnnnnnnnnnnnnnnnnnnnnnnnnnnnnnnnnnnnnnnnnnnnnnnnnnnnnnnnnnnnnnnnnnnnnnnnnnnnnnnnnnnnnnnnnnnnnnnnnnnnnnnnnnnnnnnnnnnnnnnnnnnnnnnnnnnnnnnnnnnnnnnnnnnnnnnnnnnnnnnnnnnnnnnnnnnnnnnnnnnnnnnnnnnnnnnnnnnnnnnnnnnnnnnnnnnnnnnnnnnnnnnnnnnnnnnnnnnnnnnnnnnnnnnnnnnnnnnnnnnnnnnnnnnnnnnnnnnnnnnnnnnnnnnnnnnnnnnnnnnnnnnnnnnnnnnnnnnnnnnnnnnnnnnnnnnnnnnnnnnnnnnnnnnnnnnnnnnnnnnnnnnnnnnnnnnnnnnnnnnnnnnnnnnnnnnnnnnnnnnnnnnnnnnnnnnnnnnnnnnnnnnnnnnnnnnnnnnnnnnnnnnnnnnnnnnnnnnnnnnnnnnnnnnnnnnnnnnnnnnnnnnnnnnnnnnnnnnnnnnnnnnnnnnnnnnnncaactgaggcagaagaacttactgaatggggaggcagagggttgccactggctgctagattgnttcttccgcattttatcctaagtgacagggaaaaattaaatgactgtgtaggcaatggattttgcttaggctgattagaggcttacatagtgtgagtttaaagtttctgtgtacctaatgtaaaatgcttttgatcacacctctgtagagacgtttgcctttccctgtcattcaagaatatgcgacctatagaattacgttgacttttcagtgtttgctgaagtacagagattagcaatgccttggaatagtgttgcattttaaatccagaatattactcggtttatttaatacttgagcccttgctaaagttgctcctcatattcctttgaaaatgtacaaaatgagaactctgattcctaccccctagagtatacagaatctccagggagtggtcccatcgaacccgtgtgtgatatagaggactcttgataaaaactgtgtttatataaagatggtgtcaacctctacattccaagatttcaaatgtggattaaaaaataagttttaaag

SEQ ID NO: 32020 - DNA, 414 bp, Macaca Mulatta
atgaaacacctgtggttcttcctcctcctggtggcagctcccagatgggtcctgtcccaggtgcaactgcaggagtcgggcccaggactggtgaagccctcggagaccctgcccctcacctgcactgtctctggtgcctccatcagtaattactggtggagctggatccgccagcccccagggaagggactggaatggattggggagatcaatggtgatggtgggagcacccgcaaaaatccctccctcaagagtcgagtcaccatttcaaaagacgcctccaagaaccagttctccctgaagttgagctctgtgacccccgcggacacggccctgtattactgtgcgagagtacaacatttggactggttgcccacattctacaacgcattggatgtctggggccagcctctt

SEQ ID NO: 32021 - DNA, 148 bp, Macaca Mulatta
agacgtggctggtggctattcatattccatgcttgatgcaatcagaagagcagtgatggtttccaatatccttttaattaataaggtaaatgagaaaagcctcaccctcaaagaagtcttcagactagctactcttggaggaagccaa

SEQ ID NO: 32022 - DNA, 192 bp, Macaca Mulatta
caggcctctgagcccccgcacccgcgaccctgagaataaacacgtcgcttctgctcaggttccttgatgcgctgtggcggggcatgcagcggggcgtggagaatcctcaccacgccaaggcttccagaggccgggtttcccgactcagagtcctgcccagaggcaaaggtgctgcaggaacccagcgctggg

SEQ ID NO: 32023 - DNA, 795 bp, Macaca Mulatta
  misc_feature (1)...(795): n = A,T,C or G
gggatcttccagagtcacttggtggcattcgagcttgtacactcacagtttttccacctgaagaaaaccctgggtcaccttctagagaatcacctctttcagcaccttcagatcattcttaggtctaaggtgtaacacctttgcagtacatcatgggtgatctaatacttcttcagttgtatcttcttacagtgattggtacagttattagatataaaggtaactgatgttattcgtcttgtttggcgtttagtatgtttatcaagtgactaacaaatgcattctgaagatgtatttaacatagctagctgttttaacaaatgagaaaaaaaagatgtagaaaaatgtttagatgtctttttgtgatgttatataaaattgtagatgactgtggtaaatgtgtaattatgtccattatgcttcaaagtcgagttttcatctttgactccaaaatgtcagagggaggtcactgtaacctaaaattaacgaaaggttgcccagtattaatactagttacctccctcttttcatagtttttgatatgtctgtcaacttaactcgattgtgtggttggccttccagaatatttgaaagttttcttacgcccgaccagacattaataaaaaatacctagatttggggaaaaaaaacagctaatagccaccccaaacccaaggaaatttttgggtgaatcctacctccctccttagcaaggttgatagcccacagatacaaagggtggcaannnnnnnnnnnnnntgnnnnnnnnnnnnnaagtttacccgcccccccggt

SEQ ID NO: 32024 - DNA, 269 bp, Macaca Mulatta
  misc_feature (1)...(269): n = A,T,C or G
ctgacatgctctgtgccctgggcctgggaagcaggggacacccccccattttctcttggatggggacctctggatccccgtggagccccaccacagccctctcctcggtggccaccctcaatcccacagccccaggaccacggcagcagactcacctgtcaaggtgaccttgcccggggccggtgtaaccaagaccaggaccgtccaactnnnnnnnnnnnaccctcctcagaacttgaccttgactgtcttccaaggagatggcacag

SEQ ID NO: 32025 - DNA, 98 bp, Macaca Mulatta
  misc_feature (1)...(98): n = A,T,C or G
agttcttagagcagaaatatggctattaccactgcaaggactgcaacatccgctgggagagtgcttatgtgtggtgtgtacagggaactaacaaggtn

SEQ ID NO: 32026 - DNA, 3079 bp, Macaca Mulatta
  misc_feature (1)...(3079): n = A,T,C or G
tgctaacattggcttcagcttccagtgcagttgtgctgctgcatataacactaccaaggtagcatctgccaaagccagaaataacaataggatataatataacctagttacgaatgaggtcctgccatctgtgctataccttcttaagtggggtttggatgataaaatcctgatttaaacttcagtagataagcgtattttattgatagaagatgttgaatttcttctgttcacttgcttttaaaaaagataaaccccacttgaaaaactgaggtgcttaaggagtaaaataatatgttcctggtggcatcctccagatcgtactgagaagcactccacaatgccagactcacctgtggatgtgaagacgcaatctaggctgactcctccaacgatgccacctcccccaactactaaaggagctccaagaaccagttcattcacaccgacaannnnnnnnnnnnnnnnnnnnnnnnnnnnnnnnnnnnnnnnnnnnnnnnnnnnnnnnnnnnnnnnnnnnnnnnnnnnnnnnnnnnnnnnnnnnnnnnnnnnnnnnnnnnnnnnnnnnnnnnnnnnnnnnnnnnnnnnnnnnnnnnnnnnnnnnnnnnnnnnnnnnnnnnnnnnnnnnnnnnnnnnnnnnnnnnnnnnnnnnnnnnnnnnnnnnnnnnnnnnnnnnnnnnnnnnnnnnnnnnnnnnnnnnnnnnnnnnnnnnnnnnnnnnnnnnnnnnnnnnnnnnnnnnnnnnnnnnnnnnnnnnnnnnnnnnnnnnnnnnnnnnnnnnnnnnnnnnnnnnnnnnnnnnnnnnnnnnnnnnnnnnnnnnnnnnnnnnnnnnnnnnnnnnnnnnnnnnnnnnnnnnnnnnnnnnnnnnnnnnnnnnnnnnnnnnnnnnnnnnnnnnnnnnnnnnnnnnnnnnnnnnnnnnnnnnnnnnnnnnnnnnnnnnnnnnnnnnnnnnnnnnnnnnnnnnnnnnnnnnnnnnnnnnnnnnnnnnnnnnnnnnnnnnnnnnnnnnnnnnnnnnnnnnnnnnnnnnnnnnnnnnnnnnnnnnnnnnnnnnnnnnnnnnnnnnnnnnnnnnnnnnnnnnnnnnnnnnnnnnnnnnnnnnnnnnnnnnnnnnnnnnnnnnnnnnnnnnnnnnnnnnnnnnnnnnnnnnnnnnnnnnnnnnnnnnnnnnnnnnnnnnnnnnnnnnnnnnnnnnnnnnnnnnnnnnnnnnnnnnnnnnnnnnnnnnnnnnnnnnnnnnnnnnnnnnnnnnnnnnnnnnnnnnnnnnnnnnnnnnnnnnnnnnnnnnnnnnnnnnnnnnnnnnnnnnntgttaaactgcataatggacatggtagaaaaaacaaggcgatctctcaccgtactaaggcggtgtttttaatcagaccgggaagaattgaattactggatccggtgatacagtgatgccgaggacttnnnnnnnnnnnnnnnnnnnnnnnnnnnnnnnnnnnnnnnnnnnnnnnnnnnnnnnnnnnnnnnnnnnnnnnnnnnnnnnnnnnnnnnnnnnnnnnnnnnnnnnnnnnnnnnnnnnnnnnnnnnnnnnnnnnnnnnnnnnnnnnnnnnnnnnnnnnnnnnnnnnnnnnnnnnnnnnnnnnnnnnnnnnnnnnnnnnnnnnnnnnnnnnnnnnnnnnnnnnnnnnnnnnnnnnnnnnnnnnnnnnnnnnnnnnnnnnnnnnnnnnnnnnnnnnnnnnnnnnnnnnnnnnnnnnnnnnnnnnnnnnnnnnnnnnnnnnnnnnnnnnnnnnnnnnnnnnnnnnnnnnnnnnnnnnnnnnnnnnnnnnnnnnnnnnnnnnnnnnnnnnnnnnnnnnnnnnnnnnnnnnnnnnnnnnnnnnnnnnnnnnnnnnnnnnnnnnnnnnnnnnnnnnnnnnnnnnnnnnnnnnnnnnnnnnnnnnnnnnnnnnnnnnnnnnnnnnnnnnnnnnnnnnnnnnnnnnnnnnnnnnnnnnnnnnnnnnnnnnnnnnnnnnnnnnnnnnnnnnnnnnnnnnnnnnnnnnnnnnnnnnnnnnnnnnnnnnnnnnnnnnnnnnnnnnnnnnnnnnnnnnnnnnnnnnnnnnnnnnnnnnnnnnnnnnnnnnnnnnnnnnnnnnnnnnnnnnnnnnnnnnnnnnnnnnnnnnnnnnnnnnnnnnnnnnnnnnnnnnnnnnnnnnnnnnnnnnnnnnnnnnnnnnnnnnnnnnnnnnnnnnnnnnnnnnnnnnnnnnnnnnnnnnnnnnnnnnnnnnnnnnnnnnnnnnnnnnnnnnnnnnnnnnnnnnnnnnnnnnnnnnnnnnnnnnnnnnnnnnnnnnnnnnnnnnnnnnnnnnnnnnnnnnnnnnnnnnnnnnnnnnnnnnnnnnnnnnnnnnnnnnnnnnnnnnnnnnnnnnnnnnnnnnnnnnnnnnnnnnnnnnnnnnnnnnnnnnnnnnnnnnnnnnnnnnnnnnnnnnnnnnnnnnnnnnnnnnnnnnnnnnnnnnnnnnnnnnnnnnnnnnnnnnnnnnnnnnnnnnnnnnnnnnnnnnnnnnnnnnnnnnnnnnnnnnnnnnnnnnnnnnnnnnnnnnnnnnnnnnnnnnnnnnnnnnnnnnnnnnnnnnnnnnnnnnnnncccgcttcaaaacgcgcagatgtgcagcagattggaaggagacacagatgttcggtttttctcctgtttctgaaaagaaataatatncaggtcaacagaatgaaaaatnnnnnnnnnnnnnnnnnnnnnnnnnnnnnnnnnnnnnnnnnnnnnnnnnnnnnnnnnnnnnnnnnnnnnnnnnnnnnnnnnnnnnnnnnnnnnnnnnnnnnnnnnnnnnnnnnnnnnnnnnnnnnnnnnnnnnnnnnnnnnnnnnnnnnnnnnnnnnnnnnnnnnnnnnnnnnagtaagagactcagcctgcagttaattagcattctggcagttttgacatcggccagctgccctaaataacccttcatcgtttcttcacttttgcaaggttccacagagtaagacattgggtctattccaactcattcattttatattgaaaaaaagtaattttaaaaatggtggcttcagctccagcccctgtacaaaatttttcaacccca

SEQ ID NO: 32027 - DNA, 728 bp, Macaca Mulatta
ggtgtggggctctcaaggtggggagggcacaggggacctggacgaatttgacttctgagaacaacactgcacttgacccttcatagaatccagagtcttcctggactggcctgcctcctccccacctccccaccctgggacccctgagggccaaacagcagagtggagctgagctgtggacctctcgggcaattctgtgggtgtgggggccctgggtgaatgctgccaccccagctggcagccaccttgagagctcacccggcctgtgatgtttgctctcctgagctttcgctcaatcctcttcctcttcctctgtggcttttcttgttattgtactctaatgataggatattccctgctccctacctggagattcggtaggatcttctgagtggaggtgggtagaaagagcaaggagggcaggacacttagcaggcactgagcaagcaggcctccacctgcccttagtgctgtttggagttgctttacccccttctcttgaattgccttgagatgtcctttctccctttccctgcccaccctgtcccctacaatttgtgcttctgagttgaggacccttcacctctgtttgctgaagaaatggggaaaatgctgccccatcaccttccaggcacaatcccccagtgaaaaaagctggtgaagacatcccaccatgtttcttggaacaaatccaggtttctaaaataaaagaaccgggaacccaccac

SEQ ID NO: 32028 - DNA, 636 bp, Macaca Mulatta
ggggaccgccgccttagacgaatgtagctgttggaagctgcgtgagtgaactggagggtcgcggctggttagaataatccagaatggctactctaatctatgttgataaggaaaatggagaaccaggcacccgtgtggctgctaaggatgggctgaagttggggtctggaccttcaatcaaagccttagatgggagatctcaagtttcaacaccacgttttggcaaaacgttcgatgctccaccagccttacctaaagctacaagaaaggctttgggaaccgtcaacagagctacagaaaagtctgtaaagaccaagggacccctcaaacaaaaacagccaaacttttctgccaaaaagatgactgagaagactgttaaaacaaaaagttctgttcctgcctcagacgatgcctatccagaaatagaaaaattctttcccttcaatcctctagactttgagagttttgacctgcctgaagagcaccagattgcgcacctccccttgagtggagtgcctctcatgatccttgacgaggagagagagcttgaaaagctgtttcagctaggccccccttcacctgtgaagatgccctctccaccatgggaaatccatctgttgcagtctccttcaagca

SEQ ID NO: 32029 - DNA, 311 bp, Macaca Mulatta
  misc_feature (1)...(311): n = A,T,C or G
tcgcctgcactgcactgaggaccagtgcccgaggccgtgggcgggacatgcagcagctgaaccagttgggcgcgcagcagttctcagccctgacagaggtgcttttccacttcctaactgagccaaaagaggtggaaaggtttctggctcagctctctgaatttgccaccaccaatcgtatcagtctcangctccactcagaagcattgtggaaaagcctcctcctgngttccaaatggtgcttttgaaagaagagcctcacatgcccaagcaggtccaggcggaattttatanactcnntgggccttagt

SEQ ID NO: 32030 - DNA, 867 bp, Macaca Mulatta
  misc_feature (1)...(867): n = A,T,C or G
gggccgttttggcgggcggttggcgttgcgcagaaggcggcggcggtggtggctagtggtgcggcctcaccaaacaggaacagggcagacgttagcgtgagtgatcactctcaatcccggggacccggtggccttagtctttcaggtggaacggtgtgcgacatgggaaagaaaaccaagcggacagctgacagttcttcttcagaggatgaggaggagtacgttgtggagaaggtgctagacaggcgtgtagttaagggacaagtggaatatctactgaagtggaaaggcttttctgaggagcacaatacttgggaacctgagaaaaacttggattgccctgagctaatttccgaatttatgaaaaagtataagaagatgaaggagggtgaaaataataaacccagggagaagtcagaaagtaacaagaggaaatccaatttctcaaacagtgccgatgatatcaaatccaaaaaaagagagagcagagcaatgatatcgctcggggctttgagagaggactggaaccagaaaagatcattggggcaacagattcctgtggtgatttaatgttccaatgaaatgaaaccgatactacgttgaacacgagccatgactttaaagtnnnnnnnnnnnnnnnnnnnnnnnnnnnnnnnnnnnnnnnnnnnnnnnnnnnnnnnnnnnnnnnnnnnnnnnnnnnnnnnnnnnnnnnnnnnnnnnnnnnnnnnnnnnnnnnnnnnnnnnnnnnnnnnnnnnnnnnnnnnnnnnnnnnnnnnnnnnnnnnnnnnnnnnnnnnnnnnnnnnnnnnnnnnnnnnnnnnnnnnnnnnnnnnnnnnnnnnnnnnnnnnnnnnnnnnnnnnnnnnnnn

SEQ ID NO: 32031 - DNA, 669 bp, Macaca Mulatta
ttgggcatgatggtgttaccctaaaagcttccttatgtaagataaagaggagaattctccctgagcccatcttacatatttgtccttttctttgtgtgaactagaatttcagtcttctctcctctccttctccaggaacccttctctgaagcaacagctcttctcctacgccattctgggctttgccctctcagaggccatggggctcttttgcctgatggtggcctttctcatcctcttcgccatgtgaaggagccgtctccacctcccatagttctttctcccgtgtctggtcggccctgtgtgttccttttcctatacctcccaggcggcctggggaacgtggttggctcagggtttgacagagaaaagacaaataaatactgtattaataagatgtttcttgagtctcctgtgtatatttcttttccacagttggctgagtgccttggtgagagtacaaggcccgaagggtagtgatggcgctaaactcaacatggatttggctgagctcactttttcttaattctgtttcagaaaagctttatttgaaatagcataacattttaaattattttcacctggcatggcctgctacttgcctgggaagattggggtcagtagcaacttcaagttttaacttaaaatgttggctaatagtctttctgt

SEQ ID NO: 32032 - DNA, 814 bp, Macaca Mulatta
  misc_feature (1)...(814): n = A,T,C or G
gcttctccgtcgtgtgtgcgcgccgagtctcttcctcctctttctcttgcccttatccggcctttccggcggacagtntctcttctcttttcgtcccaaccgagcggcccgcggctaccgcgatcgttctcgcgcattcctccgacgaccgcgtgaactccgccattcttcggtggcggcgccgcaaacgccaaaattttccgggtccttctctctgccacggggcccttcacctcgcaggcccacgaggttccacttcacaaggtcccccaggccattgcgccagctggtttccgtcaacccccccttctttgcccccgggccctcccccaggacgaccagaccggtcccgcggggtaacgctgggctcgcacttttctcacgtgctgactgcagggttccctgccgtgcctcaacagccttcgaggcacatcttcagtaggataatatctaggcattttgcgaagttcacccaccccgggtaccgccgttcttgtcaccaccaactggtcttgtaagagttgcacgaaccttcnnnnnnnnnnnnnnnnnnnncctggatttagcggctgagtacttcctcttgtacatggcctttctggaatacatggcagatcgggaatacctgccaattcctctgacaaggacagggttgcggctgcaatggggcctccccttcttgggcttcttagccttgaggttaccctttttcaccttgccaccagcatcagccttcttggcttcgggtttcttctctttagtatctggcttctcaactttttcacccgccatcttgcaagatgggaaagagccc

SEQ ID NO: 32033 - DNA, 1505 bp, Macaca Mulatta
  misc_feature (1)...(1505): n = A,T,C or G
ggcggcagcggcgacgagaacggcgagnnnnnnnnnnnnnnnnnnnnnnnnnnnnnnnnnnnnnnnnnnnnnnnnggcacgcagcactgacagcctggatggcccaggggagggctcggtacagcccctacccaccgctggggggcccagtgtgaaggggaagcctgggaagagnnnnnnnnnnnnnnnnnnnnnnnnnnnnnnnnnnnnnnnnnnnnnnnnnnnnnnnnnnnnnnnnnnnnnnnnnnnnnnnnnnnnnnnnnnnnnnnnnnnnnnnnnnnnnnnnnnnnnnnnnnnnnnnnnnnnnnnnnnnnnnnnnnnnnnnnnnnnnnnnnnnnnnnnnnnnnnnnnnnnnnnnnnnnnnnnnnnnnnnnnnnnnnnnnnnnnnnnnnnnnnnnnnnnnnnnnnnnnnnnnnnnnnnnnnnnnnnnnnnnnnnnnnnnnnnnnnnnnnnnnnnnnnnnnnnnnnnnnnnnnnnnnnnnnnnnnnnnnnnnnnnnnnnnnnnnnnnnnnnnnnnnnnnnnnnnnnnnnnnnnnnnnnnnnnnnnnnnnnnnnnnnnnnnnnnnnnnnnnnnnnnnnnnnnnnnnnnnnnnnnnnnnnnnnnnnnnnnnnnnnnnnnnnnnnnnnnnnnnnnnnnnnnnnnnnnnnnnnnnnnnnnnnnnnnnnnnnnnnnnnnnnnnnnnnnnnnnnnnnnnnnnnnnnnnnnnnnnnnnnnnnnnnnnnnnnnnnnnnnnnnnnnnnnnnnnnnnnnnnnnnnnnnnnnnnnnnnnnnnnnnnnnnnnnnnnnnnnnnnnnnnnnnnnnnnnnnnnnnnnnnnnnnnnnnnnnnnnnnnnnnnnnnnnnnnnnnnnnnnnnnnnnnnnnnnnnnnnnnnnnnnnnnnnnnnnnnnnnnnnnnnnnnnnnnnnnnnnnnnnnnnnnnnnnnnnnnnnnnnnnnnnnnnnnnnnnnnnnnnnnnnnnnnnnnnnnnnnnnnnnnnnnnnnnnnnnnnnnnnnnnnnnnnnnnnnnnnnnnnnnnnnnnnnnnnnnnnnnnnnnnnnnnnnnnnnnnnnnnnnnnnnnnnnnnnnnnnnnnnnnnnnnnnnnnnnnnnnnnnnnnnnnnnnnnnnnnnnnnnnnnnnnnnnnnnnnnnnnnnnnnnnnnnnnnnnnnnnnnnnnnnnnnnnnnnnnnnnnnnnnnnnnnnnnnnnnnnnnnnnnnnnnnnnnnnnnnnnnnnnnnnnnnnnnnnnnnnnnnnnnnnnnnnnnncaggaccctggagtacctgctgaggcacctggcccgcatggcgagacacagtgctaacaccagcatgcatgcccgcaacctggccattgtctgggcacccaacctgctacggnnggtccatggagctggagtcagtgggaatgggtggtgccgcggcgttccgggaagtgcgggtgcagtcggtggtggtggagtttctgctcacccacgtggacgtcctgttcagcgacaccttcacctccgctggcgtagaccctgcag

SEQ ID NO: 32034 - DNA, 138 bp, Macaca Mulatta
ccccaagctgttgcagaagatggctgacctgcggcagctggtcaccgagcatgcgcagatgatgcagcggatcaagaagaccgagaccgagacctcgctgcaccctctgctccaggagatctacaaggacatgtacta

SEQ ID NO: 32035 - DNA, 727 bp, Macaca Mulatta
  misc_feature (1)...(727): n = A,T,C or G
ggatcttgacttagagaaacaacttgaagannnnnnnnnnnnnnnnnnggaagcttatgagcagttgctaaaagagaaactcatgattgatgaaattgttaggaagatctatgaagaagatcagttggaaaaacaacaaaagttagaaaaaaatgaatgcaatgcgaaggtatatagaagagtttcagaaagagcaggctctctggagaaaaaagaaacgtgaggagatggaagaagaaaacagaaaaatcatagagtttgctaacatgcagcagcaaagagaagaagatcggatggcaaaagttcaagaaaatgaggagaaaaggctacagcttcagaatgcgttgacacagaaattagaagaaatgctgcggcaacgtgaagatttggaacaagtgcaacaagaattataccaggaagaacaagctgaaatatataagaggaagctaaaagaagaagcagaaaagaaactgagaaagcaaaaagagatgaagcaagattttgaagaacaaatggccttgaaggaattagtactacaggctgcaaaagaggaagaggagaactttagaaaaactatgctagctaaatttgctgaggatgatcggatagaagtaatgaatgctcagaaacaaggaatggaccagctgggaacaacagaaaagctgggggaaaaaacttattggaaaaaacggtcgcccaaccaatttcccttggcaaaccaaaccac

SEQ ID NO: 32036 - DNA, 1885 bp, Macaca Mulatta
  misc_feature (1)...(1885): n = A,T,C or G
agggtgagctgcatgtctccaaactcttcaaccatcctaatattgtgccatatcgagccacttttattgcagacaatgagctgtgggttgtcacatcattcatggcatanggttctgcaaaggatctcatctgtacacacttcatggatggcatgaatgagctggcgatcgcttacattctgcagggggtcctgaaggccctcgactacatccaccacatgggctatgtacacaggncaggagtgtcaaagccagccacatcctgatctctctggatgggaaggtctacctgtctggtttgcgcagcaacctcagcatgataagccatgggcagcggcagcgagtggtccacgattttccaaagtacagtgtcaaggttctgccgtggctcagccccgaggtcctccagcagnagaatctccagggttatgatgccaaatctgacatctacagtgtgggaatcacagcctgtgaactggcaaacggccacgtcccctttaaggatatgcctgccacccannnnnnnnnnnnnnnnnnnnnnnnnnnnnnnnnnnnnnnnnnnnnnnnnnnnnnnnnnnnnnnnnnnnnnnnnnnnnnnnnnnnnnnnnnnnnnnnnnnnnnnnnnnnnnnnnnnnnnnnnnnnnnnnnnnnnnnnnnnnnnnnnnnnnnnnnnnnnnnnnnnnnnnnnnnnnnnnnnnnnnnnnnnnnnnnnnnnnnnnnnnnnnnnnnnnnnnnnnnnnnnnnnnnnnnnnnnnnnnnnnnnnnnnnnnnnnnnnnnnnnnnnnnnnnnnnnnnnnnnnnnnnnnnnnnnnnnnnnnnnnnnnnnnnnnnnnnnnnnnnnnnnnnnnnnnnnnnnnnnnnnnnnnnnnnnnnnnnnnnnnnnnnnnnnnnnnnnnnnnnnnnnnnnnnnnnnnnnnnnnnnnnnnnnnnnnnnnnnnnnnnnnnnnnnnnnnnnnnnnnngaggggaccggaggctgaggtataagtggcaggatttcaggaagctggggacacggcagtgacgctgcggtctctcctcccctttccctccaggcccagtgccagcaccctcctgaaccactctttcttcaagcaggtaccgtagccccttcgttctggttctggttctagtcattctggttctaacgattcacaatccctttagctttctttcccctccctttgaatgagagaaattaccctgcttccgaagcccctgaaaggcactgctccttcctctcgtagagttggctccgacagcccgtctgccaccaagccatgggtccttgccccatggtgtcctgggacccagagcaacaggatctgtcacccacctctctcttctcccccagatcaagcgacgtgcctcagaggctttgcctgaattgcttcgtcctgtcacccccatcaccaattttgagagcagccagtctcaggaccatagtggaatctttggcctggtaacaaacctggaagagctggaggtggatgattgggagttctgagcctctgcaaactgtgcgcattctccagccagggacgcagnnnnnnnnnnnnnnccttcctgagggctggccacattcccgccctcctgggcagattgggtagaaaggacattcttccaggaaagttggctgctgactgattgggaaagaaatcctggagagacacttcactgctccaaggcttttgggacacaaggaaatctcaacaagcagggatcaagagggtccaaagccgacattcccagtcctatgagctcaggtgacctcctctacagaaggaagagatgctgctctagctctgggagccgaattccaagcccagggtttgacttcttaaccctgaggaccgccacctcttcccaatgctgcgaccagcctc

SEQ ID NO: 32037 - DNA, 184 bp, Macaca Mulatta
aactctaccatatccctttctattcccccaacaccttttctctaacctccgtatcccaaataataataataatagtaataataaaaacagttggttcagtgattctgaattaaaaggataatgttttgcaatctttaagttgtaaaaagggctgagtattggctgtgtggaagactaaagcttt

SEQ ID NO: 32038 - DNA, 406 bp, Macaca Mulatta
ggtgagacccaccctcccactccctcctccatacccaactacctccaaactccaggagaagacacttttctggtgggcatccccagacattgttttccagatgatccagtgaaatggcctagcccagaaaccaaatggtcaaagcagaaacagattaactagagttgaaggcaagcacattttcaaagcactgcagtagggagtcctggaaagagactcctcaagcacaatggggttgtggttttactggacaatgatcagaatacaaaaagtatggggtggtaggtgggatgaggggcacgtttgctggccaaggcggggtggccatacagcttgtcatttttcaacattcctgtggtttggggaattggccagctctggttagcatatgcatgctaaacaaaat

SEQ ID NO: 32039 - DNA, 2963 bp, Macaca Mulatta
  misc_feature (1)...(2963): n = A,T,C or G
cccaggtgggggcgagtcggacgccagctccgaggctggttccggatggggcggagtagccctgaagaaagagatcggattggtcagtgcctgtggtatcatcgtaggnngggaacatcatcggctctggaatctttgtctcgccaaagggcgtgctggagaatgccggttctgtgggccttgcgctcatcgtctggatcgtgacaggcttcatcacagttgtgggagccctctgctatgctgaactcggggtcaccatccccaaatctggaggtgactactcctatgtcannnnnnnnnnnnnnnnnnnnnnnnnnnnnnnnnnnnnnnnnnnnnnnnnnnnnnnnnnnnnnnnnnnnnnnnnnnnnnnnnnnnnnnnnnnnnnnnnnnnnnnnnnnnnnnnnnnnnnnnnnnnnnnnnnnnnnnnnnnnnnnnnnnnnnnnnnnnnnnnnnnnnnnnnnnnnnnnnnnnnnnnnnnnnnnnnnnnnnnnnnnnnnnnnnnnnnnnnnnnnnnnnnnnnnnnnnnnnnnnnnnnnnnnnnnnnnnnnnnnnnnnnnnnnnnnnnnnnnnnnnnnnnnnnnnnnnnnnnnnnnnnnnnnnnnnnnnnnnnnnnnnnnnnnnnnnnnnnnnnnnnnnnnnnnnnnnnnnnnnnnnnnnnnnnnnnnnnnnnnnnnnnnnnnnnnnnnnnnnnnnnnnnnnnnnnnnnnnnnnnnnnnnnnnnnnnnnnnnnnnnnnnnnnnnnnnnnnnnnnnnnnnnnnnnnnnnnnnnnnnnnnnnnnnnnnnnnnnnnnnnnnnnnnnnnnnnnnnnnnnnnnnnnnnnnnnnnnnnnnnnnnnnnnnnnnnnnnnnnnnnnnnnnnnnnnnnnnnnnnnnnnnnnnnnnnnnnnnnnnnnnnnnnnnnnnnnnnnnnnnnnnnnnnnnnnnnnnnnnnnnnnnnnnnnnnnnnnnnnnnnnnnnnnnnnnnnnnnnnnnnnngctgttcttctctggagcccgagagggccaccttcccagtgtgttggccatgatccacgtgaagcgctgcactccaatcccagccctgctcttcacannnnnnnnnnnnnnnnnnnnnnnnnnnnnnnnnnnnnnnnnnnnnnnnnnnnnnnnnnnnnnnnnnnnnnnnnnnnnnnnnnnnnnnnnnnnnnnnnnnnnnnnnnnnnnnnnnnnnnnnnnnnnnnnnnnnnnnnnnnnnnnnnnnngatcaacctgctgttccccatcatctatttgctgttctgggccttcctgctggtcttcagcctgtggtcagagccggtggtgtgtggcattggcctggccatcatgctgacaggagtgcctgtctatttcctgggtgtttactggcaacacaagcccaagtgtttcagtgacttcattgngagctgctaaccctggtgagccagaagatgtgtgtggtcgtgtaccccgaggcagagcagggctcagggacagagaaggctaatgaggacatggaggagcaacagcagcccatgtaccaacccactccccaccaaggacaaggacgtggcggggcaggcccagccctaaggaccaccattcnnnnnnnnnnnnnnnnnnnnnnnnnnnnnnnnnnnnnnnnnnnnnnnnnnnnnnnnnnnnnnnnnnnnnnnnnnnnnnnnnnnnnnnnnnnnnnnnnnnnnnnnnnnnnnnnnnnnnnnnnnnnnnnnnnnnnnnnnnnnnnnnnnnnnnnnnnnnnnnnnnnnnnnnnnnnnnnnnnnnnnnnnnnnnnnnnnnnnnnnnnnnnnnnnnnnnnnnnnnnnnnnnnnnnnnnnnnnnnnnnnnnnnnnnnnnnnnnnnnnnnnnnnnnnnnnnnnnnnccgggccacaccctcagctgctgcttcaggaaccagagctcattactgccttccctcccagggaggccccttcggagaggagaggtggccacaggggctgtgttgcgggggaacaggctcaagcaattctgtccccatcaaggggtcagctggagagacccaagaccctgtctcttcaccagggacccaaaatccaaggggatgcttccctctgccctctttcctgcccctccccatcatacctgcacccaccccagccagggctccctgtccagaattcggttctcctcaggacgccaactcccagagctaaggaccaaggagaagaacagcctctccaccccncaagccaggcggttgaggaacatactgagaaaggctcagattgcagaaacccagccctgcccctgcctcctgcatcctgcccccaacatggtgccaaagcttccagaagccaaaaaggcttctgctttttaatttagtgggcatctctctcnnnnnnnnnnnnnnntcagcaactccacctccccatcacaggaaggagcagtcccctgctatccctacagccactcccagcacgcccgcacacagccagcaccaccgcccccaccatgcccttctcctctctgggccttggcttgggaccgggtgtgaatgatccccaagtccttcaggcctgagatcagagccaaatcagccttaagtcacctcccatccaagaacttggcctaaaaatactcccctatttctaaccctcaggacggatctgatattaaatgccttccccgggaggaagggcgctttccccctccccagaggtgcccattccacaccctgggagactggggagagcattgactgaagcccagttcctttcccgtccgtcctcaactccagtagccccccactcctctcaggtctcagtgccatgccgtcttggagcagggtgagagggcagcagcagcagggcgcccgctctggaggtcctcaaaaaaggccttcctctgtggctggcggcctctgacctttccctgggctccaatggaaggccatggagtttgtcatgggccctgcaacctccccagtcactcctgctgcactaag

SEQ ID NO: 32040 - DNA, 629 bp, Macaca Mulatta
  misc_feature (1)...(629): n = A,T,C or G
agagcaggacgaacaggtcaggcggtgtcaggagcccaggtctccagctggagggaacgtcaaccctgcagtgggaacaggggcccatcgcacatcctaggcacagatggtaatgtaggcacnncagaccataaaggagaacaacaagaggcccccagcaaacatccacagatggccctggacatcaaccacattctgagaaacatgtcatgttctgggagggctaaggcaccaagtaaggcctatggggctggnnnnnnnnnnnnnnggtggggcaatccagagctgtgggggcttcccatgggaattgggaggtcccaaggcacagtcaggggttccacaggaggagtcacagagtcaccaagggctctcctggcccagggagcagtcaacaccatggactgaaggaacatctgctgggctccaagccctgggccaggctggggcatgtggggccaggaggcagctcagagtaggaggcagagagagaagtgttctcagagggcacccgtatctggatataatgtggtcctgagattctggctggggaactgcttctagggtttcatatgtgttgtgcagctgcttcctctccccagcctcactctgcaagaattctagtgattatg

SEQ ID NO: 32041 - DNA, 1976 bp, Macaca Mulatta
  misc_feature (1)...(1976): n = A,T,C or G
cagtcttcaatgcgtctgtctcataatttgtaaaggtttattatctccaagtcattgttaatctgtggtgaaaagtaattgctaaatagaaattctgagaagaaaaaggcctcatccttttcacatgatgtaggaaggtctggtgcatgannnnnnnnnnnnnnnnnnnnnnnnnnnnnnnnnnnnnnnnnnnnnnnnnnnnnnnnnnnnnnnnnnnnnnnnnnnnnnnnnnnnnnnnnnnnnnnnnnnnnnnnnnnnnnnnnnnnnnnnnnnnnnnnnnnnnnnnnnnnnnnnnnnnnnnnnnnnnnnnnnnnnnnnnnnnnnnnnnnnnnnnnnnnnnnnnnnnnnnnnnnnnnnnnnnnnnnnnnnnnnnnnnnnnnnnnnnnnnnnnnnnnnnnnnnnnnnnnnnnnnnnnnnnnnnnnnnnnnnnnnnnnnnnnnnnnnnnnnnnnnnnnnnnnnnnnnnnnnnnnnnnnnnnnnnnnnnnnnnnnnnnnnnnnnnnnnnnnnnnnnnnnnnnnnnnnnnnnnnnnnnnnnnnnnnnnnnnnnnnnnnnnnnnnnnnnnnnnnnnnnnnnnnnnnnnnnnnnnnnnnnnnnnnnnnnnnnnnnnnnnnnnnnnnnnnnnnnnnnnnnnnnnnnnnnnnnnnnnnnnnnnnnnnnnnnnnnnnnnnnnnnnnnnnnnnnnnnnnnnnnnnnnnnnnnnnnnnnnnnnnnnnnnnnnnnnnnnnnnnnnnnnnnnnnnnnnnnnnnnnnnnnnnnnnnnnnnnnnnnnnnnnnnnnnnnnnnnnnnnnnnnnnnnnnnnnnnnnnnnnnnnnnnnnnnnnnnnnntacctgtatttacaaccctttgtttggatcagatcttcaatatacaaatcgggtanggtagataaagtggtaataaatccatactttggtctaggagctccagactactcaaaaatccaaatacctaaacaggaaaaatggcagagaagcatgagcagtgtcacagaagacaagnnnnnnnnnnnnnnnnnnnnnnnnnnnnnnnnnnnnnnnnnnnnnnnnnnnnnnnnnnnnnnnnnnnnnnnnnnnnnnnnnnnnnnnnnnnnnnnnnnnnnnnnnnnnnnnnnnnnnnnnnnnnnnnnnnnnnnnnnnnnnnnnnnnnnnnnnnnnnnnnnnnnnnnnnnnnnnnnnnnnnnnnnnnnnnnnnnnnnnnnnnnnnnnnnnnnnnnnnnnnnnnnnnnnnnnnnnnnnnnnnnnnnnnnnnnnnnnnnnnnnnnnnnnnnnnnnnnnnnnnnnnnnnnnnnnnnnnnnnnnnnnnnnnnnnnnnnnnnnnnnnnnnnnnnnnnnnnnnnnnnnnnnnnnnnnnnnnnnnnnnnnnnnnnnnnnnnnnnnnnnnnnnnnnnnnnnnnnnnnnnnnnnnnnnnnnnnnnnnnnnnnnnnnnnnnnnnnnnnnnnnnnnnnnnnnnnnnnnnnnnnnnnnnnnnnnnnnnnnnnnnnnnnnnnnnnnnnnnnnnnnnnnnnnnnnnnnnnnnnnnnnnnnnnnnnnnnnnnnnnnnnnnnnnnnnnnnnnnnnnnnnnnnnnnnnnnnnnnnnnnnnnnnnnnnnnnnnnnnnnnnnnnnnnnnnnnnnnnnnnnnnnnnnnnnnnnnnnnnnnnnnnnnnnnnnnnnnnnnnnnnnnnnnnnnnnnnnnnnnnnnnnnnnnnnnnnnnnnnnnnnnnnnnnnnnnnnnagattgaagacccgctagctattcttattctctttgatgaagctagatataatttattgaagggcttttatacagctcctgatgctaagttgataacattggcaagtctggcttttgcaaatagtctatggaaattatgagagtaaaaaacacaagcaaggtttcctaaantgaagaaaatctaaaatccatcgtacctgttaccaaactgaaaagtaaggcacctcactggacaaatcgcatacttcatgaatacaag

SEQ ID NO: 32042 - DNA, 1482 bp, Macaca Mulatta
  misc_feature (1)...(1482): n = A,T,C or G
gagcaaactctctgctgtgcccggaattagcagtgtacatgaagtgcacatctgggaacttgtaagtggaaagattattgccaccctgcacatcannnnnnnnnnnnnnnnnnnnnnnnnnnnnnnnnnnnnnnnnnnnnnnnnnnnnnnnnnnnnnnnnnnnnnnnnnnnnnnnnnnnnnnnnnnnnnnnnnnnnnnnnnnnnnnnnnnnnnnnnnnnnnnnnnnnnnnnnnnnnnnnnnnnnnnnnnnnnnnnnnnnnnnnnnnnnnnnnnnnnnnnnnnnnnnnnnnnnnnnnnnnnnnnnnnnnnnnnnnnnnnnnnnnnnnnnnnnnnnnnnnnnnnnnnnnnnnnnnnnnnnnnnnnnnnnnnnnnnnnnnnnnnnnnnnnnnnnnnnnnnnnnnnnnnnnnnnnnnnnnnnnnnnnnnnnnnnnnnnnnnnnnnnnnnnnnnnnnnnnnnnnnnnnnnnnnnnnnnnnnnnnnnnnnnnnnnnnnnnnnnnnnnnnnnnnnnnnnnnnnnnnnnnnnnnnnnnnnnnnnnnnnnnnnnnnnnnnnnnnnnnnnnnnnnnnnnnnnnnnnnnnnnnnnnnnnnnnnnnnnnnnnnnnnnnnnnnnnnnnnnnnnnnnnnnnnnnnnnnnnnnnnnnnnnnnnnnnnnnnnnnnnnnnnnnnnnnnnnnnnnnnnnnnnnnnnnnnnnnnnnnnnnnnnnnnnnnnnnnnnnnnnnnnnnnnnnnnnnnnnnnnnnnnnnnnnnnnnnnnnnnnnnnnnnnnnnnnnnnnnnnnnnnnnnnnnnnnnngactggggctcaatagctgtggatacagtgttcaaagaagttcttgtttctaaactgattagaacttctagctaatgctcaggtgagatcatagcttaaatacattcaaaaaactaaagtaccacaataagtgtatttttccctttccccttaatgatcataaaagagacaagttaagtatttctgacactgaagaagtatcttttttctttgattcatttttggataaatataaaatgaataactattacggtagaaaatattctcagaacattctagaggaggtaaagattagtaggggggttttggccatctctacatttttgtgaggtgagagaaaactaatgtttactttctgctgtgaaatgaattgtggctatagaatgtttcaaatgcttaaatatataatacatgtttttcacatggaagtgagggaatatttcagctttcttaagtatgacacaaatactcagctgtcttttagagtcagtatagttggagctgtttccatttagtgctttggtaatgatttacttattcttccaaacatcctttgacttttctttcatacgattgcattgatctatgcagcatttaccagaaaaaagcattcctgggatagcagaatccttaacattgagtgttaattcttgtgaaataaataagctagactgccttctctttaatta

SEQ ID NO: 32043 - DNA, 1874 bp, Macaca Mulatta
  misc_feature (1)...(1874): n = A,T,C or G
gctttcacctacttgtctcacaccatccccgatttcacagacaactgcctgatcaacatcatgaagtgcggagaagacttctatgcgacctcagagaccaattacatcaggaaaatcaacccacagactctggaaaccctggagaaggtnnnnnnnnnnnnnnnnnnnnnnnnnnnnnnnnnnnnnnnnnnnnnnnnnnnnnnnnnnnnnnnnnnnnnnnnnnnnnnnnnnnnnnnnnnnnnnnnnnnnnnnnnnnnnnnnnnnnnnnnnnnnnnnnnnnnnnnnnnnnnnnnnnnnnnnnnnnnnnnnnnnnnnnnnnnnnnnnnnnnnnnnnnnnnnnnnnnnnnnnnnnnnnnnnnnnnnnnnnnnnnnnnnnnnnnnnnnnnnnnnnnnnnnnnnnnnnnnnnnnnnnnnnnnnnnnnnnnnnnnnnnnnnnnnnnnnnnnnnnnnnnnnnnnnnnnnnnnnnnnnnnnnnnnnnnnnnnnnnnnnnnnnnnnnnnnnnnnnnnnnnnnnnnnnnnnnnnnnnnnnnnnnnnnnnnnnnnnnnnnnnnnnnnnnnnnnnnnnnnnnnnnnnnnnnnnnnnnnnnnnnnnnnnnnnnnnnnnnnnnnnnnnnnnnnnnnnnnnnnnnnnnnnnnnnnnnnnnnnnnnnnnnnnnnnnnnnnnnnnnnnnnnnnnnnnnnnnnnnnnnnnnnnnnnnnnnnnnnnnnnnnnnnnnnnnnnnnnnnnnnnnnnnnnnnnnnnnnnnnnnnnnnnnnnnnnnnnnnnnnnnnnnnnnnnnnnnnnnnnnnnnnnnnnnnnnnnnnnnnnnnnnnnnnnnnnnnnnnnnnnnnnnnnnnnnnnnnnnnnnnnnnnnnnnnnnnnnnnnnnnnnnnnnnnnnnaggcttagagcttccacgggtcaattatgcgtacaatggaaagcgataccggtatgtctttgctgcaggagttcaatggagtccaatcccannnnnnnnnnnnnnnnnnnnnnnnnnnnnnnnnnnnnnnnnnnnnnnnnnnnnnnnnnnnnnnnnnnnnnnnnnnnnnnnnnnnnnnnnnnnnnnnnnnnnnnnnnnnnnnnnnnnnnnnnnnnnnnnnnnnnnnnnnnnnnnnnnnnnnnnnnnnnnnnnnnnnnnnnnnnnnnnnnnnnnnnnnnnnnnnnnnnnnnnnnnnnnnnnnnnnnnnnnnnnnnnnnnnnnnnnnnnnnnnnnnnnnnnnnnnnnnnnnnnnnnnnnnnnnnnnnnnnnnnnnnnnnnnnnnnnnnnnnnnnnnnnnnnnnnnnnnnnnnnnnnnnnnnnnnnnnnnnnnnnnnnnnnnnnnnnnnnnnnnnnnnnnnnnnnnnnnnnnnnnnnnnnnnnnnnnnnnnnnnnnnnnnnnnnnnnnnnnnnnnnnnnncttggttaccttttgtacttattctttctgtgggtgctttccaagggcatggcaagagagtttgtcaatatcatttctttcactttattttggccgtaaaaattttgtttgaaagtcaaatatttgaagatcaaatatatattgattagatccagttcttctaagaaagctcctttcctttaacataaagacctggaccatgaatcggaaattatattcaatgacattatcatcatttttagaatgagccactaacctgttagagaagagacagatagttatttatcattgtgccttcctctgtctctttctctttcctttgctccctcccgtctttctagtggattaaattgtgtatctgggagttcttgctttctagccaggcctgatgagttaagttatgtgaccaggaaggcatgccactttgtggtcattccatgcaagtcatggcataatagaaaataataaaaacttta

SEQ ID NO: 32044 - DNA, 1131 bp, Macaca Mulatta
  misc_feature (1)...(1131): n = A,T,C or G
tgcctaaacggccgcccgcagtacctgttccgccccactgtgcctgctgtggctcagcccccaggcgttgctggtgcccttggccatccagncagctcagccagacccctgggcccgacagccccatcttcctgcccactgactccgaatgggactggctgctggccaagacatgggtgcgcaactctgagttcctggtgcacgagaacaacacgcactttctgtgcacgcatttgctgtgcgaggccttcgccatggccacactgcgccagctgccgctctgccatcccatctacaagnagctcctgcttccccacactcgatacacgctgcaggtgaacaccatcgcgagggccacgctgctcaaccccgagggcctcgtggaccaggtnnnnnnnnnnnnnnnnnnnnnnnnnnnnnnnnnnnnnnnnnnnnnnnnnnnnnnnnnnnnnnnnnnnnnnnnnnnnnnnnnnnnnnnnnnnnnnnnnnnnnnnnnnnnnnnnnnnnnnnnnnnnnnnnnnnnnnnnnnnnnnnnnnnnnnnnnnnnnnnnnnnnnnagctttgtctcagaaatcgtgggctactattatcccagtgacgcatctgtgcagcaggattcggagctgcaggcctgggttgaagagatttttgctcaggcgttcctgggccgggaaagctcaggtatccnnnnnnnnnnnnnnnnnnnnnnnnnnnnnnnnnnnnnnnnnnnnnnnnnnnnnnnnnnnnnnnnnnnnnnnnnnnnnnnnnnnnnnnnnnnnnnnnnnnnnnnnnnnnnnnnnnnnnnnnnnnnnnnnnnnnnnnnnnnnnnnnnnnnnnnnnnnnnnnnnnnnnnnnnnnnnnnnnnnnnnnnnnnnnnnnnnnnnnnnnnnnnnnnnnnnnnnnnnnnnnnnnnnnnnnnnnnnnnnnnnnnnnnnnnnnnnnnnnnnnnnnnnnnnnnnnnnnnnnnnnnnnnnnnnnnnnnnnnnnnnnnnnnnnnnnnnnnnnnnnnnnnnnnnnnnnnnnnnnnnnnnnnnnnnnnnnnnnnnnnnnnnnnnnnnnnnnnnnnnnnnnnnnnnnnnnnnnnnnnnnnnnnntggaccctcccctcatcgagaacagtgtctccatcta

SEQ ID NO: 32045 - DNA, 649 bp, Macaca Mulatta
  misc_feature (1)...(649): n = A,T,C or G
gggctttttctttcggcggagcgcggcggcaagatggccgtgcaaatttccaagaagaggaagtttgtcgctgatggcatcttcaaagctgaactgaatgagtttcttactcgggagctggctgaagatggctactctggagttgaggtgcgagttacaccaaccaggacagaaatcattatcttagccaccagaacacagaatgttcttggtgagaagggccggcggattcgggaactgactgctgtangtcagaagaggtttggctttccagagggcagtgtagaagcttttatgcttgaaaaagtgggcccactaaaagggtcttgtgtgcccatttggcccagggcaaaagtccctctggcggtttacaaaacttcccttaaggaaggggcctttgccttggtggccgggaaggggccccctgcctttaggggggggggccttggccgggttttcattcccnnnnnnnnnnnnnnnnnnnnnnnnnnnaaaagggcttgtccccaaaggggnnnnnnnnnnnnnnnnnnnggggggaaaacaccccccccagaggggaacaaagaaggggggcactaaaaactcccccatgaaaaaaaattttttggtgggggagagagtgggccccccggaaaaagaagccccc

SEQ ID NO: 32046 - DNA, 606 bp, Macaca Mulatta
attactgaatccctacactcaaactatagtgatgtatcagtgtttgagagtgacctctagaaaaaagaaaagtgtttttagaaatgcataaaagtcatccccaaatcctattgcttatcttgggttaaatttgagagtgattctctgtatataaatatgtgaaatattattatctcaacttagcacacgtgaagcaacatttctgtcctacagagaggtgtcatggtaagatttcattcccaattcattgtttcatagagctatgatcaggccatttctgcaagcagtgtatgaccccacctgagcaaccacaaataggctctccgtgaaactacaaaggaagtgatgtgtggcacccatgctggtttcgtctgtctgtaatgtgaattccagtatttgtttagtatttccaattgtctcctgctagcaatatgtacagtaacgcgtcaggcttgtgacatttgaataaggaaaaacagagttcctgttaagtgaataactttagcttttacaggggattatgatcaaaagtgatttagtacatcttaaatgatatcttatttctacatggaaagaagttatagaatcttcatagagttctatgag

SEQ ID NO: 32047 - DNA, 1436 bp, Macaca Mulatta
  misc_feature (1)...(1436): n = A,T,C or G
gaacaactcttggaatttatgcaccagttgcctgcttttgccaatatgacgatgtccgtgaggcgagaactctgtgctgtgatggtgttcgcagtggtggaaagagcagggaccatagtgttaaatgatggtgaagannnnnnnnnnnnnnnnnnnnnnnnnnnnnnnnnnnnnnnnnnnnnnnnnnnnnnnnnnnnnnnnnnnnnnnnnnnnnnnnnnnnnnnnnnnnnnnnnnnnnnnnnnnnnnnnnnnnnnnnnnnnnnnnnnnnnnnnnnnnnnnnnnnnnnnnnnnnnnnnnnnnnnnnnnnnnnnnnnnnnnnnnnnnnnnnnnnnnnnnnnnnnnnnnnnnnnnnnnnnnnnnnnnnnnnnnnnnnnnnnnnnnnnnnnnnnnnnnnnnnnnnnnnnnnnnnnnnnnnnnnnnnnnnnnnnnnnnnnnnnnnnnnnnnnnnnnnnnnnnnnnnnnnnnnnnnnnnnnnnnnnnnnnnnnnnnnnnnnnnnnnnnnnnnnnnnnnnnnnnnnnnnnnnnnnnnnnnnnnnnnnnnnnnnnnnnnnnnnnnnnnnnnnnnnnnnnnnnnnnnnnnnnnnnnnnnnnnnnnnnnnnnnnnnnnnnnnnnnnnnnnnnnnnnnnnnnnnnnnnnnnnnnnnnnnnnnnnnnnnnnnnnnnnnnnnnnnnnnnnnnnnnnnnnnnnnnnnnnnnnnnnnnnnnnnnnnnnnnnnnnnnnnnnnnnnnnnnnnnnnnnnnnnnnnnnnnnnnnnnnnnnnnnnnnnnnnnnnnnnnnnnnnnnnnnnnnnnnnnnnnnnnnnnnnnnnnnnnnnnnnnnnnnnnnnnnnnnnnnnnnnnnnnnnnnnnnnnnnnnnnnnnnnnnnnnnnnnnnnnnnnnnnnnnnnnnnnnnnnnnnnnnnnnnnnnnnnnnnnnnnnnnnnnnnnnnnnnnnnnnnnnnnnnnnnnnnnnnnnnnnnnnnnnnnnnnnnnnnnnnnnnnnnnnnnnnnnnnnnnnnnnnnnnnnnnnnnnnnnnnnnnnnnnnnnnnnnnnnnnnnnnnnnnnnnnnnnnnnnnnnnnnnnnnnnnnnnnnnnnnnnnnnnnnnnnnnnnnnnnnnnnnnnnnnnnnnnnnnnnnnnnnnnnnnnnnnnnnnnnnnnnnnnnnnnnnnnnnnnnnnnnnnnnnnnnnnnnnnnnnnnnnnnnnnnnnnnnnnnnnnnnnnnnnnnnnnnnnnnnnnnnnnnnnnnnnnnnnnnnnnnnnnnnnnnnnnnnnnnnnnnnnnnnnnnnnnnnnnnnnnnnntgatattgggattggtcagtctcaagatgacagcatagtaggattaaggcagacaaagcacatcccaactgcattgcctgtcagtggaaccttatcatccagtaatcctgatttattgcagtcacatcatcgcattttagacttcagtactact

SEQ ID NO: 32048 - DNA, 1996 bp, Macaca Mulatta
  misc_feature (1)...(1996): n = A,T,C or G
gctggccaaaaagcggagcctggcgaaagcgtgtcctgctcagacagccttccttctccattgccaccgtgccgaacagccaggctgcccaactgcaactgtaggccaatgaactaatccatcgcccgcagaccgactctcagcagcggttcgtcccggtgcccacccccgcgaaacggagtgcccgggcacctagcctccccgccggccacnnnnnnnnnnnnnnnnnnnnnnnnnnnnnnnnnnnnnnnnnnnnnnnnnnnnnnnnnnnnnnnnnnnnnnnnnnnnnnnnnnnnnnnnnnnnnnnnnnnnnnnnnnnnnnnnnnnnnnnnnnnnnnnnnnnnnnnnnnnnnnnnnnnnnnnnnnnnnnnnnnnnnnnnnnnnnnnnnnnnnnnnnnnnnnnnnnnnnnnnnnnnnnnnnnnnnnnnnnnnnnnnnnnnnnnnnnnnnnnnnnnnnnnnnnnnnnnnnnnnnnnnnttggcatgtatatggactgttgcagcgttctgataagaaatacgatgaagctataaaatgttaccgaaatgccctcaaattagataaagataacctagcaaattttgagggatctctcactgttgcagatccaaatgagagaccttgaaggttaccgagnnnnnnnnnnnnnnnnnnnnnnnnnnnnnnnnnnnnnnnnnnnnnnnnnnnnnnnnnnnnnnnnnnnnnnnnnnnnnnnnnnnnnnnnnnnnnnnnnnnnnnnnnnnnnnnnnnnnnnnnnnnnnnnnnnnnnnnnnnnnnnnnnnnnnnnnnnnnnnnnnnnnnnnnnnnnnnnnnnnnnnnnnnnnnnnnnnnnnnnnnnnnnnnnnnnnnnnnnnnnnnnnnnnnnnnnnnnnnnnnnnnnnnnnnnnnnnnnnnnnnnnnnnnnnnnnnnnnnnnnnnnnnnaggggaaatactgttgaaattgggaagattaaaagaagccagtgaagtgttcaaaaacttgattgatcggaatgcagaaaattggtgttattatgaaggcttggaaaaagctctacaaattacactttggaagagaggcttcaaatttatgaagaaattagtaagcagcaccccaaagcaattacacccagaagattacctttgactcttgtcccaggtnnnggtgaaagatttagagaactaatggataagttcctgagggttaacttcagtaaaggatgcccacccttgtttactactttgaaatctttatattacaatnnnnnnnnnnnnnnnnnnnnnnnnnnnnnnnnnnnnnnnnnnnnnnnnnnnnnnnnnnnnnnnnnnnnnnnnnnnnnnnnnnnnnnnnnnnnnnnnnnnnnnnnnnnnnnnnnnnnnnnnnnnnnnnnnnnnnnnnnnnnnnnnnnnnnnnnnnnnnnnnnnnnnnnnnnnnnnnnnnnnnnnnnnnnnnnnnnnnnnnnnnnnnnnnnnnnnnnnnnnnnnnnnnnnnnnnnnnnnnnnnnnnnnnnnnnnnnnnnnnnnnnnnnnnnnnnnnnnnnnnnnnnnnnnnnnnnnnnnnnnnnnnnnnnnnnnnnnnnnnnnnnnnnnnnnnnnnnnnnnnnnnnnnnnnnnnnnnnnnnnnnnnnnnnnnnnnnnnnnnnnnnnnnnnnnnnnnnnnnnnnnnngaagggacatctgccatggaaaatctaaatgaaatgcagtgtatgtggtttcagacagaatgcatttcagcttatcagcgtctggggagatacggggatgccttgaaaaaatgtcatgaagtagaaagggtaagttgttagaatttcgacttcagttttctctgtaaggtgataaaaagcaggtagatttctacacgggatcatctgcctcttctaacttctctgggagcttcattgtgaaaaaaattcttgatctttaaccttctttacattcagaagttgtaaacagtggattgctttattgatcctcaagtgattatgcttttgacatgtctatatatttttgtct

SEQ ID NO: 32049 - DNA, 1244 bp, Macaca Mulatta
cagagttaagaagagtatttatgaggcatggaaccctccatcagatttggaagaaagtagagtgagcgcagaggtgacagacagccactgaggcccatggacagtctccacttcatgcttctctatcagactttaagatttattagtaatatgctacctttggaagatgaaaagaaactagtgccaaggaagcatattcttcaatatttgaaatagacgtgttctcaagacaatggcttcaaaggtctcctgtttgtatgttttgacagttgtgtgctgggccagcgctctctggtacttgagtataactcgtcctacttcttcttacactggctccaaaccattcagccacctaacagttgccaggaaaaacttcacctttggcaacataagaactcgacctatcaacccacattcttttgaatttcttatcaacgagcccaacaaatgtgagaaaaacattccttttcttgttatcctaagcagcaccacccacaaggaatttgatgcccgtcaggcaatcagagagacgtggggggatgagaacaattttaaggggatcaagatagccactctcttcctcctgggcaagaatgctgatcctgttctcaatcagatggtggagcaagagagccaaatcttccacgatatcatcgtggaggacttcattgactcctaccataatcttaccctcaaaacattaatggggatgagatgggtggccactttttgttcaaaagccaagtatgtcatgaaaacagacagtgacatttttgtaaacatggacaatcttatttataaattactgaaaccctccaccaagccacgaagaaggtattttactggctatgtcattaatggaggaccgattcgggacgtccgcagtaagtggtatatgcccagggatttgtacccagacagtaactacccaccgttctgttcggggactggctacatcttttcagccgatgtggctgaactcatttacaagacctcactccacacaaggctgcttcaccttgaagatgtatatgtgggactgtgtcttcgaaagctgggtatacatcctttccagaacagtggcttcaatcactggaaaatggcctacagtttgtgtaggtatcgccgagttatcaccgtgcatcagatctctccagaagacatgcacagaatctggaatgatatgtcaagcaagaaacatctcagatgttagaatttttaccaatgtaaatacgtttcttttc

SEQ ID NO: 32050 - DNA, 231 bp, Macaca Mulatta
ccccaaatccattaaaagtgacttcagaggtcccagatagggaccctttttgtttaacctttgtcctcattacatttcatgacccctagcttacaaaagagagactggggggtctggatgagacacacgctttcccttgagtccacactggaaaggacagaggcaggtgtcacaccgttcctctttgacccgagccgcttgaatcccagagtttcaacagctcaggtgggt

SEQ ID NO: 32051 - DNA, 649 bp, Macaca Mulatta
  misc_feature (1)...(649): n = A,T,C or G
gtcaagtgaaaagtgctaaatctataacaagccatgaccagaagagaagtcaagatgatacctcccactgaacatacgctttgtaaaaggccacattttcttctagtatctgaaagacaaacctattcatgccatttgaaatcgagaaaacagatgtgggtttctttaagtatttaagtacaacattacatcacccttgttttgtttgacctgttcagcatgcttatgtctggaccctctggcctcgcctctgctcctccaagcccagccccatgtgagtttcacgtgctccttcaggaaagcacttgggtataaatcattnnnnnnnnnnnnnnnnaggctttaagaactactcagagaatctaataattttctgtgtaattgaggcattccatataaagggacatatttggctatttccagagaaaaaaattgttctccctctctaaaaaggaaatcttatggaatgacacttggagcaaggaaatattaagactggcgtagattaggagcctctgggtacagctatcactttttatgtccaaattaaaattcacctgtgaggtgggatatacctctgagtaaaactcctctttatctttgacctccttctatctgtcaattaattaacacaaatctgtatagtttt

SEQ ID NO: 32052 - DNA, 722 bp, Macaca Mulatta
atagaaatggtgtgtacaatacctgtgttcccttaaattactatagttttcacatttttgtctttatttctaatttatgaatgtggcaatattactttgagaggacgtcaaaagtttggggaaaggctgtcaagaaagaatatctaaaaattataactgattctaagtatatactttaagaaattaaggtttgactgtacctacttcataaatttattattatctttttataaccattagaaccagagttagaaagaagctgtttggctaatataaaaattatgtggattctgttaaagtagttcaggttccttaaaataagaatagatcagctaaaaatctaaaagctaaacaagtgaaattgaagcagttttattgtaagatttggaagagtgcaggatgtttatcatagcacattattaatatttattactcttcctatgtggataagtaatgtcctagatttacaacataggaaaacaggcagagacgtttagctgtgagtgtccaagtataaatcaattaagtgccagattttgataatcgccagccactcattgaagtcctatgttgcaaagttactcttaccctttttttacatttcttgataaagcaatgtttaattacatatttcctgttaactagctggtaggcttcatacctaaagtcagtacataatgttaataattttttccagctgagcaaatgaatacgtatctaga

SEQ ID NO: 32053 - DNA, 2140 bp, Macaca Mulatta
  misc_feature (1)...(2140): n = A,T,C or G
caggtggcagccacagcagcctcagggacctcagcaactatggcctcctgcccagactctgataatagctgggtgcttgctggctccgannnnnnnnnnnnnnnnnnnnnnnnnnnnnnnnnnnnnnnnnnnnnnnnnnnnnnnnnnnnnnnnnnnnnnnnnnnnnnnnnnnnnnnnnnnnnnnnnnnnnnnnnnnnnnnnnnnnnnnnnnnnnnnnnnnnnnnnnnnnnnnnnnnnnnnnnnnnnnnnnnnnnnnnnnnnnnnnnnnnnnnnnnnnnnnnnnnnnnnnnnnnnnnnnnnnnnnnnnnnnnnnnnnnnnnnnnnnnnnnnnnnnnnnnnnnnnnnnnnnnnnnnnnnnnnnnnnnnnnnnnnnnnnnnnnnnnnnnnnnnnnnnnnnnnnnnnnnnnnnnnnnnnnnnnnnnnnnnnnnnnnnnnnnnnnnnnnnagcttggatcagagaggagggccgctgctccagcagtgaggatgacaccgacgtggacgtggagggtctgcggagacggcggggccgggaggccggcgcacctcagcccgtggcgcccctggctgtggagacccaggccgggggggagggtgcaggcggggagctgggcatctccctcaacatgtgccgccacggggccttggttctnnnnnnnnnnnnnnnnnnnnnnnnnnnnnnnnnnnnnnnnnnnnnnnnnnnnnnnnnnnnnnnnnnnnnnnnnnnnnnnnnnnnnnnnnnnnnnnnnnnnnnnnnnnnnnnnnnnnnnnnnnnnnnnnnnnnnnnnnnnnnnnnnnnnnnnnnnnnnnnnnnnnnnnnnnnnnnnnnnnnnnnnnnnnnnnnnnnnnnnnnnnnnnnnnnnnnnnnnnnnnnnnnnnnnnnnnnnnnnnnnnnnnnnnnnnnnnnnnnnnnnnnnnnnnnnnnnnnnnnnnnnnnnnnnnnnnnnnnnnnnnnnnnnnnnnnnnnnnnnnnnnnnnnnnnnnnnnnnnnnnnnnnnnnnnnnnnnnnnnnnnnnnnnnnnnnnnnnnnnnnnnnnnnnnnnnnnnnnnnnnnnnnnnnnnnnnnnnnnnnnnnnnnnnnnnnnnnnnnnnnnnnnnnnnnnnnnnnnnnnnnnnnnnnnnnnnnnnnnnnnnnnnnnnnnnnnnnnnnnnnnnnnnnnnnnnnnnnnnnnnnnnnnnnnnnnnnnnnnnnnnnnnnnnnnnnnnnnnnnnnnnnnnnnnnnnnnnnnnnnnnnnnnnnnnnnnnnnnnnnnnnnnnnnnnnnnnnnnnnnnnnnnnnnnnnnnnnnnnnnnnnnnnnnnnnnnnnnnnnnnnnnnnnnnnnnnnnnnnnnnnnnnnnnnnnnnnnnnnnnnnnnnnnnnnnnnnnnnnnnnnnnnnnnnnnnnnnnnnnnnnnnnnnnnnnnnnnnnnnnnnnnnnnnnnnnnnnnnnnnnnnnnnnnnnnnnnnnnnnnnnnnnnnnnnnnnnnnnnnnnnnnnnnnnnnnnnnnnnnnnnnnnnnnnnnnnnnnnnnnnnnnnnnnnnnnnnnnnnnnnnnnnnnnnnnnnnnnnnnnnnnnnnnnnnnnnnnnnnnnnnnnnnnnnnnnnnnnnnnnnnnnnnnnnnnnnnnnnnnnnnnnnnnnnnnnnnnnnnnnnnnnnnnnnnnnnnnnnnnnnnnnnnnnnnnnnnnnnnnnnnnnnnnnnnnnnnnnnnnnnnnnnnnnnnnnnnnnnnnnnnnnnnnnnnnnnnnnnnnnnnnnnnnnnnnnnnnnnnnnnnnnnnnnnnnnnnnnnnnnnnnnnnnntaccgggcaccccagggctgctcaggtgtggctgagtgtgcccggcaggagggcctgactttcttcggcacagagctagccccagtgcggcaacaggagctggcctctctgctaagaacatacctggcacggctgccctgggctgggcagctgaccaaggagctacccctctcgcctgctttctttggtgaggacggcatcttccgtcatgaccgcctccgcttccgggattttgtggatgccctggaggacagcttggaggaggtggctgtgcaacagacaggtgatgatgatgaagtagatgactttgaggacttcatcttcagccacttctttggagacaaagcactgaagaagagg

SEQ ID NO: 32054 - DNA, 601 bp, Macaca Mulatta
  misc_feature (1)...(601): n = A,T,C or G
caatgccaatttacgtgccattatggaactacttatgannnnnnnnnnnnnnnnnnnnnnnnnnnnnnnnnnnnnnnnnnnnnnnnnnnnnnnnnnnnnnnnnnnnnnnnnnnnnnnnnnnnnnnnnnnnnnnnnnnnnnnnnnnnnnnnnnnnnnnnnnnnnnnnnnnnnnnnnnnnnnnnnnnnnnnnnnnnnnnnnnnnnnnnnnnnnnnnnnnnnnnnnnnnnnnnnnnnnnnnnnnnnnnnnnnnnnnnnnnnnnnnnnnnnnnnnnnnnnnnnnnnnnnnnnnnnnnnnnnnnnnnnnnnnnnnnnnggaatggttgcccgttttattccttcccatcttaataataagtcctgcagagtgacatctctgtgttacagtgaagatggtcaagagattctcgttagttactcttcagattacatatatcttttcgacccgaaagatgatacagcacgagaacttaaaactccttctgcagaagagagaagagaagagnagttgcgacaaccaccagttaagcgtttgagacttcgtggtgattggtcagatactggacccagagcaaggccggagagtgaacgagaacgagatggn

SEQ ID NO: 32055 - DNA, 741 bp, Macaca Mulatta
ggggaaggaaggcgagccagggatgtagggccatggcgaacccgaagctgctgggactggagctaagcgaggcggagacgatgggtgctgattcggcacgatttgaggagctgctgctgcaggcctcgaaggagctccagcaagcccagacaaccagaccagaatcgacacaaatccagcctcagccgggcttctgcataaagaccaactcctcagaagggaaggttttcatcaacatctgccactccctctccatccctcctcccgccgacgtgaccgaggaggagctgcttcagatgctagaggaggaccaagctgggtttcgcatccccatgagtctgggagagcctcatgcagaactggatgcaagaggccagggctgtaccgcctatgacgtagctgtcaacagcgacttctaccggaggatgcagaacagcgatttcttgcgggagctcgtgatcaccatcgccagagagggccttgaggacaaatacaacttgcagctgaatccggaatggcgcatgatgaagaaccggcccattcatgggctccatctcgcagcagaacatccgctcgcagcagcgtcctcggattcaggaactggggggacctgtacacgccggcccctggggagagctgatctcagccctgaaaaacctcacctgaacctgtggcgggaagcccccaacctctcttggccgaaatttgacccccccaaactggaaggaacccctggggcct

SEQ ID NO: 32056 - DNA, 2847 bp, Macaca Mulatta
  misc_feature (1)...(2847): n = A,T,C or G
gcatgtactgcatcccttgtgaaggtccttgccccaaggtctgtgaggaagaaaagaaaacaaagaccattgattctgttacttctgctcagatgctccaaggatgcaccatcttcaagggcaatttgctcattaacatccgacgggggannnnnnnnnnnnnnnnnnnnnnnnnnnnnnnnnnnnnnnnnnnnnnnnnnnnnnnnnnnnnnnnnnnnnnnnnnnnnnnnnnnnnnnnnnnnnnnnnnnnnnnnnnnnnnnnnnnnnnnnnnnnnnnnnnnnnnnnnnnnnnnnnnnnnnnnnnnnnnnnnnnnnnnnnnnnnnnnnnnnnnnnnnnnnnnnnnnnnnnnnnnnnnnnnnnnnnnnnnnnnnnnnnnnnnnnnnnnnnnnnnnnnnnnnnnnnnnnnnnnnnnnnnnnnnnnnnnnnnnnnnnnnnnnnnnnnnnnnnnnnnnnnnnnnnnnnnnnnnnnnnnnnnnnnnnnnnnnnnnnnnnnnnnnnnnnnnnnnnnnnnnnnnnnnnnnnnnnnnnnnnnnnnnnnnnnnnnnnnnnnnnnnnnnnnnnnnnnnnnnnnnnnnnnnnnnnnnnnnnnnnnnnnnnnnnnnnnnnnnnnnnnnnnnnnnnnnnnnnnnnnnnnnnnnnnnnnnnnnnnnnnnnnnnnnnnnnnnnnnnnnnnnnnnnnnnnnnnnnnnnnnnnnnnnnnnnnnnnnnnnnnnnnnnnnnnnnnnnnnnnnnnnnnnnnnnnnnnnnnnnnnnnnnnnnnnnnnnnnnnnnnnnnnnnnnnnnnnnnnnnnnnnnnnnnnnnnnnnnnnnnnnnnnnnnnnnnnnnnnnnnnnnnnnnnnnnnnnnnnnnnnnnnnnnnnnnnnnnnnnnnnnnnnnnnnnnnnnnnnnnnnnnnnnnnnnnnnnnnnnnnnnnnnnnnnnnnnnnnnnnnnnnnnnnnnnnnnnnccctctctgcccaacggcaacctgagttactacattgtgcgctggcagcggcagcctcaggacggctacctttaccggcacaattactgctccaaannnnnnnnnnnnnnnnnnnnnnnnnnnnnnnnnnnnnnnnnnnnnnnnnnnnnnnnnnnnnnnnnnnnnnnnnnnnnnnnnnnnnnnnnnnnnnnnnnnnnnnnnnnnnnnnnnnnnnnnnnnnnnnnnnnnnnnnnnnnnnnnnnnnnnnnnnnnnnnnnnnnnnnnnnnnnnnnnnnnnnnnnnnnnnnnnnnnnnnnnnnnnnnnnnnnnnnnnnnnnnnnnnnnnnnnnnnnnnnnnnnnnnnnnnnnnnnnnnnnnnnnnnnnnnnnnnnnnnnncagacctgaaaggaagcggagagatgtcatgcaagtggccaacaccaccatgtccagccgaagcaggaacaccacggtggcagacacctacaacatcacagatctggaagagctagagacagagtaccctttctttgagagcagagtggataataaggagagaactgtcatttctaaccttcggcctttcacattgtaccgcattgatatccacagctgcaaccacgaggctgagaaactgggctgcagcgcctccaactttgtctttgcaaggactatgcctgcannnnnnnnnnnnnnnnnnnnnnnnnnnnnnnnnnnnnnnnnnnnnnnnnnnnnnnnnnnnnnnnnnnnnnnnnnnnnnnnnnnnnnnnnnnnnnnnnnnnnnnnnnnnnnnnnnnnnnnnnnnnnnnnnnnnnnnnnnnnnnnnnnnnnnnnnnnnnnnnnnnnnnnnnnnnnnnnnnnnnnnnnnnnnnnnnnnnnnnnnnnnnnnnnnnnnnnnnnnnnnnnnnnnnnnnnnnnnnnnnnnnnnnnnnnnnnnnnnnnnnnnnnnnnnnnnnnnnnnnnnnnnnnnnnnnnnnnnnnnnnnnnnnnnnnnnnnnnnnnnnnnnnnnnnnnnnnnnnnnnnnnnnnnnnnnnnnnnnnnnnnnnnnnnnnnnnnnnnnnnnnnnnnnnnnnnnnnnnnnnnnnnnnnnnnnnnnnnnnnnnnnnnnnnnnnnnnnnnnnnnnnnnnnnnnnnnnnnnnnnnnnnnnnnnnnnnnnnnnnnnnnnnnnnnnnnnnnnnnnnnnnnnnnnnnnnnnnnnnnnnnnnnnnnnnnnnnnnnnnnnnnnnnnnnnnnnnnnnnnnnnnnnnnnnnnnnnnnnnnnnnnnnnnnnnnnnnnnnnnnnnnnnnnnnnnnnnnnnnnnnnnnnnnnnnnnnnnnnnnnnnnnnnnnnnnnnnnnnnnnnnnnnnnnnnnnnnnnnnnnnnnnnnnnnnnnnnnnnnnnnnggtgcggttgctgggtgtggtgtcccagggccagccaacgctggtcatcatggaactgatgacgcggggcgatctcaaaagttatctccggtctctgaggccagaaatggannnnnnnnnnnnnnnnnnnnnnnnnnnnnnnnnnnnnnnnnnnnnnnnnnnnnnnnnnnnnnnnnnnnnnnnnnnnnnnnnnnnnnnnnnnnnnnnnnnnnnnnnnnnnnnnnnnnnnnnnnnnnnnnnnnnnnnnnnnnnnnnnnnnnnnnnnnnnngattttgggatgacgcgagatatctatgagacagactattaccggaaaggagggaaagggctgttgcccgtgcgctggatgtctccnnnnnnnnnnnnnnnnnnnnnnnnnnnnnnnnnnnnnnnnnnnngtccttcggggttgtcctctgggagatcgccacactggccgagcagccctaccagggcttgtccaacgagcaagtccttcgcttcgtcatggagggcggccttctggacagccagacaactgccccgacatgctgt

SEQ ID NO: 32057 - DNA, 1929 bp, Macaca Mulatta
  misc_feature (1)...(1929): n = A,T,C or G
ctttgctttcctctctctcttcttcgtcgttgctgttccttctctcttctctgcttcagtgtttgnnnnnnnnnnnnnnnnnnnnnnngtcttttcttttacctcgtctcttctctgttgtctgtgtctccttctctctgtctgctctgtcttgtccttactctccactctaccgcgtcgcgccggaagttttgggtccaaacgcaaacgaacatttcttggtcttcttagtagcacaaacatattttcttcttgcgtcgctcntagttggctngacttcgcnagaccctcgtgctcgtttaccgattctgggnaagcgnnnnnnnttttttttttttgaacccaacacagctgttatttacttcaaagtttcttcagctcagcttgagaaggtgaggggaatgaagcaagatgctgttaaagggccataggagagaaaaggtatctttacaagctgtgagagactcatcagatgcctgggtactgtcgctacacgaagcctgagagtagctccctccttttctacctgagctcttcctcctccacatcacagcaacaatcacagctccagtgaccacagctccaaggagaaccaggccagcaatgatgcccacgatggggatggtggactgggaagacggctcccatctcagggtgaggggctcgggtagcccctcatgctgcacatggcacgtgtatctctgctcctctccagaaggtaccaccacagctgcccacttctggaaagttccatcccctgcaggcctggtctccacaagctccgtgtcctgggtctggtcctccccatcccgctgccaggtcactgtgatctccgcaggatagaagcccagggcccagcacctcagggtggcctcatgatcagagacggggtggtgggccacgtgtgtctttgggggttctgagcgctgcagcgtctccttcccattctccaggtatctgtggagccactccacgcatgtgtcttccaggtaggctctctggtgctcagcctcagagccatcatttgacttttgctcggagatttgagccgccgtgtccaccgcggaccaggagcgcaggtcctcattcagggtgagataatccttgccgtcgtaggcgaactgttcatacccgcggaggaagcgcccgtccggccccaggtcgcagccatgcatccactggagggtatgagacccctggccccgcctgctagtcagtcccgcccaccgagccccgcccctgtcgccgccaacccgcagggattttggcctaaactgaaaacgaaaccgggtaaaggagcctgggactctgccgggtcgaggatctctgcaggtcccacagcctcggggttaatcttggaccctgagactcaagggaaccaacaccgtccgtgaggcatgaagccaggagtaagtgacatgcgccccgggctggggtcactcaccggcctcgctctggttgtagtatccgagcagcgtctctcaggttcactcagaaagtctgtgccttgtccctggcgcccagtgtctccagctcccaatactccaggcccctcctgctccacccaccactcccgcggctccatcctcggactcgcggcgtcactgtcaaaccgcacgaactgggtgtcgtccacgtagcccacggcgatgaagcggggctccccgtggccgggccgggacatgggcggtgctgaaatacctcaaggagtgggagcctgggggcgcggagaggctgagaccctccgaccctcctccccgcgcgactccccaggtcctgcgcccctgcccagagggcgccttgctcctctctcctcccgcagaggctgtttccttcctgaccccgcactcacccgccttggtctcggtcagggccaaggtccccgagagcagcaggaggagggttcggggcgccatgaccccatcgtcg

SEQ ID NO: 32058 - DNA, 149 bp, Macaca Mulatta
ccagcttcaaggagcggttccacgctagcgtgcgcaggctgacgcccagctgcgagatcaccttcatcgagtcggaggagggcagtggccggggcgcggccctggtctcggcggtggcctgtaagaaggcctgcatgctgggccagtga

SEQ ID NO: 32059 - DNA, 510 bp, Macaca Mulatta
  misc_feature (1)...(510): n = A,T,C or G
gacannnnnnnnnnnnnnnnnnnnnnnnnnnnnnnnttattatactttaagttctagggtacatgtgcacaacgtgcaggtctgccacacatgtatacctgtgccatgttggtgcgctgcacccatcaactcgtcagcatccatcaactcgtcatttacatcaggtataactcccaatgcaatccctccccgctcccccgacagtttattattaaatcagtgtttatcaaactttgatggacaccatgaaaaatctgtagagattattaataaaaatggtatcagtatccttagcccagaaaatctgatttagcagaattgggcagggtttgggtatctctgtttcttctattttcctactggtgctgaagtaacctaatgtttgaaaaatatttgattatagacaatgttatatttggtgtatagttgtgtagttggtggagcttttaaaaacaatatagatgcttagacatcactccataacaactgaatcagaatctctgagtgtcc

SEQ ID NO: 32060 - DNA, 411 bp, Macaca Mulatta
aacatccagctgtgatgtaaacagacatcacgcattacgatcaataggtcaagtcgttccactggtgtctaatatgccattgatgcttgaggtgaattctgtaacgtgaagcctcttcccatcattcacacagccacttacaattttctgtttaattaaaatcatatttaaacaaaaagtgtacgatgtatgtatcaaaataaatacttgttctttagaatgtgtgccatattttacattgttccaggatttagtaatttcctaataggtttcctagagcacaaaatatttgcatctgtgtttttccctcattcttacattacaacttaggttccgtcactttctactttgttccttaaacccgagccgcctaaacccagggctgacctgtggtggatggcgccagaagat

SEQ ID NO: 32061 - DNA, 3287 bp, Macaca Mulatta
  misc_feature (1)...(3287): n = A,T,C or G
ggatcttgaagcaagagcaccccgagttggcagtcctggcagactcggttgaccttcaggagtccacagggatagcctccgacagctccagcgactcttccagctcctccagctccagctcgtcagactccgactcagagnnnnnnnnnnnnnnnnnnnnnnnnnnnnnnnnnnnnnnnnnnnnnnnnnnnnnnnnnnnnnnnnnnnnnnnnnnnnnnnnnnnnnnnnnnnnnnnnnnnnnnnnnnnnnnnnnnnnnnnnnnnnnaggattagggacacttgtggaggccgggctcacccctgagcagataaagagactctccctgaggtggcttcagcgtaagcttttggcagccacccaactcagttctcacgtcttctactcctaccttctctgtctttgaatttggatattccttccctggtccaagctcctatcttcagtcaaatgctgtttttactgcttcctaaggatagattatcaagaagtttaacagctcggccagctcagtgaaacactgaagctaatgggatgttgggtaagaaggttctgtgccgtctcattgaaaaccgagccggtcaaccacaaggctggcggggtgtgatccttgtaacgtcttgttgtgtctgttactcacggatgtcggtannnnnnnnnnnnnnnnnnnnnnnnnnnnnnnnnnnnnnnnnnnnnnnnnnnnnnnnnnnnnnnnnnnnnnnnnnnnnnnnnnnnnnnnnnnnnnnnnnnnnnnnnnnnnnnnnnnnnnnnnnnnnnnnnnnnnnnnnnnnnnnnnnnnnnnnnnnnnnnnnnnnnnnnnnnnnnnnnnnnnnnnnnnnnnnnnnnnnnnnnnnnnnnnnnnnnnnnnnnnnnnnnnnnnnnnnnnnnnnnnnnnnnnnnnnnnnnnnnnnnnnnnnnnnnnnnnnnnnnnnnnnnnnnnnnnnnnnnnnnnnnnnnnnnnnnnnnnnnnnnnnnnnnnnnnnnnnnnnnnnnnnnnnnnnnnnnnnnnnnnnnnnnnnnnnnnnnnnnnnnnnnnnnnnnnnnnnnnnnnnnnnnnnnnnnnnnnnnnnnnnnnnnnnnnnnnnnnnnnnnnnnnnnnnnnnnnnnnnnnnnnnnnnnnnnnnnnnnnnnnnnnnnnnnnnnnnnnnnnnnnnnnnnnnnnnnnnnnnnnnnnnnnnnnnnnnnnnnnnnnnnnnnnnnnnnnnnnnnnnnnnnnnnnnnnnnnnnnnnnnnnnnnnnnnnnnnnnnnnnnnnnnnnnnnnnnnnnnnnnnnnnnnnnnnnnnnnnnnnnnnnnnnnnnnnnnnnnnnnnnnnnnnnnnnnnnnnnnnnnnnnnnnnnnnnnnnnnnnnnnnnnnnnnnnnnnnnnnnnnnnnnnnnnnnnnnnnnnnnnnnnnnnnnnnnnnnnnnnnnnnnnnnnnnnnnnnnnnnnnnnnnnnnnnnnnnnnnnnnnnnnnnnnnnnnnnnnnnnnnnnnnnnnnnnnnnnnnnnnnnnnnnnnnnnnnnnnnnnnnnnnnnnnnnnnnnnnnnnnnnnnnnnnnnnnnnnnnnnnnnnnnnnnnnnnnnnnnnnnnnnnnnnnnnnnnnnnnnnnnnnnnnnnnnnnnnnnnnnnnnnnnnnnnnnnnnnnnnnnnnnnnnnnnnnnnnnnnnnnnnnnnnnnnnnnnnnnnnnnnnnnnnnnnnnnnnnnnnnnnnnnnnnnnnnnnnnnnnnnnnnnnnnnnnnnnnnnnnnnnnnnnnnnnnnnnnnnnnnnnnnnnnnnnnnnnnnnnnnnnnnnnnnnnnnnnnnnnnnnnnnnnnnnnnnnnnnnnnnnnnnnnnnnnnnnnnnnnnnnnnnnnnnnnnnnnnnnnnnnnnnnnnnnnnnnnnnnnnnnnnnnnnnnnnnnnnnnnnnnnnnnnnnnnnnnnnnnnnnnnnnnnnnnnnnnnnnnnnnnnnnnnnnnnnnnnnnnnnnnnnnnnnnnnnnnnnnnnnnnnnnnnnnnnnnnnnnnnnnnnnnnnnnnnnnnnnnnnnnnnnnnnnnnnnnnnnnnnnnnnnnnnnnnnnnncattggcaggcaggtgggaaggagctctcactgcagtgttcacaggcagggaggctgcgtgtggatgcgttagaattgtgtgctgttgcctctcaagatatccactagaaacaggtgtaaccaggaaaatacaggtctctgcccactgttattaacagactgtcatttcctgacattgggtcatgtggctttaggaggctggttctctatttttgtcttagttcaattttttgcatcctaaaatgccaaacccagtatgtggctgggtaggtagaactgtgctgcctgcctgccatgggggctgctctcccgccttaccctcacgcccacagctcgcttggttccgtggtgggcacaagatgtgtttggctataaagtcaaactctgaatgtataatctcttggtagtaacatctgagtggtgttgctcctcctgctttttaaaaagacttttcttgccatctacaaaaagcttttttctttttcccagtattgctcctgtgctgccatatttgccctttttccttaccttcctctcaattttctatcaaccactcctctaaacttcagtttaaaattaaaataaagcccaaaaaggctatttgccaccagggggcgtggtaggacatgttgccagtggtctggctcgtagagcagaaattttgaattttaaaaattagccacccaggccaggtgcagtggctcacacctgtaatcccaacactggagaagctgaggcagggatcgcttgagtccaggagttcaagaccagtctgggcaacatggtgagatcccatctctcaattttaatctagaaaataaagattagccacccggttttccttctccagatgctaaaggtgattcctgtttggtaacagtattccagaaatgaggggaataacatacctgataggcccaagtcagctctggatagtacattgtctggatagtacagattatgtgctcctgggacatgctttgtttattcctgccaggtcagaaattcagcagccctaccccctttttttcttactgtcactgtgggctagacaggttctctgttatgtaagcacagcaggggttaggtggggaaaccgtgtgtgagaaaggagtggcgtggtggcatgtggccagtgtagggtaggaagagtgggtaccctgagaccacttgttcagaagttaactcttcttcccatctggcgtgagttactccattgaagggtgccaacaacagaaaagtgaagg

SEQ ID NO: 32062 - DNA, 1782 bp, Macaca Mulatta
  misc_feature (1)...(1782): n = A,T,C or G
agattatgcttagaggattctgcagcaattcttgatattggacatattcaaaatctcctcaacttatgtcctccccgtctattgccttccagctttaactcagttgtgctcccttcaaacattttacatgatttgcaatggttacatgaactctggggaagtcatatttgcaacatctcatactttattcactatggcactttaggaaaagaaattggggaaaagcttccaaaacattatcttaaaaaatgaatcttattgtgaaacttcggagaagttttcgaacattgattgttctcttagctaccttttgcttggtgagcattgtcatttctgccnnnnnnnnnnnnnnnnnnnnnnnnnnnnnnnnnnnnnnnnnnnnnnnnnnnnnnnnnnnnnnnnnnnnnnnnnnnnnnnnnnnnnnnnnnnnnnnnnnnnnnnnnnnnnnnnnnnnnnnnnnnnnnnnnnnnnnnnnnnnnnnnnnnnnnnnnnnnnnnnnnnnnnnnnnnnnnnnnnnnnnnnnnnnnnnnnnnnnnnnnnnnnnnnnnnnnnnnnnnnnnnnnnnnnnnnnnnnnnnnnnnnnnnnnnnnnnnnnnnnnnnnnnnnnnnnnnnnnnnnnnnnnnnnnnnnnnnnnnnnnnnnnnnnnnnnnnnnnnnnnnnnnnnnnnnnnnnnnnnnnnnnnnnnnnnnnnnnnnnnnnnnnnnnnnnnnnnnnnnnnnnnnnnnnnnnnnnnnnnnnnnnnnnnnnnnnnnnnnnnnnnnnnnnnnnnnnnnnnnnnnnnnnnnnnnnnnnnnnnnnnnnnnnnnnnnnnnnnnnnnnnnnnnnnnnnnnnnnnnnnnnnnnnnnnnnnnnnnnnnnnnnnnnnnnnnnnnnnnnnnnnnnnnnnnnnnnnnnnnnnnnnnnnnnnnnnnnnnnnnnnnnnnnnnnnnnnnnnnnnnnnnnnnnnnnnnnnnnnnnnnnnnnnnnnnnnnnnnnnnnnnnnnnnnnnnnnnnnnnnnnnnnnnnnnnnnnnnnnnnnnnnnnnnnnnnnnnnnnnnnnnnnnnnnnnnnnnnnnnnnnnnnnnnnnnnnnnnnnnnnnnnnnnnnnnnnnnnnnnnnnnnnnnnnnnnnnnnnnnnnnnnnnnnnnnnnnnnnnnnnnnnnnnnnnnnnnnnnnnnnnnnnnnnnnnnnnnnnnnnnnnnnnnnnnnnnnnnnnnnnnnnnnnnnnnnnnnnnnnnnnnnnnnnnnnnnnnnnnnnnnnnnnnnnnnnnnnnnnnnnnnnnnnnnnnnnnnnnnnnnnnnnnnnnnnnnnnnnnnnnnnnnnnnnnnnnnnnnnnnnnnnnnnnnnnnnnnnnnnnnnnnnnnnnnnnnnnnnnnnnnnnnnnnnnnnnnnnnnnnnnnnnnnnnnnnnnnnnnnnnnnnnnnnnnnnnnnnnnnnnnnnnnnnnnnnnnnnnnnnnnnnnnnnnnnnnnnnnnnnnnnnnnnnnnnnnnnnnnnnnnnnnnnnnnnnnnnnnnnnnnnnnnnnnnnnnnnnnnnnnnnnnnnnnnnnnnnnnnnnnnnnnnnnnnnnnnnnnnnnnnnnnnnnnnnnnnnnnnnnnnnnnnnnnnnnnnnnnnnnnnnnnnnnnnnnnnnnnnnnnnnnnnnnnnnnnnnnnnnnnnnnnnnnnnnnnnngtcctccctcgacagacttgtgggttgttcactcacactattttctacaaagaatatccaggaggaccccaagaactggataaaagtatcagaggaggtgaactttttctcacaatccttctaaaccca

SEQ ID NO: 32063 - DNA, 111 bp, Macaca Mulatta
cgctgagaaggggacaaggtttacgtcatgtactaaaataatagacaatgtatcgctttaaagattaaaattccgtatatttgatgtattaaagggttttacttcttctta

SEQ ID NO: 32064 - DNA, 625 bp, Macaca Mulatta
  misc_feature (1)...(625): n = A,T,C or G
gtgagccatctatatggatttggactgatggatgcagaagccatggtgatggaggcagagaagtggaccaccgttccccggcagcacgtgtgtgtggagagcacagaccgacaaatcaannnnnnnnnnnnnnnnnnnnnnnnnnnnnnnnnnnnnnnnnnnnnnnnnnnnnnnnnnnnnnnnnnnnnnnnnnnnnnnnnnnnnnnnnnnnnnnnnnnnnnnnnnnnnnnnnnnnnnnnnnnnnnnnnnnnnnnnnnnnnnnnnnnnnnnnnnnnnnnnnnnnnnnnnnnnnnnnnnnnnnnnnnnnnnnnnnnnnnnnnnnnnnnnnnnnnnnnnnnnnnnnnnnnnnnnnnnnnnnnnnnnnnnnnnnnnnnnnnnnnnnnnnnnnnnnnnnnnnnnnnnnnnnnnnnnnnnnnnnnnnnnnnnnnnnnnnnnnnnnnnnnnnnnnnnnnnnnnnnnnnnnnnnnnnnnnnnnnnnnnnnnnnnnnnnnnnnnnnnnnnnnnnnnnnnnnnnnnnnnnnnnnnnnnnnnnnnnnnnnnnnnnnnnnnnnnnnnnnnnnnnnnnnnnnnnnnnnnnnnnnnnnnnggtccctgcgaccctgagtgcagtgaggttggctgtgac

SEQ ID NO: 32065 - DNA, 395 bp, Macaca Mulatta
ctgcctgccctgacctacaggctaggtggtggtctccttgttttggtgtccaggactcaataaaagcatctatttttttttagcacttaagctggcaaggcagtaggggcacacactgttaggtggtggccaccttcagggtcaggggagaagaatgtgtccatagcgtgcccttgaagcagagaacagccccgagcagtgtgaggacacaggcatcccagcctcagctggtgggagtggctgccgctccctgagagccctgccgccccgtgtgttccgtgctggtggccaaggccgtgtgtgagggaagaggggtgcctctcttccctgctgctggcctggggtgtttccaaaacaggcttttgcacacgtgcaggttgcaccaagaggtctga

SEQ ID NO: 32066 - DNA, 7209 bp, Macaca Mulatta
  misc_feature (1)...(7209): n = A,T,C or G
atgaggagaatcttcacgagctgcctcgcattgtgacatgtctgatcccttgctcccatccctgcagcatgaacaaggtnnnggtggacactcactgacctgtcaaaaggttgccccacaaaactttggggtccatgtctgaatggattgccggagccttctcatctctcccttcgcccagttccctgcatcctaagactcgaagccagcacaggacctgggaaaaattacatgnnnnnnnnnnnnnnnnnnnnnnnnnnnnnnnnnnnnnnnnnnnnnnnnnnnnnnnnnnnnnnnnnnnnnnnnnnnnnnnnnnnnnnnnnnnnnnnnnnnnnnnnnnnnnnnnnnnnnnnnnnnnnnnnnnnnnnnnnnnnnnnnnnnnnnnnnnnnnnnnnnnnnnnnnnnnnnnnnnnnnnnnnnnnnnnnnnnnnnnnnnnnnnnnnnnnnnnnnnnnnnnnnnnnnnnnnnnnnnnnnnnnnnnnnnnnnnnnnnnnnnnnnnnnnnnnnnnnnnnnnnnnnnnnnnnnnnnnnnnnnnnnnnnnnnnnnnnnnnnnnnnnnnnnnnnnnnnnnnnnnnnnnnnnnnnnnnnnnnnnnnnnnnnnnnnnnnnnnnnnnnnnnnnnnnnnnnnnnnnnnnnnnnnnnnnnnnnnnnnnnnnnnnnnnnnnnnnnnnnnnnnnnnnnnnnnnnnnnnnnnnnnnnnnnnnnnnnnnnnnnnnnnnnnnnnnnnnnnnnnnnnnnnnnnnnnnnnnnnnnnnnnnnnnnnnnnnnnnnnnnnnnnnnnnnnnnnnnnnnnnnnnnnnnnnnnnnnnnnnnnnnnnnnnnnnnnnnnnnnnnnnnnnnnnnnnnnnnnnnnnnnnnnnnnnnnnnnnnnnnnnnnnnnnnnnnnnnnnnnnnnnnnnnnnnnnnnnnnnnnnnnnnnnnnnnnnnnnnnnnnnnnnnnnnnnnnnnnnnnnnnnnnnnnnnnnnnnnnnnnnnnnnnnnnnnnnnnnnnnnnnnnnnnnnnnnnnnnnnnnnnnnnnnnnnnnnnnnnnnnnnnnnnnnnnnnnnnnnnnnnnnnnnnnnnnnnnnnnnnnnnnnnnnnnnnnnnnnnnnnnnnnnnnnnnnnnnnnnnnnnnnnnnnnnnnnnnnnnnnnnnnnnnnnnnnnnnnnnnnnnnnnnnnnnnnnnnnnnnnnnnnnnnnnnnnnnnnnnnnnnnnnnnnnnnnnnnnnnnnnnnnnnnnnnnnnnnnnnnnnnnnnnnnnnnnnnnnnnnnnnnnnnnnnnnnnnnnnnnnnnnnnnnnnnnnnnnnnnnnnnnnnnnnnnnnnnnnnnnnnnnnnnnnnnnnnnnnnnnnnnnnnnnnnnnnnnnnnnnnnnnnnnnnnnnnnnnnnnnnnnnnnnnnnnnnnnnnnnnnnnnnnnnnnnnnnnnnnnnnnnnnnnnnnnnnnnnnnnnnnnnnnnnnnnnnnnnnnnnnnncttcaccatggggtcgcccctcagggggcctgggttggaggctctctgtaatcaggagggagagctggaccggaggagcgtgatcttctcctccagcgcttgtgaccaagtgagcacctcggtgcattcttattctggggtgagcagtttggacaaagacctctctgagccggtgccaaagggtctgtgggtgggagctggccagtccctccccagctcacaggcctactcccacggtgggctgatggccgaccacttgccaggaaggatgcggcccaacaccagctgcccggtgccaatcaaagtctgccctcgctcaccccccttggagaccaggaccaggacttccagctcctgctcctcctattcctatgcggaggacgggagcgggggctcgccctgcagcctccctctctgtgagttctcctcctcgccctgttcgcagggagccagattccttgccacagaacatcaggaaccaggcctgatgggagacggaatgtacaaccaagtgcggccccagattaaatgtgagcagtcttacggaaccaactccagtgacgaatccggatcgttctcggaagcagacagtgagtcgtgtcctgtgcaggacaggggccaggaggtannnnnnnnnnnnnnnnnnnnnnnnnnnnnnnnnnnnnnnnnnnnnnnnnnnnnnnnnnnnnnnnnnnnnnnnnnnnnnnnnnnnnnnnnnnnnnnnnnnnnnnnnnnnnnnnnnnnnnnnnnnnnnnnnnnnnnnnnnnnnnnnnnnnnnnnnnnnnnnnnnnnnnnnnnnnnnnnnnnnnnnnnnnnnnnnnnnnnnnnnnnnnnnnnnnnnnnnnnnnnnnnnnnnnnnnnnnnnnnnnnnnnnnnnnnnnnnnnnnnnnnnnnnnnnnnnnnnnnnnnnnnnnnnnnnnnnnnnnnnnnnnnnnnnnnnnnnnnnnnnnnnnnnnnnnnnnnnnnnnnnnnnnnnnnnnnnnnnnnnnnnnnnnnnnnnnnnnnnnnnnnnnnnnnnnnnnnnnnnnnnnnnnnnnnnnnnnnnnnnnnnnnnnnnnnnnnnnnnnnnnnnnnnnnnnnnnnnnnnnnnnnnnnnnnnnnnnnnnnnnnnnnnnnnnnnnnnnnnnnnnnnnnnnnnnnnnnnnnnnnnnnnnnnnnnnnnnnnnnnnnnnnnnnnnnnnnnnnnnnnnnnnnnnnnnnnnnnnnnnnnnnnnnnnnnnnnnnnnnnnnnnnnnnnnnnnnnnnnnnnnnnnnnnnnnnnnnnnnnnnnnnnnnnnnnnnnnnnnnnnnnnnnnnnnnnnnnnnnnnnnnnnnnnnnnnnnnnnnnnnnnnnnnnnnnnnnnnnnnnnnnnnnnnnnnnnnnnnnnnnnnnnnnnnnnnnnnnnnnnnnnnnnnnnnnnnnnnnnnnnnnnnnnnnnnnnnnnnnnnnnnnnnnnnnnnnnnnnnnnnnnnnnnnnnnnnnnnnnnnnnnnnnnnnnnnnnnnnnnnnnnnnnnnnnnnnnnnnnnnnnnnnnnnnnnnnnnnnnnnnnnnnnnnnnnnnnnnnnnnnnnnnnnnnnnnnnnnnnnnnnnnnnnnnnnnnnnnnnnnnnnnnnnnnnnnnnnnnnnnnnnnnnnnnnnnnnnnnnnnnnnnnnnnnnnnnnnnnnnnnnnnnnnnnnnnnnnnnnnnnnnnnnnnnnnnnnnnnnnnnnnnnnnnnnnnnnnnnnnnnnnnnnnnnnnnnnnnnnnnnnnnnnnnnnnnnnnnnnnnnnnnnnnnnnnnnnnnnnnnnnnnnnnnnnnnnnnnnnnnnnnnnnnnnnnnnnnnnnnnnnnnnnnnnnnnnnnnnnnnnnnnnnnnnnnnnnnnnnnnnnnnnnnnnnnnnnnnnnnnnnnnnnnnnnnnnnnnnnnnnnnnnnnnnnnnnnnnnnnnnnnnnnnnnnnnnnnnnnnnnnnnnnnnnnnnnnnnnnnnnnnnnnnnnnnnnnnnnnnnnnnnnnnnnnnnnnnnnnnnnnnnnnnnnnnnnnnnnnnnnnnnnnnnnnnnnnnnnnnnnnnnnnnnnnnnnnnnnnnnnnnnnnnnnnnnnnnnnnnnnnnnnnnnnnnnnnnnnnnnnnnnnnnnnnnnnnnnnnnnnnnnnnnnnnnnnnnnnnnnnnnnnnnnnnnnnnnnnnnnnnnnnnnnnnnnnnnnnnnnnnnnnnnnnnnnnnnnnnnnnnnnnnnnnnnnnnnnnnnnnnnnnnnnnnnnnnnnnnnnnnnnnnnnnnnnnnnnnnnnnnnnnnnnnnnnnnnnnnnnnnnnnnnnnnnnnnnnnnnnnnnnnnnnnnnnnnnnnnnnnnnnnnnnnnnnnnnnnnnnnnnnnnnnnnnnnnnnnnnnnnnnnnnnnnnnnnnnnnnnnnnnnnnnnnnnnnnnnnnnnnnnnnnnnnnnnnnnnnnnnnnnnnnnnnnnnnnnnnnnnnnnnnnnnnnnnnnnnnnnnnnnnnnnnnnnnnnnnnnnnnnnnnnnnnnnnnnnnnnnnnnnnnnnnnnnnnnnnnnnnnnnnnnnnnnnnnnnnnnnnnnnnnnnnnnnnnnnnnnnnnnnnnnnnnnnnnnnnnnnnnnnnnnnnnnnnnnnnnnnnnnnnnnnnnnnnnnnnnnnnnnnnnnnnnnnnnnnnnnnnnnnnnnnnnnnnnnnnnnnnnnnnnnnnnnnnnnnnnnnnnnnnnnnnnnnnnnnnnnnnnnnnnnnnnnnnnnnnnnnnnnnnnnnnnnnnnnnnnnnnnnnnnnnnnnnnnnnnnnnnnnnnnnnnnnnnnnnnnnnnnnnnnnnnnnnnnnnnnnnnnnnnnnnnnnnnnnnnnnnnnnnnnnnnnnnnnnnnnnnnnnnnnnnnnnnnnnnnnnnnnnnnnnnnnnnnnnnnnnnnnnnnnnnnnnnnnnnnnnnnnnnnnnnnnnnnnnnnnnnnnnnnnnnnnnnnnnnnnnnnnnnnnnnnnnnnnnnnnnnnnnnnnnnnnnnnnnnnnnnnnnnnnnnnnnnnnnnnnnnnnnnnnnnnnnnnnnnnnnnnnnnnnnnnnnnnnnnnnnnnnnnnnnnnnnnnnnnnnnnnnnnnnnnnnnnnnnnnnnnnnnnnnnnnnnnnnnnnnnnnnnnnnnnnnnnnnnnnnnnnnnnnnnnnnnnnnnnnnnnnnnnnnnnnnnnnnnnnnnnnnnnnnnnnnnnnnnnnnnnnnnnnnnnnnnnnnnnnnnnnnnnnnnnnnnnnnnnnaagagagtcctgaacggttcgatgtggggacggggtggtgggcagtggggaatagatggttgactttgtttctttctttgtgccattgtttggacaatattaaagctgcatgtaaaaggggaaattagtatacgatgtaggcgaacagtgaaatcatagtaacatatgttttagtattattaacttttttctgtacaaatattagcactaaatgtttaaatatgtatgaatgccagaaatttgtcagttcatgcagtaggatnnnnnnnnnnnnnnnnnnnnnnnnnnnnnnnnctttttaaacagttccacttttaaaacctgcctctgggnnnnnnnnnnnnnnnnnnnnnnnnnnnnnnnnnnnnnnnnnnnnnnnnnnnnnnnnnnnnnnnnnngtctgaaacagatcttgataaagctctgtgttggagctgctggtttttgttatggttgttggaatttcttggcctactangacagttctgtgcttcaccgtgaggtttgcctttgtggaaactggtgacagcgagaatannnnnnnnnnnnnnnnnnnnnnnnnnnnnnnnnnnnnnnnnnnnnnnnnnnnnnnnnnnnnnnnnnnnnnnnnnnnnnnnnnnnnnnnnnnnnnnnnnnnnnnnnnnnnnnnnnnnnnnnnnnnnnnnnnnnnnnnnnnnnnnnnnnnnnnnnnnnnnnnnnnnnnnnnnnnnnnnnnnnnnnnnnnnnnnnnnnnnnnnnnnnnnnnnnnnnnnnnnnnnnnnnnnnnnnnnnnnnnnnnnnnnnnnnnnnnnnnnnnnnnnnnnnnnnnnnnnnnnnnnnnnnnnnnnnnnnnnnnnnnnnnnnnnnnnnnnnnnnnnnnnnnnnnnnnnnnnnnnnnnnnnnnnnnnnnnnnnnnnnnnnnnnnnnnnnnnnnnnnnnnnnnnnnnnnnnnnnnnnnnnnnnnnnnnnnnnnnnnnnnnnnnnnnnnnnnnnnnnnnnnnnnnnnnnnnnnnnnnnnnnnnnnnnnnnnnnnnnnnnnnnnnnnnnnnnnnnnnnnnnnnnnnnnnnnnnnnnnnnnnnnnnnnnnnnnnnnnnnnnnnnnnnnnnnnnnnnnnnnnnnnnnnnnnnnnnnnnnnnnnnnnnnnnnnnnnnnnnnnnnnnnnnnnnnnnnnnnnnnnnnnnnnnnnnnnnnnnnnnnnnnnnnnnnnnnnnnnnnnnnnnnnnnnnnnnnnnnnnnnnnnnnnnnnnnnnnnnnnnnnnnnnnnnnnnnnnnnnnnnnnnnnnnnnnnnnnnnnnnnnnnnnnnnnnnnnnnnnnnnnnnnnnnnnnnnnnnnnnnnnnnnnnnnnnnnnnnnnnnnnnnnnnnnnnnnnnnnnnnnnnnnnnnnnnnnnnnnnnnnnnnnnnnnnnnnnnnnnnnnnnnnnnnnnnnnnnnnnnnnnnnnnnnnnnnnnnnnnnnnnnnnnnnnnnnnnnnnnnnnnnnnnnnnnnnnnnnnnnnnnnnnnnnnnnnnnnnnnnnnnnnnnnnnnnnnnnnnnnnnnnnnnnnnnnnnnnnnnnnnnnnnnnnnnnnnnnnnnnnnnnnnnnnnnnnnnnnnnnnnnnnnnnnnnnnnnnnnnnnnnnnnnnnnnnnnnnnnnnnnnnnnnnnnnnnnnnnnnnnnnnnnnnnnnnnnnnnnnnnnnnnnnnnnnnnnnnnnnnnnnnnnnnnnnnnnnnnnnnnnnnnnnnnnnnnnnnnnnnnnnnnnnnnnnnnnnnnnnnnnnnnnnnnnnnnnnnnnnnnnnnnnnnnnnnnnnnnnnnnnnnnnnnnnnnnnnnnnnnnnnnnnnnnnnnnnnnnnnnnnnnnnnnnnnnnnnnnnnnnnnnnnnnnnnnnnnnnnnnnnnnnnnnnnnnnnnnnnnnnnnnnnnnnnnnnnnnnnnnnnnnnnnnnnnnnnnnnnnnnnnnnnnnnnnnnnnnnnnnnnnnnnnnnnnnnnnnnnnnnnnnnnnnnnnnnnnnnnnnnnnnnnnnnnnnnnnnnnnnnnnnnnnnnnnnnnnnnnnnnnnnnnnnnnnnnnnnnnnnnnnnnnnnnnnnnnnnnnnnnnnnnnnnnnnnnnnnnnnnnnnnnnnnnnnnnnnnnnnnnnnnnnnnnnnnnnnnnnnnnnnnnnnnnnnnnnnnnnnnnnnnnnnnnnnnnnnnnnnnnnnnaatgaggaagagctgcctgcaaagctttctcacgtccctatttggctacctacttctctacattatgccccatttaaactaggagctgttttagaaatgacttcaaactgctccactgttgcttacagtttaggaggagtctcagatccataaaggagcaagaatcaagtttggtcctcaaatgactgtaaatagactaaagaacaaggtnnnnnnnnnnnnnnnnnnnnnnnnnaagaataaagctgttcgttgtaccatgggttagtgtttcttccccaggttgaacactgtgttggaagttcgatttctggtgagccagtccacagtacaatgccctgttgtggagttggtattcatacaggaagtctgtgtgcacgaggcattgtg

SEQ ID NO: 32067 - DNA, 474 bp, Macaca Mulatta
  misc_feature (1)...(474): n = A,T,C or G
tgatgcggtcagcaagagcatccacacctgtatgtatcccatttccccaggcgtggagccagctgccgcatggcccccagccagcaccaggaccccccagctctccacaccccaggatgccctccctccctacctcaacaccagctccctgctccccaagccccagagaactgtctccttccctanncncctcatacccagcccccagatctttctctcctcagttgcccccttggtggctctgacccctcccgatccccctcctcagtgctgagcaagggccaggcagtaacagggcagtatcgcttcctggcccggaacggtggctacctgtggacccagacccaggccacagtggtgtcagggggacggggcccccagtcggagagtatcgtctgtgtccattttttaatcaggtaagcaggaggaggggttggagtggctgtgtgtgggcctgatcggcacgtgtggaca

SEQ ID NO: 32068 - DNA, 571 bp, Macaca Mulatta
atgggtgtgaggaatttgaacaaacactgagaatgaaggagagtgacctgagcaagtagtagtggggtaaatggaaatagacaaaacggcaatcagcagagatgtggaggacagaatacaatgagggggccctgactgtcagtagcagagggggcaacagaagcctaattctcaaattccttagatgattttctgatttccaaattagtttccctttgaaatttgttgtatcaggttcagtttatgaggcctcaatacttttcagtcttaattatgtattgaaaatactttttgtttggtaaatacttttacattaattcagtgtgcactttgtaagaatattgatgatttgagttagtttagttttcaacatcttcctctattcctttatatgatctctgtatttaatgactgtaggataaaatttccaactaagtataaatatcaagttttctttgtgctgttttctgcaattattgaaggatgggctgaattgtcctagaactttgttccaacagattccatgtgttcataatgaataaattgctcaaagatatttcgaaagctcacc

SEQ ID NO: 32069 - DNA, 501 bp, Macaca Mulatta
tgtgatctgcctgagacccacagcctggataacaggaagaccatgatgctcctggcacagatgagcagaatctctccttcctcctgtctgatggacagacatgactttggatttccccagcaggagtttgatggcaaccagttccagaaggctccagccatctctgtcctccatgagctgatccagcagaccttcaacctctttaccacaaaagactcatctgctgcttgggatgaggacctcctagacaaattctgcactgaactctaccagcagctgaatgacttggaagcctgtgtcatgcagcaggagagggtgggagaaactcccctgatgaatgcggactccaccttggctgtgaagaaatacttccgaagaatcactctctatctgacagagaagaaatacagcccttgtgcctgggaggttgtcagagcagaaatcatgagatccttctctttatcaacaaacttgcaagaaagattaaggaggaaggaataa

SEQ ID NO: 32070 - DNA, 1395 bp, Macaca Mulatta
  misc_feature (1)...(1395): n = A,T,C or G
agctggaatatcagaagtctcagcccccacagcctggagataagtttgtgtctgttgtcagccagttcatcacagtagctagcttcagcttctctgatgttgaagatcttctagcagaagctaaagacctgnnnnnnnnnnnnnnnnnnnnnnnnnnnnnnnnnnnnnnnnnnnnnnnnnnnnnnnnnnnnnnnnnnnnnnnnnnnnnnnnnnnnnnnnnnnnnnnnnnnnnnnnnnnnnnnnnnnnnnnnnnnnnnnnnnnnnnnnnnnnnnnnnnnnnnnnnnnnnnnnnnnnnnnnnnnnnnnnnnnnnnnnnnnnnnnnnnnnnnnnnnnnnnnnnnnnnnnnnnnnnnnnnnnnnnnnnnnnnnnnnnnnnnnnnnnnnnnnnnnnnnnnnnnnnnnnnnnnnnnnnnnnnnnnnnnnnnnnnnnnnnnnnnnnnnnnnnnnnnnnnnnnnnnnnnnnnnnnnnnnnnnnnnnnnnnnnnnnnnnnnnnnnnnnnnnnnnnnnnnnnnnnnnnnnnnnnnnnnnnnnnnnnnnnnnnnnnnnnnnnnnnnnnnnnnnnnnnnnnnnnnnnnnnnnnnnnnnnnnnnnnnnnnnnnnnnnnnnnnnnnnnnnnnnnnnnnnnnnnnnnnnnnnnnnnnnnnnnnnnnnnnnnnnnnnnnnnnnnnnnnnnnnnnnnnnnnnnnnnnnnnnnnnnnnnnnnnnnnnnnnnnnnnnnnnnnnnnnnnnnnnnnnnnnnnnnnnnnnnnnnnnnnnnnnnnnnnnnnnnnnnnnnnnnnnnnnnnnnnnnnnnnnnnnnnnnnnnnnnnnnnnnnnnnnnnnnnnnnnnnnnnnnnnnnnnnnnnnnnnnnnnnnnnnnnnnnnnnnnnnnnnnnnnnnnnnnnnnnnnnnnnnnnnnnnnnnnnnnnnnnttgcaaaatattgtattgtttccaagcttgatatcctttgaaattattttcattgatggaactggagttggaaaaatacagatttaaaatggttttcgatagctgacattgtgatgtagatgcatcagtgataggaccagcttcggatttctgacatcggtgtgaggatacagtctgtaaatgtttattgagaacatcttgcacacaatttgaattatgtagaatgtcagtcagaattttttgtatatttaaaagttggacatcaatttttcccctaatttcatcaagttatctctgccaagtgctcttgataatttcttcagatttttggaaaaaaacactatctaaatgcaatccatgctttttttaaagaacaacattgccagagtatgcttgttctaacactatagatatataaaccttaaaaataaaatatctcacccaagacttaaaggaagaattctctgaagggataaagattac

SEQ ID NO: 32071 - DNA, 466 bp, Macaca Mulatta
aaatcagaaccatacgtccatacctgaacagcttggtggtcagaaagagccttctaagaatgaccatgaaataattaattgttctaactgtgaatctgtgggcaccaacgcagatatgccagtattaagaaatattacaaatgaagttttgcagacaaaagcaaaacagcagttgactgaaaagccagctttcttattaaagaaccttaaaccaagtcctgcagtgaaccttcgaaccgggaaagcagagttcactcaacatcttgagaaagaaaatgaaagggacattgcaatttttcctgaaagtctgcaaccttctgaaactctaaagcagatgaatagcatgaattcagtaggcaccttcttagatgtaaaacatctcagacagttaccaaaattattttaaccttttaactccctgctcttttaatacagggacagggtgtctcctgaagatacttaggga

SEQ ID NO: 32072 - DNA, 488 bp, Macaca Mulatta
gaatcccgggtgctgcactgcttaaaccacaggacctggttaactcctcaccaagcttcccacgaccctggttgccagtgggcgtgggagacattgtatacacattatgctatttaaaatatgttcaaaccatagtgaaaatgctaattaaccatattggtatataaccagaattttatattaaaaggggcctcctttttaaatatatgctgtgtaaaaaatgtacttataggaacatctctttgaattgtatttcttgtatattacatacttaagagaaactattttagccatttttagtcttttttggctgtgactggaataaatcatttattactgggagtcccattttggacactaataataaaatcatggcaatgcatttttgaggttttaatatttttttatttcctcgtggtaataggggacaggaagaactctttaacatcttttaaatacaatcgtttcacccttaaaaggagaggaag

SEQ ID NO: 32073 - DNA, 2359 bp, Macaca Mulatta
  misc_feature (1)...(2359): n = A,T,C or G
ggagcccctggatggccaggcttgaaaggaagtaaaggggaacgaggccgcccaggaaaggatgctatggggactcctgggtccccaggttgtcccggttcaccaggccctccaggatcgccgggacctccaggaccaccaggtnnnnnnnnnnnnnnnnnnnnnnnnnnnnnnnnnnnnnnnnnnnnnnnnnnnnnnnnnnnnnnnnnnnnnnnnnnnnnnnnnnnnnnnnnnnnnnnnnnnnnnnnnnnnnnnnnnnnnnnnnnnnnnnnnnnnnnnnnnnnnnnnnnnnnnnnnnnnnnnnnnnnnnnnnnggctctgagtggtgagaagggggaccaaggtcctccaggggatcctggctcccctgggtccccaggacctgcaggaccagctggaccacctggctacggaccccaaggagaacctggtccccagggcacgcaaggagttcctggagcccctggaccacgcggagaagccggnnnnnnnnnnnnnnnnnnnnnnnnnnnnnnnnnnnnnnnnnnnnnnnnnnnnnnnnnnnnnnnnnnnnnnnnnnnnnnnnnnnnnnnnnnnnnnnnnnnnnnnnnnnnnnnnnnnnnnnnnnnnnnnnnnnnnnnnnnnnnnnnnnnnnnnnnnnnnnnnnnnnnnnnnnnnnnnnnnnnnnnnnnnnnnnnnnnnnnnnnnnnnnnnnnnnnnnnnnnnnnnnnnnnnnnnnnnnnnnnnnnnnnnnnnnnnnnnnnnnnnnnnnnnnnnnnnnnnnnnnnnnnnnnnnnnnnnnnnnnnnnnnnnnnnnnnnnnnnnnnnnnnnnnnnnnnnnnnnnnnnnnnnnnnnnnnnnnnnnnnnnnnnnnnnnnnnnnnnnnnnnnnnnnnnnnnnnnnnnnnnnnnnnnnnnnnnnnnnnnnnnnnnnnnnnnnnnnnnnnnnnnnnnnnnnnnnnnnnnnnnnnnnnnnnnnnnnnnnnnnnnnnnnnnnnnnnnnnnnnnnnnnnnnnnnnnnnnnnnnnnnnnnnnnnnnnnnnnnnnnnnnnnnnnnnnnnnnnnnnnnnnnnnnnnnnnnnnnnnnnnnnnnnnnnnnnnnnnnnnnnnnnnnnnnnnnnnnnnnnnnnnnnnnnnnnnnnnnnnnnnnnnnnnnnnnnnnnnnnnnnnnnnnnnnnnnnnnnnnnnnnnnnnnnnnnnnnnnnnnnnnnnnnnnnnnnnnnnnnnnnnnnnnnnnnnnnnnnnnnnnnnnnnnnnnnnnnnnnnnnnnnnnnnnnnnnnnnnnnnnnnnnnnnnnnnnnnnnnnnnnnnnnnnnnnnnnnnnnnnnnnnnnnnnnnnnnnnnnnnnnnnnnnnnnnnnnnnnnnnnnnnnnnnnnnnnnnnnnnnnnnnnnnnnnnnnnnnnnnnnnnnnnnnnnnnnnnnnnnnnnnnnnnnnnnnnnnnnnnnnnnnnnnnnnnnnnnnnnnnnnnnnnnnnnnnnnnnnnnnnnnnnnnnnnnnnnnnnnnnnnnnnnnnnnnnnnnnnnnnnnnnnnnnnnnnnnnnnnnnnnnnnnnnnnnnnnnnnnnnnnnnnnnnnnnnnnnnnnnnnnnnnnnnnnnnnnnnnnnnnnnnnnnnnnnnnnnnnnnnnnnnnnnnnnnnnnnnnnnnnnnnnnnnnnnnnnnnnnnnnnnnnnnnnnnnnnnnnnnnnnnnnnnnnnnnnnnnnnnnnnnnnnnnnnnnnnnnnnnnnnnnnnnnnnnnnnnnnnnnnnnnnnnnnnnnnnnnnnnnnnnnnnnnnnnnnnnnnnnnnnnnnnnnnnnnnnnnnnnnnnnnnnnnnnnnnnnnnnnnnnnnnnnnnnnnnnnnnnnnnnnnnnnnnnnnnnnnnnnnnnnnnnnnnnnnnnnnnnnnnnnnnnnnnnnnnnnnnnnnnnnnnnnnnnnnnnnnnnnnnnnnnnnnnnnnnnnnnnnnnnnnnnnnnnnnnnnnnnnnnnnnnnnnnnnnnnnnnnnnnnnnnnnnnnnnnnnnnnnnnnnnnnnnnnnnnnnnnnnnnnnnnnnnnnnnnnnnnnnnnnnnnnnnnnnnnnnnnnnnnnnnnnnnnnnnnnnnnnnnnnnnnnnnnnnnnnnnnnnnnnnnnnnnnnnnnnnnnnnnnnnnnnnnnnnnnnnnnnnnnnnnnnnnnnnnnnnnnnnnnnnnnnnnnnnnnnnnnnnnnnnnnnnnnnnnnnnnnnnnnnnnnnnnnnnnnnnnnnnnnnnnnnnnnnnnnnnnnnnnnnnnnnnnnnnnnnnnnnnnnnnnnnnnnnnnnnnnnnnnnnnnnnnnnnnnnnnnntcagaaagcctattccatcaactgtgaaagctggagaattagaaaaaataataagtcgctgtcaggtgtgcatgaag

SEQ ID NO: 32074 - DNA, 796 bp, Macaca Mulatta
  misc_feature (1)...(796): n = A,T,C or G
ttgcgatcggtttgtctatggtgttgagttatctggctcttaaatgtattacgtgggtttgtaaaatctccgcccacaaaaaatattgtgaaaaacacgattgtcattttcacgatagttactttaatcgtttcccgttttcctggtaagaggaacaagattttttaggaggtttcaggattcgggtttcaagtatgggaaataagggccaaaaccggtttttggtaaagaattcaattaaaattatcggaacaaactttttcactttatattatttaaaaaaatcaccaaattcttagtccaaaagaataccaatcctattggatttttattactgacagaagtgggttttttttaggacttgatgcagcataaccactctatatatcatccaattgcccccaaatcaacccagaactgaaggttgatcttgccaggtcctaagaagaccgtcttgacacacacccaattttcacttaggatcgtttcccacttctccttccagtaatgtctgccagaactacacttctgagagcccaggacagcagggcagaaataaaatctccttgggttgtaataaacgtttggttttgttcttccattacacagctttttctatcctcggagacagtaagttgaggatgtgctgtgtcaagatctaaaaccaaggacaggtgcggtggctcacacatgtattcccagcactttggaaggccgaggcgggtggatcatgaggtcaggagatcaagaccatcctggctnnnnnnnnnnnnnnnnnnnnnnnncaaaaataccc

SEQ ID NO: 32075 - DNA, 650 bp, Macaca Mulatta
agccatgttcaggtagatcttttattaatcttaatataatttgaggcttttttcattactctttattttaaatattaagcctgcttctccttggaacctaaggttttttctggtagtattgttggtactttgataagaacaagaactgcagtagtaactccagagttagtgctgaagtgtactgtagctactaagaatttcttttaaaattattgggattcacttctgcttcactatgtagtatacagagtggtactataataataatttcaaataatttatgttaataacaaaatctgtgttattttcttctaatataacacatggtacaattctaattttatgagtcatgctaatgccttcaatggataaaaattaaatgtgaagggcaagagtaatttctgaaaattggattgttgtatcagtggtgatcctgttaatgttttttgcttaaatattttttgaggaacatttaaaattttgtctccgtcaataaaaaacaatttcatctttatgttttgtgttcagtatttttcaattagttatatagcttacataaagacatttaacatttgatgaacttctgtaaacattttgctcaatatcattgtattttgtgctttgtaaattagctatattgagttaccaag

SEQ ID NO: 32076 - DNA, 1588 bp, Macaca Mulatta
  misc_feature (1)...(1588): n = A,T,C or G
ggggcctatattccacgccaggtgcgaacctgggttaagcagtatcgggcttctgaaaccagcaccatcccagctatggagaggctgatcgagtggctccccctccatcttccccatcagcagaggaccacactggtgcacggggacttcaggnnnnntcaggctcgacaacctggtgtttcatccagaaaagccagaggtgcttgctgtccttgactgggaactttctaccttgngcgaccccctcatcgatgtggcctacagctgcctggctcattacctaccatccagttttcccgtgctgannnnnnnnnnnnnnnnnnnnnnnnnnnnnnnnnnnnnnnnnnnnnnnnnnnnnnnnnnnnnnnnnnnnnnnnnnnnnnnnnnnnnnnnnnnnnnnnnnnnnnnnnnnnnnnnnnnnnnnnnnnnnnnnnnnnnnnnnnnnnnnnnnnnnnnnnnnnnnnnnnnnnnnnnnnnnnnnnnnnnnnnnnnnnnnnnnnnnnnnnnnnnnnnnnnnnnnnnnnnnnnnnnnnnnnnnnnnnnnnnnnnnnnnnnnnnnnnnnnnnnnnnnnnnnnnnnnnnnnnnnnnnnnnnnnnnnnnnnnnnnnnnnnnnnnnnnnnnnnnnnnnnnnnnnnnnnnnnnnnnnnnnnnnnnnnnnnnnnnnnnnnnnnnnnnnnnnnnnnnnnnnnnnnnnnnnnnnnnnnnnnnnnnnnnnnnnnnnnnnnnnnnnnnnnnnnnnnnnnnnnnnnnnnnnnnnnnnnnnnnnnnnnnnnnnnnnnnnnnnnnnnnnnnnnnnnnnnnnnnnnnnnnnnnnnnnnnnnnnnnnnnnnnnnnnnnnnnnnnnnnnnnnnnnnnnnnnnnnnnnnnnnnnnnnnnnnnnnnnnnnnnnnnnnnnnnnnnnnnnnnnnnnnnnnnnnnnnnnnnnnnnnnnnnnnnnnnnnnnnnnnnnnnnnnnnnnnnnnnnnnnnnnnnnnnnnnnnnnnnnnnnnnnnnnnnnnnnnnnnnnnnnnnnnnnnnnnnnnnnnnnnnnnnnnnnnnnnnnnnnnnnnnnnnnnnnnnnnnnnnnnnnnnnnnnnnnnnnnnnnnnnnnnnnnnnnnnnnnnnnnnnnnnnnnnnnnnnnnnnnnnnnnnnnnnnnnnnnnnnnnnnnnnnnnnnnnnnnnnnnnnnnnnnnnnnnnnnnnnnnnnnnnnnnnnnnnnnnnnnnnnnnnnnnnnnnnnnnnnnnnnnnnnnnnnnnnnnnnnnnnnnnnnnnnnnnnnnnnnnnnnnnnnnnnnnnnnnnnnnnnnnnnnnnnnnnnnnnnnnnnnnnnnnnnnnnnnnnnnnnnnnnnnnnnnnnnnnnnnnnnnnnnnnnnnnnnnnnnnnnnnnnnnnnnnnnnnnnnnnnnnnnnnnnnnnnnnnnnnnnnnnaggtggccatggtgaagtccgatttgagcacgtgcatgtgcccaaagagaacatggtcctgggccctggccgaggctttgagatcgcccaaggcagactgggccccggcaggatccatcactgcatgaggctgatcgggttctcagagagggccctggcgctcatgaaggcccgcgtga

SEQ ID NO: 32077 - DNA, 319 bp, Macaca Mulatta
  misc_feature (1)...(319): n = A,T,C or G
gtattctgaagaagccaataatctcattgaagaatgtgaacaagctgaacgacttggagcagtggatgaatctctgagnnnnnnnnnnnnnnnnnnnnnnnnnnnnnnnnnnnnnnnnnnnnnnnnnnnnnnnnnnnnnnnnnnnnnnnnnnnnnnnnnnnnnnnnnnnnnnnnnnnnnnnnnnnnnnnnnnnnnnnnnnnnnnnnnnnnnnnnnnnnnnnnnnnnnnnnnnnnnnnnnnnnnnnnnnnnnnnnnnnnnnnnnnnnnnnnnnngccacagacaattaaaagacctttaaatcctttggcttctggtcaa

SEQ ID NO: 32078 - DNA, 1293 bp, Macaca Mulatta
gacgaggccgctcgttatgttgggtcttgtgggtcgtgtggcagttttcggctccggggccttgcggggactcactccttcagcgtcgctacccccagcacagctcttactgcgggccgctccgacggcggtccatcctgtcagggactatgcggcgcaaacatctccttcgccaaaagcgggcgccgccaccgggcgcatcgtggcggtcattggcgcagtggtggacgtccagtttgatgagggactaccaccaattctaaatgccctggaagtgcaaggcagggagaccagactggttttggaggtggcccagcatttgggtgagagcacagtaaggactattgctatggatggtacggaaggcttggttagaggccagaaagtactggattctggtgcaccaatcaaaattcctgttggtcctgagactttgggcagaatcatgaatgttattggagaacctattgatgaaagaggtcccatcaaaaccaaacaatttgctgccattcatgctgaggctccagagttcatggaaatgagtgttgagcaggaaattctggtgactggtatcaaggttgtggatctgctagctccctatgccaagggtggcaaaattgggctttttggtggtgccggagttggcaagactgtactgatcatggagttaatcaacaatgtcgccaaagcccatggtggttactctgtgtttgctggtgttggtgagaggacccgtgaaggcaatgatttataccatgaaatgattgaatctggtgttatcaacttaaaagatgccacctctaaggtagcgctggtatatggtcaaatgaatgaaccacctggtgctcgtgcccgggtagctcttactggactgactgtggctgaatacttcagagaccaagaaggtcaagatgtactgctatttattgataatatctttcgcttcacccaggctggttcagaggtgtctgcattattgggcagaatcccttctgacgtgggctatcagcctaccctcgccactgacatgggtactatgcaggaaagaatttaccactaccagaagggatctatcactctgtacaggctatctatatgctggtgatgacttgatgacctgctctgctatagtttgcccttggatgtacccggtcgtccgtgcccgtgagcgggctaacgcgtgatcctaaacacctcgtttgtcccctaccgcgggtggacaacaatgcgggccaagcgggaaatgccaaagccataaacgttaagagcgtttttttggatgcgaccattttt

SEQ ID NO: 32079 - DNA, 735 bp, Macaca Mulatta
tcatcctggatggctttgatgagctgcagaggcccttgaagaaaagttaaagaagaggggttgagtcccaaggagagcatgctgcaccttttaattaggagacatacactccccacgtgctcccttctcatcaccacccggccccctggctttgaggaatctggagcccttgctgaaacaagcacgccatgtccatatcttaggcttctctgaggaggagagggcgaggtacttcagctcctatttcacggatgagaagaaagctgacagtgccttcgacattgtacagaaaaatgacattctctacaaagcgtgtcaggttccaggcatttgctgggtggtctgctcctggctgaaggggcagatggagagaggcaaagctgtcttagagacacctagaaacagcactgacatcttcatggcttacgtctccaccttcctgccgcccgttgatgatgggggctgctccgagttttcccggcacaagatcatgaggagtctgtgctccctggccgctgaagggattcagaaccagaggttcctatttgaagaagctgagctcaggaaacataatttagatggccccaggcttgccgctttcctgagtagtaacgactaccaattgggacttgccatcaagaagttctacagcttccgtcacatcagcttccaggactttttccatgccaatcctacctggtgaaagaggaccaaagccggctggggaaagagtcc

SEQ ID NO: 32080 - DNA, 797 bp, Macaca Mulatta
  misc_feature (1)...(797): n = A,T,C or G
ggacccnnnnnnnnnnnnnnnnnnnannnnnnnnnnnnnnnnnnaaactactatttatccatatnnnnnnnnnnnnnnnnnnnnnggaaaggaatggaaaataaaagtaaagacgactcatcaaaaattgcaatgtagaagaatagtgcagaatgctgtaaactagtaccacatagaacttaatctgtaattttaaagaaaccatgtaagtatatttactcctggtattgtgtctttctctcttatcctaatttactgtgctgctatagtttaaaattaaagaattgcttttaaattttacagggcaaacagtgtactgtggagatacaaaatgttttgagacatctgtgaccagacatgtcacgtgtgaatatactgttgaatttcaaagcaacacgttgtaactttttttgttttttccttttacaacagattcattttattttcatcaccatggggcgtaccctgttgttgagttctctgggtcagacctctacagacttctcagatggatcctaggtctctgggcttgccgtgaaattactcgctgctcagggagagagttgaaatggtggcatcctccccctctgttgttccggctgtgtcccctaactctgttgctccggctgtgtcccctaactctgttgctccggctgtgtccctcactctgttgctctggctgcagctcattctgttggagctcctcattcagctggtcactgtgggtcagaggggtgttggcctgctccctttcctcangtcttctttaaagccacttattttttgtggagcatttt

SEQ ID NO: 32081 - DNA, 139 bp, Macaca Mulatta
ccaggtccagagccaaacccatcactgaccccccagcccaggcgcccagccactccccaccgctaccatggccgaagacgcagacatgcgcaatgagctggaggagaggcagcgaagggctgaccagttggctgatgag

SEQ ID NO: 32082 - DNA, 1402 bp, Macaca Mulatta
  misc_feature (1)...(1402): n = A,T,C or G
gaaagaagaaattcagaagaacatattcatcatattttaccaaggagagcagctcaggcagaaaatcaagaagatctgcgatgggnnnnnnnnnnnnnnnnnnnnnnnnnnnnnnnnnnnnnnnnnnnnnnnnnnnnnnnnnnnnnnnnnnnnnnnnnnnnnnnnnnnnnnnnnnnnnnnnnnnnnnnnnnnnnnnnnnnnnnnnnnnnnnnnnnnnnnnnnnnnnnnnnnnnnnnnnnnnnnnnnnnnnnnnnnnnnnnnnnnnnnnnnnnnnnnnnnnnnnnnnnnnnnnnnnnnnnnnnnnnnnnnnnnnnnnnnnnnnnnnnnnnnnnnnnnnnnnnnnnnnnnnnnnnnnnnnnnnnnnnnnnnnnnnnnnnnnnnnnnnnnnngaactaagtggctcctccatggcccccatcatgaccacagtgcaatctaaaacagcccctcccacatttaacaggaccaataaattcacagctggcttccagaatattgtcgatgcctacggtgtcggcagctaccgtgagataaacccagnnnnnnnnnnnnnnnnnnnnnnnnnnnnnnnnnnnnnnnnnnnnnnnnnnnnnnnnnnnnnnnnnnnnnnnnnnnnnnnnnnnnnnnnnnnnnnnnnnnnnnnnnnnnnnnnnnnnnnnnnnnnnnnnnnnnnnnnnnnnnnnnnnnnnnnnnnnnnnnnnnnnnnnnnnnnnnnnnnnnnnnnnnnnnnnnnnnnnnnnnnnnnnnnnnnnnnnnnnnnnnnnnnnnnnnnnnnnnnnnnnnnnnnnnnnnnnnnnnnnnnnnnnnnnnnnnnnnnnnnnnnnnnnnnnnnnnnnnnnnnnnnnnnnnnnnnnnnnnnnnnnnnnnnnnnnnnnnnnnnnnnnnnnnnnnnnnnnnnnnnnnnnnnnnnnnnnnnnnnnnnnnnnnnnnnnnnnnnnnnnnnnnnnnnnnnnnnnnnnnnnnnnnnnnnnnnnnnnnnnnnnnnnnnnnnnnnnnnnnnnnnnnnnnnnnnnnnnnnnnnnnnnnnnnnnnnnnnnnnnnnnnnnnnnnnnnnnnnnnnnnnnnnnnnnnnnnnnnnnnnnnnnnnnnnnnnnnnnnnnnnnnnnnnnnnnnnnnnnnnnnnnnnnnnnnnnnnnnnnnnnnnnnnnnnnnnnnnnnnnnnnnnnnnnnnnnnnnnnnnnnnnnnnnnnnnnnnnnnnnnnnnnnnnnnnnnnnnnnnnnnnnnnnnnnnnnnnnnnnnnnnnnnnnnnnnnnnnnnnnnnnnnnnnnnnnnnnnnnnnnnnnnnnnnnnnnnnnnnnnnnnnnnnnngggttgagttccagaacaagttctatgtcggcgatggttacaaattttctccattctcnnnnnnnnnnnnctggatggcacagccgaggagta

SEQ ID NO: 32083 - DNA, 560 bp, Macaca Mulatta
gctgacactgaatgctgtttgcacgtgggaagggtcctactggggagttcatcgctgggtgtgactggagaggtcagacaggaactctcatcgtcggggcctgctggggcccttcctcgaagagttctaaccctgcctcctgaccgtttgctcttctcctctcttagcccctccgagatcgagatgatgctcagtacagccgccttggaggaaactgggctcggaacaagtgaacctgaggctggtggcttctagaagcatccattaccaactgtaccttcccttcttgctcagccaataaatatatcctctttcactcagcaggtgcctggacttcttaagactcctgggcaaggcatgggagttgtcctgacttgtctgggtctcgccctcctacctttctgttccttccttcatctccttccttcctctgtcccacacagacagtgtgttggacgactctcgccacatcctggctgtctggtgtttctagctcacggggctccctgggtgaagggtctgcgccaccatattcccacagttacttgttgactccagtc

SEQ ID NO: 32084 - DNA, 705 bp, Macaca Mulatta
  misc_feature (1)...(705): n = A,T,C or G
atacataatagcagtaataaaggctttgaacctactaacaattttctgatcgtatttcatatttatttntacagttcatcactgcatttcatgataagatntaaatattaaatagaaactagctagcctaataaaatctgaacacagttaatgtctgtcataagactagttttaatggaattctctattgatactactattttaaagggttactaaaacgatttggctggtcattttgggaaatgtcccttaaacttggggagacacatcctctactgtgtataacaatatgctattatctgtcttctcagttgcactattttctaagagtacttaatcacatgcttttccctacaattatacctaagctgagtgtatcttcttgtgtagaagataaccagctctgattgaaatgtactcatattaggtaaactttaggcaatgataggaggaaagcaaaactaattctttcaaactgtcaacaatttagaaatatccttcccgatcccactaaaaccctgagaggtatttgcttttattcatactcacaaaaatttagcatttaaaaactatgagtacgaagctgtgaccttcaggatttaggttagatggcagaaagaaaacttggatattagtctaccgtataaatggacttctttaaaaccaaggttcagaactgagaatcatactggatcctcttcaagt

SEQ ID NO: 32085 - DNA, 943 bp, Macaca Mulatta
  misc_feature (1)...(943): n = A,T,C or G
taattacagtcttggattatatcaatggagtgataaagtagttcggaaagtggagagattatgggatgttcgagataatannnnnnnnnnnnnnnnnnnnnnnnnnnnnnnnnnnnnnnnnnnnnnnnnnnnnnnnnnnnnnnnnnnnnnnnnnnnnnnnnnnnnnnnnnnnnnnnnnnnnnnnnnnnnnnnnnnnnnnnnnnnnnnnnnnnnnnnnnnnnnnnnnnnnnnnnnnnnnnnnnnnnnnnnnnnnnnnnnnnnnnnnnnnnnnnnnnnnnnnnnnnnnnnnnnnnnnnnnnnnnnnnnnnnnnnnnnnnnnnnnnnnnnnnnnnnnnnnnnnnnnnnnnnnnnnnnnnnnnnnnnnnnnnnnnnnnnnnnnnnnnnnnnnnnnnnnnnnnnnnnnnnnnnnnnnnnnnnnnnnnnnnnnnnnnnnnnnnnnnnnnnnnnnnnnnnnnnnnnnnnnnnnnnnnnnnnnnnnnnnnnnnnnnnnnnnnnnnnnnnnnnnnnnnnnnnnnnnnnnnnnnnnnnnnnnnnnnnnnnnnnnnnnnnnnnnnnnnnnnnnnnnnnnnnnnnnnnnnnnnnnnnnnnnnnnnnnnnnnnnnnnnnnnnnnnnnnnnnnnnnnnnnnnnnnnnnnnnnnnnnnnnnnnnnnnnnnnnnnnnnnnnnnnnnnnnnnnnnnnnnnnnnnnnnnnnnnnnnnnnnnnnnnnnnnnnnnnnnnnnnnnnnnnnnnnnaggtttcttgttctcctcaaggtctgaaagtttgggtccaagatacttcatatttgtgtagtcgggctgggcaggtcctccccatcagtatccagatgaatggctggattcatgatggaaacctactctgcccatcgtgttgggacttctgtgagctctgtcctccagaaacagatcctccagctactaacttgacccgagctctgccac

SEQ ID NO: 32086 - DNA, 614 bp, Macaca Mulatta
  misc_feature (1)...(614): n = A,T,C or G
acatctaggntcttttcaaaagtggtggaaattggcagctggagtactttcagtttggattgatagccatcacaccccagataaaatgcagagtatctatagttgcactttataaatggtggttaaatggaaatgttcaagccattttatagttgtgatacacaatataatttaagtgcttctgtcaaagtattcctccagtaaaaattgtgtagtttgctgcccgtgatgagcaaaaagtattcatcttgggtttatctgaatgatcaggatgagatttaatgcccgtatcttaccagtgcagttatctccaggggccggttcaccctttagagtgagtcacatgctagggagtgtgaaagtcagaggtggtttattatccagtctgccttacccttaatctgttcacagatatttatttactaatgctttccttttcttaagagttatgggataggaaaatgaagtgtttgctcttcatttactaaatgattgtaaacttgagtttttcatcaacataaaattccattgttttaatgtttctgaccaaaaaaagatgcaatnnnnnnnnnnnnnnnnnnnnnnnnnnntnnnnnnnnnnnnnnnnnnnnnnn

SEQ ID NO: 32087 - DNA, 690 bp, Macaca Mulatta
  misc_feature (1)...(690): n = A,T,C or G
ggatgaacggaaccaggtgctgaccctgtatctgtggatacggcaggagtggacagatgcctacctacaatgggaccccaatgcctatggcggcctggatgccatccgcatccccagcagtcttgtgtggcggccagacatcgtactctataacaannnnnnnnnnnnnnnnnnnnnnnnnnnnnnnnnnnnnnnnnnnnnnnnnnnnnnnnnnnnnnnnnnnnnnnnnnnnnnnnnnnnnnnnnnnnnnnnnnnnnnnnnnnnnnnnnnnnnnnnnnnnnnnnnnnnnnnnnnnnnnnnnnnnnnnnnnnnnnnnnnnnnnnnnnnnnnnnnnnnactggatgtgcggccgcgcggcgctgccgccagcctggcggacttcgtggagaacgtggagtggcgcgtgctgggtatgccggcgcagcggcgcgtgctcacctacggctgctgctcagagccctaccccgacgtcaccttcacgctgctgctgcaccgccgcgccgccgcctacgtgtgcaacctgctgctgccctgcgtgctcatctcgctgcttgcgccgctcgccttccacctgcccgccgactcgggcgagaaggtgtcgttgggcgtcacggtgctgctggcgctcaccgtcttccagctgctgctggccgagagcatgccgccggccgagagcgtgccgctcatcgg

SEQ ID NO: 32088 - DNA, 92 bp, Macaca Mulatta
ggagaagatgtatggtcttatgcaaagggacttcctcacatgtttcagcagggtggtgtattctacagtattatgaagaaaaccatgggtat

SEQ ID NO: 32089 - DNA, 1349 bp, Macaca Mulatta
aaatgacgcgcgccgggggaagcgcaggataatatgaggcgtttaggaggcgccgtgcccggtgacgccgcctcgttggggtaagggaaatcccccggaaagagcccctctcaccgaactcccccatgtcagaggattggtgttagaaaaaagcggtaggtttggcgccgcggcggggagtgtttttttgttcggggggaggtcgcacaaacccgctagttggggcgcccgcgagtatttttcttagaaaacacgggtttttgccccattttttcttgacccaaggggggggcccccgcgcccaaagaaagtagttgtaaaaaggtttttttgagggagcgcagaggcgcccccacaaaaaattttatcccgggttttagtggggttagagggaagtttgggttagtcatgcgtggttttgcgtagttgggggcggggggttggggttgcgttgccaattttataactttatttgatgtatttgatgatcagcgattagttctcatccacattaactgtctgtagatttttgaaagtggtaacaggtacataggtaaccaaagtatagagcttatttggtgaatcttcatcctcattacgttttctggacagccgcacacggattcggtatgggacattccttattcctttggcccagacagctttgttgagcctggtatcaatgcgcacatctggagttcccatctccttcatggcaaatttccgaatctctttgagtgcccgaggggcacgcttcttgaagcccactccatggatgcgcttgtgaatgttgatggtgtattctcgggtcaccacctcgttgatggcagaacggccctttttcttctcgccacccttctttgcgggagccattctgccgggtccaagctggaaagctccaatgcacaagtatttatccagcctttgcctgcatcgtgtttgctcatgtctcattggctaaaatggatcacatgaccaagctcagactcagtgtgggaaaagtctatacaagttcttgggtactgaaaggcatagttcatcgggggccattgttataatctaccacacattctagactttgctttgctttagatctgaattctagcaactcgatgtgataaccctggacatgtcatgttgttcagacactgtaattggctattgatgtccctggaatgtctgagatgtatggggtggaccaaaccctgcctctctctgggaaccctggactttgggttgagaatgcctagtatttagttggcattgactctaaaaccatgtggcattcagaattcagcactaggcaatggcgcatatgctgatttaattttattagcctattagctgcc

SEQ ID NO: 32090 - DNA, 758 bp, Macaca Mulatta
ggcacattgctggagggataaagagtatggataatctttggatttggagagccattccagatacttccaccttcttggctcagcctggcttcctctggttcagccccacataatgattatggctgtttgctgtcatttctgggttagggctcctttctaacaacctagactggaataaggccctgtcagcatggctccgttatcccagtttttccatctgggaacagtacctctgcccctgattcccaatctgccatagttttattaactccattaaagaggcctgtatgtgttttggttagttacagttattttacaataatggtgggtaatggccccacctctgttatgagataatgttctaatcaatgtctctgcctttgtatcttttctgagggttttgtctgctcccttcattctaatgaaaggtgtattctagtgctgggcgcatatcatccaggataatattctgcccaactccatcctctgttactagatcccttaccagtcacatttgtggactggtggtcagtggtataccatccctggaaggattctgagacaatattccaggggattcattgacttcttggctccttttctccatttcctttggggggaagggggaattgacccattcttaagtgcatactgtcaagggggcagctccacccccatggcccattggatcatgaaaacactcctgaaattcaaaaaggcggggggcagtatccacttcaagcaaggccccccatgaa

SEQ ID NO: 32091 - DNA, 848 bp, Macaca Mulatta
gggcctttctcgctccccggccatcttagtggctgcttttgcttgggggccgtcccgcacctgaggcaggaagatggtggccgcaaagaagacgaaaaagtcgctggagtcgatcaactctaggctccaactcgttatgaaaagtgggaagtacgtcctggggtacaagcagactctgaagatgatcagacaaggcaaagcgaaattggtcattctcgctaacaactgcccagctttgaggaaatctgaaatagagtactatgcaatgttggctaaaactggtgtccatcactacagtggaaataatattgaactgggcacagcatgcggaaaatactacagagtgtgcacactggctatcattgatccaggtgactctgacatcattagaagcatgccagaacagactggtgaaaagtaaaccatgcaaaattttcctttaataaaatttaattgttttaacccccacgacctccccagtagctaatcccttgtcggccggcttcggcccttcaaaaaactttctagaccttccgtttgggcgccgcgggcccacttaggtaaagtggaacattggccattagctggtttccaaaggaaaaatcctgggtccttgaaactaggtgcttgtgagatttcctccccaaataaaaacaacccccccggcgggccaaaccggaaaggccgtttcttgcaaacaaacctcccgaatatgggactctctctcggacgggtcccttaaacgtgggcgatactaccgtcccatcctagggaagttgctccaacgccgcgaaagccccctgaggctatttccaaagatccgtgcggcgaccccgcacgggccgcgc

SEQ ID NO: 32092 - DNA, 95 bp, Macaca Mulatta
agacaaatatatgtcaacatcatataatgattcagcctggcgaaaacgaattcctttttcaaaaacatattcaaaaagtggaaagatatatccag

SEQ ID NO: 32093 - DNA, 213 bp, Macaca Mulatta
tttcatagaagggtctgacgctaacactccttgaggaggaggatggagggtggagttgggtctatggagccttttggagatggaggaatgggttcagctggctcttttcatagaacatctcattactgggcacctaaataggtgctgctagggcctttcaaggttgtaggtagactcccaatggcccagtttgcgtctctgtactcaaaggca

SEQ ID NO: 32094 - DNA, 123 bp, Macaca Mulatta
  misc_feature (1)...(123): n = A,T,C or G
nagctgttctaaagaaatccaaatggcagttctgctgaaatttgtttcagaaggggacaacatcccagatgcattaggtctcgttgagtaccttaatgagtggcttcagataatcaaaccact

SEQ ID NO: 32095 - DNA, 1746 bp, Macaca Mulatta
  misc_feature (1)...(1746): n = A,T,C or G
agaacaagttgaaacaaaggaattccagacctgggaaagtggagaaagaattttggggtcagagccatttaagactttgcctagggcctgggtcttctgtctcctaaaggcctcatcccatagcacgnnnnnnnnnnnnnnnnnnnnnnnnnnnnnnnnnnnnnnnnnnnnnnnnnnnnnnnnnnnnnnnnnnnnnnnnnnnnnnnnnnnnnnnnnnnnnnnnnnnnnnnnnnnnnnnnnnnnnnnnnnnnnnnnnnnnnnnnnnnnnnnnnnnnnnnnnnnnnnnnnnnnnnnnnnnnnnnnnnnnnnnnnnnnnnnnnnnnnnnnnnnnnnnnnnnnnnnnnnnnnnnnnnnnnnnnnnnnnnnnnnnnnnnnnnnnnnnnnnnnnnnnnnnnnnnnnnnnnnnnnnnnnnnnnnnnnnnnnnnnnnnnnnnnnnnnnnnnnnnnnnnnnnnnnnnnnnnnnnnnnnnnnnnnnnnnnnnnnnnnnnnnnnnnnnnnnnnnnnnnnnnnnnnnnnnnnnnnnnnnnnnnnnnnnnnnnnnnnnnnnnnnnnnnnnnnnnnnnnnnnnnnnnnnnnnnnnnnnnnnnnnnnnnnnnnnnnnnnnnnnnnnnnnnnnnnnnnnnnnnnnnnnnnnnnnnnnnnnnnnnnnnnnnnnnnnnnnnnnnnnnnnnnnnnnnnnnnnnnnnnnnnnnnnnnnnnnnnnnnnnnnnnnnnnnnnnnnnnnnnnnnnnnnnnnnnnnnnnnnnnnnnnnnnnnnnnnnnnnnnnnnnnnnnnnnnnnnnnnnnnnnnnnnnnnnnnnnnnnnnnnnnnnnnnnnnnnnnnnnnnnnnnnnnnnnnnnnnnnnnnnnnnnnnnnnnnnnnnnnnnnnnnnnnnnnnnnnnnnnnnnnnnnnnnnnnnnnnnnnnnnnnnnnnnnnnnnnnnnnnnnnnnnnnnnnnnnnnnnnnnnnnnnnnnnnnnnnnnnnnnnnnnnnnnnnnnnnnnnnnnnnnnnnnnnnnnnnnnnnnnnnnnnnnnnnnnnnnnnnnnnnnnnnnnnnnnnnnnnnnnnnnnnnnnnnnnnnnnnnnnnnnnnnnnnnnnnnnnnnnnnnnnnnnnnnnnnnnnnnnnnnnnnnnnnnnnnnnnnnnnnnnnnnnnnnnnnnnnnnnnnnnnnnnnnnnnnnnnnnnnnnnnnnnnnnnnnnnnnnnnnnnnnnnnnnnnnnnnnnnnnnnnnnnnnnnnnnnnnnnnnnnnnnnnnnnnnnnnnnnnnnnnnnnnnnnnnnnnnnnnnnnnnnnnnnnnnnnnnnnnnnnnnnnnnnnnnnnnnnnnnnnnnnnnnnnnnnnnnnnnnncaggacctgtctctccgcgtgacggtggctgagagcagcagcgacggccgtggggacaacgtgggccatgtcatcattgggccatcagccagtggcatgggaaccacacattggaaccagatgttgaccacgctgcgcaggcctgtgtccatgtggcacgctgtccggcgaaactagcaaccagggcgggccaggtgggcaatggagctgctggagcctggtacccactcggctctgtctgatgccctctccatagcccagctggagccgtgaacactggggtcccctggcagagtcctcatgagccatcctggtctctctgtccagattgcagcagaggagtgggcgtggctttgtgtccagggccccagagtcttctcctgctgaggaccagctgtggctgggccaggacagag

SEQ ID NO: 32096 - DNA, 1314 bp, Macaca Mulatta
  misc_feature (1)...(1314): n = A,T,C or G
ggaggactggaatgaaattgaccccattaaaaagaaagaccttcatcacagcaatggagaagagaaagcacaaagcatggagaccctccctccaggnnnnnnnnnnnnnnnnnnnnnnnnnnnnnnnnnnnnnnnnnnnnnnnnnnnnnnnnnnnnnnnnnnnnnnnnnnnnnnnnnnnnnnnnnnnnnnnnnnnnnnnnnnnnnnnnnnnnnnnnnnnnnnnnnnnnnnnnnnnnnnnnnnnnnnnnnnnnnnnnnnnnnnnnnnnnnnnnnnnnnnnnnnnnnnnnnnnnnnnnnnnnnnnnnnnnnnnnnnnnnnnnnnnnnnnnnnnnnnnnnnnnnnnnnnnnnnnnnnnnnnnnnnnnnnnnnnnnnnnnnnnnnnnnnnnnnnnnnnnnnnnnnnnnnnnnnnnnnnnnnnnnnnnnnnnnnnnnnnnnnnnnnnnnnnnnnnnnnnnnnnnnnnnnnnnnnnnnnnnnnnnnnnnnnnnnnnnnnnnnnnnnnnnnnnnnnnnnnnnnnnnnnnnnnnnnnnnnnnnnnnnnnnnnnnnnnnnnnnnnnnnnnnnnnnnnnnnnnnnnnnnnnnnnnnnnnnnnnnnnnnnnnnggacaggactcgggttgtgtcacccatcatcgatgtcattaatatggacaactttcagtatgtgggggcatctgctgacttgaagggcggtnnnnnnnnnnnnnnnnnnnnnnnnnnnnnnnnnnnnnnnnnnnnnnnnnnnnnnnnnnnnnnnnnnnnnnnnnnnnnnnnnnnnnnnnnnnnnnnnnnnnnnnnnnnnnnnnnnnnnnnnnnnnnnnnnnnnnnnnnnnnnnnnnnnnnnnnnnnnnnnnnnnnnnnnnnnnnnnnnnnnnnnnnnnnnnnnnnnnnnnnnnnnnnnnnnnnnnnnnnnnnnnnnnnnnnnnnnnnnnnnnnnnnnnnnnnnnnnnnnnnnnnnnnnnnnnnnnnnnnnnnnnnnnnnnnnnnnnnnnnnnnnnnnnnnnnnnnnnnnnnnnnnnnnnnnnnnnnnnnnnnnnnnnnnnnnnnnnnnnnnnnnnnnnnnnnnnnnnnnnnnnnnnnnnnnnnnnnnnnnnnnnnnnnnnnnnnnnnnnnnnnnnnnnnnnnnnnnnnnnnnnnnnnnnnnnnnnnnnnnnnnnnnnnnnnnnnnnnnnnnnnnnnnnnnnnnagggttccagaccatcaggatatagcttttggggccttgcagcagggaactaactgcctggacaccttgggacactttgctgatggtgtggttggagtttatgaatgtcacaatgctgggggaaaccag

SEQ ID NO: 32097 - DNA, 968 bp, Macaca Mulatta
  misc_feature (1)...(968): n = A,T,C or G
acccacacagagaaggtgtccctcaaagccagtgactccatggatagtctctacagtggacagagctcatcaagnnnnnnnntcatcaggtggcgtaacaagctgttcagatggtacgagtaaccgggacagctttcgactggatgacgatggcccctattcaggaccattctgcggtcgcgccagagtgcatacggatttcacgccaagtccctatgacactgactccctcaaaatcaagnaaggnnnnnnnnnnnnnnnnnnnnnnnnnnnnnnnnnnnnnnnnnnnnnnnnnnnnnnnnnnnnnnnnnnnnnnnnnnnnnnnnnnnnnnnnnnnnnnnnnnnnnnnnnnnnnnnnnnnnnnnnnnnnnnnnnnnnnnnnnnnnnnnnnnnnnnnnnnnnnnnnnnnnnnnnnnnnnnnnnnnnnnnnnnnnnnnnnnnnnnnnnnnnnnnnnnnnnnnnnnnnnnnnnnnnnnnnnnnnnnnnnnnnnnnnnnnnnnnnnnnnnnnnnnnnnnnnnnnnnnnnnnnnnnnnnnnnnnnnnnnnnnnnnnnnnnnnnnnnnnnnnnnnnnnnnnnnnnnnnnnnnnnnnnnnnnnntattcaagagcaagaaaatgaacctgtgcccctatccttgagctcagacatctccttaaataagtcacagttagatgactgcccaagggactctggttgttatatctcatcaggaaattcagataatggcaaagaggatctggagtctgaaaatttgtctgacatggtacaaaagattactatcgcagagccgagtgactgaacacacactctcaactatatatctacagatgcattccgttttaactcttcttgagctaaaacatcaaataagagaggaagataaatatttgtaaataaaacctaggatttaaatgttttaatctgaataattgtacataaaattttgtatcactaacattccaaatta

SEQ ID NO: 32098 - DNA, 831 bp, Macaca Mulatta
  misc_feature (1)...(831): n = A,T,C or G
tgctaggaacttgacatcatctatgttgtgcgggccgagcacagcctgcatgagcccatgtatatatttctttgcatgctttcaggcattgacatcctcatctccacctcatccatgcccaaaatgctggccatcttctggttcaattccactaccatccagtttgatgcttgtctgctacagatgtttgccattcactccttgtctggcatggaatccacagtgctgctggccatggcctttgaccgctatgtggccatctgtcacccactgcgccatgccacagtacttacattgcctcgtgtcaccaaaattggtgtggctgctgtggtgcggggggctgcactgatggcaccccttcctgtcttcatcaagcagctgcccttctgccgctccaatatcctttcccattcctactgcctacaccaagatgtcatgaagctggcatgtgatgatatccaggtcaatgtcatctatggccttattgtcatcatctctgccattggcttggactcacttctcatctccttctcatatctgcttattcttaagactgtgttgggcttgacacgtgaagcccaggccaaggcgtttggcacttgtgtctctcacgtgtgtgctgtgttcatattctatgtaccttttcattggattgtctatggtgcatcgctttagcaagcggcgtgactctctcctgccggtcatcttggccaatatctatctgctgggtcctcctgngctcaaccaaatgtctacggagtgaaaaccaaagagattcggcagcgaatccttcgactttttcatattgccacacatgcttcagagccctag

SEQ ID NO: 32099 - DNA, 504 bp, Macaca Mulatta
atggagtttgggctgagctgggttttccttgttgctattttaaaaggtgattcatggagaagtagagatattgagtgtgagtggacatgagtgagagaaacagtggatatgtgtggcagtttctgaccttggtgtctctttgtttgcaggtgtccagtgtgaggtgcagctggtggagtctgggggaggcttggtacagcctggggggtccctgagactctcctgtgcagcctctggattcaccttcagtgactactacatgcactgggtccgccaggctccagggaaggggctggagtgggtctcaggtattagtacaaagctaatggtggtagcacatactacgcagactccgtgaagggcagattcaccatctccagagacaacgccaagaacacagctgtatctgcaaatgaacagcctgagagccgaggacacggccgtgtattactgtactagagacacagtgtaagcggctggtctcgtgttctgtgggcagggcgc

SEQ ID NO: 32100 - DNA, 4645 bp, Macaca Mulatta
  misc_feature (1)...(4645): n = A,T,C or G
ttctagttatcttatgcccatttggactaaatggcactctcacaggacaggcattcaagatgtctgattcagctacaaaaaaattaattggtgaatggaaacagttctatcctatctcatgttgcttgaaggagatgtctgaagannnnnnnnnnnnnnnnnnnnnnnnnnnnnnnnnnnnnnnnnnnnnnnnnnnnnnnnnnnnnnnnnnnnnnnnnnnnnnnnnnnnnnnnnnnnnnnnnnnnnnnnnnnnnnnnnnnnnnnnnnnnnnnnnnnnnnnnnnnnnnnnnnnnnnnnnnnnnnnnnnnnnnnnnnnnnnnnnnnnnnnnnnnnnnnnnnnnnnnnnnnnnnnnnnnnnnnnnnnnnnnnnnnnnnnnnnnnnnnnnnnnnnnnnnnnnnnnnnnnnnnnnnnnnnnnnnnnnnnnnnnnnnnnnnnnnnnnnnnnnnnnnnnnnnnnnnnnnnnnnnnnnnnnnnnnnnnnnnnnnnnnnnnnnnnnnnnnnnnnnnnnnnnnnnnnnnnnnnnnnnnnnnnnnnnnnnnnnnnnnnnnnnnnnnnnnnnnnnnnnnnnnnnnnnnnnnnnnnnnnnnnnnnnnnnnnnnnnnnnnnnnnnnnnnnnnnnnnnnnnnnnnnnnnnnnnnnnnnnnnnnnnnnnnnnnnnnnnnnnnnnnnnnnnnnnnnnnnnnnnnnnnnnnnnnnnnnnnnnnnnnnnnnnnnnnnnnnnnnnnnnnnnnnnnnnnnnnnnnnnnnnnnnnnnnnnnnnnnnnnnnnnnnnnnnnnnnnnnnnnnnnnnnnnnnnnnnnnnnnnnnnnnnnnnnnnnnnnnnnnnnnnnnnnnnnnnnnnnnnnnnnnnnnnnnnnnnnnnnnnnnnnnnnnnnnnnnnnnnnnnnnnnnnnnnnnnnnnnnnnnnnnnnnnnnnnnnnnnnnnnnnnnnnnnnnnnnnnnnnnnnnnnnnnnnnnnnnnnnnnnnnnnnnnnnnnnnnnnnnnnnnnnnnnnnnnnnnnnnnnnnnnnnnnnnnnnnnnnnnnnnnnnnnnnnnnnnnnnnnnnnnnnnnnnnnnnnnnnnnnnnnnnnnnnnnnnnnnnnnnnnnnnnnnnnnnnnnnnnnnnnnnnnnnnnnnnnnnnnnnnnnnnnnnnnnnnnnnnnnnnnnnnnnnnnnnnnnnnnnnnnnnnnnnnnnnnnnnnnnnnnnnnnnnnnnnnnnnnnnnnnnnnnnnnnnnnnnnnnnnnnnnnnnnnnnnnnnnnnnnnnnnnnnnnnnnnnnnnnnnnnnnnnnnnnnnnnnnnnnnnnnnnnnnnnnnnnnnnnnnnnnnnnnnnnnnnnnnnnnnnnnnnnnnnnnnnnnnnnnnnnnnnnnnnnnnnnnnnnnnnnnnnnnnnnnnnnnnnnnnnnnnnnnnnnnnnnnnnnnnnnnnnnnnnnnnnnnnnnnnnnnnnnnnnnnnnnnnnnnnnnnnnnnnnnnnnnnnnnnnnnnnnnnnnnnnnnnnnnnnnnnnnnnnnnnnnnnnnnnnnnnnnnnnnnnnnnnnnnnnnnnnnnnnnnnnnnnnnnnnnnnnnnnnnnnnnnnnnnnnnnnnnnnnnnnnnnnnnnnnnnnnnnnnnnnnnnnnnnnnnnnnnnnnnnnnnnnnnnnnnnnnnnnnnnnnnnnnnnnnnnnnnnnnnnnnnnnnnnnnnnnnnnnnnnnnnnnnnnnnnnnnnnnnnnnnnnnnnnnnnnnnnnnnnnnnnnnnnnnnnnnnnnnnnnnnnnnnnnnnnnnnnnnnnnnnnnnnnnnnnnnnnnnnnnnnnnnnnnnnnnnnnnnnnnnnnnnnnnnnnnnnnnnnnnnnnnnnnnnnnnnnnnnnnnnnnnnnnnnnnnnnnnnnnnnnnnnnnnnnnnnnnnnnnnnnnnnnnnnnnnnnnnnnnnnnnnnnnnnnnnnnnnnnnnnnnnnnnnnnnnnnnnnnnnnnnnnnnnnnnnnnnnnnnnnnnnnnnnnnnnnnnnnnnnnnnnnnnnnnnnnnnnnnnnnnnnnnnnnnnnnnnnnnnnnnnnnnnnnnnnnnnnnnnnnnnnnnnnnnnnnnnnnnnnnnnnnnnnnnnnnnnnnnnnnnnnnnnnnnnnnnnnnnnnnnnnnnnnnnnnnnnnnnnnnnnnnnnnnnnnnnnnnnnnnnnnnnnnnnnnnnnnnnnnnnnnnnnnnnnnnnnnnnnnnnnnnnnnnnnnnnnnnnnnnnnnnnnnnnnnnnnnnnnnnnnnnnnnnnnnnnnnnnnnnnnnnnnnnnnnnnnnnnnnnnnnnnnnnnnnnnnnnnnnnnnnnnnnnnnnnnnnnnnnnnnnnnnnnnnnnnnnnnnnnnnnnnnnnnnnnnnnnnnnnnnnnnnnnnnnnnnnnnnnnnnnnnnnnnnnnnnnnnnnnnnnnnnnnnnnnnnnnnnnnnnnnnnnnnnnnnnnnnnnnnnnnnnnnnnnnnnnnnnnnnnnnnnnnnnnnnnnnnnnnnnnnnnnnnnnnnnnnnnnnnnnnnnnnnnnnnnnnnnnnnnnnnnnnnnnnnnnnnnnnnnnnnnnnnnnnnnnnnnnnnnnnnnnnnnnnnnnnnnnnnnnnnnnnnnnnnnnnnnnnnnnnnnnnnnnnnnnnnnnnnnnnnnnnnnnnnnnnnnnnnnnnnnnnnnnnnnnnnnnnnnnnnnnnnnnnnnnnnnnnnnnnnnnnnnnnnnnnnnnnnnnnnnnnnnnnnnnnnnnnnnnnnnnnnnnnnnnnnnnnnnnnnnnnnnnnnnnnnnnnnnnnnnnnnnnnnnnnnnnnnnnnnnnnnnnnnnnnnnnnnnnnnnnnnnnnnnnnnnnnnnnnnnnnnnnnnnnnnnnnnnnnnnnnnnnnnnnnnnnnnnnnnnnnnnnnnnnnnnnnnnnnnnnnnnnnnnnnnnnnnnnnnnnnnnnnnnnnnnnnnnnnnnnnnnnnnnnnnnnnnnnnnnnnnnnnnnnnnnnnnnnnnnnnnnnnnnnnnnnnnnnnnnnnnnnnnnnnnnnnnnnnnnnnnnnnnnnnnnnnnnnnnnnnnnnnnnnnnnnnnnnnnnnnnnnnnnnnnnnnnnnnnnnnnnnnnnnnnnnnnnnnnnnnnnnnnnnnnnnnnnnnnnnnnnnnnnnnnnnnnnnnnnnnnnnnnnnnnnnnnnnnnnnnnnnnnnnnnnnnnnnnnnnnnnnnnnnnnnnnnnnnnnnnnnnnnnnnnnnnnnnnnnnnnnnnnnnnnnnnnnnnnnnnnnnnnnnnnnnnnnnnnnnnnnnnnnnnnnnnnnnnnnnnnnnnnnnnnnnnnnnnnnnnnnnnnnnnnnnnnnnnnnnnnnnnnnnnnnnnnnnnnnnnnnnnnnnnnnnnnnnnnnnnnnnnnnnnnnnnnnnnnnnnnnnnnnnnnnnnnnnnnnnnnnnnnnnnnnnnnnnnnnnnnnnnnnnnnnnnnnnnnnnnnnnnnnnnnnnnnnnnnnnnnnnnnnnnnnnnnnnnnnnnnnnnnnnnnnnnnnnnnnnnnnnnnnnnnnnnnnnnnnnnnnnnnnnnnnnnnnnnnnnnnnnnnnnnnnnnnnnnnnnnnnnnnnnnnnnnnnnnnnnnnnnnnnnnnnnnnnnnnnnnnnnnnnnnnnnnnnnnnnnnnnnnnnnnnnnnnnnnnnnnnnnnnnnnnnnnnnnnnnnnnnnnnnnnnnnnnnnnnnnnnnnnnnnnnnnnnnnnnnnnnnnnnnnnnnnnnnnnnnnnnnnnnnnnnnnnnnnnnnnnnnnnnnnnnnnnnnnnnnnnnnnnnnnnnnnnnnnnnnnnnnnnnnnnnnnnnnnnnnnnnnnnnnnnnnnnnnnnnnnnnnnnnnnnnnnnnnnnnnnnnnnnnnnnnnnnnnnnnnnnnnnnnnnnnnnnnnnnnnnnnnnnnnnnnnnnnnnnnnnnnnnnnnnnnnnnnnnnnnnnnnnnnnnnnnnnnnnnnnnnnnnnnnnnnnnnnnnnnnnnnnnnnnnnnnnnnnnnnnnnnnnnnnnnnnnnnnnnnnnnnnnnnnnnnnnnnnnnnnnnnnnnnnnnnnnnnnnnnnnnnnnnnnnnnnnnnnnnnnnnnnnnnnnnnnnnnnnnnnnnnnnnnnnnnnnnnnnnnnnnnnnnnnnnnnnnnnnnnnnnnnnnnnnnnnnnnnnnnnnnnnnnnnnnnnnnnnnnnnnnnnnnnnnnnnnnnnnnnnnnnnnnnnnnnnnnnnnnnnnnnnnnnnnnnnnnnnnnnnnnnnnnnnnnnnnnnnnnnnnnnnnnnnnnnnnnnnnnnnnnnnnnnnnnnnnnnnnnnnnnnnnnnnnnnnnnnnnnnnnnnnnnnnnnnnnnnnnnnnnnnnnnnnnnnnnnnnnnnnnnnnnnnnnnnnnnnnnnnnnnnnnnnnnnnnnnnnnnnnnnnnnnnnnnnnnnnnnnnnnnnnnnnnnnnnnnnnnnnnnnnnnnnnnnnnnnnnnnnnnnnnnnnnnnnnnnnnnnnnnnnnnnnnnnnnnnnnnnnnnnnnnnnnngataattccttgtcagtacctgttgcaacctgtgaagcatgaagatagagagatctatccccagcatttaaaatccctggctttttcggcctttacccagtgtcggaggccacttccaacatcaaccaatgtgaaaacattgactggctttggtccaggtttagccatggaaactgcccttagaagtcctgat

SEQ ID NO: 32101 - DNA, 137 bp, Macaca Mulatta
ggccaggcttctggctccagaaaaccaccagttcctctcatggagacagcggaagactgggagactgagcggaagaagcaggcagccagaggctggagagtcagcacggtcaacgagaggttcgacgtagccaccag

SEQ ID NO: 32102 - DNA, 873 bp, Macaca Mulatta
aacatcatgaacatcattgacattgcggtcatcatcccctacttcatcaccctggggacagagttggccgagaagccagaggacgctcagcaaggccagcaggccatgtcactggccatcctccgtgtcatccggttggtaagagtctttaggattttcaagttgtccagacactccaaaggtctccagattctaggtcagaccctcaaagccagcatgagagaattgggcctcctgatattctttctcttcataggggtcatccttttctctagtgctgtctattttgcagaggccgatgagcgagagtcccagttccccagcatcccagatgccttctggtgggcagtcgtctccatgacaactgtaggctatggagacatggttccgactaccattgggggaaagatagtgggttccctatgtgcaattgcaggtgtgttaactattgccttaccggtccctgtcattgtgtccaatttcaactacttctaccaccgggagacagagggagaggagcaggcccaatacttgcaagtgacaagctgtccaaagatcccatcctcccctgacctaaagaaaagtagaagtgcctctaccattagtaagtccgattacatggagatccaggagggggtaaacaacagtaatgaggactttagagaggaaaacttgaaaacagccaactgcaccttggctaacacaaactatgtgaatattaccaaaatgttaactgatgtctgattgaaacctattaccatactcacagctcaatggaactaatgcagatgttgcataatagcctgcattgtagtcagtgtgttctacagtgtgtatctggttctgcatggaaagcaatagttgtgcaagtga

SEQ ID NO: 32103 - DNA, 2163 bp, Macaca Mulatta
  misc_feature (1)...(2163): n = A,T,C or G
cgccagtatgttggagtcagtggtggcttaagttntgaagggaggtagcatccgtcggatatccacaccatccttctcgctgcagnnnnnnnnnnnnnnnnnnnnnnnnnnnnnnnnnnnnnnnnnnnnnnnnnnnnnnnnnnnnnnnnnnnnnnnnnnnnnnnnnnnnnnnnnnnnnnnnnnnnnnnnnnnnnnnnnnnnnnnnnnnnnnnnnnnnnnnnnnnnnnnnnnnnnnnnnnnnnnnnnnnnnnnnnnnnnnnnnnnnnnnnnnnnnnnnnnnnnnnnnnnnnnnnnnnnnnnnnnnnnnnnnnnnnnnnnnnnnnnnnnnnnnnnnnnnnnnnnnnnnnnnnnnnnnnnnnnnnnnnnnnnnnnnnnnnnnnnnnnnnnnnnnnnnnnnnnnnnnnnnnnnnnnnnnnnnnnnnnnnnnnnnnnnnnnnnnnnnnnnnnnnnnnnnnnnnnnnnnnnnnnnnnnnnnnnnnnnnnnnnnnnnnnnnnnnnnnnnnnnnnnnnnnnnnnnnnnnnnnnnnnnnnnnnnnnnnnnnnnnnnnnnnnnnnnnnnnnnnnnnnnnnnnnnnnnnnnnnnnnnnnnnnnnnnnnnnnnnnnnnnnnnnnnnnnnnnnnnnnnnnnnnnnnnnnnnnnnnnnnnnnnnnnnnnnnnnnnnnnnnnnnnnnnnnnnnnnnnnnnnnnnnnnnnnnnnnnnnnnnnnnnnnnnnnnnnnnnnnnnnnnnnnnnnnnnnnnnnnnnnnnnnnnnnnnnnnnnnnnnnnnnnnnnnnnnnnnnnnnnnnnnnnnnnnnnnnnnnnnnnnnnnnnnnnnnnnnnnnnnnnnnnnnnnnnnnnnnnnnnnnnnnnnnnnnnnnnnnnnnnnnnnnnnnnnnnnnnnnnnnnnnnnnnnnnnnnnnnnnnnnnnnnnnnnnnnnnnnnnnnnnnnnnnnnnnnnnnnnnnnnnnnnnnnnnnnnnnnnnnnnnnnnnnnnnnnnnnnnnnnnnnnnnnnnnnnnnnnnnnnnnnnnnnnnnnnnnnnnnnnnnnnnnnnnnnnnnnnnnnnnnnnnnnnnnnnnnnnnnnnnnnnnnnnnnnnnnnnnnnnnnnnnnnnnnnnnnnnnnnnnnnnnnnnnnnnnnnnnnnnnnnnnnnnnnnnnnnnnnnnnnnnnnnnnnnnnnnnnnnnnnnnnnnnnnnnnnnnnnnnnnnnnnnnnnnnnnnnnnnnnnnnnnnnnnnnnnnnnnnnnnnnnnnnnnnnnnnnnnnnnnnnnnnnnnnnnnnnnnnnnnnnnnnnnnnnnnnnnnnnnnnnnnnnnnnnnnnnnnnnnnnnnnnnnnnnnnnnnnnnnnnnnnnnnnnnnnnnnnnnnnnnnnnnnnnnnnnnnnnnnnnnnnnnnnnnnnnnnnnnnnnnnnnnnnnnnnnnnnnnnnnnnnnnnnnnnnnnnnnnnnnnnnnnnnnnnnnnnnnnnnnnnnnnnnnnnnnnnnnnnnnnnnnnnnnnnnnnggtgtcagaaatggctgtttctgagctacccggtaaccccaatgctgtctggacagtgcgtcgacacattgaagnnnnnnnnnnnnnnnnnnnnnnnnnnnnnnnnnnnnnnnnnnnnnnnnnnnnnnnnnnnnnnnnnnnnnnnnnnnnnnnnnnnnnnnnnnnnnnnnnnnnnnnnnnnnnnnnnnnnnnnnnnnnnnnnnnnnnnnnnnnnnnnnnnnnnnaggtctatccagatggcattcggcacatacgagcagacaagagagtcaatgagtggaagacccctggaaagaaaacaattgtgaagtgtgcagtgaaccagcgacaagtggtgattgccctgacgggaggagagttggtctatttcgagatggatccnnnnnnnnnnnnnnnnnnnnnnnnnnnnnnnnnnnnnnnnnnnnnnnnnnnnnnnnnnnnnnnnnnnnnnnnnnnnnnnnnnnnnnnnnnnnnnnnnnnnnnnnnnnnnnnnnnnnnnnnnnnnnnnnnnnnnnnnnnnnnnnnnnnnnnnnnnnnngactgtttgcaacctctaagcatgcaggctctcccagcccagcctgagtccttgtgtattgtggaaatgggtgggacggagaagcaggatgagctgggtgagaggggctcgattggcttcctatacctgaatattgggctaca

SEQ ID NO: 32104 - DNA, 100 bp, Macaca Mulatta
ttgactctgccaccttcccctggcaggacgaagttctctagcagacagtggccccacagcaacagaggcgcagcttcgaggaggatgagtgtccaacagg

SEQ ID NO: 32105 - DNA, 1022 bp, Macaca Mulatta
  misc_feature (1)...(1022): n = A,T,C or G
cagaagaatagagaggctgttgcagccccgtgctttctcctgctgctggccgattgcttgctctgaactaaccctctaacccttgggagtctgtgtgcagcagtgatgtgagctgcatccgggctgaaatgggagctcccgctatggcactggctcaagtagctaatctaaagagaaagtattttggggaagacatcttggttgcacccctcattgcatcttgactaattgcttccaactccgggggcttccagggacaatctcattgttcttttctctccaagggtcagccatattaaccatttgttaatttcttctgaacagatcaagcaaaagtagatannnnnnnnnnnnnnnnnnnnnnnnnnnnnnnnnnngagtgatgacagagaaacagatacagcatcagaaagcagttaccagctcagcagacacaagaagagcccgagctctttaaccaatcttagcagctcctctggcatgacgtccttgtcttctgnnnnnnnnnnnnnnnnnnnnnnnnnnnnnnnnnnnnnnnnnnnnnnnnnnnnnnnnnnnnnnnnnnnnnnnnnnnnnnnnnnnnnnnnnnnnnnnnnnnnnnnnnnnnnnnnnnnnnnnnnnnnnnnnnnnnnnnnnnnnnnnnnnnnnnnnnnnnnnnnnnnnnnnnnnnnnnnnnnnnnnnnnnnnnnnnnnnnnnnnnnnnnnnnnnnnnnnnnnnnnnnnnnnnnnnnnnnnnnnnnnnnnnnnnnnnnnnnnnnnnnnnnnnnnnnnnnnnnnnnnnnnnnnnnnnnnnnnnnnnnnnnnnnnnnnnnnnnnnnnnnnnnnnnnnnnnnnnnnnnnnnnnnnnnnnnnnnnnnnnnnnnnnnnnnnnnnnnnnnnnnnnnnnnnnnnnnnnnnnnnnnnnnnnnnnnnnnnnnnnnnnnnnnnnnnnnnnnnnnngacagcaccagttgcccttgaagcagaaaacagaggtgaaatgaaactagctctccagtatgtcccagagccagtccctggta

SEQ ID NO: 32106 - DNA, 500 bp, Macaca Mulatta
  misc_feature (1)...(500): n = A,T,C or G
gtcgtagtcgagatcgggatcggtatagacggagaaacagtcggagccgaagtcgagatcggcagcgtcgtcaccgtagccgtagctgggatcgtcgnnnnnnnnnnnnnnnnnnnnnnnnnnnnnnnnnnnnnnnnnnnnnnnnnnnnnnnnnnnnnnnnnnnnnnnnnnnnnnnnnnnnnnnnnnnnnnnnnnnnnnnnnnnnnnnnnnnnnnnnnnnnnnnnnnnnnnnnnnnnnnnnnnnnnnnnnnnnnnnnnnnnnnnnnnnnnnnnnnnnnnnnnnnnnnnnnnnnnnnnnnnnnnnnnnnnnnnnnnnnnnnnnnnnnnnnnnnnnnnnnnnnnnnnaggttcgcgatgtacgtatcatctcagatcggaactcacgtcgttctaagggcattgcctatgtggaattctgtgaaatccagtctgtgccactggccattgggctgactgggcagcggttgctgggagtgcctatcattgtacaggcttcacag

SEQ ID NO: 32107 - DNA, 255 bp, Macaca Mulatta
taaattacacctgcctttcgttttgaagatttaaagaatctgctcaaatgatttattttctgagtctcttcacacattaacttttatatgattttttaaaaattattacctgcttatatttttttagtatctgtttcatataaagagatactgcatgttcactgtgaagtattgctgaattaaattgaaaatgtcagataaaactgatacatggtgtagttataaaaatgctgttgtgatatgaagaaaaaagga

SEQ ID NO: 32108 - DNA, 543 bp, Macaca Mulatta
ctgaatcggtgcaacctaactcaataacataacccacggttttatactgcattgtgttttggtatgattgtgagatgtcaaggccatcttcctacaggcacacagactgagaaatcctggcctagattgctgttaccatcatgctttctatagaattgacttttattacatttctttgctcctttataagttctcaatgacgtgactacatttttacattattaaagcaaacagattggccccataactaaggaaatgaatagagatggaaaagtaaatgcttggcattccttaagccctgggtaagtgtttatgctcaataaaacataaataatgttactgaaagaggctgtttatacgggagtaatggtcagggacaacactggagagaccaggtagggactggttgtgaccatatcctcatttgcgttcttcttgatgacagcatatatgattgccctcaggtaaattttgatgcagtaaattcatgaccataacatctattacttgagaccatcttgccaagtgctcctttactccatg

SEQ ID NO: 32109 - DNA, 701 bp, Macaca Mulatta
  misc_feature (1)...(701): n = A,T,C or G
caggtcaagtgtgttccagttcttttctatacgtttttctatctgattctaaaaacaatgcactcattatgaaaacaaagaagcaaaaaaacatggaaagaacaaaactgtagatttttaaaagccagaatcttaatattttggcaaaactttttctgtcttcttcactgcacaatgtattccctactcttggctgagcttttaggatctacatatctacataatcttttattgtcctatttcttcatacaatatttgaagacacacaggtttccttccacttaaattcctacagaatcaaagattaagattagtgnnnnnnnnnnnnnnnncaattgaaaataccatggcatttatacaaaatttggatttaagaaagggcaaaggcctatacattgtgtcactaaaacagtttttctcaactaattttttcttctttttaaaccctaacgcattgaaagaaatgcatatttacatttaaaaagtttcctgaaacaatgtttatctttactaagaacaatgctcccagtacttccaattaaattcatttgatttcaagcatctaaattgatttcatgacccacaatttgaaaaacactgaactaaaaagaatttgttaacactttatgtatatatttggttgtatgttctcctaatcacctatgtattaaatgttaaagcaattgaaattttaatattca

SEQ ID NO: 32110 - DNA, 500 bp, Macaca Mulatta
  misc_feature (1)...(500): n = A,T,C or G
tagaaaactcttcgtgggcatgctcaacaagcaacagtccgaggacgacgtccgccgcctcttcgaggccttcgggaacatcgaggagtgcaccatcctgcgtgggcccgacggcaacagcannnnnnnnnnnnnnnnnnnnnnnnnnnnnnnnnnnnnnnnnnnnnnnnnnnnnnnnnnnnnnnnnnnnnnnnnnnnnnnnnnnnnnnnnnnnnnnnnnnnnnnnnnnnnnnnnnnnnnnnnnnnnnnnnnnnnnnnnnnnnnnnnnnnnnnnnnnnnnnnnnnnnnnnnnnnnnnnnnnnnnnnnnnnnnnnnnnnnnnnnnnnnnnnnnnnnnnnnnnnnnnnnnnnctgatgcagcagcaagcggccctgatggcatcagtcgcacagggcggctacctgaaccccatggctgccttcgctgccgcccagatgcagcagatggcggccctcaacatgaatggcctggcggccgcacctatgaccccaacctcaggt

SEQ ID NO: 32111 - DNA, 815 bp, Macaca Mulatta
gggattccagcggcggacagcacccgggccgagatgtctcgctcagtggccttagccgtgctggcgctactctctctttctggcctggaggctatccagcgtactccaaagattcaggtttactcacgccatccaccagagaatggaaagccaaatttcctgaattgctatgtgtctggatttcatccatctgatattgaagttgacttactgaagaatggagagaaaatgggaaaagtggagcattcagacttgtctttcagcaaagactggtctttctatctcttgtactacactgaattcacccccaatgaaaaagatgagtatgcctgccgtgtgaaccatgtgactttgtcagggcccaggacagttaagtgggatcgagacatgtaagcagcatcatggaggtttgaagatgccgcatttggattggatgaattccaaattctgcttccttgcttcttaatattgatatgcttatacaggttatgcaaaaaatgcagagttataacaatgttgacacaggcatgaccttctctataattcctacttgagtgctatccccacgtttggaggtatcgggggccggctagcctttagggagggctggcctactttcgaggtgggggagccgcaagaatggccatcacccggacgccgtacaatcctcggctcaggaccttgaagcccgtcccacccctccttggtcctcccgcagcctttgcctgagcacccccctcaccccgtgcgcggtgtgccgctcacccttcctggaattcgcccaggtactgcgccgcgccgttggatgaacgtcg

SEQ ID NO: 32112 - DNA, 206 bp, Macaca Mulatta
gctggagtgacagaaactaggtgacagagagtgagaaaaaaattcggtcttagaccttggaaggaactccaagcataaacttcattaccccatagtaaatcatctatgagaaagaatgcaggtagaaaagaaagacgagagtggcctacttctccagcattcctggagcaggtagaaaataggttatcaataattgcatttgaata

SEQ ID NO: 32113 - DNA, 737 bp, Macaca Mulatta
acacaggcgagcggcccttcccgtgccccgagtgcggcgctcgcttcgcccgcggctcgcacttggcggcgcacgtgcgcgggcacaccggcgagaagccgttcgtgtgcggcgtgtgcggcgcgggcttcagccgtcgcgcgcacttgacagcgcacgggcgcgcgcacaccggggagcggccctacgcgtgcggagagtgcggccggcgctttggtcagagcgcggcgctgacgcggcaccagtgggctcacgcggaggagaagccgcaccgctgccccgactgcggcaagggcttcggccacagctcggacttcaagcggcaccggcgcacgcacacgggcgagaagcccttccgctgcgccgactgcggccgcggcttcgcacagcgctccaatctggccaagcaccggcgcggccacacgggcgaacgtcccttcccgtgcccagagtgtggcaagcgcttttcgcagcgttcggtgctggtcacgcaccagcgcacacacacgggcgagcggccctatgcctgcgccaactgtggccgccgcttttcgcagagttcgcacctgctcacccacatgaagacgcaccgcggcgccgccgcagcgccgggctcgggttcggccccagctcccgcgcccaagcccgaggcggccgccaaggggccgtccagcgtctgcccgggggagcgcggcagcgccctgctggagttcgcgggcggcacaagcttcggctcg

SEQ ID NO: 32114 - DNA, 2232 bp, Macaca Mulatta
  misc_feature (1)...(2232): n = A,T,C or G
gggcatcaagttatcagcagatgtcaaaccatttgtccccagatttgccgggctcaatgtggcatggttagagtcctcataagcatgtgtcttccccagctctgcagccacatactatccgtttgttcaggaaccaccagtgacnnnnnnnnnnnnnnnnnnnnnnnnnnnnnnnnnnnnnnnnnnnnnnnnnnnnnnnnnnnnnnnnnnnnnnnnnnnnnnnnnnnnnnnnnnnnnnnnnnnnnnnnnnnnnnnnnnnnnnnnnnnnnnnnnnnnnnnnnnnnnnnnnnnnnnnnnnnnnnnnnnnnnnnnnnnnnnnnnnnnnnnnnnnnnnnnnnnnnnnnnnnnnnnnnnnnnnnnnnnnnnnnnnnnnnnnnnnnnnnnnnnnnnnnnnnnnnnnnnnnnnnnnnnnnnnnnnnnnnnnnnnnnnnnnnnnnnnnnnnnnnnnnnnnnnnnnnnnnnnnnnnnnnnnnnnnnnnnnnnnnnnnnnnnnnnnnnnnnnnnnnnnnnnnnnnnnnnnnnnnnnnnnnnnnnnnnnnnnnnnnnnnnnnnnnnnnnnnnnnnnnnnnnnnnnnnnnnnnnnnnnnnnnnnnnnnnnnnnnnnnnnnnnnnnnnnnnnnnnnnnnnnnnnnnnnnnnnnnnnnnnnnnnnnnnnnnnnnnnnnnnnnnnnnnnnnnnnnnnnnnnnnnnnnnnnnnnnnnnnnnnnnnnnnnnnnnnnnnnnnnnnnnnnnnnnnnnnnnnnnnnnnnnnnnnnnnnnnnnnnnnnnnnnnnnnnnnnnnnnnnnnnnnnnnnnnnnnnnnnnnnnnnnnnnnnnnnnnnnnnnnnnnnnnnnnnnnnnnnnagagttatcttggacaccaatgggttatgttgttnnnnnnnnnnnnnnnnnnnnnnnnnnnnnnnnnnnnnnnnnnnnnnnnnnnnnnnnnnnnnnnnnnnnnnnnnnnnnnnnnnnnnnnnnnnnnnnnnnnnnnnnnnnnnnnnnnnnnnnnnnnnnnnnnnnnnnnnnnnnnnnnnnnnnnnnnnnnnnnnnnnnnnnnnnnnnnnnnnnnnnnnnnnnnnnnnnnnnnnnnnnnnnnnnnnnnnnnnnnnnnnnnnnnnnnnnnnnnnnnnnnnnnnnnnnnnnnnnnnnnnnnnnnnnnnnnnnnnnnnnnnnnnnnnnnnnnnnnnnnnnnnnnnnnnnnnnnnnnnnnnnnnnnnnnnnnnnnnnnnnnnnnnnnnnnnnnnnnnnnnnnnnnnnnnnnnnnnnnnnnnnnnnnnnnnnnnnnnnnnnnnnnnnnnnnnnnnnnnnnnnnnnnnnnnnnnnnnnnnnnnnnnnnnnnnnnnnnnnnnnnnnnnnnnnnnnnnnnnnnnnnnnnnnnnnnnnnnnnnnnnnnnnnnnnnnnnnnnnnnnnnnnnnnnnnnnnnnnnnnnnnnnnnnnnnnnnnnnnnnnnnnnnnnnnnnnnnnnnnnnnnnnnnnnnnnnnnnnnnnnnnnnnnnnnnnnnnnnnnnnnnnnnnnnnnnnnnnnnnnnnnnnnnnnnnnnnnnnnnnnnnnnnnnnnnnnnnnnnnnnnnnnnnnnnnnnnnnnnnnnnnnnnnnnnnnnnnnnnnnnnnnnnnnnnnnnnnnnnnnnnnnnnnnnnnnnnnnnnnnnnnnnnnnnnnnnnnnnnnnnnnnnnnnnnnnnnnnnnnnnnnnnnnnnnnnnnnnnnnnnnnnnnnnnnnnnnnnnnnnnnnnnnnnnnnnnnnnnnnnnnnnnnnnnnnnnnnnnnnnnnnnnnnnnnnnnnnnnnnnnnnnnnnnnnnnnnnnnnnnnnnnnnnnnnnnnnnnnnnnnnnnnnnnnnnnnnnnnnnnnnnnnnnnnnnnnnnnnnnnnnnnnnnnnnnnnnnnnnnnnnnnnnnnnnnnnnnnnnnnnnnnnnnnnnnnnnnnnnnnnnnnnnnnnnnnnnnnnnnnnnnnnnnnnnnnnnnnnnnnnnnnnnnnnnnnnnnnnnnnnnnnnnnnnnnnnnnnnnnnnnnnnnnnnnnnnnnnnnnnnnnnnnnnnnnnnnnnnnnnnnnnnnnnnnnnnnnnnnnnnnnnnnnnnnnnnnnnnnaggtgggctggatgacactttgcacacaattattgattatgcctgtgagcagaacattccctttgtgtttgctctcaaccgcaaagctctggggcgcagtttgaataaggcagttcctgtcagcgtggtagggatcttcagctacgatggggcccag

SEQ ID NO: 32115 - DNA, 1100 bp, Macaca Mulatta
  misc_feature (1)...(1100): n = A,T,C or G
ttggtggagtggctgaattttggagaagactacagagtgcatttctgaagaatcagagcctgagaaccaaaagctcactctggagaaggtcttccgagggctgttgcttttagaagcaaagctgaaaagtgtgtttgccaagcatggcctggagaagctgacacccattggtgacaaatatgacccccgtgagcatgaactcatctgtcatgtgccagctagtgttggggtgcagcctggcaccatggcattagtaagacaagatggctacaaacttcatgtccgcaccattaggcttgcccgagtggaagtggcagtggagtctcagagaagactgtgaagaggccatcaggagctggatgttctcccagagcacagtcacctatgtttcttttatttattaaactaggtttgtattgtacatgaggtacttcatgtgatatattttggatttagtcatattggctttatttctaagatattctattgatttaatgtgacctgtttggtctcatcagaagtcttaccattgggcatttgaacagtgtgacaagtgttccgatggcctttatcaaaacatgtttaggaaaattggtactgtgataaatttgaatccaaaatccttttaactaggtgttttcaactatgtgtttcttcctatccgtccctataataggaattgtatagtattgtgtattttgtgggaaaaggagatggtggggattggttcaacatttgggtatgtagaggataaagcttcatggttgtataaatttagatcatttggattgatttttatacacataggttttcaggactttaccnnnnnnnnnnnnnnnnnccttttagccatcttttgttcttgtaatcccagctagataggctttatgctcacatcattgtcccataccacacccctttctcattcccatttgcaggagctaaaggtctaggtgagacttggaaggcaaggaacattggaatttgagataccccaggaccctttcaagcaagaatggccaaaaagccttgtgctgtctttgctctgagttatcttcaaattattttcagcttccctgtcatataatcattcaggcaaa

SEQ ID NO: 32116 - DNA, 425 bp, Macaca Mulatta
  misc_feature (1)...(425): n = A,T,C or G
ggttcttcagacccagaagacgaaagtgttctcttctccaaccgagcagcgtgtcacttgaaggatggaaactgcagagactgcatcaaagattgcacttcnagcactggcgttggttcccttcagcattaagcccctgctgcggcgagcatctgcttatgaggctctggagaagtaccctatggcctatgttgactataagactgtgctgcagattgataatagtgtgacgtcagccgtagaaggcatcaacagnatgaccagagctctcatggactcgcttgggcctgaatggcgcctgaagctgccctctatccccttggtgcctgtttcagctcagaagaggtggaattctttgccttcggagaaccacaaagagatggctaaaagcaaatccaaagcaaccacagctacaaagaacagag

SEQ ID NO: 32117 - DNA, 732 bp, Macaca Mulatta
gctgagcccttagactccctgtcctttaacttcaggcccatcccagcactccctatactcagaccttttggacagcacccttgctcgggcagcagagggagtacaatggaagaaacctctctattgggacttgtacggacatgagcagcagcagttgctgaaggccaagctgatggactccaaacaggatcccatctatgttgaacctgagggcctggtcccagcccttccccagagcctttatgatctgccttaggagcccaaggatgtgtggggatgccaagctcaggtgaagtaggagagctatgagctcccctacaaccctgcctgatgactatgctgtgccacccaccgagagcacaaagaccctccctgctcccaagccccagggcccagccctccctgaacctagtactgcaactggcagtagcagcaaaagccacaactcagctctgtacagccaggtcctggagagtggggcctcagggagctgggactgtgggctctctagagtagggactgacaggactggggtcaagtcagaggtccctacctgagaaggagggcaaggctgaagttgctgaggaggaccatggggaggtggcactagggatcagagaaaatggttagaaccagcagaagccagagggtgggaggggccatgccatgtgagaccaggggaccagagggatgggggagtcaagggaaggacagtcaatcccaggaagtcct

SEQ ID NO: 32118 - DNA, 663 bp, Macaca Mulatta
  misc_feature (1)...(663): n = A,T,C or G
aaacaacaagaggctagtataaagccttaacttttacttggtttattagtcatgtaacattgattaacttctattaagtttttaagaagcgtaactttttattgccggggcttaacacgactatctaatgaaatatgnnnnnnnnnnnnnnnnnnnnnnctgcataaatgttaataatcttgaagtgtgctaattattttgtttatttcctaaagggatgtccgtcgcttggtagtggccatgtctagagccagacttggactttatatcttcgccagagtatccctctttcaaaactgttttgaactgactccagctttcagtcagctcacagctcgaccccttcatttgcatataattccaacagaacctttcccaaccactcgaaagaatggagagagaccatctcatgaagtacaaataataaaaaatatgccccagatggcaaactttgtatacaacatgtacatgcatttgatacagactacacatcattatcatcagactttattacaactaccacctgctatggtagaagaaggtgaggaagttcaaaatcaagaaacagaattggaaacagaagaagaggctatgactgttcaagttgacatcatacccagtccaacagacaccagctggcgtcaagaaactccagcctttcaa

SEQ ID NO: 32119 - DNA, 2037 bp, Macaca Mulatta
  misc_feature (1)...(2037): n = A,T,C or G
aagtgagtgttttgcttttgttgtaaatttatctgaaaccaattgggttgtcttcctgtttgataacatagtctcctgcatttattaggaatgttacaagacaaacgaatggagatagataaacatagcctaaatattggtgattacaatcgaacggtcgggaaaggccctggttctcggcctcagatttccaaagagtcttccatggagcgcaatccttattttgataannnnnnnnnnnnnnnnnnnnnnnnnnnnnnnnnnnnnnnnnnnnnnnnnnnnnnnnnnnnnnnnnnnnnnnnnnnnnnnnnnnnnnnnnnnnnnnnnnnnnnnnnnnnnnnnnnnnnnnnnnnnnnnnnnnnnnnnnnnnnnnnnnnnnnnnnnnnnnnnnnnnnnnnnnnnnnnnnnnnnnnnnnnnnnnnnnnnnnnnnnnnnnnnnnnnnnnnnnnnnnnnnnnnnnnnnnnnnnnnnnnnnnnnnnnnnnnnnnnnnnnnnnnnnnnnnnnnnnnnnnnnnnnnnnnnnnnnnnnnnnnnnnnnnnnnnnnnnnnnnnnnnnnnnnnnnnnnnnnnnnnnnnnnnnnnnnnnnnnnnnnnnnnnnnnnnnnnnnnnnnnnnnnnnnnnnnnnnnnnnnnnnnnnnnnnnnnnnnnnnnnnnnnnnnnnnnnnnnnnnnnnnnnnnnnnnnnnnnnnnnnnnnnnnnnnnnnnnnnnnnnnnnnnnnnnnnnnnnnnnnnnnnnnnnnnnnnnnnnnnnnnnnnnnnnnnnnnnnnnnnnnnnnnnnnnnnnnnnnnnnnnnnnnnnnnnnnnnnnnnnnnnnnnnnnnnnnnnnnnnnnnnnnnnnnnnnnnnnnnnnnnnnnnnnnnnnnnnnnnnnnnnnnnnnnnnnnnnnnnnnnnnnnnnnnnnnnnnnnnnnnnnnnnnnnnnnnnnnnnnnnnnnnnnnnnnnnnnnnnnnnnnnnnnnnnnnnnnnnnnnnnnnnnnnnnnnnnnnnnnnnnnnnnnnnnnnnnnnnnnnnnnnnnnnnnnnnnnnnnnnnnnnnnnnnnnnnnnnnnnnnnnnnnnnnnnnnnnnnnnnnnnnnnnnnnnnnnnnnnnnnnnnnnnnnnnnnnnnnnnnnnnnnnnnnnnnnnnnnnnnnnnnnnnnnnnnnnnnnnnnnnnnnnnnnnnnnnnnnnnnnnnnnnnnnnnnnnnnnnnnnnnnnnnnnnnnnnnnnnnnnnnnnnnnnnnnnnnnnnnnnnnnnnnnnnnnnnnnnnnnnnnnnnnnnnnnnnnnnnnnnnnnnnnnnnnnnnnnnnnnnnnnnnnnnnnnnnnnnnnnnnnnnnnnnnnnnnnnnnnnnnnnnnnnnnnnnnnnnnnnnnnnnnnnnnnnnnnnnnggctggaagagtctccatttgttccctatgactttatgaacagcagtacttcaccagccagtcctccaggttcaataggagatggctggccacgtgccaaatcgcctaacggctctagcagtgttaattggccaccaggtaaaattttttctaacactttctttcatgagactgtgtttccattaaggttttgttacatctggacttaatactgatgtagcccagattggcgtgcttagactgacatgtgtggacgagaaggaatgcagaagtgatagaggaaaagttaagcatgaagtcttggacaagtgagtgtgtcagcctgttacctatatctttatgctcaagcagcagaggtagaagtgagtcccattgaccagcatgaagaattacattaaaaactttaggccaggcacagtggctcacaccagtaatcccagcactttgggaggccgaggcaaggatcacgaggtcaggagatcgagaccatcctggctgacacggtgaaaccccgtctctactaaaactacaaaaaattagccaggcatggtggcaggcgcctgtagttccagctactcgggaggctgaggcaggaaagtggcgtgaatctgggagacggggcttgcagtgagctaagaggtgtgccactgcactccagcctgggcga

SEQ ID NO: 32120 - DNA, 456 bp, Macaca Mulatta
  misc_feature (1)...(456): n = A,T,C or G
ngatatatgggcaataggttgtatatttgctgaattgttgacttcagaacctatttttcactgtcgtcaggaagatataaaaacaagcaatccatttcatcatgatcaactggatcggatatttagtgtcatggggtttcctgcannnnnnnnnnnnnnnnnnnnnnnnnnnnnnnnnnnnnnnnnnnnnnnnnnnnnnnnnnnnnnnnnnnnnnnnnnnnnnnnnnnnnnnnnnnnnnnnnnnnnnnnnnnnnnnnnnnnnnnnnnnnnnnnnnnnnnnnnnnnnnnnnnnnnnnnnnnnnnnnnnnnnnnnnnnnnnnnnnnnnnnnnnnnnnnnnnnnnnnnnnnnnnnnnnnnnnnnnnnnnnnnnnnnnnnnnnnnnnnnngtatttgccggctgccagattccataccccaaacgagaattccttaatgaagatgatcctgaagaaaaag

SEQ ID NO: 32121 - DNA, 325 bp, Macaca Mulatta
tattatatgtgactatttttgtaaatgggtttgtgtttggggagagggattaaagggagggaattctacatttctctattgtattgtataactggatatattttaaatggaggcatgctgcaattctcattcacacatgaaaaaaaatcgcatcacaaaaggaaagactttacttcttgtttcaggatgtttttagatttttgaggtgcttaaatagctattgagtatttttaaggtgtctcatccagaaaaaatttaatgtgcctgtaaatttaaatagaatcacaagcattaaagagttgctttatttttacataatccatta

SEQ ID NO: 32122 - DNA, 782 bp, Macaca Mulatta
  misc_feature (1)...(782): n = A,T,C or G
ggaatatcaaaaaatcgatttttcagtgtcaccagcaatctcgtcagaaaaagcctttgaataatagtagtcacataaaagtccattgaaattataaccttatgggttcaaattttattattagccagttttcccagcaccatttaacatgggaagttgtttttcttgaagtgattggcttactttgttatttttaagcaagcacgaaatacttgtttgaatatctataatttgcttatcagttattttttcaagtagaaatggaaaaagcagctgattcctttgcatctaaaaaacaaacaaggactgtgccctggtaaaaaaaaccatcatattttagtatttagcagaaatggtttataaattcccttctctttccaccaaatattaaaagcgtgtatccaaggagtgaggttnnnnnnnnnnnnnnnnnnnnnnatcaaacatgctagataatgtgtctttttattattgttattttagtttaatttatgggatacatgtgctgaacgtgcaggtttgttacatacatatagatgtgccatggtggtttgctgcacccatcaacccgtcatctaggttttaaggcctgcatgtgttaggtatttgtcctaatgctctccctccccttgcccccaacaggccccagtgtgtgatgttctcctccctgtgtccatgtgttctcattgttcaactcccactttagagtgagagcatngtgctgttggttttctgttcctgggntagnntgnttgaggaatggtggtttccagaatcattcc

SEQ ID NO: 32123 - DNA, 366 bp, Macaca Mulatta
ttccataaaggtgttataattagtatattcatatttgtaagtgattatcttctatcacgatcatatctcttctaggaaaatgtatctccttatttcaggcctatttttgacaactgactaaattttacccaaaataaacacagaagcacataagaacatactctactgataaatacatgatccaccactagagtctagtgacaacttaaggagttttaaaccatttctcatttttagaaaagttagagttacattagggtttgtgatgatctttacgttatttggatacacttaaaagaacagatccttgttcaatgcggtctaatgctaatttcctttgtaacaagagtaaaatatatacccata

SEQ ID NO: 32124 - DNA, 766 bp, Macaca Mulatta
gggtacatttgaaaagaccctttggatacttggaactgctaaattatcttattttttacataaggtcacttaaatgaaaagtgattaaaatacatctttcctacattgccttctacataacatcaggtattacggatgttagattgcatctcagtgttaaatcttcactgatagatgtacttaagtaaatcatgaaaattctgcttataactatagaagtgaattgtggatgtaaaatggttatgctatttgggtaatggcactaggcagcatttgtatagtaactaatggcaaaaattcatggctagtgatgtataaaataaaatattctttgcggtaaaatattctctttgttaatgttatagaagagggggatacaaaaaggaactaacaatttgtatggcagtatcagatattatttttgttttagtatttcctgttttggtttatttgtatcttagaagagcataatgacattgtttgatgaaacctacattatgctggactgttttgacctggtttaacccttctgataagtaattgtggatgttggggatgagaacggaataatctttgcctggggggccgctacccccgaaaatgtccccttcggagaaaagttcagggcccacctggggaatgcctgggaagaaaaaccttgaatttggctaggcccacgcagtgggttctaaggagcggaaggaatgcccggccgcgcttttagaaaagatattaaagggtgggagtagccagttgagaaaacgcg

SEQ ID NO: 32125 - DNA, 399 bp, Macaca Mulatta
tttcctttttgccatcctttcaggaaccctgtatggtttttagtttaaattaaaggagtcattattgtggtgggaatatgaaataaagtggaagaaaaggccatgagctagtctgctggtgcttgcggttggggaaggaaaggtgatggtgtgttggactccaggtggccctcatggcccagcccaccctccccagattgaaatccgaggacagatttgtgctcagtgaattgggtgatgtttttagtatagagcagaacagaattcctaggagtatgtgtgatgaagtgcaaggtcaaaaggaaaagacagaaaaagcattttttaaagatgagaagtatttggatacttattattgtatgtatatattgtaaggtgcttaatcagcaactccatctt

SEQ ID NO: 32126 - DNA, 1999 bp, Macaca Mulatta
  misc_feature (1)...(1999): n = A,T,C or G
cagggcgaggagctctcctcaggcagcctgtcagagcaggccaccggccagacccccagcagcacgtgcgcggcctgccagcagcatgtgcacttggtacagcgctacctggctgacggcaggttgtaccaccgccactgcttccggtnnnnnnnnnnnnnnnnnnnnnnnnnnnnnnnnnnnnnnnnnnnnnnnnnnnnnnnnnnnnnnnnnnnnnnnnnnnnnnnnnnnnnnnnnnnnnnnnnnnnnnnnnnnnnnnnnnnnnnnnnnnnnnnnnnnnnnnnnnnnnnnnnnnnnnnnnnnnnnnnnnnnnnnnnnnnnnnnnnnnnnnnnnnnnnnnnnnnnnnnnnnnnnnnnnnnnnnnnnnnnnnnnnnnnnnnnnnnnnnnnnnnnnnnnnnnnnnnnnnnnnnnnnnnnnnnnnnnnnnnnnnnnnnnnnnnnnnnnnnnnnnnnnnnnnnnnnnnnnnnnnnnnnnnnnnnnnnnnnnnnnnnnnnnnnnnnnnnnnnnnnnnnnnnnnnnnnnnnnnnnnnnnnnnnnnnnnnnnnnnnnnnnnnnnnnnnnnnnnnnnnnnnnnnnnnnnnnnnnnnnnnnnnnnnnnnnnnnnnnnnnnnnnnnnnnnnnnnnnnnnnnnnnnnnnnnnnnnnnnnnnnnnnnnnnnnnnnnnnnnnnnnnnnnnnnnnnnnnnnnnnnnnnnnnnnnnnnnnnnnnnnnnnnnnnnnnnnnnnnnnnnnnnnnnnnnnnnnnnnnnnnnnnnnnnnnnnnnnnnnnnnnnnnnnnnnnnnnnnnnnnnnnnnnnnnnnnnnnnnnnnnnnnnnnnnnnnnnnnnnnnnnnnnnnnnnnnnnnnnnnnnnnnnnnnnnnnnnnnnnnnnnnnnnnnnnnnnnnnnnnnnnnnnnnnnnnnnnnnnnnnnnnnnnnnnnnnnnnnnnnnnnnnnnnnnnnnnnnnnnnnnnnnnnnnnnnnnnnnnnnnnnnnnnnnnnnnnnnnnnnnnnnnnnnnnnnnnnnnnnnnnnnnnnnnnnnnnnnnnnnnnnnnnnnnnnnnnnnnnnnnnnnnnnnnnnnnnnnnnnnnnnnnnnnnnnnnnnnnnnnnnnnnnnnnnnnnnnnnnnnnnnnnnnnnnnnnnnnnnnnnnnnnnnnnnnnnnnnnnnnnnnnnnnnnnnnnnnnnnnnnnnnnnnnnnnnnnnnnnnnnnnnnnnnnnnnnnnnnnnnnnnnnnnnnnnnnnnnnnnnnnnnnnnnnnnnnnnnnnnnnnnnnnnnnnnnnnnnnnnnnnnnnnnnnnnnnnnnnnnnnnnnnnnnnnnnnnnnnnnnnnnnnnnnnnnnnnnnnnnnnnnnnnnnnnnnnnnnnnnnnnnnnnnnnnnnnnnnnnnnnnnnnnnnnnnnnnnnnnnnnnnnnnnnnnnnnnnnnnnnnnnnnnnnnnnnnnnnnnnnnnnnnnnnnnnnnnnnnnnnnnnnnnnnnnnnnnnnnnnnnnnnnnnnnnnnnnnnnnnnnnnnnnnnnnnnnnnnnnnnnnnnnnnnnnnnnnnnnnnnnnnnnnnnnnnnnnnnnnnnnnnnnnnnnnnnnnnnnnnnnnnnnnnnnnnnnnnnnnnnnnnnnnnnnnnnnnnnnnnnnnnnnnnnnnnnnnnnnnnnnnnnnnnnnnnnnnnnnnnnnnnnnnnnnnnnnnnnnnnnnnnnnnnnnnnnnnnnnnnnnnnnnnnnnnnnnnnnnnnnnnnnnnnnnnnnnnnnnnnnnnnnnnnnnnnnnnnnnnnnnnnnnnnnnnnnnnnnnnnnnnnnnnnnnnnnnnnnnnnnnnnnnnnnnnnnnnnnnnnnnnnnnnnnnnnnnnnnnnnnnnnnnnnnnnnnnnnnnnnnnnnnnnnnnnnnnnnnnnnnnnnnnnnnnnnncagaaaaggactggacggaggaggaccgggcccgggagaaggtgctgatgcaggagcttgtgaccctcattgagcagcgcaacgctatcgtcaactgcctggatgaggaccggcagag

SEQ ID NO: 32127 - DNA, 600 bp, Macaca Mulatta
  misc_feature (1)...(600): n = A,T,C or G
ttacaggagtctctccagtgtccagctccctgacacccccatcccagccccagggagaagagggtggacgccagatgagctggcagaggctgggcaggtcctgagtgggtcaggccaggccgagagagaaggcacgatgccctgggcgccccagtcccagggcagaggccaagcctgtctggagaaggcagcacggggtcagctctcaggggtcacgctggggtccacgccggcgcaggtctgctcataggacggtggggcctcatatgggtaagccccaagagctgtactctggaggaagaatcaaggtgctggtggtaggcagggggggcccgtnnnnnnnnnnnnnnnnnnnnnnnnnnnnnnnnnnnnnnnnnnnnnnnnnnnnnnnnnnnnnnnnnnnnnnnnnnnnnnnnnnnnnnnnnnnnnnnnnnnnnnnnnnnnnnnnnnnnnnnnnnnnnnnnnnnnnnnnnnnnnnnnnnnnnnnnnnnnnnnnnnnnnnnnnnnnnnnnnnnnnnnnnnnnnnnnnnnnnnnnnnnnnnnnnnnnnnnnnnnnnnnnnnnnnnnnnnnnnnnnnnnnnnnnnnnnnnnnnnnnnnnn

SEQ ID NO: 32128 - DNA, 1827 bp, Macaca Mulatta
  misc_feature (1)...(1827): n = A,T,C or G
agttgttttggagaatcatgtagtgacagatgaagacgaacctgctttgaaacgccagcgactagaaatcaattgccaggatccgtctataaagngacaatctgcttgcggctggatagcattgaagccaagttgcaggccctggaggccacttgtaaatccttagaggaaaagctggatctggtcacgaacaagcagcacagccccatccaggttcccatggtggccggctcccctcttggggcannnnnnnnnnnnnnnnnnnnnnnnnnnnnnnnnnnnnnnnnnnnnnnnnnnnnnnnnnnnnnnnnnnnnnnnnnnnnnnnnnnnnnnnnnnnnnnnnnnnnnnnnnnnnnnnnnnnnnnnnnnnnnnnnnnnnnnnnnnnnnnnnnnnnnnnnnnnnnnnnnnnnnnnnnnnnnnnnnnnnnnnnnnnnnnnnnnnnnnnnnnnnnnnnnnnnnnnnnnnnnnnnnnnnnnnnnnnnnnnnnnnnnnnnnnnnnnnnnnnnnnnnnnnnnnnnnnnnnnnnnnnnnnnnnnnnnnnnnnnnnnnnnnnnnnnnnnnnnnnnnnnnnnnnnnnnnnnnnnnnnnnnnnnnnnnnnnnnnnnnnnnnnnnnnnnnnnnnnnnnnnnnnnnnnnnnnnnnnnnnnnnnnnnnnnnnnnnnnnnnnnnnnnnnnnnnnnnnnnnnnnnnnnnnnnnnnnnnnnnnnnnnnnnnnnnnnnnnnnnnnnnnnnnnnnnnnnnnnnnnnnnnnnnnnnnnnnnnnnnnnnnnnnnnnnnnnnnnnnnnnnnnnnnnnnnnnnnnnntcaccttttctataaatttggcatcacggaatccgactggtaccgaatcaagcnnnnnnnnnnnnnnnnnnnnnnnnnnnnnnnnnnnnnnnnnnnnnnnnnnnnnnnnnnnnnnnnnnnnnnnnnnnnnnnnnnnnnnnnnnnnnnnnnnnnnnnnnnnnnnnnnnnnnnnnnnnnnnnnnnnnnnnnnnnnnnnnnnnnnnnnnnnnnnnnnnnnnnnnnnnnnnnnnnnnnnnnnnnnnnnnnnnnnnnnnnnnnnnnnnnnnnnnnnnnnnnnnnnnnnnnnnnnnnnnnnnnnnnnnnnnnnnnnnnnnnnnnnnnnnnnnnnnnnnnnnnnnnnnnnnnnnnnnnnnnnnnnnnnnnnnnnnnnnnnnnnnnnnnnnnnnnnnnnnnnnnnnnnnnnagcttctagaggtcatccgcatcccctgcctcctggccccgtccgtcttctaagtcagcaatggccaggtgnnnnnnnnnnnnnnnnnnnnnnnnnnnnnnnnnnnnnnnnnnnnnnnnnnnnnnnnnnnnnnnnnnnnnnnnnnnnnnnnnnnnnnnnnnnnnnnnnnnnnnnnnnnnnnnnnnnnnnnnnnnnnnnnnnnnnnnnnnnnnnnnnnnnnnnnnnnnnnnnnnnnnnnnnnnnnnnnnnnnnnnnnnnnnnnnnnnnnnnnnnnnnnnnnnnnnnnnnnnnnnnnnnnnnnnnnnnnnnnnnnnnnnnnnnnnnnnnnnnnnnnnnnnnnnnnnnnnnnnnnnnnnnnnnnnnnnnnnnnnnnnnnnnnnnnnnnnnnnnnnnnnnnnnnnnnnnnnnnnnnnnnnnnnnnnnnnnnnnnnnnnnnnnnnnnnnnnnnnnnnnnnnnnnnnnnnnnnnnnnnnnnnnnctttcgtttgagtcatgctgttggtgtcggaggacggaggggaggcacagtgcggagagcgtcgcgtatgcgcgggaaatcaagaactatgatatttttctgtttaaacagctttttttaatttgctatggtgtttgtaac

SEQ ID NO: 32129 - DNA, 1188 bp, Macaca Mulatta
  misc_feature (1)...(1188): n = A,T,C or G
gggaaggcggcgggctatccggtcttcggctgcagcgggcaccatggtcggtggcgaggcggcagctgcagtggaggagctggtctcgggggtgcggcaggcggccgacttcgcggagcagttccgctcctactcagagagcgagaagcaatggaaggcccgcatggaattcatcttgcgccacctgcccgactaccgcgacccgccccgacggcggtggccgcctggaccagctgctgtccctctccatggtctgggccaaccatctcttcctaggctgcagnnnnnnnnnnnnnnnnnnnnnnnnnnnnnnnnnnnnnnnnnnnnnnnnnnnnnnnnnnnnnnnnnnnnnnnnnnnnnnnnnnnnnnnnnnnnnnnnnnnnnnnnnnnnnnnnnnnnnnnnnnnnnnnnnnnnnnnnnnnnnnnnnnnnnnnnnnnnnnnnnnnnnnnnnnnnnnnnnnnnnnnnnnnnnnnnnnnntcttaagactcctggtattaccaacataaagaggcaggtggaatgagaaggactctgtctagattggcttttttaacattctcattttttccagtagttatcactgtaaaagtatgcatggatatttatgtatttataaatcatgtactctaagatgagttcatcaacattgtaaaagccctcttttctattttcannnnnnnnnnnnnnnnnnnnnnnnnnnnnnctctgtcacccaggcgggagtacaaaggtgcagtattggctcattgcagccttgaactcctggcctcatattttcaggnnnnnnnnnnnnnnnnnnnnnnnnnngagacagagttttgctctgtcacctaggcaggagtgcagtggcgtggtatattttcagtttttaaatgtcagaatttttgtttaaaatgcctttttgggctgggcacagtggctcacacctgtaataatcccagcactttgggaggccgagatgagcggatcacctgaggttaggagtttgagaccagcctggccaacacggtgaaaccccgtctctactaaaaatacaaaaaaaattagctgggcgtggtggcagacatctgtaatcccagctactcaggaggctgaggcagaagaatcgcttgaacctgggaggtggaggttgcagtgagccaagatcgcaccgttgcactccatccttggtgacaaaagtgaaaca

SEQ ID NO: 32130 - DNA, 80 bp, Macaca Mulatta
aagcttacaaattatctactgcttgaagactggcgagaatgcaaacgcgccaaagccatttgttgctaagatttgaaagt

SEQ ID NO: 32131 - DNA, 301 bp, Macaca Mulatta
  misc_feature (1)...(301): n = A,T,C or G
ttacgggaaaaataagaacttccccttaaagaacaggtccaaattcttccnnnnnnnnnnnnnnnnnnnnnnnnnnnnnnnnnnnnnnnnnnnnnngtgacccacatggctctgtgtgtttttaaaaattgtccaccaggaagcacttcgtgcccagaaagttcctgaagcatcaaccagggcagggaggcgtccactccaccagctggtgggtgtttgcgatcgtcaagcaccagttacaggtcatagccacgtcactcacagatgattgttggtcggtggagaataaactatgagcagc

SEQ ID NO: 32132 - DNA, 105 bp, Macaca Mulatta
agggtggcatgtatgtgtttcagctctttgactactatgcagctagcggtgtatgccttttgtgggttgcattctttgaatgttttgttattgcctggatatatg

SEQ ID NO: 32133 - DNA, 1393 bp, Macaca Mulatta
  misc_feature (1)...(1393): n = A,T,C or G
aggggcttcagtggatggagaaaccaagccaaggccatcattatattcgctgcaaaattttgaggagatggaaacagaagattgtgagaagatgagcaatatgggaactttgaactcttccatgctgcacaggagtgcagagtccttaaagagtctaagttcagagttgtgtccagagaaaatcctgcctgaagagaaaccagtacatctgccagtgctcagaaggtccaagtctcagtccagaccacagcaggtcaagttttccgatgatgtcatcgacaatgggaactatgacattgaaatccggcagcctccgatgagtgaaaggactcggagacgcgtctaccattttgaagagaggggatccaggtctcatcaccaccgccgcaggagaagtagaaagtcgcgctccgacaatgccctgaatcttgttacagaaagaaaatactctcccaaggacagactgaggctgtacacccccgataactatgagaaatttatacagaataaaagtgcccgggagatccaagcatacatccagaatgctgatctttatggacagtacgcccatgccacttccgattacggcctgcagaacccaggaatgaatcggtttctgggactctatggcgaggnnnnnnnnnnnnnnnnnnnnnnnnnnnnnnnnnnnnnnnnnnnnnnnnnnnnnnnnnnnnnnnnnnnnnnnnnnnnnnnnnnnnnnnnnnnnnnnnnnnnnnnnnnnnnnnnnnnnnnnnnnnnnnnnnnnnnnnnnnnnnnnnnnnnnnnnnnnnnnnnnnnnnnnnnnnnnnnnnnnnnnnnnnnnnnnnnnnnnnnnnnnnnnnnnnnnnnnnnnnnnnnnnnnnnnnnnnnnnnnnnnnnnnnnnnnnnnnnnnnnnnnnnnnnnnnnnnnnnnnnnnnnnnnnnnnnnnnnnnnnnnnnnnnnnnnnnnnnnnnnnnnnnnnnnnnnnnnnnnnnnnnnnnnnnnnnnnnnnnnnnnnnnnnnnnnnnnnnnnnnnnnnnnnnnnnnnnnnnnnnnnnnnnnnnnnttggatggtgccaggtggacgtgacatcttgtgcctatcgggtgcgttacagatcgatacagctgctttggtttccaatcctcaagggaatactcaagatgctgtctcaaggggattggatgtgggtgttgattttagaagatggagaactccagccacctttgtaaagcaatagtgtttgtcatttatgtaagtcaggtcggttcaggtcttggtagtccgtcttggtgtgaggcatgccagtcacgatgacctagctaacactgtgcatcttattgtgaggccaacttgtcccttccaaccctctttggccaggtaaacattgtattgtatcagcgccagctaca

SEQ ID NO: 32134 - DNA, 788 bp, Macaca Mulatta
  misc_feature (1)...(788): n = A,T,C or G
tgacctgctactgttgcattgcaaggaagctgtgtgcccattaccagcagtcaggaaagcacaacaaaaagctgaagaaacctttaaagatcatctttatcgtcgtggcagcctttcttgtctcctggctgcccttcaatactttcaagctcctggccattgtctctgggttgcagcaagaacgctattttccctcagccatgcttcagcttggtatggaggtgagtggacccttggcatttgccaacagctgtgtcaaccctttcatttactatatcttcgacagctacatccgccgggctattgtccactgcttgtgcccttgcctgaaaaactatgactttgggagtagcaccgagacatcagatagtcacctcactaaggctctctccaccttcattcatgcagaagattttaccaggaggaggaagaggtctgtgtccctctaaagggaactgtgacatttcaagctctgttggtgggtttaggagttaatttttgtcagcaacaaagaaagaagtgttaatgataggattcacgttgcttcatagatgcaaggaagagttcgtttttaaggagaggactgaaaaatccctgtgttgtggatataattaggccatgtgctgttttctcagctgagcagccttcttcacccttgccaatcaagtctaccagagaannattcattcccatctgtccttgaactcttggataaaggctcctgcttgaaccagtccctttcttcatgattgttaatgcacatttgggcctttcctctctcaaaaaca

SEQ ID NO: 32135 - DNA, 829 bp, Macaca Mulatta
ggggaaaaacccacctgtagccctgaggttcttttcccaggacagctccagggtaaggatcattgtaggtggttgtggagttggcactccttttgactcctttgcagctaattgtcagagcaatagacccagcactccttggattagctctgcagagtgtcttggttgagagaataacctcacagtacccacgtgacgtgtaactgggaaagagactaaaggccacatgacatgtaactgggaaagaaactaaaggccacactcaatgtataatgaagccctggtaggtaacagagcctctgggaggtaaacagtgtgaattaggatttgagttgactttgaaggctagcatgtcaagtctcctaaaaaccatcacctcctatgggtggtagagagtggtagttatggaagacctaaactagaaagaagggtccatatctttaggccaaaaagtttcttaggcttctgcccccttggcaggagggactccttcctgcctaggggattttccaaggggactcagctgggggaaaacccctattgatacacaccccatcaatgcctttaaccaaatggctccaaaaaccattagcggaatggtccacagaacactggtttttagaaaaaccaaggggtcaaattcatttgccccaacacctgccattaaaggaacttcattccccccccaaaaactggcttgtttataaccgtacccccgcaatattctttattccgcaagtggggaaaggaaaactccctgctgcggcaacccttctccgtcaccggccacagaagcactaagtatgttagcgcgccctctgcactacat

SEQ ID NO: 32136 - DNA, 1551 bp, Macaca Mulatta
  misc_feature (1)...(1551): n = A,T,C or G
agtcaacgacgcttagcaatcccgggagaaatagggtgttttcttcccgagagaggactgctaagagggggtcaaaggggggacgatgtgaaggagagaaactggtccttgagaaggcgaagaagtaagaaaggggaagcagtgaaggaggacagagatactgggacagggagaaaaaagctgagaatagcttttaaggagtcatttggtgaccatggatccaacgtgcccttctgagtgcatttataacctcatacccagtgacttgaaggagcctccccagcctcctaggtannnnnnnnnnnnnnnnnnnnnnnnnnnnnnnnnnnnnnnnnnnnnnnnnnnnnnnnnnnnnnnnnnnnnnnnnnnnnnnnnnnnnnnnnnnnnnnnnnnnnnnnnnnnnnnnnnnnnnnnnnnnnnnnnnnnnnnnnnnnnnnnnnnnnnnnnnnnnnnnnnnnnnnnnnnnnnnnnnnnnnnnnnnnnnnnnnnnnnnnnnnnnnnnnnnnnnnnnnnnnnnnnnnnnnnnnnnnnnnnnnnnnnnnnnnnnnnnnnnnnnnnnnnnnnnnnnnnnnnnnnnnnnnnnnnnnnnnnnnnnnnnnnnnnnnnnnnnnnnnnnnnnnnnnnnnnnnnnnnnnnnnnnnnnnnnnnnnnnnnnnnnnnnnnnnnnnnnnnnnnnnnnnnnnnnnnnnnnnnnnnnnnnnnnnnnnnnnnnnnnnnnnnnnnnnnnnnnnnnnnnnnnnnnnnnnnnnnnnnnnnnnnnnnnnnnnnnnnnnnnnnnnnnnnnnnnnnnnnnnnnnnnnnnnnnnnnnnnnnnnnnnnnnnnnnnnnnnnnnnnnnnnnnnnnnnnnnnnnnnnnnnnnnnnnnnnnnnnnnnnnnnnnnnnnnnnnnnnnnnnnnnnnnnnnnnnnnnnnnnnnnnnnnnnnnnnnnnnnnnnnnnnnnnnnnnnnnnnnnnnnnnnnnnnnnnnnnnnnnnnnnnnnnnnnnnnnnnnnnnnnnnnnnnnnnnnnnnnnnnnnnnnnnnnnnnnnnnnnnnnnnnnnnnnnnnnnnnnnnnnnnnnnnnnnnnnnnnnnnnnnnnnnnnnnnnnnnnnnnnnnnnnnnnnnnnnnnnnnnnnnnnnnnnnnnnnnnnnnnnnnnnnnnnnnnagccttcagagtgaaacattcccatctattgttcctgggagggtgatccctaccatgggatcccaactttggataaagccagttcaacctcccccaatccatacacatatatacgtgggtcatcctatcacccagaagagggacaaacacctgacttggacagctggccagtgactgatcagattctctctctctcttgagagcatgaattaagagacatggagactgcagtcacttgggagtagacacctgaaactaaaaagtcaaacttcattatgcagctagtttgacttggtttctcttcctgttcaaaggaagaatgggtagaataaagatttgatgtggtctggccccttgtctgtgatctttttagcttgatttcttgaaatgctgcttcttccctacc

SEQ ID NO: 32137 - DNA, 3309 bp, Macaca Mulatta
  misc_feature (1)...(3309): n = A,T,C or G
agcctcccggagccaagaccactttgtaagcgagaactgggaccaccagctgaaattggcagtggcatagagtcgcgtggacattgcccnnnnnnnnnnnnnnnnnnnnnnnnnnnnnnnnnnnnnnnnnnnnnnnnnnnnnnnnnnnnnnnnnnnnnnnnnnnnnnnnnnnnnnnnnnnnnnnnnnnnnnnnnnnnnnnnnnnnnnnnnnnnnnnnnnnnnnnnnnnnnnnnnnnnnnnnnnnnnnnnnnnnnnnnnnnnnnnnnnnnnnnnnnnnnnnnnnnnnnnnnnnnnnnnnnnnnnnnnnnnnnnnnnnnnnnnnnnnnnnnnnnnnnnnnnnnnnnnnnnnnnnnnnnnnnnnnnnnnnnnnnnnnnnnnnnnnnnnnnnnnnnnnnnnnnnnnnnnnnnnnnnnnnnnnnnnnnnnnnnnnnnnnnnnnnnnnnnnnnnnnnnnnnnnnnnnnnnnnnnnnnnnnnnnnnnnnnnnnnnnnnnnnnnnnnnnnnnnnnnnnnnnnnnnnnnnnnnnnnnnnnnnnnnnnnnnnnnnnnnnnnnnnnnnnnnnnnnnnnnnnnnnnnnnnnnnnnnnnnnnnnnnnnnnnnnnnnnnnnnnnnnnnnnnnnnnnnnnnnnnnnnnnnnnnnnnnnnnnnnnnnnnnnnnnnnnnnnnnnnnnnnnnnnnnnnnnnnnnnggggtcttcactgaatgttaccggaaggatgaagagagagcccagaaactgctcatcagcgtgtccgaggcctgggggaagactacctgcctgcagcttgccctggaggccaaggacatgaagtttgtgtctcatggaggcatccagnnnnnnnnnnnnnnnnnnnnnnnnnnnnnnnnnnnnnnnnnnnnnnnnnnnnnnnnnnnnnnnnnnnnnnnnnnnnnnnnnnnnnnnnnnnnnnnnnnnnnnnnnnnnnnnnnnnnnnnnnnnnnnnnnnnnnnnnnnnnnnnnnnnnnnnnnnnnnnnnnnnnnnnnnnnnnnnnnnnnnnnnnnnnnnnnnnnnnnnnnnnnnnnnnnnnnnnnnnnnnnnnnnnnnnnnnnnnnnnnnnnnnnnnnnnnnnnnnnnnnnnnnnnnnnnnnnnnnnnnnnnnnnnnnnnnnnnnnnnnnnnnnnnnnnnnnnnnnnnnnnnnnnnnnnnnnnnnnnnnnnnnnnnnnnnnnnnnnnnnnnnnnnnnnnnnnnnnnnnnnnnnnnnnnnnnnnnnnnnnnnnnnnnnnnnnnnnnnnnnnnnnnnnnnnnnnnnnnnnnnnnnnnnnnnnnnnnnnnnnnnnnnnnnnnnnnnnnnnnnnnnnnnnnnnnnnnnnnnnnnnnnnnnnnnnnnnnnnnnnnnnnnnnnnnnnnnnnnnnnnnnnnnnnnnnnnnnnnnnnnnnnnnnnnnnnnnnnnnnnnnnnnnnnnnnnnnnnnnnnnnnnnnnnnnnnnnnnnnnnnnnnnnnnnnnnnnnnnnnnnnnnnnnnnnnnnnnnnnnnnnnnnnnnnnnnnnnnnnnnnnnnnnnnnnnnnnnnnnnnnnnnnnnnnnnnnnnnnnnnnnnnnnnnnnnnnnnnnnnnnnnnnnnnnnnnnnnnnnnnnnnnnnnnnnnnnnnnnnnnnnnnnnnnnnnnnnnnnnnnnnnnnnnnnnnnnnnnnnnnnnnnnnnnnnnnnnnnnnnnnnnnnnnnnnnnnnnnnnnnnnnnnnnnnnnnnnnnnnnnnnnnnnnnnnnnnnnnnnnnnnnnnnnnnnnnnnnnnnnnnnnnnnnnnnnnnnnnnnnnnnnnnnnnnnnnnnnnnnnnnnnnnnnnnnnnnnnnnnnnnnnnnnnnnnnnnnnnnnnnnnnnnnnnnnnnnnnnnnnnnnnnnnnnnnnnnnnnnnnnnnnnnnnnnnnnnnnnnnnnnnnnnnnnnnnnnnnnnnnnnnnnnnnnnnnnnnnnnnnnnnnnnnnnnnnnnnnnnnngaacaaactggagaagaacgaggaggcggccctgctatcctgggagatctacctgaaggagaactacctgcagaatcagcagttccagcaaaagcagcggcctgagcagaagatcgaggacatcagcaataagnntgacgccatggtggacctgctggacctggnnnnnnnnnnnnnnnnnnnnnnnnnnnnnnnnnnnnnnnnnnnnnnnnnnnnnnnnnnnnnnnnnnnnnnnnnnnnnnnnnnnnnnnnnnnnnnnnnnnnnnnnnnnnnnnnnnnnnnnnnnnnnnnnnnnnnnnnnnnnnnnnnnnnnnnnnnnnnnnnnnnnnnnnnnnnnnnnnnnnnnnnnnnnnnnnnnnnnnnnnnnnnnnnnnnnnnnnnnnnnnnnnnnnnnnnnnnnnnnnnnnnnnnnnnnnnnnnnnnnnnnnnnnnnnnnnnnnnnnnnnnnnnnnnnnnnnnnnnnnnnnnnnnnnnnnnnnnnnnnnnnnnnnnnnnnnnnnnnnnnnnnnnnnnnnnnnnnnnnnnnnnnnnnnnnnnnnnnnnnnnnnnnnnnnnnnnnnnnnnnnnnnnnnnnnnnnnnnnnnnnnnnnnnnnnnnnnnnnnnnnnnnnnnnnnnnnnnnnnnnnnnnnnnnnnnnnnnnnnnnnnnnnnnnnnnnnnnnnnnnnnnnnnnnnnnnnnnnnnnnnnnnnnnnnnnnnnnnnnnnnnnnnnnnnnnnnnnnnnnnnnnnnnnnnnnnnnnnnnnnnnnnnnnnnnnnnnnnnnnnnnnnnnnnnnnnnnnnnnnnnnnnnnnnnnnnnnnnnnnnnnnnnnnnnnnnnnnnnnnnnnnnnnnnnnnnnnnnnnnnnnnnnnnnnnnnnnnnnnnnnnnnnnnnnnnnnnnnnnnnnnnnnnnnnnnnnnnnnnnnnnnnnnnnnnnnnnnnnnnnnnnnnnnnnnnnnnnnnnnnnnnnnaacctgcacgcctgcgacgcgggggcctccattcgcatggcaggtgctggacaggcgtatcccactgtacgcgaaccacaagaccctcctccagaaggtggcagctgaatttggggctcactactgactctgcactcaggccgggcagttgcagtccgtggacagtccccccggaaaccagggcttctctctcccgagcctgtccaggacttaggctgatcctgggccctgcacaggatggggttgggtggacccactgcccctcacggccgctgcaagtttgccgcagatgacctcatgaactggacagggtcagggtgacctgggaggagagctcaagacagggcacaggctactcagagttgaggggcccctgggacccttggccatcaggtgaggggctggg

SEQ ID NO: 32138 - DNA, 917 bp, Macaca Mulatta
  misc_feature (1)...(917): n = A,T,C or G
ctcttctaacccccaaggggtgacgtgtggagccgttacactctctgcagagagggtcagaggggacaataaggagtatgagtactcagtggagtgccaggaggacagtgcctgcccagccgctgaggagaggctgcccattgaggtcatggtggatgccattcacaagctcaagtatgaaaactacaccagcagcttcttcatcagggacatcannnnnnnnnnnnnnnnnnnnnnnnnnnnnnnnnnnnnnnnnnnnnnnnnnnnnnnnnnnnnnnnnnnnnnnnnnnnnnnnnnnnnnnnnnnnnnnnnnnnnnnnnnnnnnnnnnnnnnnnnnnnnnnnnnnnnnnnnnnnnnnnnnnnnnnnnnnnnnnnnnnnnnnnnnnnnnnnnnnnnnnnnnnnnnnnnnnnnnnnnnnnnnnnnnnnnnnnnnnnnnnnnnnnnnnnnnnnnnnnnnnnnnnnnnnnnnnnnnnnnnnnnnnnnnnnnnnnnnnnnnnnnnnnnnnnnnnnnnnccaggatgaaaaattggaggaaaagtagaagatattaagcaaaacgtttaaagacacaatggaatagacccaaaaagatattttctatctgatttgctttaaaaagtttttttaaggatcacagtgatatctttgctttattcgtgtaggtagatgctaaatgctcattgaaacaatcagctaatttatgtatagattttctagctctcaagttgccataggccttcatgctatttaaatatttaagtaatttatgtatttattaatgtattactgttatttaccatttgtgtgccaggatgtattgaatgtttcataccctcatgacccaatccatcaggatcagtccctaccacgcaaaatgtgaatttaattttatttatgctaacaacttttcaagcaa

SEQ ID NO: 32139 - DNA, 190 bp, Macaca Mulatta
  misc_feature (1)...(190): n = A,T,C or G
gctccatggtccccttctcgatgcgcatcttgcacgcggagcttcttcagtacctggggaacccacaggagtcgctggatagactgcacagggtgaagaccgtctgcagcaagnagatcctggccaatttggagcaaggcttagcagaagacggggccatgagcagcgtgactcaggagggcagacaagg

SEQ ID NO: 32140 - DNA, 1219 bp, Macaca Mulatta
  misc_feature (1)...(1219): n = A,T,C or G
aggtctggtttcaaaaccggagggccaagtggcgcaagcgggagaagcgctggggcggcagcagcgtgatggccgagtacgggctgtacggggccatggtgcgccactgcatcccgctgcccgactccgtgctcaactccgccgagggtggcctgctgggctcctgcgcgcccnnnnnnnnnnnnnnnnnnnnnnnnnnnnnnnnnnnnnnnnnnnnnnnnnnnnnnnnnnnnnnnnnnnnnnnnnnnnnnnnnntgaccacttcaagaaggttctaccctgagtgagtcaggaccacagagaggctcggataaagtgcgccctgagcatggcttggaagatgtggctatcgacctctccagctctgcccggcaggagaccaagaaagtgcaccctggggctggtgctcaaggaggctccaactccatggcactggaggggccccagccagggaaagtgggagccatatgagacccacaagtcccaccgtcaaaggctgaaaatgtgcatattcctcactggcattttccaaaagataaaaatggtccaagatatatactctcagtttgattttcttctgacactgtcaagataaaatgcaatgccacttgctttaagaggacagatgagtgacctagggaaaattctatttcattctagaatggaaacggttccttaatggcactttaaccagttaatttggtgcaaaacttttgattctcttttgtagcttgagcagggaggacccgaagttcaaaaatgatttcactgctgggcatcatttgagatgtgtggttcaatgtgctatacagatgaacaggttaggtctgatgtcctcattctcaattaggaaatataaaattctttaatctccagaagaatctgatatcattatagtgaagactccatacagacacatgaattaattatattgtctttaccttgaacttggccttggatatttcaattttcttgttacagggtaatttatgttttcctgagtgtcacttgataggctatttatattggaactcaaagaaagccatactctgggcgtttctgcatttccttcaaaaatagcatgggatcacatttaaacaattgttggatagctggaaacagtgtttttaggtcagaccaggcttttggtcttttacaatttttgattgaaagcactttaaagacttggattttgtaaatgtttcctttcctgcgtttc

SEQ ID NO: 32141 - DNA, 763 bp, Macaca Mulatta
tcaacgatctgtaccgctacaagccgctaagccccagcgctgtagtgcgcaacgctctggcgcacgtgggcgccaaggagcgcgagctgagctggcgcaactcagagagtttcgccgcctggtgccgctacggcaagcgcgagttcaagatcggcggcgaactgcgcataggcaagcagccctaccggctgcagattcagctgtcggcgcagcgcagccacacgctagagttccagagtctagaggacctgatcatggagaagcgacgcaacgaccagatcgggcgcgcggccgtgcttcaggagctcgccacgcacctgcacccagcggagccggaggagggcgacggcaacctggcgcggactacgccgcctccccggcgcccccctgcgcccagctcggaggaggaggacggagaggcggtggcacactgatgggcgagctgagcgcagagctgcgaaggggaactgtttgcagtagcagccgctgccccctttctccctctcttcctccctctcttgccaccgtctgggccccatctgggattcctgggccctttggaaaagagttggtgaaatgcgcagccggctgtggacgggggaggaggaaggggacagagggagcaggtaggaaacgctttagttgggggtggggggcgtctctctctggccccctaagtgtgtcttcctctcaggggtgaggcaaactgtggacttgcctggctattaaaccaaggggatctgggtttataatcggccattct

SEQ ID NO: 32142 - DNA, 987 bp, Macaca Mulatta
  misc_feature (1)...(987): n = A,T,C or G
ccaggtgaaggcggagcgctaacgtctaacgctaacggcggtcgtgccccgccgctgctgtcacccctggccgctgctgccctccccgccgaggttccactgctcttcttgagaagaagggtgtgaggcactgggtctctccccacacctctcgcctgaggccagnnnnnnnnnncgcctgaggccagacagccggtttgggggcgagcctgaggnaggccaaccaatcaatggctcagacagataagccaacatgcatcccgccggagctgccgaagatgctgaaggagtttgccaaagccgccattcgggcgcagccgcaggacctcatccagtgggcagccgannnnnnnnnnnnnnnnnnnnnnnnnnnnnnnnnnnnnnnnnnnnnnnnnnnnnnnnnnnnnnnnnnnnnnnnnnnnnnnnnnnnnnnnnnnnnnnnnnnnnnnnnnnnnnnnnnnnnnnnnnnnnnnnnnnnnnnnnnnnnnnnnnnnnnnnnnnnnnnnnnnnnnnnnnnnnnnnnnnnnnnnnnnnnnnnnnnnnnnnnnnnnnnnnnnnnnnnnnnnnnnnnnnnnnnnnnnnnnnnnnnnnnnnnnnnnnnnnnnnnnnnnnnnnnnnnnnnnnnnnnnnnnnnnnnnnnnnnnnnnnnnnnnnnnnnnnnnnnnnnnnnnnnnnnnnnnnnnnnnnnnnnnnnnnnnnnnnnnnnnnnnnnnnnnnnnnnnnnnnnnnnnnnnnnnnnnnnnnnnnnnnnnnnnnnnnnnnnnnnnnnnnnnnnnnnnnnnnnnnnnnnnnnnnnnnnnnnattgggcctgatggtataatcacggtgaatgactttacccaaaaccccagggttcgactggagtaaaagcacaatttttgcaattttaaaggaagatacagagatgattgtacttcagaatgactgaaacccatataccacccaaaatcaattttcttgtacaactggtacacactaataaacaa

SEQ ID NO: 32143 - DNA, 5614 bp, Macaca Mulatta
  misc_feature (1)...(5614): n = A,T,C or G
ggccagcagcaccccacgccattcactccatggagcccagtaggacaggacaagacatggctcagggcagggacggaacagccacctgtnnnnnnnnnnncctcctcagggaccagggtcacccatcacaggggtgtcccnnnnnnnnnnnnnnnnnnnnnnnnnnnnnnnnnnnnnnnnnnnnnnnnnnnnnnnnnnnnnnnnnnnnnnnnnnnnnnnnnnnnnnnnnnnnnnnnnnnnnnnnnnnnnnnnnnnnnnnnnnnnnnnnnnnnnnnnnnnnnnnnnnnnnnnnnnnnnnnnnnnnnnnnnnnnnnnnnnnnnnnnnnnnnnnnnnnnnnnnnnnnnnnnnnnnnnnnnnnnnnnnnnnnnnnnnnnnnnnnnnnnnnnnnnnnnnnnnnnnnnnnnnnnnnnnnnnnnnnnnnnnnnnnnnnnnnnnnnnnnnnnnnnnnnnnnnnnnnnnnnnnnnnnnnnnnnnnnnnnnnnnnnnnnnnnnnnnnnnnnnnnnnnnnnnnnnnnnnnnnnnnnnnnnnnnnnnnnnnnnnnnnnnnnnnnnnnnnnnnnnnnnnnnnnnnnnnnnnnnnnnnnnnnnnnnnnnnnnnnnnnnnnnnnnnnnnnnnnnnnnnnnnnnnnnnnnnnnnnnnnnnnnnnnnnnnnnnnnnnnnnnnnnnnnnnnnnnnnnnnnnnnnnnnnnnnnnnnnnnnnnnnnnnnnnnnnnnnnnnnnnnnnnnnnnnnnnnnnnnnnnnnnnnnnnnnnnnnnnnnnnnnnnnnnnnnnnnnnnnnnnnnnnnnnnnnnnnnnnnnnnnnnnnnnnnnnnnnnnnnnnnnnnnnnnnnnnnnnnnnnnnnnnnnnnnnnnnnnnnnnnnnnnnnnnnnnnnnnnnnnnnnnnnnnnnnnnnnnnnnnnnnnnnnnnnnnnnnnnnnnnnnnnnnnnnnnnnnnnnnnnnnnnnnnnnnnnnnnnnnnnnnnnnnnnnnnnnnnnnnnnnnnnnnnnnnnnnnnnnnnnnnnnnnnnnnnnnnnnnnnnnnnnnnnnnnnnnnnnnnnnnnnnnnnnnnnnnnnnnnnnnnnnnnnnnnnnnnnnnnnnnnnnnnnnnnnnnnnnnnnnnnnnnnnnnnnnnnnnnnnnnnnnnnnnnnnnnnnnnnnnnnnnnnnnnnnnnnnnnnnnnnnnnnnnnnnnnnnnnnnnnnnnnnnnnnnnnnnnnnnnnnnnnnnnnnnnnnnnnnnnnnnnnnnnnnnnnnnnnnnnnnnnnnnnnnnnnnnnnnnnnnnnnnnnnnnnnnnnnnnnnnnnnnnnnnnnnnnnnnnnnnnnnnnnnnnnnnnnnnnnnnnnnnnnnnnnnnnnnnnnnnnnnnnnnnnnnnnnnnnnnnnnnnnnnnnnnnnnnnnnnnnnnnnnnnnnnnnnnnnnnnnnnnnnnnnnnnnnnnnnnnnnnnnnnnnnnnnnnnnnnnnnnnnnnnnnnnnnnnnnnnnnnnnnnnnnnnnnnnnnnnnnnnnnnnnnnnnnnnnnnnnnnnnnnnnnnnnnnnnnnnnnnnnnnnnnnnnnnnnnnnnnnnnnnnnnnnnnnnnnnnnnnnnnnnnnnnnnnnnnnnnnnnnnnnnnnnnnnnnnnnnnnnnnnnnnnnnnnnnnnnnnnnnnnnnnnnnnnnnnnnnnnnnnnnnnnnnnnnnnnnnnnnnnnnnnnnnnnnnnnnnnnnnnnnnnnnnnnnnnnnnnnnnnnnnnnnnnnnnnnnnnnnnnnnnnnnnnnnnnnnnnnnnnnnnnnnnnnnnnnnnnnnnnnnnnnnnnnnnnnnnnnnnnnnnnnnnnnnnnnnnnnnnnnnnnnnnnnnnnnnnnnnnnnnnnnnnnnnnnnnnnnnnnnnnnnnnnnnnnnnnnnnnnnnnnnnnnnnnnnnnnnnnnnnnnnnnnnnnnnnnnnnnnnnnnnnnnnnnnnnnnnnnnnnnnnnnnnnnnnnnnnnnnnnnnnnnnnnnnnnnnnnnnnnnnnnnnnnnnnnnnnnnnnnnnnnnnnnnnnnnnnnnnnnnnnnnnnnnnnnnnnnnnnnnnnnnnnnnnnnnnnnnnnnnnnnnnnnnnnnnnnnnnnnnnnnnnnnnnnnnnnnnnnnnnnnnnnnnnnnnnnnnnnnnnnnnnnnnnnnnnnnnnnnnnnnnnnnnnnnnnnnnnnnnnnnnnnnnnnnnnnnnnnnnnnnnnnnnnnnnnnnnnnnnnnnnnnnnnnnnnnnnnnnnnnnnnnnnnnnnnnnnnnnnnnnnnnnnnnnnnnnnnnnnnnnnnnnnnnnnnnnnnnnnnnnnnnnnnnnnnnnnnnnnnnnnnnnnnnnnnnnnnnnnnnnnnnnnnnnnnnnnnnnnnnnnnnnnnnnnnnnnnnnnnnnnnnnnnnnnnnnnnnnnnnnnnnnnnnnnnnnnnnnnnnnnnnnnnnnnnnnnnnnnnnnnnnnnnnnnnnnnnnnnnnnnnnnnnnnnnnnnnnnnnnnnnnnnnnnnnnnnnnnnnnnnnnnnnnnnnnnnnnnnnnnnnnnnnnnnnnnnnnnnnnnnnnnnnnnnnnnnnnnnnnnnnnnnnnnnnnnnnnnnnnnnnnnnnnnnnnnnnnnnnnnnnnnnnnnnnnnnnnnnnnnnnnnnnnnnnnnnnnnnnnnnnnnnnnnnnnnnnnnnnnnnnnnnnnnnnnnnnnnnnnnnnnnnnnnnnnnnnnnnnnnnnnnnnnnnnnnnnnnnnnnnnnnnnnnnnnnnnnnnnnnnnnnnnnnnnnnnnnnnnnnnnnnnnnnnnnnnnnnnnnnnnnnnnnnnnnnnnnnnnnnnnnnnnnnnnnnnnnnnnnnnnnnnnnnnnnnnnnnnnnnnnnnnnnnnnnnnnnnnnnnnnnnnnnnnnnnnnnnnnnnnnnnnnnnnnnnnnnnnnnnnnnnnnnnnnnnnnnnnnnnnnnnnnnnnnnnnnnnnnnnnnnnnnnnnnnnnnnnnnnnnnnnnnnnnnnnnnnnnnnnnnnnnnnnnnnnnnnnnnnnnnnnnnnnnnnnnnnnnnnnnnnnnnnnnnnnnnnnnnnnnnnnnnnnnnnnnnnnnnnnnnnnnnnnnnnnnnnnnnnnnnnnnnnnnnnnnnnnnnnnnnnnnnnnnnnnnnnnnnnnnnnnnnnnnnnnnnnnnnnnnnnnnnnnnnnnnnnnnnnnnnnnnnnnnnnnnnnnnnnnnnnnnnnnnnnnnnnnnnnnnnnnnnnnnnnnnnnnnnnnnnnnnnnnnnnnnnnnnnnnnnnnnnnnnnnnnnnnnnnnnnnnnnnnnnnnnnnnnnnnnnnnnnnnnnnnnnnnnnnnnnnnnnnnnnnnnnnnnnnnnnnnnnnnnnnnnnnnnnnnnnnnnnnnnnnnnnnnnnnnnnnnnnnnnnnnnnnnnnnnnnnnnnnnnnnnnnnnnnnnnnnnnnnnnnnnnnnnnnnnnnnnnnnnnnnnnnnnnnnnnnnnnnnnnnnnnnnnnnnnnnnnnnnnnnnnnnnnnnnnnnnnnnnnnnnnnnnnnnnnnnnnnnnnnnnnnnnnnnnnnnnnnnnnnnnnnnnnnnnnnnnnnnnnnnnnnnnnnnnnnnnnnnnnnnnnnnnnnnnnnnnnnnnnnnnnnnnnnnnnnnnnnnnnnnnnnnnnnnnnnnnnnnnnnnnnnnnnnnnnnnnnnnnnnnnnnnnnnnnnnnnnnnnnnnnnnnnnnnnnnnnnnnnnnnnnnnnnnnnnnnnnnnnnnnnnnnnnnnnnnnnnnnnnnnnnnnnnnnnnnnnnnnnnnnnnnnnnnnnnnnnnnnnnnnnnnnnnnnnnnnnnnnnnnnnnnnnnnnnnnnnnnnnnnnnnnnnnnnnnnnnnnnnnnnnnnnnnnnnnnnnnnnnnnnnnnnnnnnnnnnnnnnnnnnnnnnnnnnnnnnnnnnnnnnnnnnnnnnnnnnnnnnnnnnnnnnnnnnnnnnnnnnnnnnnnnnnnnnnnnnnnnnnnnnnnnnnnnnnnnnnnnnnnnnnnnnnnnnnnnnnnnnnnnnnnnnnnnnnnnnnnnnnnnnnnnnnnnnnnnnnnnnnnnnnnnnnnnnnnnnnnnnnnnnnnnnnnnnnnnnnnnnnnnnnnnnnnnnnnnnnnnnnnnnnnnnnnnnnnnnnnnnnnnnnnnnnnnnnnnnnnnnnnnnnnnnnnnnnnnnnnnnnnnnnnnnnnnnnnnnnnnnnnnnnnnnnnnnnnnnnnnnnnnnnnnnnnnnnnnnnnnnnnnnnnnnnnnnnnnnnnnnnnnnnnnnnnnnnnnnnnnnnnnnnnnnnnnnnnnnnnnnnnnnnnnnnnnnnnnnnnnnnnnnnnnnnnnnnnnnnnnnnnnnnnnnnnnnnnnnnnnnnnnnnnnnnnnnnnnnnnnnnnnnnnnnnnnnnnnnnnnnnnnnnnnnnnnnnnnnnnnnnnnnnnnnnnnnnnnnnnnnnnnnnnnnnnnnnnnnnnnnnnnnnnnnnnnnnnnnnnnnnnnnnnnnnnnnnnnnnnnnnnnnnnnnnnnnnnnnnnnnnnnnnnnnnnnnnnnnnnnnnnnnnnnnnnnnnnnnnnnnnnnnnnnnnnnnnnnnnnnnnnnnnnnnnnnnnnnnnnnnnnnnnnnnnnnnnnnnnnnnnnnnnnnnnnnnnnnnnnnnnnnnnnnnnnnnnnnnnnnnnnnnnnnnnnnnnnnnnnnnnnnnnnnnnnnnnnnnnnnnnnnnnnnnnnnnnnnnnnnnnnnnnnnnnnnnnnnnnnnnnnnnnnnnnnnnnnnnnnnnnnnnnnnnnnnnnnnnnnnnnnnngggagagagaagccgtcttttccttcctgcagagcaagcttgatccctaaacaaccatagatcagttatcttatgacgacattaggcatcaggctctcttggaataagatcaaagtgtccctattactttgattcctacttttgttttttaaccaatctacactttcagtggccgacagaaaacaagggacaatactgtgcatcatcacaaggcctaggaggctgctggtccccactggggccgaagagaagcccagctgcccacgctgagccaggggtggcagccgtgggagagccggggagcgaggacagtggtctgtccttcacaggtttttctactgtgtttttgctggagaaggacaaagtgattgcgctagctttctcttacccagtatgaattatttagatttctgaggcattttcttgataaacaaaaggctatttttaagtactgagaggagaagcaggccacaagagggataatgttgtgggaattcccaaagctctttgtaggtagtgccagaggggggcttttgctctcatttttctatgtgcaaaatagaggatctctcctggggtgggcaatgcccccattttatttttagaaaaagtaactcccagacagccccataaaagctgtgcccaaggaagaagagtctgctctagaaggagcccggttctggctcaggacaccggcccagctccctccatgaggtcaagctgaggacccaggccagtgggaagggaaggagggagaataagcatctataaagcacaggagactatttttgatattcatagctatatattaaggcacctgccgcaagagctctcaggatggggacagccttcttagtggagccatggcagcaaggcctgagggcatg

SEQ ID NO: 32144 - DNA, 991 bp, Macaca Mulatta
tctgtccccttccgcctcaccctccccccagccaccccattgtatagcgaaagcattgtattcaatcctagaataaaggtaaacacaacaaatcatctttgcagctggacaaccaataatactttgcggcattaagagatcttctgtgttaccaatcactctgttgaaatgaactttccaaatctctttattcaggaaaacatggggatttgaaattcttgggccaaaatacatcactgaggggttcacagagctgggcaagggtgcgctaggaaagcgccacattgatgggtgggaggtgacagagaacagatggtgtcaggcaatgtctctggagtaaataatgcagatattcttggttgcgtctcctctgccagatgaagctgtgttcatgctgttgacactaatacaaaatgtttggtccatttgaaatccttgtcattgccttatatgggggaaactcagtcccccagtccgtgttggaaacatcaccaaactgattgtcaatgtacggctgtagcagacattttactgtgatggcgtgcagccattttggccctacacctgccggcctggctaccttacggttgtgttcggatttttgtgtctctgcttggtgtgcctcacttgctgcattttccagcatgcaaccaggagttcatgtaggaaaaaggtatgctttcttactttggaagctctcagggaagttggtgtcagtttctcctccactgcctgacctaccccccactccaagattttgtgcaaatgtgtagttctatcttttaaaaattgtgcagatatggaaacttgtgacttcatgaccaaaactatctagaatatgtgtgggggtgtaagcatctttcttgatcaattatctatgtaggcagaggtaaccaggaaagaagcaagagttgctgcctaagggagcccaccactttacttttcacatttaatctgccatgttgaatcagctggaataaaacctgactcg

SEQ ID NO: 32145 - DNA, 948 bp, Macaca Mulatta
gttctgagtctctctgctatgttttgtgctcagatttaccctagccatattacctcttgtagcagctataattggtaatgttttacatctgtcgatgcttgctttacatcgccataataaatgatgttttattgcgttttgttctcttacagtgtatgatgatctgctttaattcacttcagtcactgctttgacatctcgctgctttacttattacttagaaagaccttatcccacttaattgcagagaaatggggttttgtgccttggcatgaaaaactaaaagttaaaatttaattgtagcttttcagttgttcagaaattatacatgacaaaatattacctcatggatgggatataagcattaatttccacagacaggttaaatggttgtagacaatactacctatttaaccagcactatcacttctgttaattaaaaagggttaagttggtccaaggctatatctaatgtgtttgacagtagtctggtatggaaagatgctcataaatctaacctttatatagcaaaagacaaagcaaagatggtgatgcaaaataggttgactacttttacaatgctttaaaatgcagaatcgactccaaaatttgtcatttggcttttaacgtaattggaagaaatggaggaagtttgaagtacgttttctagccttcctttctgcccccttggagccaaagatgagaggattagatctcacccaaatttatctgaaataataattctccatggatagaatgaagaaaaaaattaaataccagtacttgtagttgaacttaagtatgacgtgataagtataagctaatttggcaattttctttttttagatttcttccgtgccaaaaaaaaatgaagatttaggacaggaagaaattgttcaactttgtatgaaaaaagtaaaatgggttggaggacctcctttgaaaaaa

SEQ ID NO: 32146 - DNA, 150 bp, Macaca Mulatta
cttttgctctgcatgcctgcaggaatgtctgaagccgaagaagcctgtctgtggggtgtgtcgcagcgctctggcacctggcgtccgagccatggagctcgagcggcagattgagagcacagagacttcttgccatggctgccgtaagaa

SEQ ID NO: 32147 - DNA, 357 bp, Macaca Mulatta
  misc_feature (1)...(357): n = A,T,C or G
gtgtttgtggtgggactggtgggcattgcccgggccgtggtatccatgacggtgagcacctcgaacgctgcaactgttgctgataagnagatcctgtgggagatcacccgcttcttcctgctggccatcgagctgagtgtgatcatcctgggcctggcctttggnggccacctggagagcaagtccagcatcaagcggttgctggccatcaccacagtgctgtctctggcctactctgtcaccccagggcaccctggagatcctgtaccctgatgcccatctctcagctgaggactttaatatctatggccatgggggccgccagttctggctggtcagctcctgcttcttcttcct

SEQ ID NO: 32148 - DNA, 1592 bp, Macaca Mulatta
  misc_feature (1)...(1592): n = A,T,C or G
actctgtgaagggtcgcatcacatattcagcagacaatgtcatgagttccttgctatcttcaaatgaacagcctgaggcttgaggacactggtgtgtattattgtgcaagagaacgcaccggggggaactcattggatgtctggggccggggagttnnnnnnnncgtctcctcagggagtgcatccgccccaacccttttccccctcgtctcctgtgagaatgccccgttggatacaaacgaagtggccgttggctgcctcgcacaggacttccttcccgactccatcactttctcctggaaattcaagaacaactctgacatcagcaaaggcgtctggggcttcccatcagtcctgagagggggcaagtacgcggccacctcgcaggtgctgctggcttccaaggacgtcatgcagggcacagacgaacacgtggtatgcaaagtccagcaccccaatggcaacaaagaacagaacgtgcctcttccagtggttgccgagcggcctcccaacgtgagtgtcttcgtcccaccccgagacggcttcgtcggcaacccccgcgagtccaagctcatctgccaggccacaggtttcagcccccggcagattgaggtgtcctggctgcgcgaggggaagcaggtggggtctggcatcaccacggaccgggtggaggctgaagccaaagagtctgggcccacaaccttcaaggtgaccagcacactgaccgtcagcgagagagactggctcagccagagcgtgttcacctgccgcgtggatcacagaggcctgaccttccagaagaacgtgtcctccgtgtgtggccccaatccagacacagccatccgggtcttcgccatccccccatcctttgccagcatcttcctcaccaagtccaccaagttgacctgcctggtcacagacctggccacctacgacagtgtgaccatcacctggacccgccagaatggcgaagctctgaaaacccacaccaacatctccgagagccaccccaatggcaccttcagcgctgtgggtgaggccagcatctgcgaggacgactggaactccggggagaggttcaggtgcaccgtgacccacacggaccttccctcgccgctgaagcagaccatctccaggcccaagggggtggccatgcacaggcccgatgtctacttgctgccaccagcccgggaacagctgaacctgcgggagtcggccaccatcacctgcctggtgacgggcttctctcccgcggacatcttcgtgcagtggatgcagagggggcagcctttgtccccggagaagtatgtgaccagtgccccaatgcctgagccccaggccccaggccggtacttcgcccacagcatcctgaccgtgtctgaagaggactggaacacgggggagacctacacctgcgtcgtggcccatgaggccctgcccaacagggtcaccgagaggaccgtggacaagtccaccgagggggaggtgagtgctgacgaggagggctttgagaacctgtgggccactgcctccaccttcatcgtcctcttcctcttgagcctcttctacagtaccaccgtcaccttgttcaa

SEQ ID NO: 32149 - DNA, 104 bp, Macaca Mulatta
acctggcccgttagatgaaacccagatcgctactatattaagagaaatactgaaaggacttgattatctccattcggagaagaaaatccacagagacattaaag

SEQ ID NO: 32150 - DNA, 934 bp, Macaca Mulatta
  misc_feature (1)...(934): n = A,T,C or G
tgagacaccaaattctgtggctgccatcagaaattttctacagtacatgacccggatgaactcaatgcatgatgactcttcttattacacttgcaaatgaatgcctttcaaacattgagactgctagaaccaagcactaccagtatctccatccttaactgtccagtccagtgatgtgggaagttaccttttataagacaaaatttaattgtgtaactgttctttgcagtgaagatgtgtaaataagcgtttaatggtatctgttactccaaaaagaaatattaatatgtacttttccatttatttattcatgtgttcagaaacaactgccaaataaaatgtttacattttctttcatatcccaaaggtaattatttacaggagctgttttattcttgttgttggtttgttgaagaaatagttttatataatagctttgtatttggatcaaggatttacagtgtgaataatgaatgaagataaaattatgggtaatctgatattgattacccataatttatgaccaggtttatatgtggctcgatcagatgatttttaacattcaaaggtatttccaaaggtcatggcctttcgggataatttgaggtgaaatggtgacaaattaaaagaaaggtagagaaatttgcctactacaagaggactgatttgaaattagtgacagcaagacccatcctttcctgactgatagccccagctaaaatcatcactcagacaacttcctaggangaagtaaatccaagattagngatctcatactctatttagggtcttcctaacatctgacagctgatagagattgtaaccttacagcgttgccntcaatgtacctgtcatgaangcctcttatctgaccaagatgcttcacttctaaaaccantttgatttggtattaacccgctgcaaatgcccaaan

SEQ ID NO: 32151 - DNA, 2254 bp, Macaca Mulatta
  misc_feature (1)...(2254): n = A,T,C or G
cagattttattctggcagtgcaaccctctcaaaggttgaaggaactgatataacaggnagggattgaagaagtagtaattccaaaaaagaaaacttggnnnnnnnnnnnnnnnnnnnnnnnnnnnnnnnnnnnnnnnnnnnnnnnnnnnnnnnnnnnnnnnnnnnnnnnnnnnnnnnnnnnnnnnnnnnnnnnnnnnnnnnnnnnnnnnnnnnnnnnnnnnnnnnnnnnnnnnnnnnnnnnnnnnnnnnnnnnnnnnnnnnnnnnnnnnnnnnnnnnnnnnnnnnnnnnnnnnnnnnnnnnnnnnnnnnnnnnnnnnnnnnnnnnnnnnnnnnnnnnnnnnnnnnnnnnnnnnnnnnnnnnnnnnnnnnnnnnnnnnnnnnnnnnnnnnnnnnnnnnnnnnnnnnnnnnnnnnnnnnnnnnnnnnnnnnnnnnnnnnnnnnnnnnnnnnnnnnnnnnnnnnnnnnnnnnnnnnnnnnnnnnnnnnnnnnnnnnnnnnnnnnnnnnnnnnnnnnnnnnnnnnnnnnnnnnnnnnnnnnnnnnnnnnnnnnnnnnnnnnnnnnnnnnnnnnnnnnnnnnnnnnnnnnnnnnnnnnnnnnnnnnnnnnnnnnnnnnnnnnnnnnnnnnnnnnnnnnnnnnnnnnnnnnnnnnnnnnnnnnnnnnnnnnnnnnnnnnnnnnnnnnnnnnnnnnnnnnnnnnnnnnnnnnnnnnnnnnnnnnnnnnnnnnnnnnnnnnnnnnnnnnnnnnnnnnnnnnnnnnnnnnnnnnnnnnnnnnnnnnnnnnnnnnnnnnnnnnnnnnnnnnnnnnnnnnnnnnnnnnnnnnnnnnnnnnnnnnnnnnnnnnnnnnnnnnnnnnnnnnnnnnnnnnnnnnnnnnnnnnnnnnnnnnnnnnnnnnnnnnnnnnnnnnnnnnnnnnnnnnnnnnnnnnnnnnnnnnnnnnnnnnnnnnnnnnnnnnnnnnnnnnnnnnnnnnnnnnnnnnnnnnnnnnnnnnnnnnnnnnnnnnnnnnnnnnnnnnnnnnnnnnnnnnnnnnnnnnnnnnnnnnnnnnnnnnnnnnnnnnnnnnnnnnnnnnnnnnnnnnnnnnnnnnnnnnnnnnnnnnnnnnnnnnnnnnnnnnnnnnnnnnnnnnnnnnnnnnnnnnnnnnnnnnnnnnnnnnnnnnnnnnnnnnnnnnnnnnnnnnnnnnnnnnnnnnnnnnnnnnnnnnnnnnnnnnnnnnnnnnnnnnnnnnnnnnnnnnnnnnnnnnnnnnnnnnnnnnnnnnnnnnnnnnnnnnnnnnnnnnnnnnnnnnnnnnnnnnnnnnnnnnnnnnnnnnnnnnnnnnnnnnnnnnnnnnnnnnnnnnnnnnnnnnnnnnnnnnnnnnnnnnnnnnnnnnnnnnnnnnnnnnnnnnnnnnnnnnnnnnnnnnnnnnnnnnnnnnnnnnnnnnnnnnnnnnnnnnnnnnnnnnnnnnnnnnnnnnnnnnnnnnnnnnnnnnnnnnnnnnnnnnnnnnnnnnnnnnnnnnnnnnnnnnnnnnnnnnnnnnnnnnnnnnnnnnnnnnnnnnnnnnnnnnnnnnnnnnnnnnnnnnnnnnnnnnnnnnnnnnnnnnnnnnnnnnnnnnnnnnnnnnnnnnnnnnnnnnnnnnnnnnnnnnnnnnnnnnnnnnnnnnnnnnnnnnnnnnnnnnnnnnnnnnnnnnnnnnnnnnnnnnnnnnnnnnnnnnnnnnnnnnnnnnnnnnnnnnnnnnnnnnnnnnnnnnnnnnnnnnnnnnnnnnnnnnnnnnnnnnnnnnnnnnnnnnnnnnnnnnnnnnnnnnnnnnnnnnnnnnnnnnnnnnnnnnnnnnnnnnnnnnnnnnnnnnnnnnnnnnnnnnnnnnnnnnnnnnnnnnnnnnnnnnnnnnnnnnnnnnnnnnnnnnnnnnnnnnnnnnnnnnnnnnnnnnnnnnnnnnnnnnnnnnnnnnnnnnnnnnnnnnnnnnnnnnnnnnnnnnnnnnnnnnnnnnnnnnnnnnnnnnnnnnnnnnnnnnnnnnnnnnnnnnnnnnnnnnnnnnnnnnnnnnnnnntagctgctggaatcacacctgagaactaagatatgctaatatttaacactgttacaaagaagacaagataaagatttggtgaatttgttactgtgaggcacagtcagtacacagcccagttctgtagatttaagctcctaatttgctacttaataaccatctattaatgcactgttaaaggtttagcatttaagtagcaacattgcggttttcagacacatggtg

SEQ ID NO: 32152 - DNA, 5321 bp, Macaca Mulatta
  misc_feature (1)...(5321): n = A,T,C or G
gaatattaaatggcagatgcctccgaggaccaggtgtttgtgtgtgtcagaccgcagtaacaaccgtaccannnnnnnnnnnnnnnnnnnnnnnnnnnnnnnnnnnnnnnnnnnnnnnnnnnnnnnnnnnnnnnnnnnnnnnnnnnnnnnnnnnnnnnnnnnnnnnnnnnnnnnnnnnnnnnnnnnnnnnnnnnnnnnnnnnnnnnnnnnnnnnnnnnnnnnnnnnnnnnnnnnnnnnnnnnnnnnnnnnnnnnnnnnnnnnnnnnnnnnnnnnnnnnnnnnnnnnnnnnnnnnnnnnnnnnnnnnnnnnnnnnnnnnnnnnnnnnnnnnnnnnnnnnnnnnnnnnnnnnnnnnnnnnnnnnnnnnnnnnnnnnnnnnnnnnnnnnnnnnnnnnnnnnnnnnnnnnnnnnnnnnnnnnnnnnnnnnnnnnnnnnnnnnnnnnnnnnnnnnnnnnnnnnnnnnnnnnnnnnnnnnnnnnnnnnnnnnnnnnnnnnnnnnnnnnnnnnnnnnnnnnnnnnnnnnnnnnnnnnnnnnnnnnnnnnnnnnnnnnnnnnnnnnnnnnnnnnnnnnnnnnnnnnnnnnnnnnnnnnnnnnnnnnnnnnnnnnnnnnnnnnnnnnnnnnnnnnnnnnnnnnnnnnnnnnnnnnnnnnnnnnnnnnnnnnnnnnnnnnnnnnnnnnnnnnnnnnnnnnnnnnnnnnnnnnnnnnnnnnnnnnnnnnnnnnnnnnnnnnnnnnnnnnnnnnnnnnnnnnnnnnnnnnnnnnnnnnnnnnnnnnnnnnnnnnnnnnnnnnnnnnnnnnnnnnnnnnnnnnnnnnnnnnnnnnnnnnnnnnnnnnnnnnnnnnnnnnnnnnnnnnnnnnnnnnnnnnnnnnnnnnnnnnnnnnnnnnnnnnnnnnnnnnnnnnnnnnnnnnnnnnnnnnnnnnnnnnnnnnnnnnnnnnnnnnnnnnnnnnnnnnnnnnnnnnnnnnnnnnnnnnnnnnnnnnnnnnnnnnnnnnnnnnnnnnnnnnnnnnnnnnnnnnnnnnnnnnnnnnnnnnnnnnnnnnnnnnnnnnnnnnnnnnnnnnnnnnnnnnnnnnnnnnnnnnnnnnnnnnnnnnnnnnnnnnnnnnnnnnnnnnnnnnnnnnnnnnnnnnnnnnnnnnnnnnnnnnnnnnnnnnnnnnnnnnnnnnnnnnnnnnnnnnnnnnnnnnnnnnnnnnnnnnnnnnnnnnnnnnnnnnnnnnnnnnnnnnnnnnnnnnnnnnnnnnnnnnnnnnnnnnnnnnnnnnnnnnnnnnnnnnnnnnnnnnnnnnnnnnnnnnnnnnnnnnnnnnnnnnnnnnnnnnnnnnnnnnnnnnnnnnnnnnnnnnnnnnnnnnnnnnnnnnnnnnnnnnnnnnnnnnnnnnnnnnnnnnnnnnnnnnnnnnnnnnnnnnnnnnnnnnnnnnnnnnnnnnnnnnnnnnnnnnnnnnnnnnnnnnnnnnnnnnnnnnnnnnnnnnnnnnnnnnnnnnnnnnnnnnnnnnnnnnnnnnnnnnnnnnnnnnnnnnnnnnnnnnnnnnnnnnnnnnnnnnnnnnnnnnnnnnnnnnnnnnnnnnnnnnnnnnnnnnnnnnnnnnnnnnnnnnnnnnnnnnnnnnnnnnnnnnnnnnnnnnnnnnnnnnnnnnnnnnnnnnnnnnnnnnnnnnnnnnnnnnnnnnnnnnnnnnnnnnnnnnnnnnnnnnnnnnnnnnnnnnnnnnnnnnnnnnnnnnnnnnnnnnnnnnnnnnnnnnnnnnnnnnnnnnnnnnnnnnnnnnnnnnnnnnnnnnnnnnnnnnnnnnnnnnnnnnnnnnnnnnnnnnnnnnnnnnnnnnnnnnnnnnnnnnnnnnnnnnnnnnnnnnnnnnnnnnnnnnnnnnnnnnnnnnnnnnnnnnnnnnnnnnnnnnnnnnnnnnnnnnnnnnnnnnnnnnnnnnnnnnnnnnnnnnnnnnnnnnnnnnnnnnnnnnnnnnnnnnnnnnnnnnnnnnnnnnnnnnnnnnnnnnnnnnnnnnnnnnnnnnnnnnnnnnnnnnnnnnnnnnnnnnnnnnnnnnnnnnnnnnnnnnnnnnnnnnnnnnnnnnnnnnnnnnnnnnnnnnnnnnnnnnnnnnnnnnnnnnnnnnnnnnnnnnnnnnnnnnnnnnnnnnnnnnnnnnnnnnnnnnnnnnnnnnnnnnnnnnnnnnnnnnnnnnnnnnnnnnnnnnnnnnnnnnnnnnnnnnnnnnnnnnnnnnnnnnnnnnnnnnnnnnnnnnnnnnnnnnnnnnnnnnnnnnnnnnnnnnnnnnnnnnnnnnnnnnnnnnnnnnnnnnnnnnnnnnnnnnnnnnnnnnnnnnnnnnnnnnnnnnnnnnnnnnnnnnnnnnnnnnnnnnnnnnnnnnnnnnnnnnnnnnnnnnnnnnnnnnnnnnnnnnnnnnnnnnnnnnnnnnnnnnnnnnnnnnnnnnaaatgcaccagtgccggagtgatgagtacaactgcagttctggcatgtgcatccgctcctcctgggtgtgtgacggggacaacgactgcagggactggtctgacgaagccaactgtaccgnnnnnnnnnnnnnnnnnnnnnnnnnnnnnnnnnnnnnnnnnnnnnnnnnnnnnnnnnnnnnnnnnnnnnnnnnnnnnnnnnnnnnnnnnnnnnnnnnnnnnnnnnnnnnnnnnnnnnnnnnnnnnnnnnnnnnnnnnnnnnnnnnnnnnnnnnnnnnnnnnnnnnnnnnnnnnnnnnnnnnnnnnnnnnnnnnnnnnnnnnnnnnnnnnnnnnnnnnnnnnnnnnnnnnnnnnagcccctctgtacgcacttcatggacttcgtgtgtaagaaccgccagcagtgcctgttccactccatggtctgtgacggaatcatccagtgccgcgatgggtccgatgaggatgcggcgtttgcgggatgctnnnnnnnnnnnnnnnnnnnnnnnnnnnnnnnnnnnnnnnnnnnnnnnnnnnnnnnnnnnnnnnnnnnnnnnnnnnnnnnnnnnnnnnnnnnnnnnnnnnnnnnnnnnnnnnnnnnnnnnnnnnnnnnnnnngaaaaccccacagaagccccaaactgctcccgctacttccagtttcggtgtgagaatggccactgcatccccaacagatggaaatgcgacagggagaacgactgtggggactggactgatgagaaggattgtggannnnnnnnnnnnnnnnnnnnnnnnnnnnnnnnnnnnnnnnnnnnnnnnnnnnnnnnnnnnnnnnnnnnnnnnnnnnnnnnnnnnnnnnnnnnnnnnnnnnnnnnnnnnnnnnnnnnnnnnnnnnnnnnnnnnnnnnnnnnnnnnnnnnnnnnnnnnnnnnnnnnnnnnnnnnnnnnnnnnnnnnnnnnnnnnnnnnnnnnnnnnnnnnnnnnnnnnnnnnnnnnnnnnnnnnnnnnnnnnnnnnnnnnnnnnnnnnnnnnnnnnnnnnnnnnnnnnnnnnnnnnnnnnnnnnnnnnnnnnnnnnnnncacacacagcaccttgacttgcatgagcagggagttccagtgcgaggatggggaggcctgcattgtgctctcggagcgctgcgacggcttcctggactgctcagacgagagcgacgagaaggcctgcagtggtgagtnnnnnnnnnnnnnnnnnnnnnnnnnnnnnnnnnnnnnnnnnnnnnnnnnnnnnnnnnnnnnnnnnnnnnnnnnnnnnnnnnnnnnnnnnnnnnnnnnnnnnnnnnnnnnnnnnnnnnncagggtggttggagagagcatatggaagactctggagacccacagcaataagacaaacactgtattaaaagtcttgaaaccagataccacgtatcaggttaaagtacaagttcagtgtctcagcaaggcacacaacaccaacgactttgtgaccctgaggaccccggagggannnnnnnnnnnnnnnnnnnnnnnnnnnnnnnnnnnnnnnnnnnnnnnnnnnnnnnnnnnnnnnnnnnnnnnnnnnnnnnnnnnnnnnnnnnnnnnnnnnnnnnnnnnnnnnnnnnnnnnnnnnnnnnnnnnnnnnnnnnnnnnnnnnnnnnnnnnnnnnnnnnnnnnnnnnnnnnnnnnnnnnnnnnnnnnnnnnnnnnnnnnnnnnnnnnnnnnnnnnnnnnnnnnnnnnnnnnnnnnnnnnnnnnnnnnnnnnnnnnnnnnnnnnnnnnnnnnnnnnnnnnnnnnnnnnnnnnnnnnnnnnnnnnnnnnnnnnnnnnnnnnnnnnnnnnnnnnnnnnnnnnnnnnnnnnnnnnnnnnnnnnnnnnnnnnnnnnnnnnnnnnnnnnnnnnnnnnnnnnnnnnnnnnnnnnnnnnnnnnnnnnnnnnnnnnnnnnnnnnnnnnnnnnnnnnnnnnnnnnnnnnnnnnnnnnnnnnnnnnnnnnnnnnnnnnnnnnnnnnnnnnnnnnnnnnnnnnnnnnnnnnnnnnnnnnnnnnnnnnnnnnnnnnnnnnnnnnnnnnnnnnnnnnnnnnnnnnnnnnnnnnnnnnnnnnnnnnnnnnnnnnnnnnnnnnnnnnnnnnnnnnnnnnnnnnnnnnnnnnnnnnnnnnnnnnnnnnnnnntatggtattttctatgccacgtcctttcttgacctctatcgcaacccgaagagcttgactacttcgctccacaataagacggtcattgtcagtaaggatgagcagtatttgtttctggnnnnnnnnnnnnnnnnnnnnnnnnnnnnnnnnnnnnnnnnnnnnnnnnnnnnnnnnnnnnnnnnnnnnnnnnnnnnnnnnnnnnnnnnnnnnnnnnnnnnnnnnnnnnnnnnnnnnnnnnnnnnnnnnnnnnnnnnnnnnnnnnnnnnnnnnnnnnnnnnnnnnnnnnnnnnnnnnnnnnnnnnnnnnnnnnnnnnnnnnnnnnnnnnnnnnnnnnnnnnnnnnnnnnnnnnnnnnnnnnnnnnnnnnnnnnnnnnnnnnnnnnnnnnnnnnnnnnnnnnnnnnnnnnnnnnnnnnnnnnnnnnnnnnnnnnnnnnnnnnnnnnnnnnnnnnnnnnnnnnnnnnnnnnnnnnnnnnnnnnnnnnnnnnnnnnnnnnnnnnnnnnnnnnnnnnnnnnnnnnnnnnnnnnnnnnnnnnnnnnnnnnnnnnnnnnnnnnnnnnnnnnnggctatgagatacacatgtatgatagtgccatgaatatcacagcttaccttgggaatactactgacaatttctttaaaatttccaacctgaagatgggtcataattacacgttcactgtccaagcaagatgcctttttggcagtcagatctgtggggagcctgccatcctgctgtacgatgagctgggttctggtg

SEQ ID NO: 32153 - DNA, 817 bp, Macaca Mulatta
tcagaagactctgagaggcagtctgagtctgcttccagaaaccatcatggatctgttcgggagcagtcaagacatggctctggacactccgggtcccatcaccaagacaaagtcggtcacaggtactctggagacagctccagacaatcaggaactcatcacgtggagacttcctctcatggacaggctgcatcatcccatgagcagacgagatcaagtccaggagaaagacatggatcccaccaccagcagtcagcagacagctccagacactcaggaactggacgtggacaagcttcttctgcagtcagtgaccgtggacaccagggaccaagcggtagtcacttcagtgacagtgagggacattcagaagactcagacacacagtcagggtcaggccagggacaggctgggcgccatccgcacagccaccaagagtctgcacgtggccggtcaggggaaaggtctggacgttcagggtctttcgtctaccaggtgagcactcatgaacagtctgagtccacccatggacggactgggcccagcactggtggaagacaagggtcccgcaatgagcaggcacgagacagctccaggcactcagtgtcccatgagggtcaggacacaattcatggacaccacgggtcaagcagaggaggaagacagggatcccaccatgagcaatcggtagacagctctggacactcagggtcccatcacagccacaccacctcccagggaaggtctgatgcctcccgtggggagtcaggagccagaagtgcaagcagacaaacacgtcacgaggaacaatcaggag

SEQ ID NO: 32154 - DNA, 262 bp, Macaca Mulatta
gactcagaccaaataacacgtgtttctggagaccccagtgaggaaaatacaagatcaagagcatcaaagaggccaagttgtcacaagcaaaacaggaagaaaatataacactgtgtatttaagcacctttttcaaggctcttaatggataatatttattcatgggaaaaggtggaaaacaaaaacaccaacggatttttgtgaaatgtttttctccatggacccaacacctttgaaccaaaacaatgcattttgtgagggat

SEQ ID NO: 32155 - DNA, 465 bp, Macaca Mulatta
ttggagatgagggcctgtggaaagtgggctgagtggccgtccctaagctccagccctctcccctttgtttccccagtggctacatctttgactatgattactaccgggacgacttctacgacaggctcttcgactaccggggccgtctgtcgccggtgccagtgcccagggcagtccctgtgaagcgaccccgggtcacagtccctttggtccggcgtgtcaaaactaacatacctgtcaagctctttgcccgctccacagccgtcaccaccagctcagccaagatcaagttaaagagcagtgagctgcaggccatcaagacggagctgacacagatcaagtccaatatcgatgccctgctgagccgcttggagcagatcgctgcggagcaaaaggccaatccagatggcaagaagaagggtgatggaggtggtgccagcggcggtggtggtggcggtggcggca

SEQ ID NO: 32156 - DNA, 652 bp, Macaca Mulatta
  misc_feature (1)...(652): n = A,T,C or G
atatcgcccgaatagcagttcgaatgcttcaggatgggtgtgaactccgaatcaacgagaaaatacatgcaggacagctaatgagtgtgtcctcttccttaccaatagagggcactccaccgccacaaatgccacattttagaaagtaacagcagttttgtgtgtggatcattccaattgaagttgctatgaagaggnagggagaagtttctgcctggattgaaacaaaaaaacacaggagtcacagcatgttacctattaaaagagagagggtatctctgaagactaattaaaatggtaattttttaaaagatgggaccagttgacttttagtatatcaccccaagtattatccccaaaatgataatacaaaacaataatttggagaccaggagaaaaactggtagtaggattatgggggaggggaagaagcacaggtggtcaagataataatgcgtgtttggcctcagctgtaggtagaggtgccagagaaactacctgcctcacagatgagcgcacacaggtgcattgtaaaagtctgggaaggatgtattgtactctgaaggaagactttccatttctaagctaccatggagaagtataagctccttgagaccagagactgtgacttctgcatctttattccagcgac

SEQ ID NO: 32157 - DNA, 730 bp, Macaca Mulatta
cgaaccagactgacagtgaggcgccgcacccgagccgccgcaatgccgctggagctggagctgtgtcccgggcgctgggtgggcgggcaacacccgtgcttcattattgctgagatcggccagaaccaccagggcgacctggacgtggccaagcgcatgatccgcatggccaaggagtgtggggctgattgtgccaagttccagaagagtgagctagaattcaagtttaatcggaaagccttggagaggccatacacctcaaagcattcctgggggaagacgtatggcgagcacaaacgacatctggagttcaaccatgaccagtacagggagctgcagaggtacgctgaggaggttgggatcttcttcactgcctctggcatggatgagatggcagtcgaattcctgcatgaactgaatgttccatttttcaaagttggatctggagacactaataattttccttatctggaaaagacagccaaaaaaggtcgcccaatggtgatctccagcgggatgcagtcgatggacaccatgaagcaagtctatcagattgtgaagcccctcaaccccaacttctgcttcttgcagtgtaccagcgcatacccactccagcctgaggacgtcaacctgcgggtcatctcggaatatcagaagctctttcctgatattcccataggttattctgggcatgaaacaggcatagccatatctgtggccgcagtggctc

SEQ ID NO: 32158 - DNA, 163 bp, Macaca Mulatta
  misc_feature (1)...(163): n = A,T,C or G
ggctcacctgttcctagagcaatgtcttcnnnnnnnnnnnnnnnnnnnnnnnnnnnnnnnnnnnnnnnnnnnnnnnnnnnnnnnnnnnnnnnnnnccttgtcagccaccccctgttaaatgtcaagagacatgtgcacccaaaaccgagaatccatgtgctcc

SEQ ID NO: 32159 - DNA, 462 bp, Macaca Mulatta
  misc_feature (1)...(462): n = A,T,C or G
gtttcttttactgannnnnnnnnnnnnnnnnnnnnnnnnnnnnnnnnnnttgtgcctgaaatgaatcttgtttttttaataagtagccgcctggttactgtgtcctgtaaaatacagacacttgacccttggtgtagcttctgttcaactttatatcacgggaatggatgggtctgatttcttggccctcttcttgaattggccatatacagggtccctggccagtggactgaaggctttgtctaagatgacaagggtcagctcaggggatgtgggggagggcggttttatcttcccccttgtcgtttgaggttttgatctctgggtaaagaggccgtttatctttgtaaacacaaaacatttttgctttctccagttttctgttaatggcgaaagaatggaagcgaataaagttttactgattnnnnnnnnnnnnnnnnnnnnnnnnnnnnnnnnnnnnnn

SEQ ID NO: 32160 - DNA, 793 bp, Macaca Mulatta
ggcaactccatggtttcctgtctgtgcatgccctgaagaacaccaatttgcagtgagtgacctgtcactgacagaaccgatgtgattggtcactgatcatgatgcacatctgttatttatatagtgatttgtggactgatgagttagcagcagagtttgtactttatacaattactcatagtttaatatataatactggggtcattggcatttgaactgtgttgtgggggactggtgttatttagtacaatcatggtatctgaaatttttgcatatcagaactgcaatgtgaggattgcctgtattaagacacacattgcctattatacaacactgtattatttggcttctgcttttgcttttagattcatcttaaggccttcttccttggaactgtgctcacacagacctaagcccatgtgtttctctcaagtttgaattcccctgcctcttctccacatacctctatcctatcctcttctgtttatttgctcctacttaccctttaagtttttctgtagatattgctttctctgaaaaaaatttttctgttcttttcaaatttgttaatcagcctgtggtattcccatatcttataaatttcctgttataatatcacatatgtgatcacatagtattgtgcttatttttacttacatgtcaccattactagacagtgtttttcatggcagtagagactatatgcagtgcagtttctttactatattcccaaaggcaccctcgtctagaacaaaatagggtaatacttagtaaaattttgttgatttaatgc

SEQ ID NO: 32161 - DNA, 721 bp, Macaca Mulatta
gccgcctgcgctcgcagctggtgccagtgcgcgcgctcggcctgggccaccgttccgacgagctggtgcgtttccgcttctgcagcggctcctgccgccgcgcgcgatctccgcacgacctcagcctggccagcctactgggcgctggggccctccgaccgcccccgggctcccggcccatcagccagccctgctgccgacccacgcgctacgaagcagtctccttcatggacgtcaatagcacctggagaaccgtggaccgtctctcggccaccgcctgcggctgcctgggctgaaggctcactccagggctttgcagactggacccttgccgatagctcttcctgcctgggactctcccgcagagtcccactagccagtggcctcagccagggacggaggcctcagagccgagaggcccctgctggcgagtgatgaacatcatccctggacaggtggagggacaactgactagcagccccagagccctcaccctgccatcccagcctaaaagacaccagagacctcagttagggagccctacggacccacttctcacagactctggcactggccaggcctcgaacctgggactcctcctctgatgaaccctacagtggctgagacatcagcccccgcccaggcgctttggggacagccttttgaggacacatattgcagttgcttggttgaaagcgcctgtgctggaactggcctgtac

SEQ ID NO: 32162 - DNA, 759 bp, Macaca Mulatta
  misc_feature (1)...(759): n = A,T,C or G
gggagaagtgggacgcaccaaactggaggtcaaggtggtcatcaagtccaactttaaaccctcactcctggctcagaagattgaggtgaggatcccaaccccactgaacacaagtggggtgcaggtgatctgcatgaaggggaaggccaagtacaaggccagcgagaatgccatcgtgtggaagatcaagcgcatggcaggcatgaaggaatcgcagatcagcgcagagattgagcttctgcctaccaacgacaagaagaaatgggctcgaccccccatttccatgaactttgaggtgccatttgcgccctctggcctcaaggtgcgctacttgaaggtatttgaaccgaagctgaactacagcgaccatgatgtcatcaaatgggtgcgctacattggccgcagcggcatttatgaaactcgctgctagctgccactaggcagctagcccacctccccacccaccctcttcaacaggtccaggtgccgctccctctcncaccacacatcagtgtctcctccctcctgctttgctgccttccctttgcaccagcccctgaatctagggctgggccaaagcacattgcaagtgggactggtggaagtagcccccggggctccctggaaaggggaaattccgagggttcctgttctcccctccaaccgggtttgtcctgggccctaatggcaggggtctgaaattctctgtaacaaaagccaagggggggttccccctttcctttcccacggcccggtggc

SEQ ID NO: 32163 - DNA, 2029 bp, Macaca Mulatta
  misc_feature (1)...(2029): n = A,T,C or G
gagctgctgcatctgacccaagcctgcctggagaaaggaggaagaggcaagnnnnnnnnnnnnnnnnnnnnnnnnnnnnnnnnnnnnnnnnnnnnnnnnnnnnnnnnnnnnnnnnnnnnnnnnnnnnnnnnnnnnnnnnnnnnnnnnnnnnnnnnnnnnnnnnnnnnnnnnnnnnnnnnnnnnnnnnnnnnnnnnnnnnnnnnnnnnnnnnnnnnnnnnnnnnnnnnnnnnnnnnnnnnnnnnnnnnnnnnnnnnnnnnnnnnnnnnnnnnnnnnnnnnnnnnnnnnnnnnnnnnnnnnnnnnnnnnnnnnnnnnnnnnnnnnnnnnnnnnnnnnnnnnnnnnnnnnnnnnnnnnnnnnnnnnnnnnnnnnnnntcagggatccacatcttctggacccaactctggaatatgtgaagnnnnnnnnnnnnnnnnnnnnnnnnnnnnnnnnnnnnnnnnnnnnnnnnnnnnnnnnnnnnnnnnnnnnnnnnnnnnnnnnnnnnnnnnnnnnnnnnnnnnnnnnnnnnnnnnnnnnnnnnnnnnnnnnnnnnnnnnnnnnnnnnnnnnnnnnnnnnnnnnnnnnnnnnnnnnnnnnnnnnnnnnnnnnnnnnnnnnnnnnnnnnnnnnnnnnnnnnnnnnnnnnnnnnnnnnnnnnnnnnnnnnnnnnnnnnnnnnnnnnnnnnnnnnnnnnnnnnnnnnnnnnnnnnnnnnnnnnnnnnnnnnnnnnnnnnnnnnnnnnnnnnnnnnnnnnnnnnnnnnnnnnnnnnnnnnnnnnnnnnnnnnnnnnnnnnnnnnnnnnnnnnnnnnnnnnnnnnnnnnnnnnnnnnnnnnnnnnnnnnnnnnnnnnnnnnnnnnnnnnnnnnnnnnnnnnnnnnnnnnnnnnnnnnnnnnnnnnnnnnnnnnnnnnnnnnnnnnnnnnnnnnnnnnnnnnnnnnnnnnnnnnnnnnnnnnnnnnnnnnnnnnnnnnnnnnnnnnnnnnnnnnnnnnnnnnnnnnnnnnnnnnnnnnnnnnnnnnnnnnnnnnnnnnnnnnnnnnnnnnnnnnnnnnnnnnnnnnnnnnnnnnnnnnnnnnnnnnnnnnnnnnnnnnnnnnnnnggctgcaagctgccacctcagtcctcaggtgtggacacaagcccctgcccaaactcacccgtgttcaggacgggaagagagcccgccctgagcccagcagttgttcggagggtctcctaggacgccagggctggggaggcgctgaggggatcagacagtcaactgtgccctaagccacctcctaagccctgcaaggtgccgttcctcaaggctccctcatctccctctgcctggctcaactcagaggccaactactgtgaactgaacccagcgtttgccacaggcaggggagcaaagctacctttatgtgcccagggaagccccacagaactgctcacagccaagcagaatggggcactaggtccccggaactctggcatcaactacttgatccttgatgatgatgacagggaaagaccttgggaacctgcggcagctcagacggagaaggggcagtgggacaagggcgagtttgtggcgcccctcctggagactgtctcctccttcaggcccaatgactttgagtccaagttccttccccctgagaataagcccctggaaacagcaatgttgaaacgtgcaaaggaactgttcaccaacaacgaccccaaggtcatcgctcagcacatactgagcatggactgcagggtnnnnnnnnnnnnnnnnnnnnnnnnnnnnnnnnnnnnnnnnnnnnnnnnnnnnnnnnnnnnnnnnnnnnnnnnnnnnnnnnnnnnnnnnnnnnnnnnnnnnnnnnnnnnnnnnngacacagcacgatggccatcggcattgcagtgtacattctgggctgcacgggcactttggaggaccgagcagccactctgagtaaggtcatccaggtggcagtggaactgaaggattccatgggggacctctattccttctcagctctcatgaaagccctggaaatgccacag

SEQ ID NO: 32164 - DNA, 843 bp, Macaca Mulatta
  misc_feature (1)...(843): n = A,T,C or G
ctctctgagtctgtcttattgagtagttagtagtattttttcctaaaattcagaangtcatctttgttacactatacaggggttcagatagcaataggacacaaaattgcttcattctacgactgccagctccaggcagagataggaaggcaaagagataaaaggaaaaatgagagaatgaagtctgtatagggtagagcaatagaaagtaaactttgggtgcctccaaaattcatgactgtctgtcccattggtaaacctcacatttagttacttgtggccactgcccacacatacactcctgtaattgagaactcttaggagaggactagggaatcactggggatagtgggctggagagaaccccaggctttatatgtatagcatctcatttgacatcagcgttaattttaaatgcttatgaatcacacacattgctttagtaagattaagtgcttatatacttggaaatgtgatgctcattggaacacatctgcctagcatttatgtaaaagtcttaagtgatattaagatgattccttaccatttcagatggtccacaatttgaattaccaagtggtaatggttccttactgttttagatggtgcctgtgagataccattcctctggatggtcatgtccagtgggaggtagaaagggtggcctctatagccctcttcgtgcacgtaagtggcatttatgtgaatgtcccagctaatcactagcatgtcatatggctgggtagtgggtattttgatgacctgngagcaccaaatatgttcattcttcatttggggaggctggtgtgttaacacaaaaattgttgtccagatctttcatct

SEQ ID NO: 32165 - DNA, 878 bp, Macaca Mulatta
ggtaccggtccggttttcccgggatcgcagtctgttttttcttgtttgctctcttgtatgctcggcgaggccgggagagacccgggagggagctaggccgagtctgccgcccgagccttttgttacgcacaaagccgccgactcccgccccggggctagcagagcgttctccgcccgttatcagcgcggctagacgcacggtgcgccttatgcccccgcgcccccaccgcccccgccgcggcagccggagctcagtgagagaacgcgccaccgcggggcccgagtgcagctagcgaccctcgccccctgcgcccagcccgaggtgagcagtgagcggcgagcgggacggcagcgaggcgttcgcgggccccctcctgctgcccgggcccggcccgctcatggcggccatccgcaagaagctggtggtggtgggcgacggcgcgtgtggcaagacgtgcctgctgatcgtgttcagtaaggacgagttccccgaggtgtacgtgcccactgtcttcgagaactatgtggccgatatcgaggtggacggcaagcaggtggagctggcgctgtgggacacggcgggccaggaggactacgaccgtctgcggccactctcttatccggacaccgacgtcatcctcatgtgcttctcggtggacagcccggactcgctggagaacatccccgagaagtgggtgcccgaggtgaagcacttctgccccaacgtgcccatcatcctggtggccaacaaaaaagacctgcgcagcgacgagcatgtccgcacagagctggcccgcatgaagcaggaaccagtgcgcacggatgacggccgcgccatggccgtgcgcattcaagcctacgactacctcgagtgctcg

SEQ ID NO: 32166 - DNA, 491 bp, Macaca Mulatta
tctagttgccaaaataaaaaaggtggtggtttcatttttgtataatactttaatggaatgcttttttaaaaagataaaaccaaggtaaattattgtttcatcttcacatacggacgctagtgcctttaatggaaggttaagaatgttttgctagttagaagtaaatattgaggttttaatggtgatagtgagttttgtggtaccagctgttttttattttaatctttctgagcatccggcaaggtacaggtttcgatgttcaagttttattgggataagaccgtttgatcccaaggtcaggtggatggaatttttggatttatatttgctccttgagttttcagggcagtgtctccatgaggcttttcctgttgaggggcaccacatacaatagtgtgaagtaggtacgaggggcagtcattgtattctatagttttttatgtagtctacatttctcagatgtatgcccattcggctttattctcagaact

SEQ ID NO: 32167 - DNA, 691 bp, Macaca Mulatta
atgggggtgcacgaatgtcctgcctggctgtggcttctcctgtctctcgtgtcgctccctctgggcctcccagtcccgggcgccccaccacgcctcgtctgtgacagccgagtcctggagaggtacctcttggaggccaaggaggccgagaatgtcacgatgggctgttccgaaagctgcagcttgaatgagaatatcaccgtcccagacaccaaagttaacttctatgcctggaagaggatagaggtcgggcagcaggctgtagaagtctggcagggcctggccctgctctcagaagctgtcctgcggggccaggccgtgttggccaactcttcccagcctttcgagcccctgcagctgcacatggataaagccatcagtggccttcgcagcatcaccactctgcttcgggcgctgggagcccaggaagccatctccctcccagatgcggcctcggctgctccactccgaaccatcactgctgacactttctgcaaactcttccgagtctactccaatttcctccggggaaagctgaagctgtacacgggggaggcctgcaggagaggggacagatgaccaggtgcgtccagctgggcacatccaccaactccctcaccaacactgcctgtgccacaccctccctcaccactcccgaaccccatcgaggggctctcagctaagcgccagc

SEQ ID NO: 32168 - DNA, 505 bp, Macaca Mulatta
  misc_feature (1)...(505): n = A,T,C or G
tgggccctgactttctctctgagcacttctcagaggcccaggagccatgcaggctgcaggccagggcacagggggcgcagcgggcgatgctgatggcccagggggccctggcgatcctggtggcccagggggctatgctggcggtccaggagaggcgggtgctgcgagcggcggaggtactcagggcatcgcggcagcaagggcctcggggccgggaggaggcgccccacggnnnnnnnnnnnnnnnnnnnnnnnnnnnnnnnnnnnnnnnnnnnnnnnnnnnnnnnnnnnnnnnnnnnnnnnnnnnnnnnnnnnnnnnnnnnnnnnnnnnnnnnnnnnnnnnnnnnnnnnnnnnnnnnnnnnnnnnccgactgattgctgcagaccaccgccaactccagctctccatcagctcctgtctccagcagctttccctgttgatgtggatcgtgcagtgctttctgcctgtgtttttggctcggcctccctcaggacaaaggcgcta

SEQ ID NO: 32169 - DNA, 411 bp, Macaca Mulatta
agagataatttgttatagacgagtatgtcatattactgaggctacaaggtagtcagcagatgagtgccattccaggcttttctggtacattattgtgttagaaatactgagttataatgttacatctgaggaagtatgtaatttgagaattgtaacttctaagggattcattgcatcatagctatgcctgtatagagtctaacatatgaccaatgccaacccataatccagctgaacaaagttactgtaacattatgatttgagtggtgcttttccttgctttgttaaccatcacaagagtctgcagcacaacttttcttttaacaaagctagaacagttttggcttcttaaacttcatatttgggtaggttaagctgccatacgtgttcagtgtgaatagcgtttaagtt

SEQ ID NO: 32170 - DNA, 893 bp, Macaca Mulatta
ttttctgatgagcgtaagcttcagattttacatgcattgctgtttctggtgacatacctgctggccttgacaggcaacctcctcattatcaccgtcattaccttggaccatcgtctccattcccccatgtattactttttaaagcacctctctcttctggacctctgcttcatctctgtcacagtcccccagtccattgcaaattcacttatgggcaacggttacatttctcttgttcagtgcattcttcaggttttcttcttcatagctctggcctcatcagaagtggccattctcacagtgatgtcttatgaccggtacgcagcgatctgtcaaccacttcactatgagaccactatggatcccagtgcctgtaggcatgcagtgatagctgtgtggattgctgggggcctctctgggctcatgcatgctgccattaacttctccatacctctctgtgggaagagagtcattcagcaattcttctgtgatgttcctcagatgctgaaactagcctgttcttatgaatccattaacgagattgcactggctgcattcacgacatctacagcatttatctgtttgatatccattgtgctctcctacattcgcatcttctctacagtgctgagaatcccatcagctgagggccggaccaaggtcttctccacctgcctaccacacctatttgtagtcaccttctttctttcagctgcaggctttgagtttctcagactgccttctgattcctcatcgactatggaccttgtattctccatattctatactgtgatacctccaacactcaatccagtcatctatagcttacggaatgacgccatgaaggcagcactgaggaagatgctgtcaaaggaagtcggtcctagaacaaa

SEQ ID NO: 32171 - DNA, 104 bp, Macaca Mulatta
gatcaaactgcatcatggaagctgcacacgatgacaccctgtctggaaagtttttgccagacggcaaaagactgcaagcagaatatcccttcgccatttctcat

SEQ ID NO: 32172 - DNA, 543 bp, Macaca Mulatta
tgctccttatcccaccacgttagggaaagacggggagtgtcagagccagggtctggcactcaaggagcagagtaacttgaagcagttggaatttggcctcaaggaagcaccagttcaagatcaaggctacaaaactctcagactcggggaaaactgcgtcctgagttcaagcccacatccattcccggagatctctagaggagagtatttctatactgacgactcacaggttacagactcagaacacaactccagcttagtcaatcagcagacaggctccccaggaaaacagcccggtgaaaacagtgactgtcacagagcttccagtcaggccattccagttacggagctcacaaaaaaccaggcgcaggacaaaccctacaaatgtaccgactgtgggaagtcgtttaaccataacgcacacctcactgtgcacaagaggattcatacgggagaaagaccttatatgtgcaaggagtgcgggaaagccttcagccagaactcctccctcgttcagcacgagcgtatccacactggagacaa

SEQ ID NO: 32173 - DNA, 1269 bp, Macaca Mulatta
  misc_feature (1)...(1269): n = A,T,C or G
cggcgtcggtcgggagcgcaggccaggcagagccgcaggcgctaggccgcccgacagagcccgcgcgtccccgtagcgggtggcgcctcgagcggccacgcgcacgcgcgcaccccgccccaccagccttctagcgccagagacgaacccgccacctggctggagctctctgggcccctcaacctcgggagcagcgcgtccccggcgacttctggcacannnnnnnnnnnnnnnnnnnnnnnnnnnnnnnnnnnnnnnnnnnnnnnnnnnnnnnnnnnnnnnnnnnnnnnnnnnnnnnnnnnnnnnnnnnnnnnnnnnnnnnnnnnnnnnnnnnnnnnnnnnnnnnnnnnnnnnnnnnnnnnnnnnnnnnnnnnnnnnnnnnnnnnnnnnnnnnnnnnnnnnnnnnnnnnnnnnnnnnnnnnnnnnnnnnnnnnnnnnnnnnnnnnnnnnnnnnnnnnnnnnnnnnnnnnnnnnnnnnnnnnnnnnnnnnnnnnnnnnnnnnnnnnnnnnnnnnnnnnnnnnnnnnnnnnnnnnnnnatcaggtttgcctgtctgtcctgagctggtgagggaacacatacctaaaaccaaggatgtgggacactttttatctgtcactgggacagtgattcgaacaagtctggtgaaggttctggagtttgagcgggattacatgtgtaccaaatgcaagcatgtgtttgtggtcaaggctgactttgagcagtattacaccttttgccggccatcctcgtgtcccagcttggagagctgtgattcctctaaattcacttgcctctcaggcttgtcttcatctccaaccaggtgcagagattaccaggaaatcaaaattcaggaacaggtnnnnnnnnnnnnnnnnnnnnnnnnnnnnnnnnnnnnnnnnnnnnnnnnnnnnnnnnnnnnnnnnnnnnnnnnnnnnnnnnnnnnnnnnnnnnnnnnnnnnnnnnnnnnnnnnnnnnnnnnnnnnnnnnnnnnnnnnnnnnnnnnnnnnnnnnnnnnnnnnnnnnnnnnnnnnnnnnnnnnnnnnnnnnnnnnnnnnnnnnnnnnnnnnnnnnnnnnnnnnnnnnnnnnnnnnnnnnnnnnnnnnnnnnnnnnnnnnnnnnnnnnnnnnnnnnnnnnnnnnnnnnnnnnnnnnnnnnnnnnnnnnnnnnnnnnnnnnnnnnnnnnnnnnnnnnnnnnnnnnnnnnnnnnngccatggtgttggctggtgggattcaaaggactgatgcgacagaaacacgggtcagagg

SEQ ID NO: 32174 - DNA, 646 bp, Macaca Mulatta
tgcaggaaccgtactatgaaccacgaccgtctccttgcagagacccactaccagctgggcttggcttatgggtacaactctcagtatgatgaggcagtggcacagttcagcaaatctattgaagttattgagaagagaatggctgtactaaatgagcatgtgaaggaggctgaaggattgtctgctgaatacaagaaagaaattgaggaactaaaggaactgctacccgagattagagagaagatagaagatgcaaaggagtctcagcatagtgggaatgtagctgaactggctctgaaagctactctggtggagagctctacttcaggtttcactcctagtggaggaggctcttcagtctccatgattgccggtagaaagccaacagatggtgcttcctcatcaaactgtgtgactgatatttcccaccttgtcagaaagaagaggaaaccagaggaagagagtccccggaaagatgatgccaagaaagccaaaccagagccggaggtgaacggaggcagtggggatgctgtccccagtggaaatgaagtttcggaaaacatggaggaggaggctgagaatcgggctgaaagccgggcggcagtggaggcgacagtggaggctgtagctacagttgaaagcactg

SEQ ID NO: 32175 - DNA, 769 bp, Macaca Mulatta
  misc_feature (1)...(769): n = A,T,C or G
gccaggtnnnnnnnnnnnnnnnnnnnnnnnnnnnnnnnnnnnnnnnnnnnnnnnnnnnnnnnnnnnnnnnnnnnnnnnnnnnnnnnnnnnnnnnnnnnnnnnnnnnnnnnnnnnnnnnnnnnnnnnnnagaagcaagtttatttaagagatcagctcagcacaggccattgtagagtgtcttaccccaccatattgtaatggtatacacaaaaggcctaaattctaagctatacatctaggaacaagacagatacgttggatgctgttgtaccagcgccaataatattttaaaacaagataaactattccagtgaccggaattgcctaccacagactccagagaagatcagcattttagaattagaaacacacttgaatagatggaaaagaaacgagttgttctacgtgtgataagagcaccagtattgagtgatgaggacaaaaagaggaagaatatattcaaggaaatgtttagcacttttgttcttcaaagctagaacccagtttgaacagcagcgtatgggccagtgtcttgtcagtagttaagcagtatgtttgcatttcttgaaatgcttactgcagttgagggttccaagactgcttgaagattgatttgactccagtcaaatcatgagttccaagacttgaccagcaacatccctgaaggtctcttttccttcacgttctggggataattgctggtcgccctcttgagcctttcacacctcatttagtggctacggtgcccccaggacctgaggctgtcca

SEQ ID NO: 32176 - DNA, 774 bp, Macaca Mulatta
  misc_feature (1)...(774): n = A,T,C or G
gggagttcccgaagcttccggtggccggcttaattgggagctatggctaaacatcatcctgatttgatcttttgccgcaagcaggctggtgttgccatcggaagactgtgtgaaaaatgtgatggcaagtgtgtgatttgtgactcctatgtgcgtccctgcactctggtgcgcatatgtgatgagtgtaactatggatcttaccagggacgctgtgtgatctgtggaggccctggggtctctgatgcgtattattgtaaggagtgcaccatccaggagaaggatagagatggctgcccaaagattgtcaatctggggagctctaaaacagacctcttctatgaacgcaaaaaatacggcttcaagaagaggtgaattggtgggtggccccttcccccccccaacatcaagctgctgcaactgccaaaaaacatgcctactactaccancagaaagggagcagagaccatagcatcaccaggagtgcctgctagtgtactggcagcttgccaccccctcctctcccttcacccaaacgtggtagggatggaaaaagattcttcacagaacactctgggcccccgtatcacaaaaaagttgatagattaattaatgatttttcctgaatttccaaaaccaaagatcctgtcctcccaatttgaatatgttctccccccaaccaagatctttccaaaaaacaagtaatatttttaagccttcggccccaagaagattgcctgttaaaccctccgcccggtgaaaaccaacgcttcc

SEQ ID NO: 32177 - DNA, 137 bp, Macaca Mulatta
ggtggagctgagagggagtggcctacaaccggacctgatagagggcaggaaaggggcgcagatagtgaagcgggccagcctgaaaagggggaaacagtgaccccgagccgctctccttggagtagcctctcgggagg

SEQ ID NO: 32178 - DNA, 111 bp, Macaca Mulatta
gaacctcttcgacagcatcaagagtgagcccttctccatccctgaggacgacggcaatgacctctctcacaccttcttcaacccagaccgggagggctggctgctcaagct

SEQ ID NO: 32179 - DNA, 756 bp, Macaca Mulatta
gtgggctgcagccatggaaggcgagcctcactgtggaggagcggcggcggctgcaggaggagctgagcgagttcgtggagagctgctgccggaggcgtggaggaggtgacggcgtccctgggctgggacctggatagtctggatcccggggaagaggaggcggcggaggatgaagttgtgttatgtccttacgattccaatcatcacatgcctaaatcgtctttagcaaagcacatggcatcttgtagattgaggaaaatgggctataccaaagaagaagagggatttattcttctttgcctgttgaagttcctctgaatcacaaacggtttgtttgtgatctaactcaagctgatcgtcttgccctctatgatttcgtagttgaggagacaaagaaaaagcgctctgattctcagattattgaaaatgacagcgatctctttgtagacttggctgccaaaatcaatcaagataatagtcgaaaaagtccaaaatcctaccttgaaatcctagcagaagtaagagattataaaagaagacgccagtcctatagagctaagaatgttcacataaccaagaaatcatatactgaggtgattcgagatgtgataaatgtgcacatggaagaactcagcaatcactggcaagaagaacaagagaaggcagaggatgatgctgaaaagaattgaagaaaggcgatcaggttcagtagattcccggcaggctggtgggaagctatttggatgctgagtgtcc

SEQ ID NO: 32180 - DNA, 733 bp, Macaca Mulatta
cagccgttctcgtgcacatcgacaatcttcgctgggagggcgtgcctttcatcttgatgtctggcaaagccttggacgagagagtgggctacgctcggatcttgttcaagaaccaggcctgctgtgtgcagagcgaaaagcactgggctgcggcacagagccagtgcctgcctcggcagctcatcttccacatcggccacggcgacctgggcagccccgccgtgctggtcagcaggaacctgttcaggccctccctgccctccagctggaaggaaatggagggcccacctgggctccgccttttcggcagccctctgtccgattactatgcctacagccccgtgcaggagcgggacgcccactctgtcctcttatcccatatcttccatggccggaaggattccttcatcaccacagagaacttgctggcctcttggggcttctggacccctctgctggagagcctggcccataaggccccacgcctctatcctggaggagctgagaacggccgtctgttggactttgagttcagtagcggccggttgttcttttcccagcagcagccggagcagctagtgccagggccagggccggccccaatgcccagtgacttccaggtcctcagggccaagtaccgagagagcccgctggtctccgcctggtccgaggagctgatctctaagctggctaacgacattgaggccactgctgtgcgggccgtgcggcgctt

SEQ ID NO: 32181 - DNA, 443 bp, Macaca Mulatta
ctgatttggggtaggccacattgaggggaatcagaaagtgtccccgatgtggcacatacaatggaacccggggactgagctgtaagaacaagacatgtggaaccatattccgctatggtgcacgcaagcagcctagtgttgaagctgtcaaaatcattacaggctctgatcttcaggtctactcagtgcggcaaagagaccggggccctgattaccgatgctttgtggagctcggggtttcagagacaacaatccagacagtggatgggacaatcatcactcagctgagctctggacggtgttatgtcccctcatgcctgaaagctgccactcaaggcgttgtggaaaaccagtgccagcacatcaagctggcggtgaactgccaggcagaggccacccctctgaccctgaagagctcggtcctgaatgcgatgcaggcctcc

SEQ ID NO: 32182 - DNA, 391 bp, Macaca Mulatta
  misc_feature (1)...(391): n = A,T,C or G
gttatttcatggaaactcccggaagccttttcatagctgaggggttaagtgaagttttaggaagatcactctanttttagggtggaaanatgaagactgggaaaaggttccaaaccaagaactgctaagaanctcttgcagcttctggaaggaacngtgatttttgaacnccctangnnagggnggggaanaaggccaaanttcccnngggacctccnaaaacaaaaaaatcccggacggattnaaccccntccctcccaaaantttaacaatttccccanttttnnngggttccctttctttaaaggaaaaagggttcccccncccgcgaaaaantttttccnggaanccnnagggcnccnttggggttttccccnnaaagaanngatta

SEQ ID NO: 32183 - DNA, 712 bp, Macaca Mulatta
  misc_feature (1)...(712): n = A,T,C or G
acacttagggagcacgtgctgtttgtaatatctttctataagaagctgtgggggtcatgtacagagtaccctaaggtagtctgcagccagtaacaacaattccgatgggtaggggtggagtcgccattgcattaccgcttttagcgtaagacctagctctgtgagacccgcgtgctgtgtctatttttactttgtgtctgtcagtcgtaggtcccattcccttatcccagtagcaaacccccggcaggccactttccttatttatcactaaagcccacattaaccttgttacaggacaagagggagaaagttgtctgagaacttttgactgtggccctggactttgctgtgctcgtcatttttggacgaaaatttgtaagccagtccttttggagggacaggtctgctccaggagagggcataaagacactgctcaagctccagaaatcttccagcgttgcgactgtggccccggactactgtgtcgaagccaactgaccagcaatcggcagcatgcacggttacgagtatgccaaaaaatagaaaagctataaatatttcaaaataaagaagaatctacattgcatttgagctcaatcttggacattaactttaaaatgcttccatacagatctctcttanaatcaaatcttgtagcaagtgaaatagcctgaaactagagaactaagagttggcgaccttgtgatgaatg

SEQ ID NO: 32184 - DNA, 504 bp, Macaca Mulatta
ccagctggcaaggaaccccccagactcttcggggcagccgagatgtcctggctggcctttccagcagctgctgcaaatgggggtgtagcaaaagtgaaatcagtagcctttgctagttcgagggctaggcagctgtgggcaccagtaccaatgccccagtcctgccatccacttaaccagtgtctggctgggcacctgtctttcgagcctcacatattcattcattcgtctgcaagtcacagagtccaggcactgtgggctcaggcacagtcccccgacaccacctaaccaaccctgccttttgaccagcctatcatgaccctgtcccctgagcaagctgtgcccctgcctggacaagtggggacccctgatcctgacctctgacctctccccaaccctaactatgcgtttgcctgtgactgcactgccacaactgggtccctattctacccagacaggccacacagtgacccctgccccctgcccagtccaaactgtggccag

SEQ ID NO: 32185 - DNA, 620 bp, Macaca Mulatta
tgctgaagacaactaaaaccgggtccattacaattgcacagaaaaaagcccagaaacatcatggagtcctttgaaaatccatttagaatgtttctgccctcactaggacaccgtgccgtctctcaggcagcgaagttcgatccatcaacaaaaatctatgaaatcagcaaccgttggaagctggcccaggtgcaagtacaaaaagactctaaagaaactgtcaagaagaaggcagctgagcaaacagctgcccgggaacaggcaaaggaggcgtgcaaagctgcagcagaacaggccatctccgtccgacagcaggtcgcgctagaaaatgctgcaaagaagagagagcgagcaacaagtgacccaaggaccacagaacagaaacaagagaagaaacgactcaaaatttccaagaagccaaaggacctggagccgccagaaaaagagtctacgccttatgactacagccagtcagacttcaaggcttttgctggaaacagcaaatccaaagctgcttctcagtttgatccaaataaacagaccccttctggcaagaaattcattgcagccaacaaaattaaacagtcggtgggaaacaaaagcatgtactttccgacggg

SEQ ID NO: 32186 - DNA, 808 bp, Macaca Mulatta
  misc_feature (1)...(808): n = A,T,C or G
ctttagccttcccaaaaggggctggggataacagcccattgcattcccagcctgggcaaacagagctagaattcnnnnnnnnnnnnnnnnnnnnnnnnnngggaagttcaaaagggaggaagaaaataaattaactgtggaaagctataatcgacaggggtgaaactgggttattactttgtgatatttctttacatcatactctaaatgcattacattcttgtatttctatagttataaatgcataagaaaaactaagaacacataattctcattgacaaatgtaattaacattctgatattaactgggtgtctctggtagccttccactttttattcaaagaatttccattctctatatcattgcattttggcatttgcagcgatataatcaaacaagctcatcatatggctctaattggtagaaatacatcctctttcatatcagcaagtccaacaattccttagtacatgccacttagcaatagggcatagccggccagtgctctgcaagatagggccattttctgttgtctagtgggtagtcactgtgtcttctactgactttggatttcctataagccctactgaacatgaactatccnnnnnnnnnnnnnnnnnnnnnnnnnnnnnnnatctcactgtcatctaggctaggttgcagtggtacaatcatagctcatcgtagcctctaacttccgggctcaagagatcctcctgcctcagcctcttgagtagctgggtctacaggcatgagccactacccccagctttttttctggtaaagaaaaagtctcactatgttgcc

SEQ ID NO: 32187 - DNA, 257 bp, Macaca Mulatta
  misc_feature (1)...(257): n = A,T,C or G
tagtaggacagtcttagggagagatggtagggaaaacaccatttatgcggggttttgtacatttccaccacgctgcttactctctgttgccccctggtggaattctgctgcctctgcattgtcctagctgggnnnnnnnnnnnnnnntcttattcctaaagtggtaataggaaccagacttcatagggttgctgtaaagattaaataagtggatgtgtgtgaatgggctttgtaaagtcagaaaacataggtatttg

SEQ ID NO: 32188 - DNA, 938 bp, Macaca Mulatta
gggctcttttcccggctggaaccatggagggtgcggaagagaagaagaaggttcctgctgtgccagaaacccttaagaaaaagcgaaggaatttcgcagagctgaagataaagcgcctgagaaagaagtttgcccaaaagatgcttcgaaaggcaaggaggaagcttatctatgaaaaagcgaagcactatcacaaggaatataggcagatgtacagaactgaaattcgaatggcgaggatggcaagaaaagctggcaacttctatgtacctgctgaacccaaattggcgtttgtcatcaggatcagaggtatcaatggcgtgagcccaaaggtccgaaaggtattgcagcttttgcgccttcgtcaaatcttcaatggaaacctttgtgaagcctcaaccaagggctttcgattaacatgcctgaggattgtagagccatatattgccatggggggtacccccaatcctgaagttaagtaaaatggaacttaatcctccaagcgttggtttatggacaaattcaactaaaaaaccgaaattgctttttaacaaattaaccccttttaaatggctccaaatctccctgggaaaaatatgggcaatcctcccggcatgggagcgaactttgacttcccttgaaaaatcctttacctgggtcggaaaaaatgcctttcccaaggagggctaaaaacacctttctccgcggggcccctttcaaagttttcctttcccccccccgagggggggcgaatttaaaccatacacagaaccccccccattttgattaaaaacgcgggggcacaatcgcggcgccactgagcggggagcccccgtgccatcctacatcgcccccttcgcactgcacccacattggcgctcattaggcaggtcgcacacgcgacgcttagatcgatgttcgcccgcgggttggccgct

SEQ ID NO: 32189 - DNA, 3322 bp, Macaca Mulatta
  misc_feature (1)...(3322): n = A,T,C or G
cacagtggctcacgcctataatcccagcactttgggaggccgaggtgggaggatcacttgaggtcaggagtttgagaccagcctggccaacatggtgaaaccccatatttactaaaaatacaaaaattagccgggcatggtggcgggtgcctgtaatcccagctacttggcaggctgaggcaggacagtcacttgaacctgggaggcagaggttgcagtgagccgagatcgcgccactgcactccagcctagatgacaagagtaaaactccatctnnnnnnnnnnnnnnnnnnnnnnnnnnnnnnnnnnnnnnnnnnnnnnnnnnnnnnnnnnnnnnnnnnnnnnnnnnnnnnnnnnnnnnnnnnnnnnnnnnnnnnnnnnnnnnnnnnnnnnnnnnnnnnnnnnnnnnnnnnnnnnnnnnnnnnnnnnnnnnnnnnnnnnnnnnnnnnnnnnnnnnnnnnnnnnnnnnnnnnnnnnnnnnnnnnnnnnnnnnnnnnnnnnnnnnnnnnnnnnnnnnnnnnnnnnnnnnnnnnnnnnnnnnnnnnnnnnnnnnnnnnnnnnnnnnnnnnnnnnnnnnnnnnnnnnnnnnnnnnnnnnnnnnnnnnnnnnnnnnnnnnnnnnnnnnnnnnnnnnnnnnnnnnnnnnnnnnnnnnnnnnnnnnnnnnnnnnnnnnnnnnnnnnnnnnnnnnnnnnnnnnnnnnnnnnnnnnnnnnnnnnnnnnnnnnnnnnnnnnnnnnnnnnnnnnnnnnnnnnnnnnnnnnnnnnnnnnnnnnnnnnnnnnnnnnnnnnnnnnnnnnnnnnnnnnnnnnnnnnnnnnnnnnnnnnnnnnnnnnnnnnnnnnnnnnnnnnnnnnnnnnnnnnnnnnnnnnnnnnnnnnnnnnnnnnnnnnnnnnnnnnnnnnnnnnnnnnnnnnnnnnnnnnnnnnnnnnnnnnnnnnnnnnnnnnnnnnnnnnnnnnnnnnnntgtatgtgtacccaagcacacatgcgtgaagggctatagccaaagtatttttactagcctgtatgaagtcactagtccttatttttaaaggtctatgacttcttggaagtagtttgattgttgagagagacctttgatctgcagtgtaaatctaccagtcacgggccagaagggcaaaannnnnnnnnnnnnnnnnnnnnnnnnnnnnnnnnnnnnnnnnnnnnnnnnnnnnnnnnnnnnnnnnnnnnnnnnnnnnnnnnnnnnnnnnnnnnnnnnnnnnnnnnnnnnnnnnnnnnnnnnnnnnnnnnnnnnnnnnnnnnnnnnnnnnnnnnnnnnnnnnnnnnnnnnnnnnnnnnnnnnnnnnnnnnnnnnnnnnnnnnnnnnnnnnnnnnnnnnnnnnnnnnnnnnnnnnnnnnnnnnnnnnnnnnnnnnnnnnnnnnnnnnnnnnnnnnnnnnnnnnnnnnnnnnnnnnnnnnnnnnnnnnnnnnnnnnnnnnnnnnnnnnnnnnnnnnnnnnnnnnnnnnnnnnnnnnnnnnnnnnnnnnnnnnnnnnnnnnnnnnnnnnnnnnnnnnnnnnnnnnnnnnnnnnnnnnnnnnnnnnnnnnnnnnnnnnnnnnnnnnnnnnnnnnnnnnnnnnnnnnnnnnnnnnnnnnnnnnnnnnnnnnnnnnnnnnnnnnnnnnnnnnnnnnnnnnnnnnnnnnnnnnnnnnnnnnnnnnnnnnnnnnnnnnnnnnnnnnnnnnnnnnnnnnnnnnnnnnnnnnnnnnnnnnnnnnnnnnnnnnnnnnnnnnnnnnnnnnnnnnnnnnnnnnnnnnnnnnnnnnnnnnnnnnnnnnnnnnnnnnnnnnnnnnnnnnnnnnnnnnnnnnnnnnnnnnnnnnnnnnnnnnnnnnnnnnnnnnnnnnnnnnnnnnnnnnnnnnnnnnnnnnnnnnnnnnnnnnnnnnnnnnnnnnnnnnnnnnnnnnnnnnnnnnnnnnnnnnnnnnnnnnnnnnnnnnnnnnnnnnnnnnnnnnnnnnnnnnnnnnnnnnnnnnnnnnnnnnnnnnnnnnnnnnnnnnnnnnnnnnnnnnnnnnnnnnnnnnnnnnnnnnnnnnnnnnnnnnnnnnnnnnnnnnnnnnnnnnnnnnnnnnnnnnnnnnnnnnnnnnnnnnnnnnnnnnnnnnnnnnnnnnnnnnnnnnnnnnnnnnnnnnnnnnnnnnnnnnnnnnnnnnnnnnnnnnnnnnnnnnnnnnnnnnnnnnnnnnnnnnnnnnnnnnnnnnnnnnnnnnnnnnnnnnnnnnnnnnnnnnnnnnnnnnnnnnnnnnnnnnnnnnnnnnnnnnnnnnnnnnnnnnnnnnnnnnnnnnnnnnnnnnnnnnnnnnnnnnnnnnnnnnnnnnnnnnnnnnnnnnnnnnnnnnnnnnnnnnnnnnnnnnnnnnnnnnnnnnnnnnnnnnnnnnnnnnnnnnnnnnnnnnnnnnnnnnnnnnnnnnnnnnnnnnnnnnnnnnnnnnnnnnnnnnnnnnnnnnnnnnnnnnnnnnnnnnnnnnnnnnnnnnnnnnnnnnnnnnnnnnnnnnnnnnnnnnnnnnnnnnnnnnnnnnnnnnnnnnnnnnnnnnnnnnnnnnnnnnnnnnnnnnnnnnnnnnnnnnnnnnnnnnnnnnnnnnnnnnnnnnnnnnnnnnnnnnnnnnnnnnnnnnnnnnnnnnnnnnnnnnnnnnnnnnnnnnnnnnnnnnnnnnnnnnnnnnnnnnnnnnnnnnnnnnnnnnnnnnnnnnnnnnnnnnnnnnnnnnnnnnnnnnntataaggatggtacccttcccagagttacagaatcttaggtgctgtctctagtctgtgatggaggaactcccagcatccccattgcccacaaatggaatcctcactgtatccactaggaaattagaaattaaggtttcttcactacttctatggtagggttgtctgaaattccctttcaggctgtgggtactggtcttaggttctagtcagaaggggttccttataaggagcacgaggaggggagtacactttcatatcatttaattttgatcctgccctctccagctgctccttcaaaagatacatcaaaagatacaaactcggccgggcacagtggctcacacactttgggaggccgaggggggcgcggatcacctaaggtcaggagtttgagaccagcctggccgacgtggtgaaaccccatctctactaaaaatacaaaaattagccgggtgtggtggctcatgcctgtaatcccagctactccggaggctgaggcaggagaatcacttgaacccgggagggagaggttgcagtgagccaagatggcgccattgcactccaacctgggcaacaagagcaaaactctgtct

SEQ ID NO: 32190 - DNA, 1699 bp, Macaca Mulatta
  misc_feature (1)...(1699): n = A,T,C or G
aataaatgtagagacagtaccatgtgcccatctcatgccacctgcaccagcactgtggacagttactattgtgcttgcaaacaaggattccggtccagcaatggacaaaatcacttcaaggatccaggagtggaatgcaaagnnnnnnnnnnnnnnnnnnnnnnnnnnnnnnnnnnnnnnnnnnnnnnnnnnnnnnnnnnnnnnnnnnnnnnnnnnnnnnnnnnnnnnnnnnnnnnnnnnnnnnnnnnnnnnnnnnnnnnnnnnnnnnnnnnnnnnnnnnnnnnnnnnnnnnnnnnnnnnnnnnnnnnnnnnnnnnnnnnnnnnnnnnnnnnnnnnnnnnnnnnnnnnnnnnnnnnnnnnnnnnnnnnnnnnnnnnnnnnnnnnnnnnnnnnnnnnnnnnnnnnnnnnnnnnnnnnnnnnnnnnnnnnnnnnnnnnnnnnnnnnnnnnnnnnnnnnnnnnnnnnnnnnnnnnnnnnnnnnnnnnnnnnnnnnnnnnnnnnnnnnnnnnnnnnnnnnnnnnnnnnnnnnnnnnnnnnnnnnnnnnnnnnnnnnnnnnnnnnnnnnnnnttgatgaatgcactgaaatgtgtctcatcaattcaacatgcaccaacactcctgggagctacttttgcacctgccaccctggctttgcaccaagcaatggacagttgaatttcacagaccaaaaagtggaatgtagagnagatattgatgagtgccgccaagatccatcaacatgtggtccaaattctatctgcaccaatgctctgggctcctacagctgtggctgcattgcaggctttcgtcccgatccagaaagctcccagaaagacggcaacttcagctgccaaagnnnnnnnnnnnnnnnnnnnnnnnnnnnnnnnnnnnnnnnnnnnnnnnnnnnnnnnnnnnnnnnnnnnnnnnnnnnnnnnnnnnnnnnnnnnnnnnnnnnnnnnnnnnnnnnnnnnnnnnnnnnnnnnnnnnnnnnnnnnnnnnnnnnnnnnnnnnnnnnnnnnnnnnnnnnnnnnnnnnnnnnnnnnnnnnnnnnnnnnnnnnnnnnnnnnnnnnnnnnnnnnnnnnnnnnnnnnnnnnnnnnnnnnnnnnnnnnnnnnnnnnnnnnnnnnnnnnnnnnnnnnnnnnnnnnnnnnnnnnnnnnnnnnnnnnnnnnnnnnnnnnnnnnnnnnnnnnnnnnnnnnnnnnnnnnnnnnnnnnnnnnnnnnnnnnnnnnnnnnnnnnnnnnnnnnnnnnnnnnnnnnnnnnnnnnnnnnnnnnnnnnnnnnnnnnnnnnnnnnnnnnnnnnnnnnnnnnnnnnnnnnnnnnnnnnnnnnnnnnnnnnnnnnnnnnnnnnnnnnnnnnnnnnnnnnnnnnnnnnnnnnnnnnnnnnnnnnnnnnnnnnnnnnnnnnnnnnnnnnnnnnnnnnnnnnnnnnnnnnnnnnnnnnnnnnnnnnnnnnnnnnnnnnnnnnnnnnnnnnnnnnnnnnnnnnnnnnnnnnnnnnnnnnnnnnnnnnnnnnnnnnnnnnnnnnagccaaagcaggagtttgagaggcccatctgtgtttcctggagcaccgatgtgaagggtggaagatggacatcctttggctgtgtgatcctggaagcctctgagatacataccgtctgcagctgtaatcggatggcgaatcttgctgttatcatggcttctggggagctcac

SEQ ID NO: 32191 - DNA, 4136 bp, Macaca Mulatta
  misc_feature (1)...(4136): n = A,T,C or G
atgagtgactccaaagaaccaagactgcagcagctggacctcctgggtgaggctgggttgggacgctgggattctgggaagggagaagggatggccagccctggcctcagcctgcccaggctctgagttcacgtctatccattcagaggaggaacagctgggaggcgttggattccgacagactcgaggctacaagagcttagcaggtagagaggagttagcagcttgggaggagagaagagagactcctggactcctgggtcctgaggagctggacgctggggcctggattcctgggtcctggggaggtgggggctaagagcctgggttccagggacctggggatatagaggctggggcctggattcctgggtcccggggaggtagaaccaggtacctggttcctgggacctggggaggggtaggctgggaatggggtttctgggtcctggggaggtgcgagctagggcctggattcccaggtgttggagtggagggggctggggctggggttcctgagtcctggggtgctgagagattcaggccaggttccccctgggccaggctcaggtggggacactggcaggctgacgcatggatcctctctcagggtgtcttggccatggccccctggtcctgcaactcctctccttcacgctcttggctgggctccttgtccaaggtcagacgcaggttctgagggtctggggtccccaggcctagcttttggctgtggacacagctggggcagccaggtctgggagggaggtggggttgagagtcaaggtgttgtccctaggggtttgtaggggcctctcccacagctcctccccactctagggcaggagaggagannnnnnnnnnnnnnnnnnnnnggaaaaacctggctctccttggccttctgtgctgccttctccgggtgtcagttttcctcatcttcaaaggcgattaacggagaccttggctctcacaaatgatgtccccgtgggctcagttcagggcttggcacacagtaggtgtttaataattgcagttccttttctttcttgacccagtgtccaaagtccctagctccctaagtcagggacaatccaaacaagatgcgatctaccagaatctgacccagcttaaagttgcagtcagtgagctctcagagaaatccaagcagcaggagatctaccaggagctgacccggctgaaggctgcagtgggtgagcttccagagaaatccaagcagcaggagatctacgaggagctgacccggctcaaggctgcagtgggtgagcttccagagaaatccaagctgcaggagatctaccaggagctgacccggctgaaggctgcagtgggtgagcttccagagaaatctaagcagcaggagatctaccaggagctatcccggctgaaggctgcagtgggtgagcttccagagaaatccaagcagcaggagatctaccagaagctgacccagctgaaggctgcagtcgatgggttgccagacaggtccaagcaacaggagatctaccaggagctgatccagctgaaggctgcagtgggtgagttcctggaaccagggctccttgggcctgagacggtcattgtgtggtgtgagtttgcttgtcactgaccctgcctgagccacagtttcttcatctgtgaaatgagaacacagggtaactgtgataatggcactcggtgtttacagtgggccgggtacacagtaggcactgaattaagccagtctcctgccttctgttctaagttctaaagccccgacttctcctagtctggaggagatggggccaggactcctaggttctcatgggaattggggagggtctcgggaagtggggaggggaatggtccacccagcgtggacagtgaaggaagggctccgactctcaagaccttgaaggctggacagatacaggaatatggacaacctcatctgagcccagccctgaccggcctcccccaacagaacgcctgtgccacccctgtccctgggagtggacattcttccaaggaaactgttatttcatgtctaactcccagcggaactggcacgactccatcaccgcctgccaggaggtgggggcccagctcgtcgtaatcaaaagtgctgaggagcaggtacacctggtgggggtccccatcctggcctggggcatggcttctggccaacaggggaggagatgctgaaagatgattttgcagaagaggggttttgttccacttggaaagatgggaagagaaggatatgaatgagggagtcccaagtacccttagagcagatacaaaccaagtctgaacatgtgtgaaagctctggggaaaatgtaaactataagtaacccccagggcatgccacaagtggttaacaaccagctctctgggggaggaagtcctgatgcgttctgtttgccaatttccctggtgtaaatattcccatggcggctgatttcaagctgtcgatgtgatgtcactcagtgcagagctgaaaggagatgtgcatgaccagcaattaggaaatggatgtggctccaatacattaagcccagttatgagtaaatgttgcagacatgcacagaatgtataaaatggataaacacgcagtgttagcaagagtgtgtgaggagagtgtgaggagaggccagctgtgcatggatgtgtgcacatcagggcacatgtgctgtgggatacacatgtaagagggactcagacacgaggggacttaggacccagtgtaccggaaggctgaaggttagcctacaagcagaacttcttgccaagagatggggaaacagagcctggaaaatgggaagcagagctccctcctgactcctcctctaccctccagaacttcctacagctgcagtcttccagaagtaaccgcttcacctggatgggactttcagacctaaatcacgaaggcacgtggcaatgggtggatggctcacctctgttgcccaggtagacctcagaaggggcattccatccgctagggctgcggctctgcaactctgacttgaacttcccctggggatccctccccaactccctgacactctagacccaagaatctgggggttttactgacttgaggaaggtggtcttcttacccacctccagacagcatggcaggtgcctagaattccaccagcagagctgcaggaggagcttaccccgtgggtgggtgtgttaaaatatagtgtattaataggaaatctgaggtctagtaaggccaccagctcaggagacacctaccattgtgagtagcttctcatatacatagatccctagagagaggacacatcacagctgggggccacctggggaagcaccagggtctgctatgaggcagagtggtggggagaggtgactgtgggccacagcgtttattatggtttgcatggaaaggaaaggtcaaggccaggtgaacaggcttaggattgggaagtatgaagcatttgtgggctctggggcacaggggctgcccctagctgtctaccatctggccttgggttgattagcacaggatagcggcttggagtacaagagcccagtaaggcaggtggctgggggtgtggactccagattggttggtttgtatttgaaaatcacaccctcaataggtggagtccacccaaggacaggttttgagaagagaggcaggaacccaaggcaccgtgagtcaggcatattatcaggtatgcagagggattcatgtccagcacaaacacgcagggcagatgttaaagcaccaagacaacagaaggtagaaacacagctcatgtagccggggcggggggagtgggggacagaggctcacattctgcatgcgctttgcagcttcaagcagtattggaacaaaggagagcccaacaatattggggaggaagactgtgcggaatttagtggcaatggctggaacgatgacaaatgcaatcttgccaaattctggatctgcaaaaagtcagcggcctcctgctccggggatgaagaacggttgctctccccagcccctaccactccaaacccccctcctgagtagcagaacttcacccacttttaagctacaattccttctctccatcctgcgaccttcacaaaatctctgggactgttctctgtcaga

SEQ ID NO: 32192 - DNA, 101 bp, Macaca Mulatta
cccccagaaaggatttgctgggggcaaagtgtctctgcgggattgtttcaaccttttcactaaggaagaagagctagagtcggagaatgccccagtatgtg

SEQ ID NO: 32193 - DNA, 11224 bp, Macaca Mulatta
  misc_feature (1)...(11224): n = A,T,C or G
catcgaggacctggaggacgtggatgtgcaggagggctcctcggccacctttcgttgccggatctccccggccaactacgagcctgtgcactggttcctggataagacacccctgcatgccaacgagctcaatgagatcgaggcccagcctgggggctaccacgtgctgaccctgcggcagctggcgctcaaggactcgggcaccatctacttcgaggcgggtgaccagagggcctcagccgccctgcgggtcactgnnaagccaagtgtcttctcccgggagctcacagatgccaccatcacagagggtgaggacttgaccctggtgtgcgagaccagtgcctgcgacagccctgtgtgctggaccaaggatgggaagaccctgcggggatctgcccggtatcagctgagccacgagggccaccgagcccagttgctcatcactggggccaccctgcaggacagcggacgctacaagtgtgagactgggggcgcctgcagcagctccattgtannnnnnnnnnnnnnnnnnnnnnnnnnnnnnnnnnnnnnnnnnnnnnnnnnnnnnnnnnnnnnnnnnnnnnnnnnnnnnnnnnnnnnnnnnnnnnnnnnnnnnnnnnnnnnnnnnnnnnnnnnnnnnnnnnnnnnnnnnnnnnnnnnnnnnnnnnnnnnnnnnnnnnnnnnnnnnnnnnnnnnnnnnnnnnnnnnnnnnnnnnnnnnnnnnnnnnnnnnnnnnnnnnnnnnnnnnnnnnnnnnnnnnnnnnnnnnnnnnnnnnnnnnnnnnnnnnnnnnnnnnnnnnnnnnnnnnnnnnnnnnnnnnnnnnnnnnnnnnnnnnnnnnnnnnnnnnnnnnnnnnnnnnnnnnnnnnnnnnnnnnnnnnnnnnnnnnnnnnnnnnnnnnnnnnnnnnnnnnnnnnnnnnnnnnnnnnnnnnnnnnnnnnnnnnnnnnnnnnnnnnnnnnnnnnnnnnnnnnnnnnnnnnnnnnnnnnnnnnnnnnnnnnnnnnnnnnnnnnnnnnnnnnnnnnnnnnnnnnnnnnnnnnnnnnnnnnnnnnnnnnnnnnnnnnnnnnnnnnnnnnnnnnnnnnnnnnnnnnnnnnnnnnnnnnnnnnnnnnnnnnnnnnnnnnnnnnnnnnnnnnnnnnnnnnnnnnnnnnnnnnnnnnnnnnnnnnnnnnnnnnnnnnnnnnnnnnnnnnnnnnnnnnnnnnnnnnnnnnnnnnnnnnnnnnnnnnnnnnnnnnnnnnnnnnnnnnnnnnnnnnnnnnnnnnnnnnnnnnnnnnnnnnnnnnnnnnnnnnnnnnnnnnnnnnnnnnnnnnnnnnnnnnnnnnnnnnnnnnnnnnnnnnnnnnnnnnnnnnnnnnnnnnnnnnnnnnnnnnnnnnnnnnnnnnnnnnnnnnnnnnnnnnnnnnnnnnnnnnnnnnnnnnnnnnnnnnnnnnnnnnnnnnnnnnnnnnnnnnnnnnnnnnnnnnnnnnnnnnnnnnnnnnnnnnnnnnnnnnnnnnnnnnnnnnnnnnnnnnnnnnnnnnnnnnnnnnnnnnnnnnnnnnnnnnnnnnnnnnnnnnnnnnnnnnnnnnnnnnnnnnnnnnnnnnnnnnnnnnnnnnnnnnnnnnnnnnnnnnnnnnnnnnnnnnnnnnnnnnnnnnnnnnnnnnnnnnnnnnnnnnnnnnnnnnnnnnnnnnnnnnnnnnnnnnnnnnnnnnnnnnnnnnnnnnnnnnnnnnnnnnnnnnnnnnnnnnnnnnnnnnnnnnnnnnnnnnnnnnnnnnnnnnnnnnnnnnnnnnnnnnnnnnnnnnnnnnnnnnnnnnnnnnnnnnnnnnnnnnnnnnnnnnnnnnnnnnnnnnnnnnnnnnnnnnnnnnnnnnnnnnnnnnnnnnnnnnnnnnnnnnnnnnnnnnnnnaggccacagaaggggccacggccatactgtggtgtgagctgagcaaggtggccccggtggagtggaggaaggggcatgactgcctcagagatggggacagacacagcctgaagcaggatgggtccaggtgtgagctgcagatccgtggcctggctgtggtggatgccggcgagtactcgtgtgtgtgtgggcaggagaggacctcagccatactcactgtcagggngccctgccttccaagttcatagagggtctgaggaatgaagaggccacagaaggggccacggccatactgtggtgtgagctgagcaaggtggccccggtggagtggaggaaggggcatgactgcctcagagatggggacagacacagcctgaagcaggatgggtccaggtgtgagctgcagatccgtggcctggctgtggtggatgccggcgagtactcgtgtgtgtgtgggcaggagaggacctcagccatactcactgtcagggnnnnnnnnnnnnnnnnnnnnnnnnnnnnnnnnnnnnnnnnnnnnnnnnnnnnnnnnnnnnnnnnnnnnnnnnnnnnnnnnnnnnnnnnnnnnnnnnnnnnnnnnnnnnnnnnnnnnnnnnnnnnnnnnnnnnnnnnnnnnnnnnnnnnnnnnnnnnnnnnnnnnnnnnnnnnnnnnnnnnnnnnnnnnnnnnnnnnnnnnnnnnnnnnnnnnnnnnnnnnnnnnnnnnnnnnnnnnnnnnnnnnnnnnnnnnnnnnnnnnnnnnnnnnnnnnnnnnnnnnnnnnnnnnnnnnnnnnnnnnnnnnnnnnnnnnnnnnnnnnnnnnnnnnnnnnnnnnnnnnnnnnnnnnnnnnnnnnnnnnnnnnnnnnnnnnnnnnnnnnnnnnnnnnnnnnnnnnnnnnnnnnnnnnnnnnnnnnnnnnnnnnnnnnnnnnnnnnnnnnnnnnnnnnnnnnnnnnnnnnnnnnnnnnnnnnnnnnnnnnnnnnnnnnnnnnnnnnnnnnnnnnnnnnnnnnnnnnnnnnnnnnnnnnnnnnnnnnnnnnnnnnnnnnnnnnnnnnnnnnnnnnnnnnnnnnnnnnnnnnnnnnnnnnnnnnnnnnnnnnnnnnnnnnnnnnnnnnnnnnnnnnnnnnnnnnnnnnnnnnnnnnnnnnnnnnnnnnnnnnnnnnnnnnnnnnnnnnnnnnnnnnnnnnnnnnnnnnnnnnnnnnnnnnnnnnnnnnnnnnnnnnnnnnnnnnnnnnnnnnnnnnnnnnnnnnnnnnnnnnnnnnnnnnnnnnnnnnnnnnnnnnnnnnnnnnnnnnnnnnnnnnnnnnnnnnnnnnnnnnnnnnnnnnnnnnnnnnnnnnnnnnnnnnnnnnnnnnnnnnnnnnnnnnnnnnnnnnnnnnnnnnnnnnnnnnnnnnnnnnnnnnnnnnnnnnnnnnnnnnnnnnnnnnnnnnnnnnnnnnnnnnnnnnnnnnnnnnnnnnnnnnnnnnnnnnnnnnnnnnnnnnnnnnnnnnnnnnnnnnnnnnnnnnnnnnnnnnnnnnnnnnnnnnnnnnnnnnnnnnnnnnnnnnnnnnnnnnnnnnnnnnnnnnnnnnnnnnnnnnnnnnnnnnnnnnnnnnnnnnnnnnnnnnnnnnnnnnnnnnnnnnnnnnnnnnnnnnnnnnnnnnnnnnnnnnnnnnnnnnnnnnnnnnnnnnnnnnnnnnnnnnnnnnnnnnnnnnnnnnnnnnnnnnnnnnnnnnnnnnnnnnnnnnnnnnnnnnnnnnnnnnnnnnnnnnnnnnnnnnnnnnnnnnnnnnnnnnnnnnnnnnnnnnnnnnnnnnnnnnnnnnnnnnnnnnnnnnnnnnnnnnnnnnnnnnnnnnnnnnnnnnnnnnnnnnnnnnnnnnnnnnnnnnnnnnnnnnnnnnnnnnnnnnnnnnnnnnnnnnnnnnnnnnnnnnnnnnnnnnnnnnnnnnnnnnnnnnnnnnnnnnnnnnnnnnnnnnnnnnnnnnnnnnnnnnnnnnnnnnnnnnnnnnnnnnnnnnnnnnnnnnnnnnnnnnnnnnnnnnnnnnnnnnnnnnnnnnnnnnnnnnnnnnnnnnnnnnnnnnnnnnnnnnnnnnnnnnnnnnnnnnnnnnnnnnnnnnnnnnnnnnnnnnnnnnnnnnnnnnnnnnnnnnnnnnnnnnnnnnnnnnnnnnnnnnnnnnnnnnnnnnnnnnnnnnnnnnnnnnnnnnnnnnnnnnnnnnnnnnnnnnnnnnnnnnnnnnnnnnnnnnnnnnnnnnnnnnnnnnnnnnnnnnnnnnnnnnnnnnnnnnnnnnnnnnnnnnnnnnnnnnnnnnnnnnnnnnnnnnnnnnnnnnnnnnnnnnnnnnnnnnnnnnnnnnnnnnnnnnnnnnnnngccccacagccagtgttccgggagccgctgcagagtctgcaggcagaggagggctccacagccaccctgcagtgtgagctgtctgagcccactgctacagtggtctggagcaagggtggcctgcagctgcgggccaatgggcgccgggagccacggcttcagggctgcactgcggagctggtgttacggggcctacgacgtgaagacactggagaatacacttgcacctgtggctcccaggccaccagcgccaccctcactgtcacagntgnnnnnncagctgcccctgtgcggttcctccaagagctgcagccccaggaggtggatgagggaggcacagcacacttacgctgtgagctgagccgggcgggtgcaagcgtggagtggcgcaagggctccctggagctcttcccttgtgccaagtaccagatggtgcaggatggtgcagctgcggagctgctggtacacggagtggagcaggaggatgcgggtgactacacgtgcgacacaggccacacacacagcatggccagcctctctgtccgtnnnnnnnnnnnnnnnnnnnnnnnnnnnnnnnnnnnnnnnnnnnnnnnnnnnnnnnnnnnnnnnnnnnnnnnnnnnnnnnnnnnnnnnnnnnnnnnnnnnnnnnnnnnnnnnnnnnnnnnnnnnnnnnnnnnnnnnnnnnnnnnnnnnnnnnnnnnnnnnnnnnnnnnnnnnnnnnnnnnnnnnnnnnnnnnnnnnnnnnnnnnnnnnnnnnnnnnnnnnnnnnnnnnnnnnnnnnnnnnnnnnnnnnnnnnnnnnnnnnnnnnnnnnnnnagagcctgaggtgaccattgtgcgggggctggttgatgcagaggtgctggccaatgagggtgttgagttcagctgcgaggtgtccagggctggagccacaggcatgcagtggtgcctacaaggcctgccactgcaaagcaatgaggtgacagaagtgactgtgcaggatggccgcatccacacactgcgactgaagggtgtgacacctgaggatgctggcactgtctccttccatttgggcaactgtgcttcctccgcccagctcaccatcagagnagctcctgaggtgaccatcctggagcccctgcaggacgtacagctcagtgagggccaggatgccannnnnnnnnnnnnnnnnnnnnnnnnnnnnnnnnnnnnnnnnnnnnnnnnnnnnnnnnnnnnnnnnnnnnnnnnnnnnnnnnnnnnnnnnnnnnnnnnnnnnnnnnnnnnnnnnnnnnnnnnnnnnnnnnnnnnnnnnnnnnnnnnnnnnnnnnnnnnnnnnnnnnnnnnnnnnnnnnnnnnnnnnnnnnnnnnnnnnnnnnnnnnnnnnnnnnnnnnnnnnnnnnnnnnnnnnnnnnnnnnnnnnnnnnnnnnnnnnnnnnnnnnnnnnnnnnnnnnnnnnnnnnnnnnnnnnnnnnnnnnnnnnnnnnnnnnnnnnnnnnnnnnnnnnnnnnnnnnnnnnnnnnnnnnnnnnnnnnnnnnnnnnnnnnnnnnnnnnnnnnnnnnnnnnnnnnnnnnnnnnnnnnnnnnnnnnnnnnnnnnnnnnnnnnnnnnnnnnnnnnnnnnnnnnnnnnnnnnnnnnnnnnnnnnnnnnnnnnnnnnnnnnnnnnnnnnnnnnnnnnnnnnnnnnnnnnnnnnnnnnnnnnnnnnnnnnnnnnnnnnnnnnnnnnnnnnnnnnnnnnnnnnnnnnnnnnnnnnnnnnnnnnnnnnnnnnnnnnnnnnnnnnnnnnnnnnnnnnnnnnnnnnnnnnnnnnnnnnnnnnnnnnnnnnnnnnnnnnnnnnnnnnnnnnnnnnnnnnnnnnnnnnnnnnnnnnnnnnnnnnnnnnnnnnnnnnnnnnnnnnnnnnnnnnnnnnnnnnnnnnnnnnnnnnnnnnnnnnnggcctccctgaccccccagaggatgctgaagtggtggcttgcagcagccacactgtgacactgtcttgggcagctcccatgagtgatggaggcggtggtctctgtggctaccgcgtggaggtgaaggagggggccatgggccagtggcggctgtgccacgagctggtgcctggacctgagtgtgtggtggatggcctggcccccggggagacctaccgcttccgtgtggcagctgtgggcccagtgggtgctggggaaccggttcacctgccccagactgtgcggcttnnnnnnnnnnnnnnnnnnnnnnnnnnnnnnnnnnnnnnnnnnnnnnnnnnnnnnnnnnnnnnnnnnnnnnnnnnnnnnnnnnnnnnnnnnnnnnnnnnnnnnnnnnnnnnnnnnnnnnnnnnnnnnnnnnnnnnnnnnnnnnnnnnnnnnnnnnnnnnnnnnnnnnnnnnnnnnnnnnnnnnnnnnnnnnnnnnnnnnnnnnnnnnnnnnnnnnnnnnnnnnnnnnnnnnnnnnnnnnnnnnnnnnnnnnnnnnnnnnnnnnnnnnnnnnnnnnnnnnnnnnnnnnnnnnnnnnnnnnnnnnnnnnnnnnnnnnnnnnnnnnnnnnnnnnnnnnnnnnnnnnnnnnnnnnnnnnnnnnnnnnnnnnnnnnnnnnnnnnnnnnnnnnnnnnnnnnnnnnnnnnnnnnnnnnnnnnnnnnnnnnnnnnnnnnnnnnnnnnnnnnnnnnnnnnnnnnnnnnnnnnnnnnnnnnnnnnnnnnnnnnnnnnnnnnnnnnnnnnnnnnnnnnnnnnnnnnnnnnnnnnnnnnnnnnnnnnnnnnnnnnnnnnnnnnnnnnnnnnnnnnnnnnnnnnnnnnnnnnnnnnnnnnnnnnnnnnnnnnnnnnnnnnnnnnnnnnnnnnnnnnnnnnnnnnnnnnnnnnnnnnnnnnnnnnnnnnnnnnnnnnnnnnnnnnnnnnnnnnnnnnnnnnnnnnnnnnnnnnnnnnnnnnnnnnnnnnnnnnnnnnnnnnnnnnnnnnnnnnnnnnaaagacctgggtgatccctcaatggacaaggcagctgtgaagatccaggccgcctttaagggctacaaggtccggaaggagatgaagcagcaggaagggcctatgttctcccacacatttggggacaccgaggcacaggtaggggatgccctgcggctggagtgtgttgtggccagcaaggcagatgtgcgagcctgctggctgaaggatggtgtggagctgaccgacgggcggcaccatcacatcgaccagcttggggatggcacctgttctctgctgatcactggcctgggccatgctgatgctggccactacacctgtcaggtgagcaacaagtttggccaggtggcccacagtgcctgcgtggtggtcagtgggacagagagtgaggccgagagctcctctgggggtgagctggacgatgccttccgccgggctgcccggcggctgcaccggctcttccgcaccaaaagcccggctgaggtttcagacgaggagctcttcctgagtgcagatgagggccctgcagagccagaggagcctgcggactggcagacataccacgaagatgagcatttcatttgcatccgttttgaggcactcactgaggcccgccaggcggtaactcgcttccaggagatgtttgccacactgggcatcggggtgcagatcaacctggtggaggaggggcctcggagggtagagatgcgcatcagcaaagaggcccccgcccctgtggtgcctccagagccattgcccagcctactgacttctgatgctgnnnnnnnnnnnnnnnnnnnnnnnnnnnnnnnnnnnnnnnnnnnnnnnnnnnnnnnnnnnnnnnnnnnnnnnnnnnnnnnnnnnnnnnnnnnnnnnnnnnnnnnnnnnnnnnnnnnnnnnnnnnnnnnnnnnnnnnnnnnnnnnnnnnnnnnnnnnnnnnnnnnnnnnnnnnnnnnnnnnnnnnnnnnnnnnnnnnnnnnnnnnnnnnnnnnnnnnnnnnnnnnnnnnnnnnnnnnnnnnnnnnnnnnnnnnnnnnnnnnnnnnnnnnnnnnnnnnnnnnnnnnnnnnnnnnnnnnnnnnnnnnnnnnnnnnnnnnnnnnnnnnnnnnnnnnnnnnnnnnnnnnnnnnnnnnnnnnnnnnnnnnnnnnnnnnnnnnnnnnnnnnnnnnnnnnnnnnnnnnnnnnnnnnnnnnnnnnnnnnnnnnnnnnnnnnnnnnnnnnnnnnnnnnnnnnnnnnnnnnnnnnnnnnnnnnnnnnnnnnnnnaggctaccctgctcccagattatactggttcaaagatggccagcccctgaccgcatctgcccacatccacatgactgacaaaaagaccctgcacaccctggagatcatctcagtcactcgggaggactctggccagtatgcggcctacatcagcaatgccatgggtgccgcctactcatctgcccggctgctggtccgagnnnnnnnnnnnnnnnnnnnnnnnnnnnnnnnnnnnnnnnnnnnnnnnnnnnnnnnnnnnnnnnnnnnnnnnnnnnnnnnnnnnnnnnnnnnnnnnnnnnnnnnnnnnnnnnnnnnnnnnnnnnnnnnnnnnnnnnnnnnnnnnnnnnnnnnnnnnnnnnnnnnnnnnnnnnnnnnnnnnnnnnnnnnnnnnnnnnnnnnnnnnnnnnnnnnnnnnnnnnnnnnnnnnnnnnnnnnnnnnnnnnnnnnnnnnnnnnnnnnnnnnnnnnnnnnnnnnnnnnnnnnnnnnnnnnnnnnnnnnnnnnnnnnnnnnnnnnnnnnnnnnnnnnnnnnnnnnnnnnnnnnnnnnnnnnnnnnnnnnnnnnnnnnnnnnnnnnnnnnnnnnnnnnnnnnnnnnnnnnnnnnnnnnnnnnnnnnnnnnnnnnnnnnnnnnnnnnnnnnnnnnnnnnnnnnnnnnnnnnnnnnnnnnnnnnnnnnnnnnnnnnnnnnnnnnnnnnnnnnnnnnnnnnnnnnnnnnnnnnnnnnnnnnnnnnnnnnnnnnnnnnnnnnnnnnnnnnnnnnnnnnnnnnnnnnnnnnnnnnnnnnnnnnnnnnnnnnnnnnnnnnnnnnnnnnnnnnnnnnnnnnnnnnnnnnnnnnnnnnnnnnnnnnnnnnnnnnnnnnnnnnnnnnnnnnnnnnnnnnnnnnnnnnnnnnnnnnnnnnnnnnnnnnnnnnnnnnnnnnnnnnnnnnnnnnnnnnnnnnnnnnngatctttgacatctacgtggtcaccgccgattacctgcccctgggggctgagcaggatgccatcgcactgcgggaaggccagtacgtggaggtcctggatgcagcccacccactgcgctggctcgtccgcaccaagcccaccaagtccagcccctcacggcagggctgggtgtcaccagcctacctggacaggaggctcaagnagctgtcacctgagtggggggctgctgaggcccctgagttccccggggaggccgtgtctgaagatgaatacaagtcaaggctgagnnnnnnnnnnnnnnnnnnnnnnnnnnnnnnnnnnnnnnnnnnnnnnnnnnnnnnnnnnnnnnnnnnnnnnnnnnnnnnnnnnnnnnnnnnnnnnnnnnnnnnnnnnnnnnnnnnnnnnnnnnnnnnnnnnnnnnnnnnnnnnnnnnnnnnnnnnnnnnnnnnnnnnnacagcagcttcctgcaggagctgcctttatgcgacacagacgacgacgtggccatgtgcttcatcaagaaccaggcagcctttgagcagtacttggagttcctggtggggcgcgtgcaggctgagtcggtggtcgtcagcacggccatccaggagttctacaagnnnnnnnnnnnnnnnnnnnnnnnnnnnnnnnnnnnnnnnnnnnnnnnnnnnnnnnnnnnnnnnnnnnnnnnnnnnnnnnnnnnnnnnnnnnnnnnnnnnnnnnnnnnnnnnnnnnnnnnnnnnnnnnnnnnnnnnnnnnnnnnnnnnnnnnnnnnnnnnnnnnnnnnnnnnnnnnnnnnnnnnnnnnnnnnnnnnnnnnnnnnnnnnnnnnnnnnnnnnnnnnnnnnnnnnnnnnnnnnnnnnnnnnnnnnnnnnnnnnnnnnnnnnnnnnnnnnnnnnnnnnnnnnnnnnnnnnnnnnnnnnnnnnnnnnnnnnnnnnnnnnnnnnnnnnnnnnnnnnnnnnnnnnnnnnnnnnnnnnnnnnnnnnnnnnnnnnnnnnnnnnnnnnnnnnnnnnnnnnnnnnnnnnnnnnnnnnnnnnnnnnnnnnnnnnnnnnnnnnnnnnnnnnnnnnnnnnnnnnnnnnnnnnnnnnnnnnnnnnnnnnnnnnnnnnnnnnnnnnnnnnnnnnnnnnnnnnnnnnnnnnnnnnnnnnnnnnnnnnnnnnnnnnnnnnnnnnnnnnnnnnnnnnnnnnnnnnnnnnnnnnnnnnnnnnnnnnnnnnnnnnnnnnnnnnnnnnnnnnggcccccggactttgaagaggagctggctgactgcacagcggagctcggtgagacagtcaagctggcctgccgcgtgacaggcacacccaagcctgtcatcagctggtacaaannnnnnnnnnnnnnnnnnnnnnnnnnnnnnnnnnnnnnnnnnnnnnnnnnnnnnnnnnnnnnnnnnnnnnnnnnnnnnnnnnnnnnnnnnnnnnnnnnnnnnnnnnnnnnnnnnnnnnnnnnnnnnnnnnnnnnnnnnnnnnnnnnnnnnnnnnnnnnnnnnnnnngtcccaccacggttcatgaaccaggtccgagcctcgccctttgtggagggagaggatgcccagttcacctgcaccatcgaaggcgccccatacccgcagatcangtggnnnnnnnnnnnnnnnnnnnnnnnnnnnnnnnnnnnnnnnnnnnnnnnnnnnnnnnnnnnnnnnnnnnnnnnnnnnnnnnnnnnnnnnnnnnnnnnnnnnnnnnnnnnnnnnnnnnnnnnnnnnngctggtgaaccggctgggctccacacgagctagtgcagagctgcacattcagagccccacgctgcaggcccgggagcagtgccacagggagcagctcg

SEQ ID NO: 32194 - DNA, 592 bp, Macaca Mulatta
tgaaagttcagggacacggagccaagacagagtctagcaaagaagaggattttggaaggtgtcttccaacaatcgcctgaatctaggctctgtagcaggtcctcttctttctagcttctgacaagtctgtcttcttttcttgatttcataccgttcttatcgcctgcccaagtgtatcgtctctgtgcttccctatataaggagtaagaaacttctttaagtcttggaacttgttgctgctcagaatactggtgtcgcctttctggctacaggcctccactgcaccttcttagggaagggcatgctggccatcagctccaaacaggctgtaaccaagtccacccatccctggggcttcccttgctctgccttattttcaattaactgaatggatctcaccagattttgtatctattgctcagctaggaccagagtccaagagtcaaattattataagagaacattcatctccacattttcctgtctcaagcccatccattttttttttaacttttattttaggtttcgggggtacatgtaaaggtttgctatataggtaaactcatttcatgcaggttttttgtacagatta

SEQ ID NO: 32195 - DNA, 858 bp, Macaca Mulatta
gagtcctttagagtgacaggtactgtacgtaaactgtgaggggaacaagagacagataggggaggtgggaggaagggaaagagaattcccagagccccacccctccccatggccaggaccttctcatcctgacatgagacagatgaatgagacctggtgtcgcctgttggcagtgacctgggtagctcaactttgggttctgatggattctcaccatcagggccagagggaaagggaggggcccataccaagcctcagggcctgttgagttcaagagggtttagacaattcaggcctgtttcagagcaggtttctattcgggaagggtagtggtgtgtgacctgcaggcagcaggaactcaggcatgggcagtccgcacaataggagaggagcagcatggccacttcacctagaatgtcaagggaaggggcgtccctggaagaggctaagaagagagagacctgggggaattccaggacgagggggctgtgagggccttggcccacccagttcctcccagttcctaaggctgcattcccagagaaagcagcttgagtcccagcagttaaggtggaaggtgaagagtagagcatgtccaggacgaggtttaggaaatggccaagccccttggacccatgggattcctggccgggccctggggtgatgcccctgccattctgcctccttcacactccagatcctgagccagctgatggccctgcctggagcagagtggactcagacagggcagctgagctgctgctagaggtccatggttgccactgagcttggctgggaatgaatggggcggggcaggggcagtcctattcagagctatgggtgcagctcccggggtga

SEQ ID NO: 32196 - DNA, 4271 bp, Macaca Mulatta
  misc_feature (1)...(4271): n = A,T,C or G
aggaaggagcaaatattaataagtctcttacaactttgggcaaagtcatttcagccttggccgaggtnnnnnnnnnnnnnnnnnnnnnnnnnnnnnnnnnnnnnnnnnnnnnnnnnnnnnnnnnnnnnnnnnnnnnnnnnnnnnnnnnnnnnnnnnnnnnnnnnnnnnnnnnnnnnnnnnnnnnnnnnnnnnnnnnnnnnnnnnnnnnnnnnnnnnnnnnagatatgcagatcgtgcaaaacaaattaaatgcaatgctgttatcaatgaggaccccaatgccaaactggtgggtgaattaaaggaggaggtgacacggctgaaggaccttcttcgtgctcagggccgggaaaatattattgatnnnnnnnnnnnnnnnnnnnnnnnnnnnnnnnnnnnnnnnnnnnnnnnnnnnnnnnnnnnnnnnnnnnnnnnnnnnnnnnnnnnnnnnnnnnnnnnnnnnnnnnnnnnnnnnnnnnnnnnnnnnnnnnnnnnnnnnnnnnnnnnnnnnnnnnnnnnnnnnnnnnnnnnnnnnnnnnnnnnnnnnnnnnnnnnnnnnnnnnnnnnnnnnnnnnnnnnnnnnnnnnnnnnnnnnnnnnnnnnnnnnnnnnnnnnnnnnnnnnnnnnnnnnnnnnnnnnnnnnnnnnnnnnnagaccccacatcttgttaacctcaatgaagacccactaatgtctgagtgcctactttattacatcaaagatggaattacaagnnnnnnnnnnnnnnnnnnnnnnnnnnnnnnnnnnnnnnnnnnnnnnnnnnnnnnnnnnnnnnnnnnnnnnnnnnnnnnnnnnnnnnnnnnnnnnnnnnnnnnnnnnnnnnnnnnnnnnnnnnnnnnnnnnnnnnnnnnnnnnnnnnnnnnnnnnnnnnnnnnnnnnnnnnnnnnnnnnnnnnnnnnnnnnnnnnnnnnnnnnnnnnnnnnnnnnnnnnnnnnnnnnnnnnnnnnnnnnnnnnnnnnnnnnnnnnnnnnnnnnnnnnnnnnnnnnnnnnnnnnnnnnnnnnnnnnnnnnnnnnnnnnnnnnnnnnnnnnnnnnnnnnnnnnnnnnnnnnnnnnnnnnnnnnnnnnnnnnnnnnnnnnnnnnnnnnnnnnnnnnnnnnnnnnnnnnnnnnnnnnnnnnnnnnnnnnnnnnnnnnnnnnnnnnnnnnnnnnnnnnnnnnnnnnnnnnnnnnnnnnnnnnnnnnnnnnnnnnnnnnnnnnnnnnnnnnnnnnnnnnnnnnnnnnnnnnnnnnnnnnnnnnnnnnnnnnnnnnnnnnnnnnnnnnnnnnnnnnnnnnnnnnnnnnnnnnnnnnnnnnnnnnnnnnnnnnnnnnnnnnnnnnnnnnnnnnnnnnnnnnnnnnnnnnnnnnnnnnnnnnnnnnnnnnnnnnnnnnnnnnnnnnnnnnnnnnnnnnnnnnnnnnnnnnnnnnnnnnnnnnnnnnnnnnnnnnnnnnnnnnnnnnnnnnnnnnnnnnnnnnnnnnnnnnnnnnnnnnnnnnnnnnnnnnnnnnnnnnnnnnnnnnnnnnnnnnnnnnnnnnnnnnnnnnnnnnnnnnnnnnnnnnnnnnnnnnnnnnnnnnnnnnnnnnnnnnnnnnnnnnnnnnnnnnnnnnnnnnnnnnnnnnnnnnnnnnnnnnnnnnnnnnnnnnnnnnnnnnnnnnnnnnnnnnnnnnnnnnnnnnnnnnnnnnnnnnnnnnnnnnnnnnnnnnnnnnnnnnnnnnnnnnnnnnnnnnnnnnnnnnnnnnnnnnnnnnnnnnnnnnnnnnnnnnnnnnnnnnnnnnnnnnnnnnnnnnnnnnnnnnnnnnnnnnnnnnnnnnnnnnnnnnnnnnnnnnnnnnnnnnnnnnnnnnnnnnnnnnnnnnnnnnnnnnnnnnnnnnnnnnnnnnnnnnnnnnnnnnnnnnnnnnnnnnnnnnnnnnnnnnnnnnnnnnnnnnnnnnnnnnnnnnnnnnnnnnnnnnnnnnnnnnnnnnnnnnnnnnnnnnnnnnnnnnnnnncatttgtttacctgagcaatctgctgtatcctgtgcccctgatccacagggtggccatcgtcagtgagaaaggtgaagtgcggggatttctgcgtgtggctgtacaggccattgcagnnnnnnnnnnnnnnnnnnnnnnnnnnnnnnnnnnnnnnnnnnnnnnnnnnnnnnnnnnnnnnnnnnnnnnnnnnnnnnnnnnnagagtgacttttcgtctgttgcaatgactcgttctggtctgtccttggaggagttgaggattgtggaaggacaaggtcagagttctgaggtcatcactcctccagaagaaatcaatcggatgaatgacttggngatttgaagtcaagcactttgctggatggtaagatggtaatggaagggttttctgaagagattggcaaccacctgaaactgggcagtgccttcactttccgagtaacagtgttgcaggccagtggaatcctcccagagtatgcagatatcttctgtcagttcaannnnnnnnnnnnnnnnnnnnnnnnnnnnnnnnnnnnnnnnnnnnnnnnnnnnnnnnnnnnnnnnnnnnnnnnnnnnnnnnnnnnnnnnnnnnnnnnnnnnnnnnnnnnnnnnnnnnnnnnnnnnnnnnnnnnnnnnnnnnnnnnnnnnnnnnnnnnnnnnnnnnnnnnnnnnnnnnnnnnnnnnnnnnnnnnnnnnnnnnnnnnnnnnnnnnnnnnnnnnnnnnnnnnnnnnnnnnnnnnnnnnnnnnnnnnnnnnnnnnnnnnnnnnnnnnnnnnnnnnnnnnnnnnnnnnnnnnnnnnnnnnnnnnnnnnnnnnnnnnnnnnnnnnnnnnnnnnnnnnnnnnnnnnnnnnnnnnnnnnnnnnnnnnnnnnnnnnnnnnnnnnnnnnnnnnnnnnnnnnnnnnnnnnnnnnnnnnnnnnnnnnnnnnnnnnnnnnnnnnnnnnnnnnnnnnnnnnnnnnnnnnnnnnnnnnnnnnnnnnnnnnnnnnnnnnnnnnnnnnnnnnnnnnnnnnnnnnnnnnnnnnnnnnnnnnnnnnnnnnnnnnnnnnnnnnnnnnnnnnnnnnnnnnnnnnnnnnnnnnnnnnnnnnnnnnnnnnnnnnnnnnnnnnnnnnnnnnnnnnnnnnnnnnnnnnnnnnnnnnnnnnnnnnnnnnnnnnnnnnnnnnnnnnnnnnnnnnnnnnnnnnnnnnnnnnnnnnnnnnnnnnnnnnnnnnnnnnnnnnnnnnnnnnnnnnnnnnnnnnnnnnnngctggatcattgcatccagccggctgtcatcaccaaggatgtgtgcatggtcttctattcccgagatgccaagatctcaccaccacgctctctgcgtagcctctttggcagtggctactcgaagtcaccagattcgnnnnnnnnnnnnnnnnnnnnnnnnnnnnnnnnnnnnnnnnnnnnnnnnnnnnnnnnnnnnnnnnnnnnnnnnnnnnnnnnnnnnnnnnnnnnnnnnnnnnnnnnnnnnnnnnnnnnnnnnnnnnnnnnnnnnnnnnnnnnnnnnnnnnnnnnnnnnnnnnnnnnnnnnnnnnnnnnnnnnnnnnnnnnnnnnnnnnnnnnnnnnnnnnnnnnnnnnnnnnnnnnnnnnnnnnnnnnnnnnnnnnnnnnnnnnnnnnnnnnnnnnnnnnnnnnnnnnnnnnnnnnnnnnnnnnnnnnnnnnnnnnnnnnnnnnnnnnnnnnnnnnnnnnnnnnnnnnnnnnnnnnnnnnnnnnnnnnnnnnnnnnnnnnnnnnnnnnnnnnnnnnnnnnnnnnnnnnnnnnnnnnnnnnnnnnnnnnnnnnnnnnnnnnnnnnnnnnnnnnnnnnnnnnnnnnnnnnnnnnnnnnnnnnnnnnnnnnnnnnnnnnnnnnnnnnnnnnnnnnnnnnnnnnnnnnnnnnnnnnnnnnnnnnnnnnnnnnnnnnnnnnnnnnnnnnnnnnnnnnnnnnnnnnnnnnnnnnnnnnnnnnnnnnnnnnnnnnnnnnnnnnnnnnnnnnnnnnnnnnnnnnnnnnnnnnnnnnnnnnnnaccccagaagccaattcccgggcctctagtccctgcccagaatttgaacagtttcagattgtcccagctgtggaaacgccctatttggcccgagcaggaaaaaacgaatttctcaatcttgttccagatattgaagaaattagaccanagctcagtggtctctaagaaaggataccttcatttcaaggagccactttacagtaactgggctaaacattttgttgtcgtccgtcggccttacgtcttcatctataacagtgac

SEQ ID NO: 32197 - DNA, 603 bp, Macaca Mulatta
ttctgcaaagtaataggcttcttgcctcttttctttctggcatgttatggaaagatcattggaaatcatggcaatctatcaagcagtacaccagctcataagatcaaattctattgaatggtttgaggttgtagctctgtgaatagtagtttttaacatgcctgtactattgctaactgcgaaaacatactctttgtacaagaagtgcttctaagaagaatttcattgacattaatgacactgtatacaataaatgtgtagtttcttaatcgcactacctatgcaacactgtatattaggtttgtcatcctcatgtatttttatgtgacctgtatgtatactctaatctatgagttttatcacaaataaaaatgcaatccttcaaatgtgttataattaagaaaagaagtgagagactcagaacggaaaaaggtgaaacgaatggaagactatttcactaaaggagaaaagcttatttccactatggtttaaaactaagaggaactgtaaacattttcttttggctaaatcaacataactaagactttaccatgcttgtgggcagggttagccatatacatcaggggaatgaatggctcttat

SEQ ID NO: 32198 - DNA, 657 bp, Macaca Mulatta
gggtcagtctcaagctcaaggcatgatgcgatactctgagggagaaatgtgggccccatgggatcctacgctttgccctccgcaatccagctccccctccacccccagcccagtccagcaagcccagctacgcctacgctcctctccccaggagctggagcgccaggccttagccaaacacgtcagggcagaggccctgagctccacccttcggctggcccaagacgaggccctgcgggccaagaatctactgctgacagacaagatgaagccggagtgaggaaggaggctgagggcatgggaggagggtgagatcttggggaaagggcctgatctccccttccactcgaacaccccagcacctagccatgttgccatcaactccccactgcctcatgacagggagaagatggccactctggaccatctacatttgaagacgtgctccctccacgatcatctcagcaacctgccacttgaggggtccacaggaacaatggggggaggcagcagtgcgggaacccccccaaaacatgggggcttagcccctgaacaataaatggcccctcatgctggcatgaattctgtctgcttttttggcaccagagggctagtgaattgcccacacaccatgcactccctctatgcccaatgtga

SEQ ID NO: 32199 - DNA, 535 bp, Macaca Mulatta
  misc_feature (1)...(535): n = A,T,C or G
aggaaggaatgctagaaaaacacgaatatttgacatggatcctggatgttttagaaaagatcagaccaatggatgatgatcttcttaaactcttgctaccactaatgctgcagnnnnnnnnnnnnnnnnnnnnnnnnnnnnnnnnnnnnnnnnnnnnnnnnnnnnnnnnnnnnnnnnnnnnnnnnnnnnnnnnnnnnnnnnnnnnnnnnnnnnnnnnnnnnnnnnnnnnnnnnnnnnnnnnnnnnnnnnnnnnnnnnnnnnnnnnnnnnnnnnnnnnnnnnnnnnnnnnnnnnnnnnnnnnnnnnnnnnnnnnnnnnnnnnnnnnnnnnnnnnnnnnnnnnnnnnnnnnnnnnnnnnnnnnnnnnnnnnnnnnnnnnnnncagactgtcactctctgttgcccaagtgccttggtgtggaattattccacaaatgagaataagagcgcaaacccaggctcacccctggatctgctacaggtggccccttccagcctccccatgccgggtgggaacacggctttcaatcagcaggt

SEQ ID NO: 32200 - DNA, 275 bp, Macaca Mulatta
gcctcctttggtgaaggtgacacatcatgtgacctcttcagtgaccactctacggtgtcgggccctgaactactacccccagaacatcaccatgaagtggctgaaggataggcagtcaatggatgccaaggaggtcgaacctaaagacgtattgcccaatggggatgcgacctaccagggctggataaccttgactgtacccccaggggaagaacagagatatacttgccaggtggagcacccaggcctggatcagcccctccttgctttctggg

SEQ ID NO: 32201 - DNA, 806 bp, Macaca Mulatta
gggggcaagcgcgggggccatattagcagcggttattcgggcagccctggtggtttattttcccgcggagataagggctcagtggacatctgaagtcttcagggtcttccatctggaactatataaagttcagaaaacatgtctcgaagatatgactccaggaccactatattttctccagaaggtcgcttataccaagttgaatatgccatggaagctattggacatgcaggcacctgtttgggaattttagcaaatgatggtgttttgcttgcagcagagagacgcaacatccacaagcttctcgatgaagtctttttttctgaaaaaatttataaactcaatgaggacatggcttgcagtgtggcaggcataacttctgatgctaatgttctgactaatgaactaaggctcattgctcaaaggtatttattgcagtatcaggagccgataccttgtgagcagttggttacagcactatgtgatatcaagcaagcatatacacaatttggtggaaaacgtccatttggtgtttcattgctgtacattggttgggataagcactatggctttcagctctatcagagtgacccaagtggaaattacgggggatggaaaggccacatgcatttggaaataatagcgcttgcagcctgtgtcaatgtttgaaaccagactaccaaagaaaggagaaaattgacctttgaagtccaagcacctttggctttttaaccctattccaaagttcctaaaattaaagaaacccattggtggaatgttttttaaaacctctcccgccgttaaaa

SEQ ID NO: 32202 - DNA, 4220 bp, Macaca Mulatta
  misc_feature (1)...(4220): n = A,T,C or G
aaggctggttgggaaggtgatacctctcacagtttgctgggctcagtggggagataatattccctatgggagttgtgtaccctgttaacaatcagaggtgctacagaactccctgaagttaatggagccaactggaatgtgttgggagtttacaagagtgaacattatgtagaatgtgaatggatatacaaataaaagatgaaacgtaattcatacagaagttctgacaaagcaaacactgtcattacagtgtctgttgcctataaacctacaagcctgagctgtgccttctgtaacttttgaataatgttatgttattattgtgtaagttaaaatattcttggcttctttatnnnnnnnnnnnnnnnnnnnnnnnnnnnnnnnnnnnnnnnnnnnnnnnnnnnnnnnnnnnnnnnnnnnnnnnnnnnnnnnnnnnnnnnnnnnnnnnnnnnnnnnnnnnnnnnnnnnnnnnnnnnnnnnnnnnnnnnnnnnnnnnnnnnnnnnnnnnnnnnnnnnnnnnnnnnnnnnnnnnnnnnnnnnnnnnnnnnnnnnnnnnnnnnnnnnnnnnnnnnnnnnnnnnnnnnnnnnnnnnnnnnnnnnnnnnnnnnnnnnnnnnnnnnnnnnnnnnnnnnnnnnnnnnnnnnnnnnnnnnnnnnnnnnnnnnnnnnnnnnnnnnnnnnnnnnnnnnnnnnnnnnnnnnnnnnnnnnnnnnnnnnnnnnnnnnnnnnnnnnnnnnnnnnnnnnnnnnnnnnnnnnnnnnnnnnnnnnnnnnnnnnnnnnnnnnnnnnnnnnnnnnnnnnnnnnnnnnnnnnnnnnnnnnnnnnnnnnnnnnnnnnnnnnnnnnnnnnnnnnnnnnnnnnnnnnnnnnnnnnnnnnnnnnnnnnnnnnnnnnnnnnnnnnnnnnnnnnnnnnnnnnnnnnnnnnnnnnnnnnnnnnnnnnnnnnnnnnnnnnnnnnnnnnnnnnnnnnnnnnnnnnnnnnnnnnnnnnnnnnnnnnnnnnnnnnnnnnnnnnnnnnnnnnnnnnnnnnnnnnnnnnnnnnnnnnnnnnnnnnnnnnnnnnnnnnnnnnnnnnnnnnnnnnnnnnnnnnnnnnnnnnnnnnnnnnnnnnnnnnnnnnnnnnnnnnnnnnnnnnnnnnnnnnnnnnnnnnnnnnnnnnnnnnnnnnnnnnnnnnnnnnnnnnnnnnnnnnnnnnnnnnnnnnnnnnnnnnnnnnnnnnnnnnnnnnnnnnnnnnnnnnnnnnnnnnnnnnnnnnnnnnnnnnnnnnnnnnnnnnnnnnnnnnnnnnnnnnnnnnnnnnnnnnnnnnnnnnnnnnnnnnnnnnnnnnnnnnnnnnnnnnnnnnnnnnnnnnnnnnnnnnnnnnnnnnnnnnnnnnnnnnnnnnnnnnnnnnnnnnnnnnnnnnnnnnnnnnnnnnnnnnnnnnnnnnnnnnnnnnnnnnnnnnnnnnnnnnnnnnnnnnnnnnnnnnnnnnnnnnnnnnnnnnnnnnnnnnnnnnnnnnnnnnnnnnnnnnnnnnnnnnnnnnnnnnnnnnnnnnnnnnnnnnnnnnnnnnnnnnnnnnnnnnnnnnnnnnnnnnnnnnnnnnnnnnnnnnnnnnnnnnnnnnnnnnnnnnnnnnnnnnnnnnnnnnnnnnnnnnnnnnnnnnnnnnnnnnnnnnnnnnnnnnnnnnnnnnnnnnnnnnnnnnnnnnnnnnnnnnnnnnnnnnnnnnnnnnnnnnnnnnnnnnnnnnnnnnnnnnnnnnnnnnnnnnnnnnnnnnnnnnnnnnnnnnnnnnnnnnnnnnnnnnnnnnnnnnnnnnnnnnnnnnnnnnnnnnnnnnnnnnnnnnnnnnnnnnnnnnnnnnnnnnnnnnnnnnnnnnnnnnnnnnnnnnnnnnnnnnnnnnnnnnnnnnnnnnnnnnnnnnnnnnnnnnnnnnnnnnnnnnnnnnnnnnnnnnnnnnnnnnnnnnnnnnnnnnnnnnnnnnnnnnnnnnnnnnnnnnnnnnnnnnnnnnnnnnnnnnnnnnnnnnnnnnnnnnnnnnnnnnnnnnnnnnnnnnnnnnnnnnnnnnnnnnnnnnnnnnnnnnnnnnnnnnnnnnnnnnnnnnnnnnnnnnnnnnnnnnnnnnnnnnnnnnnnnnnnnnnnnnnnnnnnnnnnnnnnnnnnnnnnnnnnnnnnnnnnnnnnnnnnnnnnnnnnnnnnnnnnnnnnnnnnnnnnnnnnnnnnnnnnnnnnnnnnnnnnnnnnnnnnnnnnnnnnnnnnnnnnnnnnnnnnnnnnnnnnnnnnnnnnnnnnnnnnnnnnnnnnnnnnnnnnnnnnnnnnnnnnnnnnnnnnnnnnnnnnnnnnnnnnnnnnnnnnnnnnnnnnnnnnnnnnnnnnnnnnnnnnnnnnnnnnnnnnnnnnnnnnnnnnnnnnnnnnnnnnnnnnnnnnnnnnnnnnnnnnnnnnnnnnnnnnnnnnnnnnnnnnnnnnnnnnnnnnnnnnnnnnnnnnnnnnnnnnnnnnnnnnnnnnnnnnnnnnnnnnnnnnnnnnnnnnnnnnnnnnnnnnnnnnnnnnnnnnnnnnnnnnnnnnnnnnnnnnnnnnnnnnnnnnnnnnnnnnnnnnnnnnnnnnnnnnnnnnnnnnnnnnnnnnnnnnnnnnnnnnnnnnnnnnnnnnnnnnnnnnnnnnnnnnnnnnnnnnnnnnnnnnnnnnnnnnnnnnnnnnnnnnnnnnnnnnnnnnnnnnnnnnnnnnnnnnnnnnnnnnnnnnnnnnnnnnnnnnnnnnnnnnnnnnnnnnnnnnnnnnnnnnnnnnnnnnnnnnnnnnnnnnnnnnnnnnnnnnnnnnnnnnnnnnnnnnnnnnnnnnnnnnnnnnnnnnnnnnnnnnnnnnnnnnnnnnnnnnnnnnnnnnnnnnnnnnnnnnnnnnnnnnnnnnnnnnnnnnnnnnnnnnnnnnnnnnnnnnnnnnnnnnnnnnnnnnnnnnnnnnnnnnnnnnnnnnnnnnnnnnnnnnnnnnnnnnnnnnnnnnnnnnnnnnnnnnnnnnnnnnnnnnnnnnnnnnnnnnnnnnnnnnnnnnnnnnnnnnnnnnnnnnnnnnnnnnnnnnnnnnnnnnnnnnnnnnnnnnnnnnnnnnnnnnnnnnnnnnnnnnnnnnnnnnnnnnnnnnnnnnnnnnnnnnnnnnnnnnnnnnnnnnnnnnnnnnnnnnnnnnnnnnnnnnnnnnnnnnnnnnnnnnnnnnnnnnnnnnnnnnnnnnnnnnnnnnnnnnnnnnnnnnnnnnnnnnnnnnnnnnnnnnnnnnnnnnnnnnnnnnnnnnnnnnnnnnnnnnnnnnnnnnnnnnnnnnnnnnnnnnnnnnnnnnnnnnnnnnnnnnnnnnnnnnnnnnnnnnnnnnnnnnnnnnnnnnnnnnnnnnnnnnnnnnnnnnnnnnnnnnnnnnnnnnnnnnnnnnnnnnnnnnnnnnnnnnnnnnnnnnnnnnnnnnnnnnnnnnnnnnnnnnnnnnnnnnnnnnnnnnnnnnnnnnnnnnnnnnnnnnnnnnnnnnnnnnnnnnnnnnnnnnnnnnnnnnnnnnnnnnnnnnnnnnnnnnnnnnnnnnnnnnnnnnnnnnnnnnnnnnnnnnnnnnnnnnnnnnnnnnnnnnnnnnnnnnnnnnnnnnnnnnnnnnnnnnnnnnnnnnnnnnnnnnnnnnnnnnnnnnnnnnnnnnnnnnnnnnnnnnnnnnnnnnnnnnnnnnnnnnnnnnnnnnnnnnnnnnnnnnnnnnnnnnnnnnnnnnnnnnnnnnnnnnnnnnnnnnnnnnnnnnnnnntagcttgtgttcgtgcaactagacagtcccatctgggggtgatgggaaacaatgacagatcatcaggcattaggctttcataaggagtccacaacctaggtcccttgcttgctcagttcacagtagggtttgtactcctataagaatctaatgtggctgttgatctgacaggaggtagagctcaggcggtaatgccagtgatgggaagcagctgcttgctgacagctcacctcctgctgtgcggccctggggttggggacccctgccgtagagcctctccttcttagtcttttccctagcaaccccctgaggggggcccttggcatatttaggcccatgtggagggctcacaatttaaaaattaattcatagtagttatcgatatgtttctttatgtgtgaagctttgtgatttttttttggaggattgctttatcttggtgattagttgtaaaatagatgaacactgacaggtgaaaagtt

SEQ ID NO: 32203 - DNA, 132 bp, Macaca Mulatta
  misc_feature (1)...(132): n = A,T,C or G
caatccagcatctgtagagctgcaattcattatggtataatagacaatgatggtggttgggtagatatcactagacaaggaagaaaacattatttcatcaagtctaatagaaatggtattcagacaattggn

SEQ ID NO: 32204 - DNA, 471 bp, Macaca Mulatta
  misc_feature (1)...(471): n = A,T,C or G
tggatgatgatgattttggtgnttttgaggnaggctgcggagacttttgatggtggaaatggtgaaactcaaacaacatctcctgctattccttgggccgcctttcctnnnnnnnnnnnnnnnnnnnnnnnnnnnnnnnnnnnnnnnnnnnnnnnnnnnnnnnnnnnnnnnnnnnnnnnnnnnnnnnnnnnnnnnnnnnnnnnnnnnnnnnnnnnnnnnnnnnnnnnnnnnnnnnnnnnnnnnnnnnnnnnnnnnnnnnnnnnnnnnnnagattcagcaatcagcacacactcatctggatatctcactttttccattgggtttaactgatgaaaaaagtaatggaacaattgcccttgtgaatgattctgaggatcctggagccaatgtatctaacatacagcttcagcaaaaaatttcaagtctggagattaaactcaaagtatctgaagaagaaaaacagagaattaa

SEQ ID NO: 32205 - DNA, 536 bp, Macaca Mulatta
atattttcataagagaatatttactttcatgtgtatttaaaattattctcagccttttatttcatgaaggtaaaatttggacatagttatcagggatttcattatcataacatcattaattattatttaattcagtatactttgtattaatgtacagaattactacaggagacagaaaaattaatgaaggaaaaactagaagtacaatgtcaagctgaaaaagtacgtgatgaccttcaaaaacaagtgaaagctctagaaatagatgtggaagaacaagtcagtaggtttatagagctggaacaagaaaaaaatgctgaactaatggatttaagacagcaaaaccaagcattggaaaagcagttagaaaaaatgagaaaatttttagatgtaagtattctcaagttgaatattgatttttctcagtagaatgttctttgctagtatactagcctatgaattttaaatcatgaaaagactgttgaattagtttttcaatgttttattaggtgtcgattctgctaattgatcaaaag

SEQ ID NO: 32206 - DNA, 664 bp, Macaca Mulatta
  misc_feature (1)...(664): n = A,T,C or G
ggctggaccagacgactctgagcgatgagatgaggcaggagctgagggccctggagcagaagaagcctgagctgctcatcttcagcagannnnnnnnnnnnnnnnnnnnnnnnnnnnnnnnnnnnnnnnnnnnnnnnnnnnnnnnnnnnnnnnnnnnnnnnnnnnnnnnnnnnnnnnnnnnnnnnnnnnnnnnnnnnnnnnnnnnnnnnnnnnnnnnnnnnnnnnnnnnnnnnnnnnnnnnnnnnnnnnnnnnnnnnnnnnnnnnnnnnnnnnnngagggaagctccccagaggtagaacaggtggaacccttgtgcctgccttcacctgcctctctaggggnnnnnnnnnnnnnnnnnnnnnnnnnnnnnnnnnnnnnnnnnnnnnnnnnnnnnnnnnnnnnnnnnnnnnnnnnnnnnnnnnnnnnnnnnnnnnnnngagttcacttccctgtagctggctcctaccgctggcccaacacgggtctctgctttgtggtgagagaagcggtgaccactgagattgaattctgtgtgtgggaccagttcctgggtgagatcaacccacagcacagctggatggtggcagggcctctgttggacatcaaggctgagcccggagccgtggaagctgtgcacctccctcactttgtggctctccaagg

SEQ ID NO: 32207 - DNA, 534 bp, Macaca Mulatta
gggagaacaccgaaaacaataactcctcctccaacaagcagaaccaactctctcctctggaagggggcaagccgctcatgtccagctcagaagaggaattctcacctccccaaagtccagaccagaactcggtccttctgctgcagggcaatatgggccacaccaggagctcaaactattctctcccgggcttaacagcttcgcagcccagtcatggtctgcaggcccaccagcatcagctccaagactctctgctcggccccctcacctccagtctggtggacttgggttcctaagtggggagggactggggcctcgaagggatgcctggagcagcaaccactgcagcgactagggacacttgtaaatagaaatcaggaacatttttgcagcttgtttctggagttctttgcgcataaaggaatggtggactttcacaaatatctttttaaaaatcaaaaccaacagcgatctcaagcttaatctccctcgtctctccaactctttccacttttgcattttccttcccaatgc

SEQ ID NO: 32208 - DNA, 936 bp, Macaca Mulatta
  misc_feature (1)...(936): n = A,T,C or G
ggcttccatgcttacaagtcctgatggaccatttataaatttatctagactgaatttaacaaaatattcccagaaacctaagttggcaaagnnnnnnnnnnnnnnnnnnnnnnnnnnnnnnnnnnnnnnnnnnnnnnnnnnnnnnnnnnnnnnnnnnnnnnnnnnnnnnnnnnnnnnnnnnnnnnnnnnnnnnnnnnnnnnnnnnnnnnnnnnnnnnnnnnnnnnnnnnnnnnnnnnnnnnnnnnnnnnnnnnnnnnnnnnnnnnnnnnnnnnnnnnnnnnnnnnnnnnnnnnnnnnnnnnnnnnnnnnnnnnnnnnnnnnnnnnnnnnnnnnnnnnnnnnnnnnnnnnnnnnnnnnnnnnnnnnnnnnnnnnnnnnnnnnnnnnnnnnnnnnnnnnnnnnnnnnnnnnnnnnnnnnnnnnnnnnnnnnnnnnnnnnnnnnnnnnnnnnnnnnnnnnnnnnnnnnnnnnnnnnnnnnnnnnnnnnnnnnnnnnnnnnnnnnnnnnnnnnnnnnnnnnnnnnnnnnnnnnnnnnnnnnnnnnnnnnnnnnnnnnnnnnnnnnnnnnnnnnnnnnnnnnnnnnnnnnnnnnnnnnnnnnnnnnnnnnnnnnnnnnnnnnnnnnnnnnnnnnnnnnnnnnnnnnnnnnnnnnnnnnnnnnnnnnnnnnnnnnnnnnnnnnnnnnnnnnnnnnnnnnnnnnnnnnnnnnnnnnnnnnnnnnnnnnnnnnnnnnnnnnnnnnnnnnnnnnnnnnnnnnnnnnnnnnnnnnnnnnnnnnnnnnnnnnnnnnnnnnnnnnnnnnnnnnnnnnnnnnnnnggaataggagataccaatttggcccatcagtgcttcaggctggctctggtcaacaacaacaaccacgccgaggcctacaacaacctggctgtgctggagatgcggaagggccacgttgaacagg

SEQ ID NO: 32209 - DNA, 1339 bp, Macaca Mulatta
  misc_feature (1)...(1339): n = A,T,C or G
ggtgcaggagacattgttgcaatcatgatcggcaatctgaaaggcacaaaaattctacaatctattcaaagaggcatacaagtgacaatggtcatagaagtggggaaaaaacacggcccttgggtgaatcactattcaatttttttcgtttctgtgtccttttttattattacggcagcaactgtgggctattttatcttnnnnnnnnnnnnnnnnnnnnnnnnnnnnnnnnnnnnnnnnnnnnnncagaggcaattaaaggcagatgctaaaaaagctattggaaggcttcaactacgcacactgaaacaaggagacaaggnnnnnnnnnnnnnnnnnnnnnnnnnnnnnnnnnnnnnnnnnnnnnnnnnnnnnnnnnnnnnnnnnnnnnnnnnnnnnnnnnnnnnnnnnnnnnnnnnnnnnnnnnnnnnnnnnnnnnnnnnnnnnnnnnnnnnnnnnnnnnnnnnnnnnnnnnnnnnnnnnnnnnnnnnnnnnnnnnnnnnnnnnnnnnnnnnnnnnnnnnnnnnnnnnnnnnnnnnnnnnnnnnnnnnnnnnnnnnnnnnnnnnnnnnnnnnnnnnnnnnnnnnnnnnnnnnnnnnnnnnnnnnnnnnnnnnnnnnnnnnnnnnnnnnnnnnnnnnnnnnnnnnnnnnnnnnnnnnnnnnnnnnnnnatgaaaatctacagctggtaaaccatgaagcaaattctgtgtcagtggatgttgttcctcatgttgacaacccaacttttgaagaagatgaaactcctgatcaagagactgctgttcgagaaattaaatcttaaagtctgtgtcaatagaaaacttgaaccgttagtaataacagaactgccaatcagggcctagtttctattaataaactggataaatttaataaaataagagtgatactgaaagtgcagagatgactaatattatgctatagttaaatggcttaaaatatttaacctgttaacttttttccacaaactcattataatgtttttcataggcaagtttcctctcaatagtgatagcaacatttttagacattcaaaactgtcttcaagaagtcatgtttttcatttataagaattttcttataaaaacatgttgcttttaaaatgtggagtagctgtaatcactttattttatgatagtatcttaatgaaaaatactactactttagcttgggctatatgtgtcagggtttttctccaggtgcttatattgatctggaattgtaatgtaaaaagcagtgcaaacttaggctagttctttcttgaaatgtctatttaagctactttaagttaacagaacaagagataagcaaaatattca

SEQ ID NO: 32210 - DNA, 349 bp, Macaca Mulatta
  misc_feature (1)...(349): n = A,T,C or G
aggtggcgtctctagccatggacagtctctgccgtggagtgtttgcaggcaacagccgtgagctcagcatcaggtcctgttttcccagtctcttccaagctgagcaaacccatcgttccgtattactgggcctgctgctgggggcagnnnnngcagggcggaccccacagccagactcagcactcattcgccaggccttggctgagcgctggagccagtggtcacttcgtggaggtctagagatgctgcctcaggcccttgaaacccacctaactagtaggggggtcagtgttctcagaggtcagccagtctgtgggctcagcctccaggcagaagggcgctggaaggt

SEQ ID NO: 32211 - DNA, 1672 bp, Macaca Mulatta
  misc_feature (1)...(1672): n = A,T,C or G
atggccgccaagagcgagtcatgtttgacaaaattacatctcgaatccagaagctttgttatggactcaatatggattttgttgatcctgnnnnnnnnnnnnnnnnnnnnnnnnnnnnnnnnnnnnnnnnnnnnnnnnnnnnnnnnnnnnnnnnnnnnnnnnnnnnnnnnnnnnnnnnnnnnnnnnnnnnnnnnnnnnnnnnnnnnnnnnnnnnnnnnnnnnnnnnnnnnnnnnnnnnnnnnnnnnnnnnnnnnnnnnnnnnnnnnnnnnnnnnnnnnnnnnnnnnnnnnnnnnnnnnnnnnnnnnnnnnnnnnnnnnnnnnnnnnnnnnnnnnnnnnnnnnnnnnnnnnnnnnnnnnnnnnnnnnnnnnnnnnnnnnnnnnnnnnnnnnnnnnnnnnnnnnnnnnnnnnnnnnnnnnnnnnnnnnnnnnnnnnnnnnnnnnnnnnnnnnnnnnnnnnnnnnnnnnnnnnnnnnnnnnnnnnnnnnnnnnnnnnnnnnnnnnnnnnnnnnnnnnnnnnnnnnnnnnnnnnnnnnnnnnnnnnnnnnnnnnnnnnnnnnnnnnnnnnnnnnnnnnnnnnnnnnnnnnnnnnnnnnnnnnnnnnnnnnnnnnnnnnnnnnnnnnnnnnnnnnnnnnnnnnnnnnnnnnnnnnnnnnnnnnnnnnnnnnnnnnnnnnnnnnnnnnnnnnnnnnnnnnnnnnnnnnnnnnnnnnnnnnnnnnnnnnnnnnnnnnnnnnnnnnnnnnnnnnnnnnnnnnnnnnnnnnnnnnnnnnnnnnnnnnnnnnnnnnnnnnnnnnnnnnnnnnnnnnnnnnnnnnnnnnnnnnnnncagctcgatatgtggatcaaggtgggaacaannnnnnnnnnnnnnnnnnnnnnnnnnnnnnnnnnnnnnnnnnnnnnnnnnnnnnnnnnnnnnnnnnnnnnnnnnnnnnnnnnnnnnnnnnnnnnnnnnnnnnnnnnnnnnnnnnnnnnnnnnnnnnnnnnnnnnnnnnnnnnnnnnnnnnnnnnnnnnnnnnnnnnnnnnnnnnnnnnnnnnnnnnnnnnnnnnnnnnnnnnnnnnnnnnnnnnnnnnnnnnnnnnnnnnnnnnnnnnnnnnnnnnnnnnnnnnnnnnnnnnnnnnnnnnnnnnnnnnnnnnnnnnnnnnnnnnnnnnnnnnnnnnnnnnnnnnnnnnnnnnnnnnnnnnnnnnnnnnnnnnnnnnnnnnnnnnnnnnnnnnnnnnnnnnnnnnnnnnnnnnnnnnnnnnnnnnnnnnnnnnnnnnnnnnnnnnnnnnnnnnnnnnnnnnnnnnnnnnnnnnnnnnnnnnnnnnnnnnnnnnnnnnnnnnnnnnnnnnnnnnnnnnnnnnnnnnnnnnnnnnnnnnnnnnnnnnnnnnnnnnnnnnnnnnnnnnnnnnnnnnnnnnnnnnnnnnnnnnnnnnnnnnnnnnnnnnnnnnnnnnnnnnnnnnnnggcatgcctatcaaataaacgtcatcgccccattggaattggggtacaaggtctggcagatgcttttatcctgatgagatacccttttgagagtgcagaagcccaattactaaataagcagatctttgaaactatttattatggcgccctggaagccagctgtgaccttgccaaggagcagggcccatacgaaacctatgagggctctccagttagcaaaggan

SEQ ID NO: 32212 - DNA, 155 bp, Macaca Mulatta
acccagaagtccacattcccctcgagaatctacagcagtttcctgccttcaattcctatacctgctcctccgattctgctttgggtcccaccagcaccgagggccacggggccctctccctttctcctctcagcagaagtccaggttcccatgca

SEQ ID NO: 32213 - DNA, 1960 bp, Macaca Mulatta
  misc_feature (1)...(1960): n = A,T,C or G
gcccggaagggaagagctcttcgcgcagccccggcccgcacccccgctcctggagctccagccgttcgccctccaaatcgcgctcgcgctccgcggagaagcggccccgcagccccagccgctcgccctcgcccaagaagcccctcagccgngggacaaggacggcgagggccgcgcaaggcactccgaggccgaggccgcccgcgcccggcgccgctcccgcagctactcgcccatccgcaagcggcgccgggactcgccgagcttcatggagccgcggcgcatcaccannnnnnnnnnnnnnnnnnnnnnnnnnnnnnnnnnnnnnnnnnnnnnnnnnnnnnnnnnnnnnnnnnnnnnnnnnnnnnnnnnnnnnnnnnnnnnnnnnnnnnnnnnnnnnnnnnnnnnnnnnnnnnnnnnnnnnnnnnnnnnnnnnnnnnnnnnnnnnnnnnnnnnnnnnnnnnnnnnnnnnnnnnnnnnnnnnnnnnnnnnnnnnnnnnnnnnnnnnnnnnnnnnnnnnnnnnnnnnnnnnnnnnnnnnnnnnnnnnnnnnnnnnnnnnnnnnnnnnnnnnnnnnnnnnnnnnnnnnnnnnnnnnnnnnnnnnnnnnnnnnnnnnnnnnnnnnnnnnnnnnnnnnnnnnnnnnnnnnnnnnnnnnnnnnnnnnnnnnnnnnnnnnnnnnnnnnnnnnnnnnnnnnnnnnnnnnnnnnnnnnnnnnnnnnnnnnnnnnnnnnnnnnnnnnnnnnnnnnnnnnnnnnnnnnnnnnnnnnnnnnnnnnnnnnnnnnnnnnnnnnnnnnnnnnnnnnnnnnnnnnnnnnnnnnnnnnnnnnnnnnnnnnnnnnnnnnnnnnnnnnnnnnnnnnnnnnnnnnnnnnnnnnnnnnnnnnnnnnnnnnnnnnnnnnnnnnnnnnnnnnnnnnnnnnnnnnnnnnnnnnnnnnnnnnnnnnnnnnnnnnnnnnnnnnnnnnnnnnnnnnnnnnnnnnnnnnnnnnnnnnnnnnnnnnnnnnnnnnnnnnnnnnnnnnnnnnnnnnnnnnnnnnnnnnnnnnnnnnnnnnnnnnnnnnnnnnnnnnnnnnnnnnnnnnnnnnnnnnnnnnnnnnnnnnnnnnnnnnnnnnnnnnnnnnnnnnnnnnnnnnnnnnnnnnnnnnnnnnnnnnnnnnnnnnnnnnnnnnnnnnnnnnnnnnnnnnnnnnnnnnnnnnnnnnnnnnnnnnnnnnnnnnnnnnnnnnnnnnnnnnnnnnnnnnnnnnnnnnnnnnnnnnnnnnnnnnnnnnnnnnnnnnnnnnnnnnnnnnnnnnnnnnnnnnnnnnnnnnnnnnnnnnnnnnnnnnnnnnnnnnnnnnnnnnnnnnnnnnnnnnnnnnnnnnnnnnnnnnnnnnnnnnnnnnnnnnnnnnnnnnnnnnnnnnnnnnnnnnnnnnnnnnnnnnnnnnnnnnnnnnnnnnnnnnnnnnnnnnnnnnnnnnnnnnnnnnnnnnnnnnnnnnnnnnnnnnnnnnnnnnnnnnnnnnnnnnnnnnnnnnnnnnnnnnnnnnnnnnnnnnnnnnnnnnnnnnnnnnnnnnnnnnnnnnnnnnnnnnnnnnnnnnnnnnnnnnnnnnnnnnnnnnnnnnnnnnnnnnnnnnnnnnnnnnnnnnnnnnnnnnnnnnnnnnnnnnnnnnnnnnnnnnnnnnnnnnnnnnnnnnnnnnnnnnnnnnnnnnnnnnnnnnnnnnnnnnnnnnnnnnnnnnnnnnnnnnnnnnnnnnnnnnnnnnnnnnnnnnnnnnnnnnnnnnnnnnnnnnnnnnnnnnnnnnnnnnggggccctcagggatctcacaaagtcttccttggcccaaccaggcagatgcnccgggctccagtggggggaagggtctggggtctggtccgggttccctgctttctctgtgtcccccctccctctttctccgcggtgcggataaaaattggactcgaataaaacccttggtgcccg

SEQ ID NO: 32214 - DNA, 478 bp, Macaca Mulatta
taataagtcatgggaaattatgctcatggttgattttgcattaaaaacgttgtcacatcctgagcttccgtctcgtctgacatttgtcatggtgcagtggggctgtggctcccggggcctcctgacctgagcatcaggagtgctggcggctaactccgctcgtgtctttatttgggagccatgttacccacaagaccagttagggagttagggagcagatctcccgtcctaaagcacccagcaccctggttgagttctgcaccaacactgcagggttcccacaagggcatgggatgccccactggggtgtgagcgagggccaggaggaggagcagacgccgcgtcagccaagtcgaggctgaacaggcaggagggtcattactgtctgagattactcgaggagcaagggattgcaggtgaacctcctccaccatgtttgtgtgcttcatgctccagcaaggggcaggggcagagacaa

SEQ ID NO: 32215 - DNA, 1070 bp, Macaca Mulatta
gggattgaaaaaagggaattttttaagctgcagaagatcataagtaaacaagatgacatgatgacagtgaatactaatgaaactggatgtcaggaagcaacggtgaaagaacctgaaattaacacaactcttcagatgcgtttctttggaaaaagaggacaaagaaaacttcattataaagaatttcgaagatttatggaaaatttacaaacggagattcaagaaatggaattccttcagttttctaaaggtttgagtttcatgagaaaagaagactttgcagagtggctactttttttcactaacactgaaaataaagatatttattggaaaaatgtgagagagaagttgtcagcaggagagagcattagtttggatgaattcaagtcattttgccattttacaacccagttggaagactttgctattgccatgcagatgttcagtttagctcatcgtcctgtcagactagccgagtttaagagagctgtgaaagtagcaacaggacaagaactctcaaacaatattttggacaccgtcttcaagatctttgatttggatggtgatgaatgtcttagtcatgaagagtttcttggggtgttaaaaaacagaatgcatcgaggtttatgggtgccacaacatcagagtatacaagaatactgggagtgtgtgaagaaagaaagcattaaaggagtaaaagaaagtctgggaaacaagcccggaaaaaggtcttttttaataaaagatataatagtatggcaattatattgttccaaatgtcaaaatttgtgatattttagaagtactagctgtttatcttcctaagtcttcattgatattctttgtgatataagcatgtcttgtacttactttctgattcataattttattaaagaacttagtagaaagaaaagtaagtataaaaatagatactggattctgtcaaaaggcctagatttgaaatggtgttttgtacttcggtaagatggaaagcttagtgattcactgatttcttggacactctaataatgatatgctttctggaaggataaaacaaatacatacgggaa

SEQ ID NO: 32216 - DNA, 800 bp, Macaca Mulatta
  misc_feature (1)...(800): n = A,T,C or G
agggggtagaagtagttttaattcaacatcaaaacttaagatgggcctgtatgagacaggaaaaaccaacaggtttatctgaaggaccccaggtaagatgttaatctcccagcccacctcaacccagaggctactcttgacttagacctatactgaaagatctctgtcacatccaactggaaattccgggaaccaaaaagatcatccctatgggcttggaccacttacagtgtgataaggcctactacacattaggaagtggcagttctttactcgtcccctttcatcggtgcctggtactctggcaaatgatgatggggtgggagactttccattaaatcaatcaggaatgagtcaatcagcctttgggtctttagtccgggggacttggggctgagagagtataaataaccctgggctgtccagccttaatagacttctcttacattttcgtcctgtagcacgctgcctgccaaagtagtcctggcagctgggccatctctgtaggatcgnnnnnnnnnnnnnnnnnnnnnnnnnaaagaaagaaagagggaaaacgagctggtggtttgatcatttctgccatgatgtttacaagatggcgaccaccaaagtcaaatgactaacctatctatgaacaacagtagtttctcagggtcactgtccttgaacccaacagtcccttatgagcgtcactgcccaccaaaggtcaatgttaagagaggaagagagggaggaggggtaggactgcaggggccactacagactcgcttaggtagaaactattggtgcttgactct

SEQ ID NO: 32217 - DNA, 2030 bp, Macaca Mulatta
  misc_feature (1)...(2030): n = A,T,C or G
gagattccgtgccccttgtcgggccgcttgtttggctgctgccgtcacctcatggcgacgcgggtagaggaggcagcgcggggaagaggcggcggcgccgaagaggcgactgaggccggacggggcggacggcgacgcagcccgcggcagaagnnnnnnnnnnnnnnnnnnnnnnnnnnnnnnnnnnnnnnnnnnnnnnnnnnnnnnnnnnnnnnnnnnnnnnnnnnnnnnnnnnnnnnnnnnnnnnnnnnnnnnnnnnnnnnnnnnnnnnnnnnnnnnnnnnnnnnnnnnnnnnnnnnnnnnnnnnnnnnnnnnnnnnnnnnnnnnnnnnnnnnnnnnnnnnnnnnnnnnnnnnnnnnnnnnnnnnnnnnnnnnnnnnnnnnnnnnnnnnnnnnnnnnnnnnnnnnnnnnnnnnnnnnnnnnnnnnnnnnnnnnnnnnnnnnnnnnnnnnnnnnaggaaaagaagttttattactgatgcaagccctaaacaccctttcaaccccagaggagaagctggcagctctctgtaagaaatatgctgatcttnnnnnnnnnnnnnnnnnnnnnnnnnnnnnnnnnnnnnnnnnnnnnnnnnnnnnnnnnnnnnnnnnnnnnnnnnnnnnnnnnnnnnnnnnnnnnnnnnnnnnnnnnnnnnnnnnnnnnnnnnnnnnnnnnnnnnnnnnnnnnnnnnnnnnnnnnnnnnnnnnnnnnnnnnnnnnnnnnnnnnnnnnnnnnnnnnnnnnnnnnnnnnnnnnnnnnnnnnnnnnnnnnnnnnnnnnnnnnnnnnnnnnnaatgaaatttcagccctagctggagcagcacgacatccacaacgccaaactccgacaggagaacatcgagctgggggagaagctgaagaagctcatcgaacagtatgcactgagggaagagnagcacattgataaggtgttcaaacataaggaaaactgcacacagctcgtggatgccaaactgcagcaaactacacaactgataaaagaagctgannnnnnnnnnnnnnnnnnnnnnnnnnnnttattaaaagaagcgacagaatcgaggcacaaatacgaacaaatgaaacagcaagaagtacaactaaaacagcagnnnnnnnnnnnnnnnnnnnnnnnnnnnnnnnnnnnnnnnnnnnnnnnnnnnnnnnnnnnnnnnnnnnnnnnnnnnnnnnnnnnnnnnnnnnnnnnnnnnnnnnnnnnnnnnnnnnnnnnnnnnnnnncaataatatggcgtaccaaatgggaaaacaataataaagcacttctgcaaatggctgaagagnagaaaacagtccgtgataaagagtacaaggcccttcaaataaaactggaacggttagagaagctgtgcagggctcttcaaacagaaaggaatgagctcaatgagaaggtagaagtcctgaaagagcaggtatccctcaaagcggcnntcaaagcggctgacagggatttagcaacacctgtgatacagccctgtgctgctctggattctcacaaggagctgaacacttcctcgaaaagagccctgggagcgtacctggaggccgagtccaagagccagagaagcgccgtgcaaaagcccccgtccacaggctctgctccggccattgagtcggttgactaagatgaggtgtgatcactgtattgagagatatattttgtgtataactttctctgttagtagttaactattggttttgtggtgaaaattttcttactttttctaccatatctgtattttcttagaactactggacttacatggtacaggaggctgcttagcagttttgaatagttttaatctataaattttcctcggctgtgttgcacatcggcctcattctccctccactggaatgcatgtgttcattgccttgtcctttctctccctgctacttgcacattatcatcctaatgaaaatttcactgacagggccgaccattacaagggaactttgttctgatgatggttccttaatgtgaaaacaatattaatttaaacgtcttag

SEQ ID NO: 32218 - DNA, 174 bp, Macaca Mulatta
gatgtgttattcacccacttcattcatctttatccagtgaagagcagcaggctgtgtttgtaaaacctcctgtaggagtaactaagattataatttccaccaacattgctgagacatccataaccatcgatgatgttgtctatgtcatcgattctgggaaaatgaaagaaaaga

SEQ ID NO: 32219 - DNA, 1518 bp, Macaca Mulatta
  misc_feature (1)...(1518): n = A,T,C or G
ccccagcagacccccagcaggatgggcagggaaggggaagggactcatagcagcctgggatgctcctccctcgggatgattgtcattgcagacctgagcacagaccctgctgagctggaagagagggctctggaggtggctgggcccgatgggcaggccagcgccatgtcacctgcctctcccaagaggaaggccgctgatggaggctacaggagggccctgccaggctgcaccccactcactggggaaaccgcaggagaaatgggggaggcagggcaggatgacaagccccctggcgatgtcccagtgggcccgacagcatacctggctctggcacccgggagtggagagtccatgatgggcacaggagattccaaccatgcagccacggacacgggtccatgtgtcgatcaaaagcaggagccaggccctactccagaggcagccgagtcaggtggccaggacctcgaacaagaccttgaggggctccgtgtgtccccgcaagcttctgttctgccagaacacagagaagcagcagacagccctctccaggagcctggggcccagcagggcatagacaccacctcagacctggcagggcagcaagaccacctgcctcattctgcagaccaggccgcctgggcagactcttcagctgtggaactcgacttcctgctggacagccagatacaggatgccctggacgcttctgactttgaagccccgcctgagcannnnnnnnnnnnnnnnnnnnnnnnnnnnnnnnnnnnnnnnnnnnnnnnnnnnnnnnnnnnnnnnnnnnnnnnnnnnnnnnnnnnnnnnnnnnnggaccttcgtggggatccaggcctctgaggcctccaggatggaagacgccaccaacatcgtgcatggcctcatcgttgagctctctaacctgaannnnnnnnnnnnnnnnnnnnnnnnnnnnnnnnnnnnnnnnnnnnnnnnnnnnnnnnnnnnnnnnnnnnnnnnnnnnnnnnnnnnnnnnnnnnnnnnnnnnnnnnnnnnnnnnnnnnnnnnnnnnnnnnnnnnnnnnnnnnnnnnnnnnnnnnnnnnnnnnnnnnnnnnnnnnnnnnnnnnnnnnnnnnnnnnnnnnnnnnnnnnnnnnnnnnnnnnnnnnnnnnnnnnnnnnnnnnnnnnnnnnnnnnnnnnnnnnnnnnnnnnnnnnnnnnnnnnnnnnnnnnnnnnnnnnnnnnnnnnnnnnnnnnnnnnnnnnnnnnnnnnnnnnnnnnnnnnnnnnnnnnnnnnnnnnnnnnnnnnnnnnnnnnnnnnnnnnnnnnnnnnnnnnnnnnnnnnnnnnnnnnnctccaggaaaccggccacctccaagcagggcccatcctgtccggatttgcaaattttaggctcctganccaagtatggaaggttcagaatttgtttctttcctggaggagaagagagctccctttgttttctttctccctatttccattttatttcttctgggaagacccgtaataaatgattctgtagagg

SEQ ID NO: 32220 - DNA, 1396 bp, Macaca Mulatta
  misc_feature (1)...(1396): n = A,T,C or G
caagctggtgtctaagaactacccggatctgtccttgggagactactctctgctctggaaagcccacaagaagctcacccgctcagccctgctgctgggcatgcgtgactccatggagcccgtggtggagcagctgacccaggagttctgnnagcgcatgagagcccaggccggcacccctgtggccattgaggaggaattctctctcctcacctgcagcatcatctgtcacctcaccttcggagacaagatcaaggnaggaggacaacttagtgcctgcctattacaaatgtatccaggagnnnnnnnnnnnnnnnnnnnnnnnnnnnnnnnnnnnnnnnnnnnnnnnnnnnnnnnnnnnnnnnnnnnnnnnnnnnnnnnnnnnnnnnnnnnnnnnnnnnnnnnnnnnnnnnnnnnnnnnnnnnnnnnnnnnnnnnnnnnnnnnnnaggagagcttggtggcaggccagtggagggacatgatggactacatgctccaggtggtggcacagccgagcatggaagagggctctggacagctcctggaagggcacgtgcacatggctgcagagaacatcctcatcggtggcactgagaccaccgcaaacactctctcctgggccgtgnnnnnnnnnnnnnnnnnnnnnnagattcagcagcgactgcaggaggagctagaccacgaactaggccccagtacctccagctcccgggtcccctacaaggaccgtgcacggctgcccttgctcaaaaacaccatcgctgaggtgctgcgcctgcggcccgttgtgcccctggccctgccccaccgcaccacacggcccagcannagcatctccggctatgacatccctgagggcacagtcatcatcccgaacctccaaggcgcccacctggatgagatggtctgggagaggccacatgagttctggcctgngatcgcttcctggagccaggcaagaactccagagcgctggccttcggctgcggggcgcgtgtgtgcctgggagagcccttggcgcgcctggagctcttcgtggtgctgacccgactgctgcaggccttcacgctgctgcccccgggggacgccctgccctccctgcagcccctgccccactgcagtgtcatcctcaagatgcagcctttccaagtgtggctgcagccccgggggttgggggtccacagcctgggccagagccagtgacggggcaggacggatgccagccgggtgcctcagtttctcctttattgctcccgtacgatcccctccccccactgtaaacatagtgctgcgagatcgctggcggagaaggcttcctccagtggctgggtggtgaggggccctggctcttctctcggggcgacccctcagtgctcggcagtcatactggggtgc

SEQ ID NO: 32221 - DNA, 2855 bp, Macaca Mulatta
  misc_feature (1)...(2855): n = A,T,C or G
cagaggcaggtcttgcagcacctccataccgtgcagctgaggctgcagccccaggaggcccctggcaccgaaaccagactacaggagctcagtgtagatgaagatgaagatgaggaggaggaggcggcagccacagcggagtgcaaagccctggaggccagtgaggtggagctctcagannnnnnnnnnnnnnnnnnnnnnnnnnnnnnnnnnnnnnnnnnnnnnnnnnnnnnnnnnnnnnnnnnnnnnnnnnnnnnnnnnnnnnnnnnnnnnnnnnnnnnnnnnnnnnnnnnnnnnnnnnnnnnnnnnnnnnnnnnnnnnnnnnnnnnnnnnnnnnnnnnnnnnnnnnnnnnnnnnnnnnnnnnnnnnnnnnnnnnnnnnnnnnnnnnnnnnnnnnnnnnnnnnnnnnnnnnnnnnnnnnnnnnnnnnnnnnnnnnnnnnnnnnnnnnnnnnnnnnnnnnnnnnnnnnnnnnnnnnnnnnnnnnnnnnnnnnnnnnnnnnnnnnnnnnnnnnnnnnnnnnnnnnnnnnnnnnnnnnnnnnnnnnnnnnnnnnnnnnnnnnnnnnnnnnnnnnnnnnnnnnnnnnnnnnnnnnnnnnnnnnnnnnnnnnnnnnnnnnnnnnnnnnnnnnnnnnnnnnnnnnnnnnnnnnnnnnnnnnnnnnnnnnnnnnnnnnnnnnnnnnnnnnnnnnnnnnnnnnnnnnnnnnnnnnnnnnnnnnnnnnnnnnnnnnnnnnnnnnnnnnnnnnnnnnnnnnnnnnnnnnnnnnnnnnnnnnnnnnnnnnnnnnnnnnnnnnnnnnnnnnnnnnnnnnnnnnnnnnnnnnnnnnnnnnnnnnnnnnnnnnnnnnnnnnnnnnnnnnnnnnnnnnnnnnnnnnnnnnnnnnnnnnnnnnnnnnnnnnnnnnnnnnnnnnnnnnnnnnnnnnnnnnnnnnnnnnnnnnnnnnnnnnnnnnnnnnnnnnnnnnnnnnnnnnnnnnnnnnnnnnnnnnnnnnnnnnnnnnnnnnnnnnnnnnnnnnnnnnnnnnnnnnnnnnnnnnnnnnnnnnnnnnnnnnnnnnnnnnnnnnnnnnnnnnnnnnnnnnnnnnnnnnnnnnnnnnnnnnnnnnnnnnnnnnnnnnnnnnnnnnnnnnnnnnnnnnnnnnnnnnnnnnnnnnnnnnnnnnnnnnnnnnnnnnnnnnnnnnnnnnnnnnnnnnnnnnnnnnnnnnnnnnnnnnnnnnnnnnnnnnnnnnnnnnnnnnnnnnnnnnnnnnnnnnnnnnnnnnnnnnnnnnnnnnnnnnnnnnnnnnnnnnnnnnnnnnnnnnnnnnnnnnnnnnnnnnnnnnnnnnnnnnnnnnnnnnnnnnnnnnnnnnnnnnnnnnnnnnnnnnnnnnnnnnnnnnnnnnnnnnnnnnnnnnnnnnnnnnnnnnnnnnnnnnnnnnnnnnnnnnnnnnnnnnnnnnnnnnnnnnnnnnnnnnnnnnnnnnnnnnnnnnnnnnnnnnnnnnnnnnnnnnnnnnnnnnnnnnnnnnnnnnnnnnnnnnnnnnnnnnnnnnnnnnnnnnnnnnnnnnnnnnnnnnnnnnnnnnnnnnnnnnnnnnnnnnnnnnnnnnnnnnnnnnnnnnnnnnnnnnnnnnnnnnnnnnnnnnnnnnnnnnnnnnnnnnnnnnnnnnnnnnnnnnnnnnnnnnnnnnnnnnnnnnnnnnnnnnnnnnnnnnnnnnnnnnnnnnnnnnnnnnnnnnnnnnnnnnnnnnnnnnnnnnnnnnnnnnnnnnnnnnnnnnnnnnnnnnnnnnnnnnnnnnnnnnnnnnnnnnnnnnnnnnnnnnnnnnnnnnnnnggggagcaccaacaggtgctgcaagccgtggagctccagggctcgggcctctcattcagcgcctgctccctggccctacaccaggcccagcttacacccctgctgcgggccctcaagctgcacacagcactcnnnnnnnnnnnnnnnnnnnnnnnnnnnnnnnnnnnnnnnnnnnnnnnnnnnnnnnnnnnnnnnnnnnnnnnnnnnnnnnnnnnnnnnnnnnnnnnnnnnnnnnnnnnnnnnnnnnnnnnnnnnnnnnnnnnnnnnnnnnnnnnnnnnnnnnnnnnnnnnnnnnnnnnnnnnnnnnnnnnnnnnnnnnnnnnnnnnnnnnnnnnnnnnnnnnnnnnnnnnnnnnnnnnnnnnnnnnnnnnnnnnnnnnnnnnnnnnnnnnnnnnnnnnnnnnnnnnnnnnnnnnnnnnnnnnnnnnnnnnnnnnnnnnnnnnnnnnnnnnnnnnnnnnnnnnnnnnnnnnnnnnnngctgagcacctgaagaccctgtgcctgtcctacaatgccctgggagccccatccctggccaggaccctgcagagcctgcccgcccacaccctcctgcacctagagctcagctccgtggcagccggcaagggtgactcaggcctcatggagcccatagtccgatacctggccaagnnnnnnnnnnnnnnnnnnnnnnnnnnnnnnnnnnnnnnnnnnnnnnnnnnnnnnnnnnnnnnnnnnnnnnnnnnnnnnnnnnnnnnnnnnnnnnnnnnnnnnnnnnnnnnnnnnnnnnnnnnnnnnnnnnnnnnnnnnnnnnnnnnnnnnnnnnnnnnnnnnnnnnnnnnnnnnnnnnnnnnnnnnnnnnnnnnnnnnnnnnnncaggctgcgccatccagggtcccctggaaaaaaaaaagtgggacaagatcgccgcgcagctccgggaactgcagctgtgcagcagacgcctcggcgccgaggaccgggacgccctgcgccagctgcggcccagtcggccgtgccccggcgagtgcacgctggaccacggctccaagctcttcttccggcgcctctg

SEQ ID NO: 32222 - DNA, 169 bp, Macaca Mulatta
acattttctaatgtttacagaatgaagaggaacagattatctgttgagaataaaattgtccagttgtcaggagcagtgaaacagccaaaacttgggttcttcttctatgtcaaccagactcatacacacacggttcgtctagactgaaggagtttgcctcaccatgtag

SEQ ID NO: 32223 - DNA, 224 bp, Macaca Mulatta
  misc_feature (1)...(224): n = A,T,C or G
atattttacttccagcatagttttacagataattcattggtcacatataacgaagtataattctgaagtccattatggggctctgagcctggtttaaggtcacagaagaaagaatttgagtctgtttctcagatctagaactatcanatatcaggaacttcttggcaaaacagggtgccactttcaactgacaaacttgtgggtgagaataaagaaaagtgagt

SEQ ID NO: 32224 - DNA, 460 bp, Macaca Mulatta
gtctgccctctctggtcaccctgcctagctagaagagctgtgaccccagccatgaggaccatcgccatccttgctgccattctcctgttcgccctgctggctcaggctaagtcactccaggaaacagctgatgacgctgcaacccaggagcagcctggggaagatgaccaggaccttgctgtctcctttgaagaaaatggactctctactcttagagcctcaggttctcaggcaagacgcacctgccgttgccgttttggccgttgtttcaggcgtgagtcctactctgggagttgcaacatcaatggccgcatcttcagtctctgctgtcgctgagcttcctagatagaaaccaaagcagtgcaagattcaatccaaggtcctgaaaaaggaaaaacacttcgctctgtgtaccttgtgtctttctaaatttttctctccaaaataaagttcaagcatt

SEQ ID NO: 32225 - DNA, 443 bp, Macaca Mulatta
gctgatcaatttttatgaagtaagtagaggaatcaatgtatagacagcatatttgtcccctcgagacagatgtttccaatggtggagctggtgagcagtgttctctcttgctttctcaggcagtactacgagatgctttacaacacagctgacgagctcctgaacctggtggtggaccagggtgtgaagtacacggagctggagtacatccatgccctgaccctgctgcaccgcagccagacaggggtgggggaactgaccacccagaacatgaggctgcagcggctcaaagagatcatctgcgagcaggctgccatcaagcaagccaccaaggacaagaagataactaccgtttagcagagcatacttcggttggtagctggggtcccttcagtcacactcacattgtcccttggtatgttattggtatattctgagcttag

SEQ ID NO: 32226 - DNA, 4064 bp, Macaca Mulatta
  misc_feature (1)...(4064): n = A,T,C or G
ttgcttttcccggcgattcctctccctggtctcccgtacgcgccgcgcacgacctctgcctacgctgggctgtgtggatcaggagcccccagccccgaacttgagcgccgcgctgagccttgctggacgccctcgcggcggcttccccgctgcctgccgccccgcggcccctgcgcccccgacaccacaggacgcccgccatcctcagccctcggggctggctggctgtnnnnnnnnnnnnnnnnnnnnnnnnnnnnnnnnnnnnnnnnnnnnnnnnnnnnnnnnnnnnnnnnnnnnnnnnnnnnnnnnnnnnnnnnnnnnnnnnnnnnnnnnnnnnnnnnnnnnnnnnnnnnnnnnnnnnnnnnnnnnnnnnnnnnnnnnnnnnnnnnnnnnnnnnnnnnnnnnnnnnnnnnnnnnnnnnnnnnnnnnnnnnnnnnnnnnnnnnnnnnnnnnnnnnnnnnnnnnnnnnnnnnnnnnnnnnnnnnnnnnnnnnnnnnnnnnnnnnnnnnnnnnnnnnnnnnnnnnnnnnnnnnnnnnnnnnnnnnnnnnnnnnnnnnnnnnnnnnnnnnnnnnnnnnnnnnnnnnnnnnnnnnnnnnnnnnnnnnnnnnnnnnnnnnnnnnnnnnnnnnnnnnnnnnnnnnnnnnnnnnnnnnnnnnnnnnnnnnnnnnnnnnnnnnnnnnnnnnnnnnnnnnnnnnnnnnnnnnnnnnnnnnnnnnnnnnnnnnnnnnnnnnnnnnnnnnnnnnnnnnnnnnnnnnnnnnnnnnnnnnnnnnnnnnnnnnnnnnnnnnnnnnnnnnnnnnnnnnnnnnnnnnnnnnnnnnnnnnnnnnnnnnnnnnnnnnnnnnnnnnnngaggaatgccagctcctgagcaggcctcattggtggaggaggggcaaccacagacccgccaggaagctgcctccactggcccaggcatggaacccgagaccacagccaccactattctagcatccgtgaaggagcangagcttcagtttcaacgactcacccgagaactggaagtggaaaggcagattgttgccagtcagctagaaagatgtaggcttggagcagaatcaccaagcatcgccagcaccaggtacagggccannnnnnnnnnnnnnnnnnnnnnnnnnnnnnnnnnnnnnnnnnnnnnnnnnnnnnnnnnnnnnnnnnnnnnnnnnnnnnnnnnnnnnnnnnnnnnnnnnnnnnnnnnnnnnnnnnnnnnnnnnnnnnnnnnnnnnnnnnnnnnnnnnnnnnnnnnnnnnnnnnnnnnnnnnnnnnnnnnnnnnnnnnnnnnnnnnnnnnnnnnnnnnnnnnnnnnnnnnnnnnnnnnnnnnnnnnnnnnnnnnnnnnnnnnnnnnnnnnnnnnnnnnnnnnnnnnnnnnnnnnnnnnnnnnnnnnnnnnnnnnnnnnnnnnnnnnnnnnnnnnnnnnnnnnnnnnnnnnnnnnnnnnnnnnnnnnnnnnnnnnnnnnnnnnnnnnnnnnnnnnnnnnnnnnnnnnnnnnnnnnnnnnnnnnnnnnnnnnnnnnnnnnnnnnnnnnnnnnnnnnnnnnnnnnnnnnnnnnnnnnnnnnnnnnnnnnnnnnnnnnnnnnnnnnnnnnnnnnnnnnnnnnnnnnnnnnnnnnnnnnnnnnnnnnnnnnnnnnnnnnnnnnnnnnnnnnnnnnnnnnnnnnnnnnnnnnnnnnnnnntcccggcagacctccaatcccaacggaccaacccctcaataccaaaccaccgccagagtggggtccccactgaccctgacggatgcacagactcgagtagcttccccatcccaaggccaggtggggtcgtcgtcccccaaacgctcagggatgaccgccgtaccacagcatctgggaccttcactgcaaaggactgttcatgacatggagcaattcggacagcagcagtatgacatttatgagaggatggttccacccaggccagacagcctgacagnnnnnnnnnnnnnnnnnnnnnnnnnnnnnnnnnnnnnnnnnnnnnnnnnnnnnnnnnnnnnnnnnnnnnnnnnnnnnnnnnnnnnnnnnnnnnnnnnnnnnnnnnnnnnnnnnnnnnnnnnnnnnnnnnnnnnnnnnnnnnnnnnnnnnnnnnnnnnnnnnnnnnnnnnnnnnnnnnnnnnnnnnnaggtattggaaatctacaaaggacatccagccaacgaagtacccttacataccaaagaaataattatgctctgaacacaacagctacctacgcagagccctacaggcctatacaataccgagtgcaagagtgcaattataacaggcttcagcacatagtgtcggctgatgatggcaccacaagatccccatcaatagacagcattcagaaggaccccaggcgnnnnnnnnnnnnnnnnnnnnnnnnnnnnnnnnnnnnnnnnnnnnnnnnnnnnnnnnnnnnnnnnnnnnnnnnnnnnnnnnnnnnnnnnnnnnnnnnnnnnnnnnnnnnnnnnnnnnnnnnnnnnnnnnnnnnnnnnnnnnnnnnnnnnnnnnnnnnnnnnnnnnnnnnnnnnnnnnnnnnnnnnnnnnnnnnnnnnnnnnnnnnnnnnnnnnnnnnnnnnnnnnnnnnnnnnnnnnnnnnnnnnnnnnnnnnnnnnnnnnnnnnnnnnnnnnnnnnnnnnnnnnnnnnnnnnnnnnnnnnnnnnnnnnnnnnnnnnnnnnnnnnnnnnnnnnnnnnnnnnnnnnnnnnnnnnnnnnnnnnnnnnnnnnnnnnnnnnnnnnnnnnnnnnnnnnnnnnnnnnnnnnnnnnnnnnnnnnnnnnntgtgatcgttccacattctggatggaataactcttcttttgatgatgatcataaaattaaatttcagacttcactagttctgcgtaacacgacaggttgcctnnnnnnnnnnnnnnnnnnnnnnnnnnnnnnnnnnnnnnnnnnnnnnnnnnnnnnnnnnnnnnnnnnnnnnnnnnnnnnnnnnnnnnnnnnnnnnnnnnnnnnnnnnnnnnnnnnnnnnnnnnnnnnnnnnnnnnnnnnnnnnnnnnnnnnnnnnnnnnnnnnnnnnnnnnnnnnnnnnnnnnnnnnnnnnnnnnnnnnnnnnnnnnnnnnnnnnnnnnnnnnnnnnnnnnnnnnnnnnnnnnnnnnnnnnnnnnnnnnnnnnnnnnnnnnnnnnnnnnnnnnnnnnnnnnnnnnnnnnnnnnnnnnnnnnnnnnnnnnnnnnnnnnnnnnnnnnnnnnnnnnnnnnnnnnnnnnnnnnnnnnnnnnnnnnnnnnnnnnnnnnnnnnnnnnnnnnnnnnnnnnnnnnnnnnnnnnnnnnnnnnnnnnnnnnnnnnnnnnnnnnnnnnnnnnnnnnnnnnnnnnnnnnnnnnnnnnnnnnnnnnnnnnnnnnnnnnnnnnnnnnnnnnnnnnnnnnnnnnnnnnnnnnnnnnnnnnnnnnnnnnnnnnnnnnnnnnnnnnnnnnnnnnnnnnnnnnnnnnnnnnnnnnnnnnnnnnnnnnnnnnnnnnnnnnnnnnnnnnnnnnnnnnnnnnnnnnnnnnnnnnnnnnnnnnnnnnnnnnnnnnnnnnnnnnnnnnnnnnnnnnnnnnnnnnnnnnnnnnnnnnnnnnnnnnnnnnnnnnnnnnnnnnnnnnnnnnnnnnnnnnnnnnnnnnnnnnnnnnnnnnnnnnnnnnnnnnnnnnnnnnnnnnnnnnnnnnnnnnnnnnnnnnnnnnnnnnnnnnnnnnnnnnnnnnnnnnnnnnnnnnnnnnnnnnnnnnnnnnnnnnnnnnnnnnnnnnnnnnnnnnnnnncatctctgaaagtggtgaaggcagcagcccaggtcttgaatacattatggcaatatcgggacctccggagcatttataaaaaggnaggatgggtggaatcagaaccattttattacacctgtgtcgacattggagcgagaccgattcaaatcacatccttccttgtctaccaccaaccaacagatgtcacccatcattcagtcaggtcagtgggaaacgccactccttcacgagagcctttgtgtgacagaacattgtttcccagccagagaagat

SEQ ID NO: 32227 - DNA, 130 bp, Macaca Mulatta
aggtgagaactcggacagttgctgaatgtgtagcattctactatatgtggaagaaatctgaacgttatgattactttgctcaacagacaagatttgggaaaaaacgatataaccatcaccctggagttac

SEQ ID NO: 32228 - DNA, 1649 bp, Macaca Mulatta
  misc_feature (1)...(1649): n = A,T,C or G
ggtagaacagaagttccaggggtcaatatcatttaaagatgtgactgtgggcttcagccaggaggagtggcagcacctggaccctagtcagagggctctgtatagagatgtgatgctggagaactacagcaaccttgtctcagtgggnnnnnnnnnnnnnnnnnnnnnnnnnnnnnnnnnnnnnnnnnnnnnnnnnnnnnnnnnnnnnnnnnnnnnnnnnnnnnnnnnnnnnnnnnnnnnnnnnnnnnnnnnnnnnnnnnnnnnnnnnnnnnnnnnnnnnnnnnnnnnnnnnnnnnnnnnnnnnnnnnnnnnnnnnnnnnnnnnnnnnnnnnnnnnnnnnnnnnnnnnnnnnnnnnnnnnnnnnnnnnnnnnnnnnnnnnnnnnnnnnnnnnnnnnnnnnnnnnnnnnnnnnnnnnnnnnnnnnnnnnnnnnnnnnnnnnnnnnnnnnnnnnnnnnnnnnnnnnnnnnnnnnnnnnnnnnnnnnnnnnnnnnnnnnnnnnnnnnnnnnnnnnnnnnnnnnnnnnnnnnnnnnnnnnnnnnnnnnnnnnnnnnnnnnnnnnnnnnnnnnnnnnnnnnnnnnnnnnnnnnnnnnnnnnnnnnnnnnnnnnnnnnnnnnnnnnnnnnnnnnnnnnnnnnnnnnnnnnnnnnnnnnnnnnnnnnnnnnnnnnnnnnnnnnnnnnnnnnnnnnnnnnnnnnnnnngacatcagagggtgcacacaggagagaaaccctttcaatgtaatgaatgtggaaaagctttctgggataagtcaaacctcactaaacatcagagatcacacacaggggagaaaccttttgaatgcaatgaatgtgggaaagcctttagccataagtcagctctcacattacaccagagaacacatacaggggagaaaccctatcagtgtaatgcgtgtgggaaaactttttgccagaaatctgacctcactaaacatcagagaacacacacagggctgaaaccctatgaatgttataaatgtggaaaattcttccgtgtgacttcgcaccttaaagtacaccagagaactcacacaggtgagaaaccttttgaatgtcttgagtgtgggaaatccttttgtgaaaagtcaaatcttacacagcatcagagaactcacataggagataaatcttatgaatgtaatgcatgtgggaaaactttctaccacaagtcattactcaccaggcatcagatagttcatacagggtggaaaccttatgaatgttatgaatgtgggaaaaccttctgcttgaagtcagacctaacagtacatcagagaatgcacacaggtgagaaaccctttgcatgtcctgaatgtgggaaattctttagccataagtcaaccctctctcaacattatagaacacacacaggggagaaaccctatgaatgtcatgaatgtggaaaaatattttacaataagtcatacctaactaaacataatagaacacatacaggggagaaaccctatgaatgtaatgaatgtggaaaaaccttctaccagaagtcacaactcactcagcatcagataattcacataggggagaaaccctataaatgtaatgagtgtggaaaagctttttggcataagtcagctctaattgtacatcagagaaacccatacacaag

SEQ ID NO: 32229 - DNA, 584 bp, Macaca Mulatta
cgcggggagaaggccatcacccaggtcagcaagggcacctgcgagcaaggtccttccatagtgacgccccccaaggacatctggaatgtcactggtgcccaggtgtacttgagctgtgaggtcatcggaatcccgacacctgtcctcatctggaacaaggtaaaaaggggtcactatggagttcaaaggacagaactcctacctggtgaccgggacaacctggccattcagacccggggtggcccagaaaagcatgaagtaactggctgggtgctggtatctcctctaagtaaggacgatgctggaaaatatgagtgccatgcatccaattcccaaggacaggcttcagcatcgacaaaaattacagtggttgatgccttacatgaaataccagtgaaaaaaggtgaaggtgctgagctataaacctccagaatacattagtctgcatggttaaaagtagtcatggataactacattacctgttcttgcctaataagtttcttttaatccaatccactaacactttagttatattcactggttttatacagagaaatacaaaataaagatcacacatcgagact

SEQ ID NO: 32230 - DNA, 148 bp, Macaca Mulatta
gacccaaccagacaattaaggggttgcagacacgcaaaaaagaaacaaaacatgtcctccaactttttgtcagacccgggagcagagagcgggcacgctagcccccagccatctgtgaagcgcgcaggtaactttaattcgccgcccc

SEQ ID NO: 32231 - DNA, 685 bp, Macaca Mulatta
tttctgtgtccctgagataggtctgaaattttacccagtattgaatgtgtacctgaagtggtcaaataatacttcttataaaaaagtttttctacctaagattataattttaactttaaataagaatggccacaattaaccaacatgcaaaaattctcagactaaacactgtagaaattcttcatagaatgcatttaccaccttattgcatgtttaaaatctttattctgtagtgagtgggtgttcccaatctgcctaagcaaaggcatgccatgcccttctaacaagatttgcttagagcagaggtgatgaaaggaagaatccgaaggcctatggcatggcaatttgggagtagtacactgtggatggagtccaagtgagcaaactgcacacaattcaatttagtgacaagtgggcttgctcccttttcatccaggaaaaaaactactcagaccactgaccagaatctggaataagaaccctcattttaaggtattcttcccaacaaatacatatctcaatatcgaaagggggcatatcagaaaacttaagacctaataaacaaaaccaaaagcctcttcaaaacaagtaaagcatgtctatatttagttcactctagaacattctaagctcttcttgcagttagttcctacaagaattgatcggactgggcacaacaggaact

SEQ ID NO: 32232 - DNA, 152 bp, Macaca Mulatta
  misc_feature (1)...(152): n = A,T,C or G
ggcatgttaaactacagtcatgttcagcttcattgcatgtaatgtagacctagtccatgagatcatgcgttctggagagtgttctttattcaataaagttttaatttagtatnnnnnnnnnnnnnnnnnnnnnnnnnnnnnnnnnnnntgtc

SEQ ID NO: 32233 - DNA, 811 bp, Macaca Mulatta
aggggtgagtctaggcggcaggtgggcaggcaaagagcccacaggtgcttggggtatgacagagtgtcaggctgtcttctgtgccttgcaggtggcctcagccctgagtccaagaagatcctgacacccgccctcaagaagcgggcccgggccagccgcggggaggctaccaggcaggaggagagcgctgagcggagcgagcccttacagcatgtagcactcagcctgactttcaagcgttatgtcttcgacacccacaagcgcatggtccagtctccctgagtgtccagtgacctcccccagggcctccttgcccggcccagtccagagtgctgtgccaaatcccaaccagtcatgcttcaacctctcccagtctctccctgcagtcctgcagcagcagcccccacccccacgattggtgctcagccctggtgaggagctgagggggatgtgttgctggggccaggagggtctgtcctccagcccctgcacactcccacccaggacagccaccagcccaactaggaaagggccttgggcagagggctggtagccagtgtcttccactgccccatttgttggccacctgcaggcctgtctcacccctcccccaggtgggcagacacttgacggctacaaataaatgtcccatggccccagcccactctactgatgtctctctctttgacttcactagggcccccgccctccccaactgtgttccaaggggaatctcagaggaataggaagagttcctgcccaggtaggggccaggggagggaccaaaggtcagagtccgtaggctatggga

SEQ ID NO: 32234 - DNA, 5755 bp, Macaca Mulatta
  misc_feature (1)...(5755): n = A,T,C or G
agtggctgtaaggtgaagaagcatgaaactcagtctctcgctttggatgcatgttcnnnnnnnnnnnnnnnnnnnnnnnnnnnnnnnnnnnnnnnnnnnnnnnnnnnnnnnnnnnnnnnnnnnnnnnnnnnnnnnnnnnnnnnnnnnnnnnnnnnnnnnnnnnnnnnnnnnnnnnnnnnnnnnnnnnnnnnnnnnnnnnnnnnnnnnnnnnnnnnnnnnnnnnnnnnnnnnnnnnnnnnnnnnnnnnnnnnnnnnnnnnnnnnnnnnnnnnnnnnnnnnnnnnnnnnnnnnnnnnnnnnnnnnnnnnnnnnnnnnnnnnnnnnnnnnnnnnnnnnnnnnnnnnnnnnnnnnnnnnnnnnnnnnnnnnnnnnnnnnnnnnnnnnnnnnnnnnnnnnnnnnnnnnnnnnnnnnnnnnnnnnnnnnnnnnnnnnnnnnnnnnnnnnnnnnnnnnnnnnnnnnnnnnnnnnnnnnnnnnnnnnnnnnnnnnnnnnnnnnnnnnnnnnnnnnnnnnnnnnnnnnnnnnnnnnnnnnnnnnnnnnnnnnnnnnnnnnnnnnnnnnnnnnnnnnnnnnnnnnnnnnnnnnnnnnnnnnnnnnnnnnnnnnnnnnnnnnnnnnnnnnnnnnnnnnnnnnnnnnnnnnnnnnnnnnnnnnnnnnnnnnnnnnnnnnnnnnnnnnnnnnnnnnnnnnnnnnnnnnnnnnnnnnnnnnnnnnnnnnnnnnnnnnnnnnnnnnnnnnnnnnnnnnnnnnnnnnnnnnnnnnnnnnnnnnnnnnnnnnnnnnnnnnnnnnnnnnnnnnnnnnnnnnnnnnnnnnnnnnnnnnnnnnnnnnnnnnnnnnnagccaatgaggagattgcgcaggttcgaacaaaggcaaaggctgagagtgcagctctccatgctggactccggaaagagcagatgaaggtggagtccctggaaagggccctacagcagaannnnnnnnnnnnnnnnnnnnnnnnnnnnnnnnnnnnnnnnnnnnnnnnnnnnnnnnnnnnnnnnnnnnnnnnnnnnnnnnnnnnnnnnnnnnnnnnnnnnnnnnnnnnnnnnnnnnngtgaccacaattatcttgccttatccaggaataatcgcccctttgcagannnnnnnnnnnnnnnnnnnnngcacatgtctactgctgcctgtcccgctttgctgccaatgcaacagccctggaagaaaccctagagggttgcgtagtctagaaaggagtgtgacctgacagtgccggagccttccagttccccatatgaaggttccattaggctgctgagtttgggtttgtgatttctttatgtttagtttgttttaaagtcatctttactttcccaaatgtgttaaaatttgtagctcctctttggggtcttctacaccacctgtctgatttttttgtgtgtgatctatttaatcttttaattttttaatatcagtggttttatttaaggagacaatttggcctattgttacttccagtttataatcaagaaggggctctgggtccccttttattacacacactctcacacacatacatgtatatttatagatgctgctactcttttccctgaagcatagtcaagtaagaacttgtctgcagaaggacatatttccttcgatgtgagaccctattttgaaatagagtcctgactcagaacaccaacttaagaatttgggggattaaagatatgaagaccacagtcttgggttttcatgtctgcagaagactattggccatgacattttgttgccctggtatttnnnnnnnnnnnnnnnnnnnnnnnnnnnnnnnnnnnnnnnnnnnnnnnnnnnnnnnnnnnnnnnnnnnnnnnnnnnnnnnnnnnnnnnnnnnnnnnnnnnnnnnnnnnnnnnnnnnnnnnnnnnnnnnnnnnnnnnnnnnnnnnnnnnnnnnnnnnnnnnnnnnnnnnnnnnnnnnnnnnnnnnnnnnnnnnnnnnnnnnnnnnnnnnnnnnnnnnnnnnnnnnnnnnnnnnnnnnnnnnnnnnnnnnnnnnnnnnnnnnnnnnnnnnnnnnnnnnnnnnnnnnnnnnnnnnnnnnnnnnnnnnnnnnnnnnnnnnnnnnnnnnnnnnnnnnnnnnnnnnnnnnnnnnnnnnnnnnnnnnnnnnnnnnnnnnnnnnnnnnnnnnnnnnnnnnnnnnnnnnnnnnnnnnnnnnnnnnnnnnnnnnnnnnnnnnnnnnnnnnnnnnnnnnnnnnnnnnnnnnnnnnnnnnnnnnnnnnnnnnnnnnnnnnnnnnnnnnnnnnnnnnnnnnnnnnnnnnnnnnnnnnnnnnnnnnnnnnnnnnnnnnnnnnnnnnnnnnnnnnnnnnnnnnnnnnnnnnnnnnnnnnnnnnnnnnnnnnnnnnnnnnnnnnnnnnnnnnnnnnnnnnnnnnnnnnnnnnnnnnnnnnnnnnnnnnnnnnnnnnnnnnnnnnnnnnnnnnnnnnnnnnnnnnnnnnnnnnnnnnnnnnnnnnnnnnnnnnnnnnnnnnnnnnnnnnnnnnnnnnnnnnnnnnnnnnnnnnnnnnnnnnnnnnnnnnnnnnnnnnnnnnnnnnnnnnnnnnnnnnnnnnnnnnnnnnnnnnnnnnnnnnnnnnnnnnnnnnnnnnnnnnnnnnnnnnnnnnnnnnnnnnnnnnnnnnnnnnnnnnnnnnnnnnnnnnnnnnnnnnnnnnnnnnnnnnnnnnnnnnnnnnnnnnnnnnnnnnnnnnnnnnnnnnnnnnnnnnnnnnnnnnnnnnnnnnnnnnnnnnnnnnnnnnnnnnnnnnnnnnnnnnnnnnnnnnnnnnnnnnnnnnnnnnnnnnnnnnnnnnnnnnnnnnnnnnnnnnnnnnnnnnnnnnnnnnnnnnnnnnnnnnnnnnnnnnnnnnnnnnnnnnnnnnnnnnnnnnnnnnnnnnnnnnnnnnnnnnnnnnnnnnnnnnnnnnnnnnnnnnnnnnnnnnnnnnnnnnnnnnnnnnnnnnnnnnnnnnnnnnnnnnnnnnnnnnnnnnnnnnnnnnnnnnnnnnnnnnnnnnnnnnnnnnnnnnnnnnnnnnnnnnnnnnnnnnnnnnnnnnnnnnnnnnnnnnnnnnnnnnnnnnnnnnnnnnnnnnnnnnnnnnnnnnnnnnnnnnnnnnnnnnnnnnnnnnnnnnnnnnnnnnnnnnnnnnnnnnnnnnnnnnnnnnnnnnnnnnnnnnnnnnnnnnnnnnnnnnnnnnnnnnnnnnnnnnnnnnnnnnnnnnnnnnnnnnnnnnnnnnnnnnnnnnnnnnnnnnnnnnnnnnnnnnnnnnnnnnnnnnnnnnnnnnnnnnnnnnnnnnnnnnnnnnnnnnnnnnnnnnnnnnnnnnnnnnnnnnnnnnnnnnnnnnnnnnnnnnnnnnnnnnnnnnnnnnnnnnnnnnnnnnnnnnnnnnnnnnnnnnnnnnnnnnnnnnnnnnnnnnnnnnnnnnnnnnnnnnnnnnnnnnnnnnnnnnnnnnnnnnnnnnnnnnnnnnnnnnnnnnnnnnnnnnnnnnnnnnnnnnnnnnnnnnnnnnnnnnnnnnnnnnnnnnnnnnnnnnnnnnnnnnnnnnnnnnnnnnnnnnnnnnnnnnnnnnnnnnnnnnnnnnnnnnnnnnnnnnnnnnnnnnnnnnnnnnnnnnnnnnnnnnnnnnnnnnnnnnnnnnnnnnnnnnnnnnnnnnnnnnnnnnnnnnnnnnnnnnnnnnnnnnnnnnnnnnnnnnnnnnnnnnnnnnnnnnnnnnnnnnnnnnnnnnnnnnnnnnnnnnnnnnnnnnnnnnnnnnnnnnnnnnnnnnnnnnnnnnnnnnnnnnnnnnnnnnnnnnnnnnnnnnnnnnnnnnnnnnnnnnnnnnnnnnnnnnnnnnnnnnnnnnnnnnnnnnnnnnnnnnnnnnnnnnnnnnnnnnnnnnnnnnnnnnnnnnnnnnnnnnnnnnnnnnnnnnnnnnnnnnnnnnnnnnnnnnnnnnnnnnnnnnnnnnnnnnnnnnnnnnnnnnnnnnnnnnnnnnnnnnnnnnnnnnnnnnnnnnnnnnnnnnnnnnnnnnnnnnnnnnnnnnnnnnnnnnnnnnnnnnnnnnnnnnnnnnnnnnnnnnnnnnnnnnnnnnnnnnnnnnnnnnnnnnnnnnnnnnnnnnnnnnnnnnnnnnnnnnnnnnnnnnnnnnnnnnnnnnnnnnnnnnnnnnnnnnnnnnnnnnnnnnnnnnnnnnnnnnnnnnnnnnnnnnnnnnnnnnnnnnnnnnnnnnnnnnnnnnnnnnnnnnnnnnnnnnnnnnnnnnnnnnnnnnnnnnnnnnnnnnnnnnnnnnnnnnnnnnnnnnnnnnnnnnnnnnnnnnnnnnnnnnnnnnnnnnnnnnnnnnnnnnnnnnnnnnnnnnnnnnnnnnnnnnnnnnnnnnnnnnnnnnnnnnnnnnnnnnnnnnnnnnnnnnnnnnnnnnnnnnnnnnnnnnnnnnnnnnnnnnnnnnnnnnnnnnnnnnnnnnnnnnnnnnnnnnnnnnnnnnnnnnnnnnnnnnnnnnnnnnnnnnnnnnnnnnnnnnnnnnnnnnnnnnnnnnnnnnnnnnnnnnnnnnnnnnnnnnnnnnnnnnnnnnnnnnnnnnnnnnnnnnnnnnnnnnnnnnnnnnnnnnnnnnnnnnnnnnnnnnnnnnnnnnnnnnnnnnnnnggtagccatctcatgaactgtctctgactgttgtctctgccgtcatatgattgtgagcttgctctctgacttgcatttctgactttatcctgttgttgggaagatagaaactaggttttgaaagattacatgattcaagtgagggattttaaagtaaagatgtgtatattctgaagaatccaaaagataacagattattattatttgcttatgaaagaacaatatagtctgggaatcccagaatgtcaagccaaaggtctaagaagtcttatcttcttcaaatattttaataaagaagtatttcaaggagatatctgcccagaaaggtttgactggcctccagattccagttatttttaaaaagcaatttaccactaaatccttgagtctccgtagagtaacagtaaagaaactaatataacggactctcctctcaaaggatctcctctggaagagagtatcagcggcagcattctccagggaagacccatcccctagtgccagagcttgcatcctggagactaaagattgcacttttcgtagtttttcgtccaaatgcaatcccatttctgtgcctcttagcatgcagttagatttggacaaacaagattcctaaggaatgactttattaactataatatggttacagcnnnnnnnnnnnnnnnnnnctggttatagttctaatatggagatgttgcgtgcaatgctggcctgtggcagtctgtgtaatgctttaacttgtatggaggaggccagactcagagctgagatgtggcctgaaccttccctgtatcgatcctttaatttagaactctcaagatgccactttctccccctctgccttttagtggtatctgaaatatactcaaaacagaaatttcctggtcacatcattaactgctaattctatatttataaagaattttcagatggacatatacaaatctgaactcaaaccatccccagtccagatacagggcagcgtgtaggtgaccacaccagagcctcagccttggtccttctcagccatcgggataggaaccaggcatttcttttaaatctcagaggtagcagtaaacttttcagtattgctgttagcaagtgtgtgtttgccaatagatatccattatactaatgtgc

SEQ ID NO: 32235 - DNA, 1867 bp, Macaca Mulatta
  misc_feature (1)...(1867): n = A,T,C or G
aagaaaagaatctttgtgcattagtatcactgtgtccaaggtagagaaagaccagccttccagtttaaactcctgtgaagacccacttccagggatgttgttttttttgccacctggtcagcacttgtcagactgttcccagttgaatgaaagcacaacaagagaggcttcagaggccagccagcttgaagatgctgctgggggtgacagtgcatctgaggaaaaaagtgggtctgctgagccatttgtgccgccagtctcttctgtggaaagtacattaccagtgcttgaggcatccagttggaagaagcaggtgtcgcatgacttcctggagaccaggtttaaaatccagcagcttttggagcctcagcagtacatggcttttctgccccaccacattatggtaaaaatcttcaggttacttcccaccaagagtttagtggcccttaaatgtacctgctgctatttcaagtttatcattgagtactacaatatcaggccagcagattctcgctgggttcgagatccacgctacagagaagatccttgcaaacagtgcaagaaaaagtatgtgaaaggggatgtgtccctgtgccgatggcaccccaagccctattgccaggcattgccctatgggccagggtattggatgtgctgccaccggtctcagaaaggattccctggctgtaagctggggcttcatgacaatcactgggttcctgcctgccacagctttaatcgggcaatccataagaaggcaaaagggactgaagctgaagaggaatactaaagtccatgtgagaggcaacgaaaggaccgatttttaaaactgcaaaacacctagatacaccattcaaatgagcgtagccnnnnnnnnnnnnnnnnnnnnnnnnnnnnnnnnnnnnnnnnnnnnnnnnnnnnnnnnnnnnnnnnnnnnnnnnnnnnnnnnnnnnnnnnnnnnnnnnnnnnnnnnnnnnnnnnnnnnnnnnnnnnnnnnnnnnnnnnnnnnnnnnnnnnnnnnnnnnnnnnnnnnnnnnnnnnnnnnnnnnnnnnnnnnnnnnnnnnnnnnnnnnnnnnnnnnnnnnnnnnnnnnnnnnnnnnnnnnnnnnngagttcactgcagacactctcaggtagtcttcaaaaaggggtttgagaaatgttttgagcactggcaccatctttgaaataagtgaatagtgtcctgtgaaaagaatagcaggacttttagatgaaaagtattcttaaaaagaaaagtcaggcaccccaccttagacctcgtatgcttgatcctgtgagattgatgtttgtggctggagatggatttcatgccctgtggtgtttacagtgtatataatggttgtgttttcatagggctatgaaagtgcacattaaacctgagcgcctttacctttagatgagtgctttggcccctctgtaaatagcacgattaaaatccagttgtatataatggacagctaactgaacaacataatcacaatgcagctaggatagtgttgcggctataattgtgtgtgttttttttaattgtctagtcttaaatttgtacatcctgtataaaatatgaatgtttcccaaataaactatgaatgtttcctgtataatatatgaatgtttctgagaagaaactctaaatagttgaaaggctaacctgctcaaaggataccaaataatggtttaactggacaacctgaaaattagcatagaaaacaatccttcattatattttagtgatccacaacattgagagaatattatatagttagctcataacattcttgtctactttatcctgtctggttacaaaattttttaaaacttcaataaaaacatgcatcttaaatgg

SEQ ID NO: 32236 - DNA, 217 bp, Macaca Mulatta
aagcggtttctacctctctatgtgcctgagtgatgatacaatcgctgtttagttactagataaagaaatccacagagtgggtaaagagtagaatctgaactatatcttgacaaatattatcaaacttgaatgtaaatatatacagtatgtatatttttaaaaacgatttgcttgcagtgaccttgtaagtgacatttaatgtcatagcatgtaaagg

SEQ ID NO: 32237 - DNA, 1241 bp, Macaca Mulatta
  misc_feature (1)...(1241): n = A,T,C or G
cagaagtctcgtgattgctctgggagctttgcttaaccatttggaactacagaagaaagaaggatctagcgaagtatggctgcagagagccctgctatgcgtcgggtccaggtggcagaacatnnnnnnnnnnnnnnnnnnnnnnnnnnnnnnnnnnnnnnnnnnnnnnnnnnnnnnnnnnnnnnnnnnnnnnnnnnnnnnnnnnnnnnnnnnnnnnnnnnnnnnnnnnnnnnnnnnnnnnnnnnnnnnnnnnnnnnnnnnnnnnnnnnnnnnnnnnnnnnnnnnnnnnnnnnnnnnnnnnnnnnnnnnnnnnnnnnnnnnnnnnnnnnnnnnnnnnnnngacttcagtactagtgctaataacattcagattgataaaaccaagcctttgtggcacaactatttcttatgtggacttaaaggaattcaggnnnnnnnnnnnnnnnnnnnnnnnnnnnnnnnnnnnnnnnnnnnnnnnnnnnnnnnnnnnnnnnnnnnnnnnnnnnnnnnnnnnnnnnnnnnnnnnnnnnnnnnnnnnnnnnnnnnnnnnnnnnnnnnnnnnnnnnnnnnnnnnnaggtggaacttgcagaaatctgtgccaagagtgagcgttacattggtactgaaggaggaggcatggaccagtctatatcatttcttgcagaagaaggaactgccaagttgatagaatttagtcctctgagggcaactgatgtaaaactcccaagtggagcagtgtttgtgattgccaacagttgtgtggagatgaataaggcagcaacttctcagttcaatatcagggtgatggagtgtcggctggctgcgaannnnnnnnnnnnnnnnnnnnnnnnnnnnnnnnnnnnnnnnnnnnnnnnnnnnnnnnnnnnnnnnnnnnnnnnnnnnnnnnnnnnnnnnnnnnnnnnnnnnnnnnnnnnnnnnnnnnnnnnnnnnnnnnnnnnnnnnnnnnnnnnnnnnnnnnnnnnnnnnnnnnnnnnnnnnnnnnnnnnnnnnnnnnnnnnnnnnnnnnnnnnnnnnnntgcttatcttcaaactctatcagcgggcaaagcatgtgtacagcgaggctgcgcgagtgctccagtttaagaagatatgtgaagaagcacctgaaaacatggtccattttttttgagagttgatgaaccagagccacttgagcggccgggacatgtatgagtgcagctgccctgagctggaccagctggtggacatctgtcgg

SEQ ID NO: 32238 - DNA, 910 bp, Macaca Mulatta
gaattctgcatcacctgtagaaaataaaaaatcagcttccccagaaatggatgtttcgtttccatataactacagcataaggtactaaaagttaataactgcataatgccctgtgtgaacatgtgtatcttatctccattctaaattctctgttctccttctcttgggtcttcaggataccggatgtcagctccccagaactgtccagaggatatttttaaaatcatgatgaagtgttgggattataaacctgaaaatcgccctaagttcagtgaacttcacaaagagctcactatcatcaagaaaaaactcacatagtgacaggatggcgccaaacccagccttcaggactctgtcctccagcagagtaacgttattgtcctcattaacaatgaatttataccacattaccttcgacagtcttctaccatttttttttattaactgggtgttttaaaagtatgttccacttgtaaaaagtcaaacgcaaatttgttaaagaaataggcagtcctaccaagggctttcttagctaaccatagcaatcctaccatttcaggccattgcaaatggaaaagcacaggcttctaagtgtgtgaaggataaaagatttatccttttcacaccttgtttctacttcaggcacagtttgtgggctgccatcctatgccacagaccctactcagttggtgctataaacagtattggtaatgccatgtttgcagtacatattccaaccacagctggctttctcctctgccaagcaagattatatttgtaaacagatttttatatttgggaatatttgggactcctgaaggtttttcttttcttcctgccaggtataagccccaatgtaagatcatcatgctcctacataaatcgaagggtggcattttcctcctccttg

SEQ ID NO: 32239 - DNA, 1202 bp, Macaca Mulatta
  misc_feature (1)...(1202): n = A,T,C or G
ggagatgcatgcaccatcgtttcgtgtggagagaggagcagatgggaacatgtttctccattactactcagatagaagtggtctgtgccatattgtaccaggtatnnnnnnnnnnnnnnnnnnnnnnnnnnnnnnnnnnnnnnnnnnnnnnnnnnnnnnnnnnnnnnnnnnnnnnnnnnnnnnnnnnnnnnnnnnnnnnnnnnnnnnnnnnnnnnnnnnnnnnnnnnnnnnnnnnnnnnnnnnnnnnnnnnnnnnnnnnnnnnnnnnnnnnnnnnnnnnnnnnnnnnnnnnnnnnnnnnnnnnnnnnnnnnnnnnnnnnnnnnnnnnnnnnnnnnnnnnnnnnnnnnnnnnnnnnnnnnnnnnnnnnnnnnnnnnnnnnnnnnnnnnnnnnnnnnnnnnnnnnnnnnnagggcatctcgtgaatgcctttgagcccatttatcctgagagactctggattgaagagaagacattctgcaatgcttttcctttccacattgtatttgatgaatcnnnnnnnnnnnnnnnnnnnnnnnnnnnnnnnnnnnnnnnnnnnnnnnnnnnnnnnnnnnnnnnnnnnnnnnnnnnnnnnnnnnnnnnnnnnnnnnnnnnnnnnnnnnnnnnnnnnnnnnnnnnnnnnnnnnnnnnnnnnnnnnnnnnnnnnnnnnnnnnnnnnnnnnnnnnnnnnnnnnnnnnnnnnnnnnnnnnnnnnnnnnnnnnnnnnnnnnnnnnnnnnnnnnnnnnnnnnnnnnnnnnnnnnnnnnnnnnnnnnnnnnnnnnnnnnnnnnnnnnnnnnnnnnnnnnnnnnnnnnnnnnnnnnnnnnnnnnnnnnnnnnnnnnnnnnnnnnnnnnnnnnnnnnnnnnnnnnnnnnnnnnnnnnnnnnnnnnnnnnnnnnnnnnnnnnnnnnnnnnnnnnnnnnnnnnnnnnnnnnnnnnnnnnnnnnnnnnnnnnnnnnnnnnnnnnnnnnnnnnnnnnnnnnnnnnnnnnnnnnnnnnnnnnnnnnnnnnnnnnnnnnnnnnnnnnnnnnnnnnnnnnnnnnnnnnnnnnnaggagaatttaaaagctgcacgattcttttcagcgatgtggtgacatttactgacatccgtgctgcctgtgaacctatacacatagtgaacatgctgaactccatgtactccaagtttgacagattaaccagtgtgcacgcagtctataaagt

SEQ ID NO: 32240 - DNA, 117 bp, Macaca Mulatta
acctacgagcagctcgtggcgctggagaacaagttcaaggccacgcgctacctgtcggtgtgcgagcgcctcaacctggcgctgtcgctcagcctcaccgagacgcaagtgaagatc

SEQ ID NO: 32241 - DNA, 912 bp, Macaca Mulatta
aaccaccctcaataaacaccacaaagttcacactgcagaaaggccttatgtatgtggggaatgtgggaaggcttttatgttcaaatctaaacttgttcggcaccagagaactcacactggagaaaggcctttcgagtgcagtgaatgtgggaaattttttagacaaagctatacccttgttgaacaccagaaaattcacactggattaagaccttatgactgtggacagtgcgggaaatcctttatccaaaagtctagcctcattcaacaccaggtggttcacacgggagaaaggccatatgagtgtggcaaatgtgggaagtcctttacacaacactctggcctcattctccaccggaaatctcacactgtggagaggcctcgtgacagcagcaaatgcggaaaatcctacagcccaagagctaacattgtttaactcctaaaactccacactggagaaaaggcttagacctgcagggaatgtgccatctctttcttcagtgttacggctatagagagtctttgtgaaggagccatctgcctaaagttaaacctcatactggtagacctccagatgggtgagactctcatgagttccaggcacatgtgtcttgcaggagctcctttgcacgttctaaactgctggaggcctttgcaggagttaaatcattagtcacccttgtgtactaaggcaagggagatacacctgtgtgctcccattccttggaggaaattccttgagcagtctgagcctttaaggggaattcctttccttttctgactgattacagcatacatctgaccagttttggccagaaggacccagcctgggttctgctggaagctgatgtggaaggcttcccttcatggaaattcttgttctcacacgacacttggtagttttttcagcct

SEQ ID NO: 32242 - DNA, 110 bp, Macaca Mulatta
  misc_feature (1)...(110): n = A,T,C or G
ccttatcctccatttatgcctcggaggctcacaggacgtagtagataccgatcccagcagccaataccacctcccccttatcatcccagcttactgccatatgtgttntc

SEQ ID NO: 32243 - DNA, 899 bp, Macaca Mulatta
  misc_feature (1)...(899): n = A,T,C or G
gggtgtggttttctcccatgtgtcccccaccccccaatttcttgtcccctcttgaagagcagttgtcaccacctgaacaccaaggcattgtattttcgtgcccagttaatttattgacgatgttttaagttctctgcttcagagtttggttagtttcctgaagcgcagcccctgtgaataacaggtggcttttcatggatgtctctagtcagagaaaaatgataaaggcttcaattgaggattaacagaagcagattaacctcagaaatcctgtctggctggcagatttcaagtaaaaaaagaaggtggttttgggggacacttttatttccagttgtctttaaggaaaattaattnnnnnnnnnnnnnnnnnnnnnnncttctggccgaaatttttatgagatatctctcacttgtcttccactttgaaccggttaaagctcatagctgtcagctctgaatgaggaggggagaagccccctgggtctgtcttttaaaggaatccgctgcttgagggccgccttcccctgtggtgtggtgggtcgtttcctcttcctggaagcatcttatgatatcaggaggtaactatgccaaagcattccagacggtttttaaatgtgaagcactccaacccagcagagtccccggtgttccctctgtccccgtctgcccggccccgtgtttctctcctcaagaagtgcaccacagggaaatcacagaagttttagggctcccccagaaaagggggaagcttttttggttcttttcaaaaaacccattagggagagcccgtcccacagtgggaaagggggggggtcctcccttgggggaaatggtaagccccgggtcccctttttaccttttaaaaatggaaggtccccatggaaaaaaaggttttg

SEQ ID NO: 32244 - DNA, 661 bp, Macaca Mulatta
  misc_feature (1)...(661): n = A,T,C or G
gatcacgtattctacaaattccagccttctgtggtcgctgcagcctgtgttggggcctccaggatttgcctgcagctttctccctactggaccagagacctgcagaggatctcaagctattccctggaacacctcagcacgtgtattgaaatcctgctggtnnnnnnnnnnnnnnnnnnnnnnnnnnnnnnnnnnnnnnnnnnnnnnnnnnnnnnnnnnnnnnnnnnnnnnnnnnnnnnnnnnnnnnnnagtgctgttccagccaccagcctacccagccctcggccagccagcgaccaccctggcacagttccagacccccgtgcaggacctatgcttggcctaccgggactccttgcaggcccaccgttcggggagcctgctctcggggagcacaggctcatccctccacaccccgtacctccctctccagcccctggatatgtgtcccgtgcccatccctgcgtcccttagcatgcagatggccattgcagctgagcccaggcactgccacgctaccacctacggaagcagctacttcagtgggagccacatgttccccactggctgctttgacagatagaagacctccagacctcacgaggaagccttggagatctgggcagaggaagaggacactgaagaggagagctcaaccaag

SEQ ID NO: 32245 - DNA, 811 bp, Macaca Mulatta
  misc_feature (1)...(811): n = A,T,C or G
aggtattgctcacacctgtannnnnnnnnnnnnnnnnnnnnnnnnnnnnnnnnnnnnnnnnnnnnnnnnnnnnnnnnnnnagcctggtcaacagagcaagaccctatttctacatacacacaaaaatgagccagatgtagttgtgtgcacctgtagtcctagctacacgggaggcagcggtgggaggatctcttggcaggagttcaaggcttcagtgaaccatgattgcaccactgccctccagcctgggtaacagcaagactttgtctctaaaaaagtaaaatgggaaaaaagctttattagctgtgtcgttaacacagtatattcaggaattgacaaagttttatttttatgcctttaaaatcattgatgtgaatgacttggtagtgatttagagatttaatttgccagagctcactgaaagcagttaatttgagatccttggagaattaaaattggaaactccagtgttcatgaatgctcactttgctccatttcacttgaactcctatcccctcaatgttgtcaagtaggtcaaggtaggcccttaggcctctttcttgaaaggttccccttgggcctggggcattcnnnnnnnnnnnnnnnnnnnnnnnnnnnnnnnnaaaaaaacccaataaaagcatggctttgcattttccaatattcccaattcccttaatcataaatttacacaatacccgtgagttttaaaaggttcaccatttcaaacgaaaggacccttctcccttgggaaggagtccgatacacaaaaaaacccgtgggtgtttaagcccattatacgagagttggt

SEQ ID NO: 32246 - DNA, 1502 bp, Macaca Mulatta
  misc_feature (1)...(1502): n = A,T,C or G
gaaggttgcccacctggctggatacaaccagaacagcacacagatcctggtaaactgcctgagggcactttcaggggccaaggtgatgtgtgtgtccaacaagatgngagattcctccaactgaacttccagagagaccctgaagagnnnnnnnnnnnnnnnnnnnnnnnnnnnnnnnnnnnnnnnnnnnnnnnnnnnnnnnnnnnnnnnnnnnnnnnnnnnnnnnnnnnnnnnnnnnnnnnnnnnnnnnnnnnnnnnnnnnnnnnnnnnnnnnnnnnnnnnnnnnnnnnnnnnnnnnnnnnnnnnnnnnnnnnnnnnnnnnnnnnnnnnnnnnnnnnnnnnnnnnnnnnnnnnnnnnnnnnnnnnnngaatatcaccaaggagcaggtaccacttgtggtggaggagtacctggacaatgtcaatgagcataactggaagatgctacgaaactgtatgatggacatagttcaagatgccactttcgtgtacgccatgctgcagactgttcactaccannnnnnnnnnnnnnnnnnnnnnnnnnnnnnnnnnnnnnnnnnnnnnnnnnnnnnnnnnnnnnnnnnnnnnnnnnnnnnnnnnnnnnnnnnnnnnnnnnnnnnnnnnnnnnnnnnnnnnnnnnnnnnnnnnnnnnnnnnnnnnnnnnnnnnnnnnnnnnnnnnnnnnnnnnnnnnnnnnnnnnnnnnnnnnnnnnnnnnnnnnnnnaaatcccaatgatggaaatctgccctgctggccacgctacaacaaggatgaaaagtacctgcagctggattttaccacgagcgtgggcatgaagctcaaggagaagaagatggctttttgcgtgagtctgtaccagtctcagagacctgagaagcagaggcaattctaagggtggctatgcaggaaggagccaaagaggggtttgccccaccacccaggccctggggagactggccatggacatacctggggacaagagttctacccaccccaatttagaactgcaggagctccctgctgcctccaggccagagctagagcttttgcctgttgtgtgggacctgcactgccctctccagcctgacatcccatgatgccccctacctcaatgttgacatccagttaggccaggccctgtcaacaccatactgtgcccagctctccagcctcgggacaacctctctttttccnnnnnnnnnnnnnnnnnnnnnnnnnnnnnnnnnnnnnnnnnnnnnnnnnnnnnnnnnnnnnnnnnnnnnnnctgcccctgtcactgcacccagcttggcatttaccatccatcctgctcaaccttgtgcccatctgttcacattggcctggaggcctagggcaggttgtgacatggagcaaacttttggtagtttgggatcttctctcccacccgcacttatctcccccagggccactccaaagtctatccacagggatgttctcaataaagaagtgttgatttgacctgaatttctccacctataaaa

SEQ ID NO: 32247 - DNA, 2822 bp, Macaca Mulatta
  misc_feature (1)...(2822): n = A,T,C or G
agatcggggaggaacgggccacagccatttccttgatgcgcaagttcattgcctaccagttcacagacacnnnnnnnnnnnnnnnnnnnnnnnnnnnnnnnnnnnnnnnnnnnnnnnnnnnnnnnnnnnnnnnnnnnnnnnnnnnnnnnnnnnnnnnnnnnnnnnnnnnnnnnnnnnnnnnnnnnnnnnnnnnnnnnnnnnnnnnnnnnnnnnnnnnnnnnnnnnnnnnnnnnnnnnnnnnnnnnnnnnnnnnnnnnnnnnnnnnnnnnnnnnnnnnnnnnnnnnnnnnnnnnnnnnnnnnnnnnnnnnnnnnnnnnnnnnnnnnnnnnnnnnnnnnnnnnnnnnnnnnnnnnnnnnnnnnnnnnnnnnnnnnnnnnnnnnnnnnnnnnnnnnnnnnnnnnnnnnnnnnnnnnnnnnnnnnnnnnnnnnnnnnnnnnnnnnnnnnnnnnnnnnnnnnnnnnnnnnnnnnnnnnnnnnnnnnnnnnnnnnnnnnnnnnnnnnnnnnnnnnnnnnnnnnnnnnnnnnnnnnnnnnnnnnnnnnnnnnnnnnnnnnnnnnnnnnnnnnnnnnnnnnnnnnnnnnnnnnnnnnnnnnnnnnnnnnnnnnnnnnnnnnnnnnnnnnnnnnnnnnnnnnnnnnnnnnnnnnnnnnnnnnnnnnnnnnnnnnnnnnnnnnnnnnnnnnnnnnnnnnnnnnnnnnnnnnnnnnnnnnnnnnnnnnnnnnnnnnnnnnnnnnnnnnnnnnnnnnnnnnnnnnnnnnnnnnnnnnnnnnnnnnnnnnnnnnnnnnnnnnnnnnnnnnnnnnnnnnnnnnnnnnnnnnnnnnnnnnnnnnnnnnnnnnnnnnnnnnnnnnnnnnnnnnnnnnnnnnnnnnnnnnnnnnnnnnnnnnnnnnnnnnnnnnnnnnnnnnnnnnnnnnnnnnnnnnnnnnnnnnnnnnnnnnnnnnnnnnnnnnnnnnnnnnnnnnnnnnnnnnnnnnnnnnnnnnnnnnnnnnnnnnnnnnnnnnnnnnnnnnnnnnnnnnnnnnnnnnnnnnnnnnnnnnnnnnnnnnnnnnnnnnnnnnnnnnnnnnnnnnnnnnnnnnnnnnnnnnnnnnnnnnnnnnnnnnnnnnnnnnnnnnnnnnnnnnnnnnnnnnnnnnnnnnnnnnnnnnnnnnnnnnnnnnnnnnnnnnnnnnnnnnnnnnnnnnnnnnnnnnnnnnnnnnnnnnnnnnnnnnnnnnnnnnnnnnnnnnnnnnnnnnnnnnnnnnnnnnnnnnnnnnnnnnnnnnnnnnnnnnnnnnnnnnnnnnnnnnnnnnnnnnnnnnnnnnnnnnnnnnnnnnnnnnnnnnnnnnnnnnnnnnnnnnnnnnnnnnnnnnnnnnnnnnnnnnnnnnnnnnnnnnnnnnnnnnnnnnnnnnnnnnnnnnnnnnnnnnnnnnnnnnnnnnnnnnnnnnnnnnnnnnnnnnnnnnnnnnnnnnnnnnnnnnnnnnnnnnnnnnnnnnnnnnnnnnnnnnnnnnnnnnnnnnnnnnnnnnnnnnnnnnnnnnnnnnnnnnnnnnnnnnnnnnnnnnnnnnnnnnnnnnnnnnnnnnnnnnnnnnnnnnnnnnnnnnnnnnnnnnnnnnnnnnnnnnnnnnnnnnnnnnnnnnnnnnnnnnnnnnnnnnnnnnnnnnnnnnnnnnnnnnnnnnnnnnnnnnnnnnnnnnnnnnnnnnnnnnnnnnnnnnnnnnnnnnnnnnnnnnnnnnnnnnnnnnnnnnnnnnnnnnnnnnnnnnnnnnnnnnnnnnnnnnnnnnnnnnnnnnnnnnnnnnnnnnnnnnnnnnnnnnnnnnnnnnnnnnnnnnnnnnnnnnnnnnnnnnnnnnnnnnnnnnnnnnnnnnnnnnnnnnnnnnnnnnnnnnnnnnnnnnnnnnnnnnnnnnnnnnnnnnnnnnnnnnnnnnnnnnnnnnnnnnnnnnnnnnnnnnnnnnnnnnnnnnnnnnnnnnnnnnnnnnnnnnnnnnnnnnnnnnnnnnnnnnnnnnnnnnnnnnnnnnnnnnnnnnnnnnnnnnnnnnnnnnnnnnnnnnnnnnnnnnnnnnnnnnnnnnnnnnnnnnnnnnnnnnnnnnnnnnnnnnnnnnnnnnnnnnnnnnnnnnnnnnnnnnnnnnnnnnnnnnnnnnnnnnnnnnnnnnnnnnnnnnnnnnnnnnnnnnnnnnnnnnnnnnnnnnnnnnnnnnnnnnnnnnnnnnnnnnnnnnnnnnnnnnnnnnnnnnnnnnnnnnnnnnnnnnnnnnnnnnnnnnnnnnnnnnnnnnnnnnnnnnnnnnnnnnnnnnnnnnnnnnnnnnnnnnnnnnnnnnnnnnnnnnnnnnnnnnnnnnnnnnnnnnnnnnnnnnnnnnnnnnnnnnnnnnnnnnnnnnnnnnnnnnnnnnnnnnnnnnnnnnnnnnnnnnnnnnnnnnnnnnnnnnnnnnnnnnnnnnnnnnnnnnnnnnnnnnnnnnnnnnnnnnnnnnnnnnnnnnnnnnnnnnnnnngggggcatgtgctccgtgtacctgaaggacagtgagaaggtcgtcagcatttccagtgagcacctggagcccatcacccccacgaagaacaacaaggtnaggtgaaagtgatcctaggcgaggatcgggaagccacgggcgtcctgctgagcattgatggtgaggatggcattgtccgtatggaccttgatgagcagctcaagatcctcaacctccgcttcctgnggaagctcctggaagcctgaagcaggcagggcgggtggacttcggcaggtgaagagtggtcgtccttccgtccctggcccttggctgtgacacaagatcctgctgcagggctaggccgatcgttctgg

SEQ ID NO: 32248 - DNA, 88 bp, Macaca Mulatta
tgaagacctaaatgcatgtgagcctgcttctcctgcccctgaagcaccaactacctcactgctgaatgacctcaagtacagcccatca

SEQ ID NO: 32249 - DNA, 1441 bp, Macaca Mulatta
  misc_feature (1)...(1441): n = A,T,C or G
tcccaggtgctgttcccactgaatccatacaaggaagtacctttgaagagaagatatttcttcagtggagagaaccaactcaaacatacggtgtaatcactttatatgagnnnnnnnnnnnnnnnnnnnnnnnnnnnnnnnnnnnnnnnnnnnnnnnnnnnnnnnnnnnnnnnnnnnnnnnnnnnnnnnnnnnnnnnnnnnnnnnnnnnnnnnnnnnnnnnnnnnnnnnnnnnnnnnnnnnnnnnnnnnnnnnnnnnnnnnnnnnnnnnnnnnnnnnnnnnnnnnnnnnnnnnnnnnnnnnnnnnnnnnnnnnnnnnnnnnnnnnnnnnnnnnnnnnnnnnnnnnnnnnnnnnnnnnnnnnnnnnnnnnnnnnnnnnnnnnnnnnnnnnnnnnnnnnnnnnnnnnnnnnnnnnnnnnnnnnnnnnnnnnnnnnnnnnnnnnnnnnnnnnnnnnnnnnnnnnnnnnnnnnnnnnnnnnnnnnnnnnnnnnnnnnnnnnnnnnnnnnnnnnnnnnnnnnnnnnnnnnnnnnnnnnnnnnnnnnnnnnnnnnnnnnnnnnnnnnnnnnnnnnnnnnnnnnnnnnnnnnnnnnnnnnnnnnnnnnnnnnnnnnnnnnnnnnnnnnnnnnnnnnnnnnnnnnnnnnnnnnnnnnnnnnnnnnnnnnnnnnnnnnnnnnnnnnnnnnnnnnnnnnnnnnnnnnnnnnnnnnnnnnnnnnnnnnnnnnnnnnnnnnnnnnnnnnnnnnnnnnnnnnnnnnnnnnnnnnnnnnnnnnnnnnnnnnnnnnnnnnnnnnnnnnnnnnnnnnnnnnnnnnnnnnnnnnnnnnnnnnnnnnnnnnnnnnnnnnnnnnnnnnnnnnnnnaaggaaactggccaagaagcggaaagagacgatgagcagcacccgacaggagatgaccgtgatggtgaactcaatggacaagagctatgccgagcagggcacaaactgcgacgaggctttctcattcatggacacgcacaatctgaatgggagatnctgtgtcttcaccatcatccttcacaatgaaaacaaatacactgagcacgtcggtgcctaattcctattacccagnnnnnnnnnnnnnnnnnnnnnnnnnnnnnnnnnnnnnnnnnnnnnnnnnnnnnnnnnnnnnnnnnnnnnnnnnnnnnnnnnnnnnnnnnnnnnnnnnnnnnnnnnnnnnnnnnnnnnnnnnnnnnnnnnnnnnnnnnnnnnnnnnnnnnnnnnnnnnnnnnnnnnnnnnnnnnnnnnnnnnnnnnnnnnnnnnnnnnnnnnnnnnnnnnnnnnnnnnnnnnnnnnnnnnnnnnnnnnnnnnnnnnnnnnnnnnnnnnnnnnnnnnnnnnnttgcagacgatcattcccgagtgaggctgcagacaatagaaggagacacaaactcagactatatcaatggcaattatatcgatg

SEQ ID NO: 32250 - DNA, 624 bp, Macaca Mulatta
ctccctggtgtgcaccgagtgtgtgcttctggcctccatggcctacgaccgctacgtggccatctgccacccgctgcactaccacgtcctcgtgaccccggggctgtgcctccagctggtgggcttctccttcgtgagcggcttcaccatctccatgatcaaggtctattttatctccagcgtcacgttctgtggctccaacatcttgaaccacttcttttgtgacatttcccctatcctcaagctggcctgcacggacttctccactgctgagctggtggatttcatcctggccttcatcatcctggtgtttccgcttctggccaccgtgctgtcatatgggcacatcaccctggctgtcctgtgcatcccctcggccactggccgctggagagccttctccacctgtgcctctcacctcaccgtggtcaccatcttctacatgaatatgattttcacgtatgtccggccccaagccattgattcccggagctccaacaagctcatctctgccgtgtacactgttgtcacgccaataattaacccattgatctactgcctgaggaacaaggaatttaaggatgaattgaaaaaggccttgggcttgggtcaaacttcatacta

SEQ ID NO: 32251 - DNA, 1291 bp, Macaca Mulatta
  misc_feature (1)...(1291): n = A,T,C or G
gatgacactcgcttaagtcacgacgccctgccagagcgcacggtgatccagctggattcctcgcccaggtncaggtttgtggtgctattcaacccgctggaacaggagcggttcagcatggtgtccctgctggtcaactcgccccgtgtgcgcgtcctttcggaggagggtcagcccctggccgtgcagatcagcgcacactggagctctgccaccgaggtggtccctgatgtctaccaggtgnnnnnaggtgtctgtgcctgtccgcctgccagccctgggcctgggcatgctgcagctacagctgggcctggatgggcaccgcacgctgccctcctctgtgcgtgtctacctgcacggccggcagctgtctgtcagcaggcacgaagcgttccctctccgcgtcattgactctggcagcagtgacttcgccctcagcaaccgctacatgcaggtctggttctcaggccttactgggctcctcaagnnnnnnnnnnnnnnnnnnnnnnnnnnnnnnnnnnnnnnnnnnnnnnnnnnnnnnnnnnnnnnnnnnnnnnnnnnnnnnnnnnnnnnnnnnnnnnnnnnnnnnnnnnnnnnnnnnnnnnnnnnnnnnnnnnnnnnnnnnnnnnnnnnnnnnnnnnnnnnnnnnnnnnnnnnnnnnnnnnnnnnnnnnnnnnnnnnnnnnnnnnnnnnnnnnnnnnnnnnnnnnnnnnnnnnnnnnnnnnnnnnnnnnnnnnnnnnnnnnnnnnnnnnnnnnnnnnnnnnnnnnnnnnnnnnnnnnnnnnnnnnnnnnnnnnnnnnnnnnnnnnnnnnnnnnnnnggtgcagccccgacggtatctgaagaagctccccctccaggccaacttctatcccatgccagtcatggcctatatccaggacgcacataagcgcctcacactgcacactgcccaggccctgggtgtctctagcctcaaagatgnnnnnnnnnnnnnnnnnnnnnnnnnnnnnnnnnnnnnnnnnnnnnnnnnnnnnnnnnnnnnnnnnnnnnnnnnnnnnnnnnnnnnnnnnnnnnnnnnnnnnnnnnnnnnnnnnnnnnnnnnnnnnnnnnnnnnnnnnnnnnnnnnnnnnnnnncagctacccatccctcctcagccacctgacctccatgtacctgaacaccccggcgctcgctctgcctgtagccaggacgcagctcccaggccctggtctgcgctcatttcatccgctggcttcctcactgccttgtgacttccacctgctcaacctacgtacgctgcaggctgag

SEQ ID NO: 32252 - DNA, 2133 bp, Macaca Mulatta
  misc_feature (1)...(2133): n = A,T,C or G
acccaaaggagtgttgtgtggacacgactcaccctgaggagtctccagtggtggaagtggggcacgcggccactggtcggtgctgcctggtcctgggcccggggcagagcctgtgtgttctccacctgtgcctgctcctggtggtctctgctttgttttctgtcttgtcttttgtgccactcttgactctcctgtttctgccgctgttttctgaggaatgtagcatccgctgcagctggccacacggaaggccctctgggaaccccaccccaccagagccgctccggcagctcttcccgccactgaatgcgttctgcagcatgtagcatgcccacctagctccctggccagggccctggggaggcagagggtacccnnnnnntgagggcttagaaatgactttctctgtgcggctggaaccgcctccttcctccagtgaagcacgaggtcttggttccagggttcctggccaggtgcccccttagcattcgttcttcatctcctgtctcttcaagcctccccactccaccatgctgaaggagctctgccggtgggcctgggcaggcagccgcaagagggcatgttagctgctaaagcannnnnnnnnnnnnnnnnnnnnnnnnnnnnnnnnnnnnnnnnnnnnnnnnnnnnnnnnnnnnnnnnnnnnnnnnnnnnnnnnnnnnnnnnnnnnnnnnnnnnnnnnnnnnnnnnnnnnnnnnnnnnnnnnnnnnnnnnnnnnnnnnnnnnnnnnnnnnnnnnnnnnnnnnnnnnnnnnnnnnnnnnnnnnnnnnnnnnnnnnnnnnnnnnnnnnnnnnnnnnnnnnnnnnnnnnnnnnnnnnnnnnnnnnnnnnnnnnnnnnnnnnnnnnnnnnnnnnnnnnnnnnnnnnnnnnnnnnnnnnnnnnnnnnnnnnnnnnnnnnnnnnnnnnnnnnnnnnnnnnnnnnnnnnnnnnnnnnnnnnnnnnnnnnnnnnnnnnnnnnnnnnnnnnnnnnnnnnnnnnnnnnnnnnnnnnnnnnnnnnnnnnnnnnnnnnnnnnnnnnnnnnnnnnnnnnnnnnnnnnnnnnnnnnnnnnnnnnnnnnnnnnnnnnnnnnnnnnnnnnnnnnnnnnnnnnnnnnnnnnnnnnnnnnnnnnnnnnnnnnnnnnnnnnnnnnnnnnnnnnnnnnnnnnnnnnnnnnnnnnnnnnnnnnnnnnnnnnnnnnnnnnnnnnnnnnnnnnnnnnnnnnnnnnnnnnnnnnnnnnnnnnnnnnnnnnnnnnnnnnnnnnnnnnnnnnnnnnnnnnnnnnnnnnnnnnnnnnnnnnnnnnnnnnnnnnnnnnnnnnnnnnnnnnnnnnnnnnnnnnnnnnnnnnnnnnnnnnnnnnnnnnnnnnnnnnnnnnnnnnnnnnnnnnnnnnnnnnnnnnnnnnnnnnnnnnnnnnnnnnnnnnnnnnnnnnnnnnnnnnnnnnnnnnnnnnnnnnnnnnnnnnnnnnnnnnnnnnnnnnnnnnnnnnnnnnnnnnnnnnnnnnnnnnnnnnnnnnnnnnnnnnnnnnnnnnnnnnnnnnnnnnnnnnnnnnnnnnnnnnnnnnnnnnnnnnnnnnnnnnctgcccacaggacaagaagtgggtaagggcaggaaggaaatgaacagagttagctcccaggctcctgtctctgcctgagcctctattcttctactatcagagaagggggccattgggtgcatagagatggggaggaggccactgggctgagttttctctttaggcagaaatgctctccccaggcccattgcgttcgtcaagttcttagaaatggacaaagggctctgtcttcctccatcctagtggaggatcaagaaggaaagtcccttgcaaaagggtattttaatctcctgtttatgatttattcacctctacagcagtcactgtcagagtggtgtgaaaatactctgcacctttgggatgatagggttgttagtgacccacaggacagtagagacgtttgctgatgtagcactgagtggtgatacccagaccagcagtcaccccaggaagtgggggctacccataccctcattcctctgctggggagctgcctgcagagaggcctgccactggggggttccaggccgtggtgccccttgcctctggggaag

SEQ ID NO: 32253 - DNA, 334 bp, Macaca Mulatta
ctatacaggtgaagatctggaaagaaatgatggatctacagaaaaaccctatttcataacccctaacctgcacggaattctgatcaagaagcaactagttccccagaagcagaaagagtagaaaagctccaaacagtgtcactcacttttaagtagaagttgtgtaaattaggttgattgtaatttggaaatgtcgcttttgagtaatgtgaaatttctgtgcttaattctaaaaagtcagcacctggtgccacgtgagagtgtcaggtatttggtgatgttagctgctgtctgctttatagacggtggtcccggcaaaagatcaaaatgttaa

SEQ ID NO: 32254 - DNA, 620 bp, Macaca Mulatta
ttgcgatagacgcagcctgtttcagctggagacggtcgccattactcagatgaacaagtgctacctgccgcagaatctgggggaggccctggactttcgtgagaggcagaagaatggcttggatgagagcaacacctatcagctcccagacggctcccgcgtggagctgacccccatgcagcgggtggctcctgagatgttctttagcccgcaggtgttcgagcagccagggcccagcatcccacgggccatcgtggaatccgtggagtcctgcgagatctccctgcgccccctgctggtctcccatgtgatggcctgcgggggcaacaccctctatcccgggttcacaaagcgcctgttcagggagctgatgggggatcgtgtctcctccaccaaggccacagtctgggcgggttccaatagaaacttcagtgtctggctaggagcgtccgtggtggctcacctttctacctaccagtctgagtggatgtcccgagaggagtatggtgagcataggaggatgtgaccctactggctgtctcctgagaatgggctcctgttagatgggcccaggcagattaattttagcaaaatgttctgggtggtggtagaatgaggtg

SEQ ID NO: 32255 - DNA, 104 bp, Macaca Mulatta
tgctcgcacagcaggtgctgagccacccacctatgagtgcagccactgtcgcaagacgttcagctcccggaaaaactacaccaagcacatgttcatccactcgg

SEQ ID NO: 32256 - DNA, 780 bp, Macaca Mulatta
  misc_feature (1)...(780): n = A,T,C or G
ggggtaaaaaccgggccagccattccctggttcccctttccgtgggagccagcgttctccttttccaattacaaggggttaccagaaggccacttggtgaaactgtgcgtgtttggaggtggtggaaacccggagagggagaaagaagtctcaaagggcctgatgtgagaagttgaaagggttcgcaggttagggaatgaagggggggggggtggcggcgacacccatttcggtgactttctccccatttcatgtaaacaaaattgccagggaccagttaccatggatatgtttttctagaaactcaatgtctgcacaatccatagaactggaggatgtgtctgtttcctgttgggtttttctcgtcccttacatcagatgaaattcaatttatacctagaataacaggggtagtgggggtgggggttgttgagacaggctnnnnnnnnnnnnnnnnnnnnnacagtgatgcaattacagctcactgcattttcgaactcctgggctcgagcgatcctcctggctcagcctctgtagtagctgggacgacaggcgtgtaccaccacgcccagcttatttttaaatttttggatagacaaggtttcactacgttgcccaggctggagggtggtggtttttgtatttcttgtgtgaaaggtgtctgtgatgtttggaatttgagaatggatttagacaatgctaagtacagtctgctgggttttgctttgtttcgggttctttggtttttggtttttcttgccgtggtgcaaaactctatcc

SEQ ID NO: 32257 - DNA, 798 bp, Macaca Mulatta
  misc_feature (1)...(798): n = A,T,C or G
gggacagagccctaacagattatatcactcggctggaggcactgcaaagacgacttggaactatacagtcaggttcaactactcaatttcatgctggcatgagaagataatccattgaaacatcattagttgaagtgattttaaacagatttcattttgtaaatcattggttcttttgtgcttttgtattgtgaatatttgatgggaccaatatgaacacagcttatgattgtatacaaatcccttgccagcacatgaaaacaaactggaatttgtatatataagcattgtgtatgtattcatgcacaataatcattgaattacctgtatatttgtggaatgctaatttaaaacattaaattatgaaccttgtgtatttatcaaatgggtgaaaagattaaacttttacgcattacagtaccgctgaatgtgtagctcgaggtgtcctgcactttccttataaggctactgaagttacatgttttgcctaatatattctactggtgatgaaaacagataccacttgtagagacctatttttgtataatggtagaagtttcgaattttatggggtattttgtcaagtactgaaataaaaatgacttcaccatttccaaannnnnnnnnnnnnnnnnnnnnnnnnnntnnnnnnnnnnnnncgnnnnnnnnncnnngcttttcaaaaccatttcgttttggccgcgcggggccccagtaggttaaagtggaacatgggtccataagcctggttttccctagggagaatccccggggtcccatggaccataaaggcctttg

SEQ ID NO: 32258 - DNA, 653 bp, Macaca Mulatta
  misc_feature (1)...(653): n = A,T,C or G
gggagaacaagcacggctgggtccggcgcctgagcacgccggccggcgtccaggtcatccttcgccgaatgctcaagggccgcaagtcgctgagccattgaggatcgcgatgctgtcggcgggacccccatagaagcatcgccctcacctcgcgaccttgcctggcgctgtttttgcagggagctggggagcaggaacgcctcggacttgagtgctctccgtattgtggggttgaaggctgcatgggagcttgccaagtctctttttaggctttttaggaagcctaaattaggaagcatttcgaacctgcgcaacagaccgaagaacagtacaacgaacctccttgtacccagtacacagccctgactaccgaccacctacaacccgtccctgccccatccctggttctttttgagctgatctcaagcatcggatgatttcttctataaatatttcttgtatctcggaaaggatgtatctctcccagaagagagctccttaaattataataccaaagcgtttcccnnnaaaagaaaacagaaaaaaatataacatggcggccccctggccctcaaaagcttttaaaactttcttgtgccccggcccaaagggaaaaaaagggcaaacgtttccaggaaacccggcatgaaagc

SEQ ID NO: 32259 - DNA, 740 bp, Macaca Mulatta
  misc_feature (1)...(740): n = A,T,C or G
nnnnnnnnnnnnnnnnnnnnnnnnnnnnnnnnnnnnnnnnnnnnnnnnnnnnnnnnnnnnnnnnnnnnnnnnnnnnnnnnnnnnnnnnnnnnnnnnnnnnnnnnnnnnnnnnnnnnnnnnnnnnnnnnnnnnnnnnnnnnnnnnnnnnnnnnnnnnnnnnnnnnnnnnnnnnnnnnnnnnnnnnnnnnnnnnnnnnnnnnnnnnnnnnnnnnnnnnnnnnnnnnnnnnnnnnnngatcgtttatgatgtgaaacgtgacatgtatagaaagctgtcttcgctcaaaattgtgtttttctgtaattcaaattccatagtccaaatggcatggtttgtaaccataactaaattgtcagtctgacatttaatgtctttctatggacaacattaaatctccctctcttctgtaattgtttttggtttgtgaaattagtcttatttttatatacnnnnnnnnnnnnnnnnnnnnagatagggtctttgttgccaggctggaagtgcagtgtgtgatcatggctcactgtaactttgaactcctgggctcaagtgatcttcctgcctcagcctcttgagtagctagtactacagacgtgtgccaccacgtctgagtaacgtttaaattttatgcagagaccaggttttgnnnnnnnnnnnnnnnnnnntttgaactcctgagctcaagcgatactcccaccttggtctcccaacgggctgggattgcagagttgagccactatacc

SEQ ID NO: 32260 - DNA, 1829 bp, Macaca Mulatta
  misc_feature (1)...(1829): n = A,T,C or G
gtaacgcctgcggagaactgaagatgctgtccgtacgcgttgtgcggcgggtccgcgccctccctcggcgggccggagtggtctccataaatgcttgggtcatcttcatgctgcaaggaacctccatgcctctaacactcatcttcagaagactgggactgctgagatgtcctctattcttgaagagcgtattcttggagctgatatctctgttgaccttgaggaaactgggcgtgtcttaagtattggtgatggtattgcccgcgtacatgggctgaggaatgtcaggcagaagaaatggtagagttttcttcaggcttaaagggtatgtccttgaacttggaatctgacaatgttggtgttgtcgtgtctggaaatgataaactgattaaggaaggagatatagtgaagaggacaggagccattgtggacgttccagttggtgaggagctgttgggtcgtgtagttgatgctcttggtaatgctattgatggaaagggtccaattggttccaagacccgtaggcgagttggtctgaaagcccctggtatcattcctcgaatttcagtgcgggaaccaatgcagactggcattaaggctgtggatagcttggtgccaattggtccgtggtcagcgtgagcnnnnnnnnnnnnnccgacagactggtgaaaactcaattgctattgacacaatcattaaccagaaacgtttcaatgatggatctgatgaaaagaagaagctgtactgtatctatgttgctattggtcaaaagagatccactgttgcccagttggtgaagagacttacagatgcagatgccatgaagtacaccattgtggtgtcagctacagcctcggatgctgccccacttcagtacctggctccttactctggctgttccatgggagagtattttagagacaatggcaaacatgcttnnnnnnnnnnggatgacgacttatccnnnnnnnnnnnnnnnnnnnnnnnnnnnnnnnnnnnnnnnnnnnnnnnnnnnnnnnnnnnnnnnnnnnnnnnnnnnnnnnnnnnnnnnnnncccgattgttgggagagagcagccaaaatgaacgatgcttttggtggtggctccttgactgctttgccagtcatagaaacacaggctggtgatgtgtctgcttacattccaacgaatgtcatttccatcactgatggacagatcttcttggaaacagaattgttctacaaaggtatccgccctgccattaacgttggtctgtctgtgtctcgtgtcggatctgctgcccaaaccagggctatgaagcaggtggcaggtaccatgaagctggaattggctcagtatcgtgaggttgctgcttttgcccagtttggttctgacctcgatgctgccactcaacaacttttgagtcgtggtgtgcgtctaactgagttgctgaagcaaggacagtattctcccatggctattgaagaacaagtggctgttatctatgcgggtgtaaggggctatcttgataaactggagcccagcaagattacaaagtttgagaatgctttcttgtctcatgttatcagccagcaccaagccctgtttgggtactatcagggctgatggaaagatctcagaagaatcagatgcaaagctgaaagagattgtaacaaagttcttggctggatttgaagcttaaactcctgtggattcacatcaaataccagttcaattttgccattgttctagtaacattagttccatttgtaaaagggttactctgatactccttatgtacagaaatcacatgaaaaataaaggttccataatgtgtaaaaaaaaaaaa

SEQ ID NO: 32261 - DNA, 587 bp, Macaca Mulatta
  misc_feature (1)...(587): n = A,T,C or G
agtggtgggcatgttaagcttgaagaagatgtagatcttggctacgtggaagatgggacgccttgtggtccccaaatgatgtgcttagaacacaggtgtcttcctgtggcttctttcaactttagtacttgcttgagcagtaaagaaggcactatttgctcaggaaatggagnnnnnnnnnnnnnnnnnnnnnnnnnnnnnnnnnnnnnnnnnnnnnnnnnnnnnnnnnnnnnnnnnnnnnnnnnnnnnnnnnnnnnnnnnnnnnnnnnnnnnnnnnnnnnnnnnnnnnnnnnnnnnnnnnnnnnnnnnnnnnnnnnnnnnnnnnnnnnnnnnnnnnnnnnnnnnnnnnnnnnnnnnnnnnnnnnnnnnnnnnnnnnnnnnnnnnnnnnnnnnnnnnnnnnnnnnnnnnnnnnnnnnnnnnnnnnnnnnnnnnnnnnnnnnnnnnnnnnnnnnnnnnnnnnnnnnnnnnnnnnnnnnnnnnnnnnnnnnnnnnnnnnnnnnnnnnnnnnnnnnnnngattccagacacaaaacatatttcttacctctgtgaaaatgggcgacctcgaagtaactcttggcaaggta

SEQ ID NO: 32262 - DNA, 1898 bp, Macaca Mulatta
  misc_feature (1)...(1898): n = A,T,C or G
agtccgaggagaaagctgatctcagtggactcaagaagtgtctccctcctccccctggagttccgcaaagactcgagctatgagctgcaggtgcgggcagggcccatgcctggctcttcctaccaggggacctggagtgagtggagtgatccggtcatctttcagacccagtcagaggnnnnnnnnnnnnnnnnnnnnnnnnnnnnnnnnnnnnnnnnnnnnnnnnnnnnnnnnnnnnnnnnnnnnnnnnnnnnnnnnnnnnnnnnnnnnnnnnnnaggctatggaagaagatatgggccgtccccagccccgagcagttcttcgtgcccctgtacaagggctgcagcggagacttcaannnnnnnnnnnnnnnnnnnnnnnnnnnnnnnnnnnnnnnnnnnnnnnnnnnnnnnnnnnnnnnnnnnnnnnnnnnnnnnnnnnnnnnnnnnnnnnnnnnnnnnnnnnnnnnnnnnnnnnnnnnnnnnnnnnnnnnnnnnnnnnnnnnnnnnnnnnnnnnnnnnnnnnnnnnnnnnnnnnnnnnnnnnnnnnnnnnnnnnnnnnnnnnnnnnnnnnnnnnnnnnnnnnnnnnnnnnnnnnnnnnnnnnnnnnnnnnnnnnnnnnnnnnnnnnnnnnnnnnnnnnnnnnnnnnnnnnnnnnnnnnnnnnnnnnnnnnnnnnnnnnnnnnnnnnnnnnnnnnnnnnnnnnnnnnnnnnnnnnnnnnnnnnnnnnnnnnnnnnnnnnnnnnnnnnnnnnnnnnnnnnnnnnnnnnnnnnnnnnnnnnnnnnnnnnnnnnnnnnnnnnnnnnnnnnnnnnnnnnnnnnnnnnnnnnnnnnnnnnnnnnnnnnnnnnnnnnnnnnnnnnnnnnnnnnnnnnnnnnnnnnnnnnnnnnnnnnnnnnnnnnnnnnnnnnnnnnnnnnnnnnnnnnnnnnnnnnnnnnnnnnnnnnnnnnnnnnnnnnnnnnnnnnnnnnnnnnnnnnnnnnnnnnnnnnnnnnnnnnnnnnnnnnnnnnnnnnnnnnnnnnnnnnnnnnnnnnnnnnnnnnnnnnnnnnnnnnnnnnnnnnnnnnnnnnnnnnnnnnnnnnnnnnnnnnnnnnnnnnnnnnnnnnnnnnnnnnnnnnnnnnnnnnnnnnnnnnnnnnnnnnnnnnnnnnnnnnnnnnnnnnnnnnnnnnnnnnnnnnnnnnnnnnnnnnnnnnnnnnnnnnnnnnnnnnnnnnnnnnnnnnnnnnnnnnnnnnnnnnnnnnnnnnnnnnnnnnnnnnnnnnnnnnnnnnnnnnnnnnnnnnnnnnnnnnnnnnnnnnnnnnnnnnnnnnnnnnnnnnnnnnnnnnnnnnnnnnnnnnnnnnnnnnnnnnnnnnnnnnnnnnnnnnnnnnnnnnnnnnnnnnnnnnnnnnnnnnnnnnnnnnnnnnnnnnnnnnnnnnnnnnnnnnnnnnnnnnnnnnnnnnnnnnnnnnnnnnnnnnnnnnnnnnnnnnnnnnnnnnnnnnnnnnnnnnnnnnnnnnnnnnnnnnnnnnnnnnnnnnnnnnnnnnnnnnnnnnnnnnnnnnnnnnnnnnnnnnnnnnnnnnnnnnnnnnnnnnnnnnnnnnnnnnnnnnnnnnnnnnnnnnnnnnnnnnnnnnnnnnnnnnnnnnnnnnnnnnnnnnnnnnnnnnnnnnnnnnnnnnnnnnnnnnnnnnnnnnnnnnnnnnnnnnnnnnnnnnnnnnnnnnnnnnnnnnnnnggtctgaataccgactctgataccttctggctgtgctacctgagccaagtcgccgcccctctctggtctaaagtttccttgtccggacaatggggaaggcatgacccacctgggggaaattggcaatgtcacccatgtacagtacacagcccagagcagaccctcaataaacgtcagcttccttc

SEQ ID NO: 32263 - DNA, 134 bp, Macaca Mulatta
gacatccatgggctccacaaggtcattgataacaccaatgtcactcagctgcagctggaagcagagatcgaggctctcaaagaggagctgctcttcatgaagaagaaccatgaagaggaggtaaagagcctata

SEQ ID NO: 32264 - DNA, 717 bp, Macaca Mulatta
cagactcccagtgctacgaggaccaagttcactggcaggtgagacatcactgggcacttacaccctctgagtctcccttccctgccttgtctcccatggcccaagctgccttcttccttccttgccgctgcttctcctctggggtacactcctgagctgtggctcccaggctcctggagctaccctttcacctctacccactcctgccttccaggtgcctggcgagcatgaagatgaagcccagagacctctgagggtggaggaggcagatactcaggcctaacccactgctggcccctgagaggacacgctccttttcaaagatgctgactggctgctactgggaagttctttttgagcccccattcctctggctgcaagaagggagccatgagccagaaggaggcccctttccacaggcagcatctccacagggaaaggggcaacaggaggctgggagatggtggggagtggggccataactgggtacggcggggggaacctcaccagctacctgaaccgactgccctaccagcctgcacttgggtagaagaggccaaagtgaagcacccaagtgatccactggccccatgtcacacagttacagtgaagcctgagccaggcctggtttgagggtgataaacgccaccatctctaagggttctgactccttgtctttgtgccctgggaacataagaagttcctcttaccttctaa

SEQ ID NO: 32265 - DNA, 1390 bp, Macaca Mulatta
  misc_feature (1)...(1390): n = A,T,C or G
caggtaaaattttccataaccttatggagagaaaggactttgagacatggcttgataacatttctgttacatttctttctctgacggacttgcagaaaaatgaaactctggatcacctgattagtctgagtggggcagtccagctcaggcatctctccaataacctagagactctcctcaagcgggacttcctcaaactccttcccctggagctcagtttttatttgttaaaatggctcgatcctcagactttactcacatgctgcctcgtctctaaacagtggaataaggtgataagtgcctgtacagaggtgtggcagactgcatgtaaaaatttgggctggcagatagatgattctgttcaggacgctttgcactggaagaaggtttatttgaaggctattttgagaatgaagcaactggaggaccatgaagcctttgagacctcatcattaattggacacagtgccagagtgtatgcactttactacannnnnnnnnnnnnnnnnngggtcagatgacttgtctgcaaagctgtgggatgtgagcacagggcagtgcgtttatggcatccagacccacacttgtgcagcggtgaagtttgatgaacagaagcttgtgacaggctcctttgacaacactgtggcttgctgggaatggagttccggagccaggacccagcactttcgggggcacacgggggcggnnnnnnnnnnnnnnnnnnnnnnnnnnnnnnnnnnnnnnnnnnnnnnnnnnnnnnnnnnnnnnnnnnnnnnnnnnnnnnnnnnnnnnnnnnnnnnnnnnnnnnnnnnnnnnnnnnnnnnnnnnnnnnnnnnnnnnnnnnnnnnnnnnnnnnnnnnnnnnnnnnnnnnnnnnnnnnnnnnnnnnnnnnnnnnnnnnnnnnnnnnnnnnnnnnnnnnnnnnnnnnnnnnnnnnnnnnnnnnnnnnnnnnnnnnnnngtgcttaaagacattgtctgtctctgaggatagaagcatctgcctgcagccaagactgcattttgatgggaaatacattgtctgcagttcagcacttggtctctaccagtgggactttgctagttatgatattctcagnnagggtcatcaagccacctgagatagcaaacttggccttgctgggctttggagatatctttgccctgctgtttgacaaccgctacctgtacatcatggacttgcggacagagagcctgattagtcgctggcctctgccagagtacatgaagtcaaagaggaggctcaagcttcctggcaggcgaagcatcctggctgaatggattggatgggcacaatgacacgggcttggtctttgccaccagcatgcctgaccacagtattcacctggtgttgtggaaggagcacggctg

SEQ ID NO: 32266 - DNA, 92 bp, Macaca Mulatta
aggtttacaaccaggcactgactacaagatctacctgtacaccctgaacgacaatgcccggagctcccctgtggtcatcgacgcctccactg

SEQ ID NO: 32267 - DNA, 1433 bp, Macaca Mulatta
  misc_feature (1)...(1433): n = A,T,C or G
gaatggcatcatcactggcgtgtacccggcgagcccctccagttggcttatcgtggtggtgggcgtgatgacaacaatgtatgccaagatcgacccctcgttaggaataattgcaaaaatcaatcggaccctggaaacnnnnnnnnnnnnnnnnnnnnnnnnnnnnnnnnnnnnnnnnnnnnnnnnnnnnnnnnnnnnnnnnnnnnnnnnnnnnnnnnnnnnnnnnnnnnnnnnnnnnnnnnnnnnnnnnnnnnnnnnnnnnnnnnnnnnnnnnnnnnnnnnnnnnnnnnnnnnnnnnnnnnnnnnnnnnnnnnnnnnnnnnnnnnnnnnnnnnnnnnnnnnnnnnnnnnnnnnnnnnnnnnnnnnnnnnnnnnnnnnnnnnnnnnnnnnnnnnnnnnnnnnnnnnnnnnnnnntatctagagtcggtgaggcctcttatgaaggaagaagacttcaaacggatgacggcacttgctcaagactttgctgtcagtcttggaccaagactacagtggtatttgannnnnnnnnnnnnnnnnnnnnnnnnnnnnnnnnnnnnnnnnnnnnnnnnnnnnnnnnnnnnnnnnnnnnnnnnnnnnnnnnnnnnnnnnnnnnnnnnnnnnnnnnnnnnnnnnnnnnnnnnnnnnnnnnnnnnnnnnnnnnnnnnnnnnnnnnnnnnnnnnnnnnnnnnnnnnnnnnnnnnnnnnnnnnnnnnnnnnnnnnnnnnnnnnnnnnnnattcgtcttttgggatccacgattccactctgctccgctcagtgggagcgaatgtttaacacttcccggatcccaggagaggagacagnnnnnnnnnnnnnnnnnnnnnnnnnnnnnnnnnnnnnnnnnnnnnnnnnnnnnnnnnnnnnnnnnnnnnnnnnnnnnnnnnnnnnnnnnnnnnnnnnnnnnnnnnnnnnnnnnnnnnnnnnnnnnnnnnnnnnnnnnnnnnnnnnnnnnnnnnnnnnnnnnnnnnnnnnnnnnnnnnnnnnnnnnnnnnnnnncagagttccctgggccaggtgtcgccaggcctattttggacgggggaaacttaaacagtctcttgatgctgtggagaaggcagcgttcttcgtgacgttagatgaaactgaacaaggatacagaacggaagacccagatacatcgatggacagctacgccaagtctctactacatggccaatgttatgacaggtnnnnnnnnnnnnnnnnnnnnnnnnnnnnnnnnnnnnnnnnnnnnnnnnnnnnnnnnnnnnnnnnnnnnnnnnnnnnnnnnnnnnnnnnnnnnnnnnnnnnnnnnnnnnnnnnnnnnnnnnnnnnnctccagttgggctatgcagaggatgggcactgcaaaggcgacaccaatccgaacattccgtaccccaccaggctgcagtgggacatccccgggga

SEQ ID NO: 32268 - DNA, 1691 bp, Macaca Mulatta
  misc_feature (1)...(1691): n = A,T,C or G
gggatggagtcctggccctggataatttccaccgctggttccagccggccatcccctcctggctgcagaagacgtacaacgtggccctggcgcgggtgcagcgcgctgtgcaaatggatgagnnnnnnnnnnnnnnnnnnnnnnnnnnnnnnnnnnnnnnnnnnnnnnnnnnnnnnnnnnnnnnnnnnnnnnnnnnnnnnnnnnnnnnnnnnnnnnnnnnnnnnnnnnnnnnnnnnnnnnnnnnnnnnnnnnnnnnnnnnnnnnnnnnnnnnnnnnnnnnnnnnnnnnnnnnnnnnnnnnnnnnnnnnnnnnnnnnnnnnnnnnnnnnnnnnnnnnnnnnnnnnnnnnnnnnnnnnnnnnnnnnctgtgtgtggtggtgactgacatggagcagctgcggctggtgatcggcaagttgcccacccagctggcatgggaggccctggagcagcgggtaggggctgtgctggagcaggggcagctgcagaacacgctgcatgcccagctgcagagcgcgctggccgggctgggccatgagatccgcactggcgtccgaaccctggccgagcagncagttggaggtgggcatcgccaagcacatccagaaactggtgggcgtcagggagtccgtcctgcctgaggatgnnnnnnnnnnnnnnnnnnnnnnnnnnnnnnnnnnnnnnnnnnnnnnnnnnnnnnnnnnnnnnnnnnnnnnnnnnnnnnnnnnnnnnnnnnnnnnnnnnnnnnnnnnnnnnnnnnnnnnnnnnnnnnnnnnnnnnnnnnnnnnnnnnnnnnnnnnnnnnnnnnnnnnnnnnnnnnnnnnnnnnnnnnnnnnnnnnnnnnnnnnnnnnnnnnnnnnnnnnnnnnnnnnnnnnnnnnnnnnnnnnnnnnnnnnnnnnnnnnnnnnnnnnnnnnnnnnnnnnnnnnnnnnnnnnnnnnnnnnnnnnnnnnnnnnnnnnnnnnnnnnnnnnnnnnnnnnnnnnnnnnnnnnnnnnnnnnnnnnnnnnnnnnnnnnnnnnnnnnnnnnnnnnnnnnnnnnnnnnnnnnnnnnnnnnnnnnnnnnnnnnnnnnnnnnnnnnnnnnnnnnnnnnnnnnnnnnnnnnnnnnnnnnnnnnnnnnnnnnnnnnnnnnnnnnnnnnnnnnnnnnnnnnnnnnnnnnnnnnnnnnnnnnnnnnnnnnnnnnnnnnnnnnnnnnnnnnnnnnnnnnnnnnnnnnnnnnnnnnnnnnnnngcacgtgggctctggaccacctgggttcagactccagcttcatcactgcttagcagccttggacaggttcctggtgcagatgagaatagttctggcttctgctgaggattaaatgggtcatgtgaggtgctgagcgtggtgtcagtacaaaggaagtggtcagtgattattagctgtagtgacgatgacgatgacagtgcccacctccctgtggaatctgggcgctgaagaggccgcctgccctcctagagttctgttccacccccacaggtatagtcagggccccttggagcccagccgtttttatttcttaaaccatgtatatannnnnnnnnnnnnnngagatggagtcttgctctgtcgccagactggagtgcagtggcgccatctcagctcactgcaacctctgccaccgggttcaagtgattccctgcctcagcctcccaagtagctgggactac

SEQ ID NO: 32269 - DNA, 525 bp, Macaca Mulatta
  misc_feature (1)...(525): n = A,T,C or G
cctgattcaaataactttgcttaaaatttttctgtattttaacttgtctagggttttctacttcttctatttttataatattttctcattttttagattactaaacattatacttatccacatgtgccaagatgtgccatttaggtctctgcagaagtcagctgtttggtattatcacctgccatatatgttgtgtgcagcagcagtaagaagtatatgctccgccactgctctttctcatgattattttctccattcctattaaaacaaataattgttatgttaattcaataaagcaaaccaataaggaatgaaatgcatggcccaaaacatagaaaatgaaaatcgtttgaccatttatgcaattattgaatccaattaagatgatccattttanatttaatatatgctcgctttttggatgtgttatgcattgatgctaagtgaatggatctaagtaaatctattgatatctctactgggctgttttattttatttgncntaatctaagtttgctttctggt

SEQ ID NO: 32270 - DNA, 492 bp, Macaca Mulatta
ggtccattttgaatcaagaaagattcattgaagactcctttgagaagagtgttttgaagaaggaaaaagaaatactgtttgagagacggcaaacagacaaaaagcgtgatagaaatatatatttttgttgtatatgaaacttctgagagaccttcctagagtgaacgtggagaacataaaagggagtaaattaaggaatgactgaatttgtgggtcttgatggaaaaaccgctggtcttctttttctgtagggaaaccagctggtgattcagtcctaggaattatgtctctgctgtgggcagttatcataaactcttctcacaatcagagctgctctttgtcctctgtgaatgatggtacttttgcttctatttcatcagtgcttccaaggatgaatgaaaatgtatagcatctgcccaaacctaaaaagtactgtttatcacaagagctttgtaaggtacttcacttgcattttaaaattcgttagtgctc

SEQ ID NO: 32271 - DNA, 4568 bp, Macaca Mulatta
  misc_feature (1)...(4568): n = A,T,C or G
acgtatacgggctccatcctggtggccgtgaacccctaccagctgctctccatctactcaccagagcacatccgccagtataccaacaagaagattggggagatgcccccccacatctttgccattgctgacaactgctacttcaacatgaaacgcaatagccgtgaccagtgctgcatcatcannnnnnnnnnnnnnnnnnnnnnnnnnnnnnnnnnnnnnnnnnnnnnnnnnnnnnnnnnnnnnnnnnnnnnnnnnnnnnnnnnnnnnnnnnnnnnnnnnnnnnnnnnnnnnnnnnnnnnnnnnnnnnnnnnnnnnnnnnnnnnnnnnnnnnnnnnnnnnnnnnnnnnnnnnnnnnnnnnnnnnnnnnnnnnnnnnnnnnnnnnnnnnnnnnnnnnnnnnnnnnnnnnnnnnnnnnnnnnnnnnnnnnnnnnnnnnnnnnnnnnnnnnnnnnnnnnnnnnnnnnnnnnnnnnnnnnnnnnnnnnnnnnnnnnnnnnnnnnnnnnnnnnnnnnnnnnnnnnnnnnnnnnnnnnnnnnnnnnnnnnnnnnnnnnnnnnnnnnnnnnnnnnnnnnnnnnnnnnnnnnnnnnnnnnnnnnnnnnnnnnnnnnnnnnnnnnnnnnnnnnnnnnnnnnnnnnnnnnnnnnnnnnnnnnnnnnnnnnnnnnnnnnnnnnnnnnnnnnnnnnnnnnnnnnnnnnnnnnnnnnnnnnnnnnnnnnnnnnnnnnnnnnnnnnnnnnnnnnnnnnnnnnnnnnnnnnnnnnnnnnnnnnnnnnnnnnnnnnnnnnnnnnnnnnnnnnnnnnnnnnnnnnnnnnnnnnnnnnnnnnnnnnnnnnnnnnnnnnnnnnnnnnnnnnnnnnnnnnnnnnnnnnnnnnnnnnnnnnnnnnnnnnnnnnnnnnnnnnnnnnnnnnnnnnnnnnnnnnnnnnnnnnnnnnnnnnnnnnnnnnnnnnnnnnnnnnnnnnnnnnnnnnnnnnnnnnnnnnnnnnnnnnnnnnnnnnnnnnnnnnnnnnnnnnnnnnnnnnnnnnnnnnnnnnnnnnnnnnnnnnnnnnnnnnnnnnnnnnnnnnnnnnnnnnnnnnnnnnnnnnnnnnnnnnnnnnnnnnnnnnnnnnnnnnnnnnnnnnnnnnnnnnnnnnnnnnnnnnnnnnnnnnnnnnnnnnnnnnnnnnnnnnnnnnnnnnnnnnnnnnnnnnnnnnnnnnnnnnnnnnnnnnnnnnnnnnnnnnnnnnnnnnnnnnnnnnnnnnnnnnnnnnnnnnnnnnnnnnnnnnnnnnnnnnnnnnnnnnnnnnnnnnnnnnnnnnnnnnnnnnnnnnnnnnnnnnnnnnnnnnnnnnnnnnnnnnnnnnnnnnnnnnnnnnnnnnnnnnnnnnnnnnnnnnnnnnnnnnnnnnnnnnnnnnnnnnnnnnnnnnnnnnnnnnnnnnnnnnnnnnnnnnnnnnnnnnnnnnnnnnnnnnnnnnnnnnnnnnnnnnnnnnnnnnnnnnnnnnnnnnnnnnnnnnnnnnnnnnnnnnnnnnnnnnnnnnnnnnnnnnnnnnnnnnnnnnnnnnnnnnnnnnnnnnnnnnnnnnnnnnnnnnnnnnnnnnnnnnnnnnnnnnnnnnnnnnnnnnnnnnnnnnnnnnnnnnnnnnnnnnnnnnnnnnnnnnnnnnnnnnnngctgtttgaccggcacctgtgtgtgcgccagctgcggtactcagggatgatggagaccatccgaatccaccgagctggctaccccatccgctacagcttcgtggagttcgtggagcggtaccgcgtgctgctgccgggtgtgaagccagcctacaagcagnnncagggtgaccttcgcgggacgtgccagcgcatggctgagactgtgctgggcacccacgatgactggcagataggcaaaaccaagatctttctgaagnnnnnnnnnnnnnnnnnnnnnnnnnnnnnnnnnnnnnnnnnnnnnnnnnnnnnnnnnnnnnnnnnnnnnnnnnnnnnnnnnnnnnnnnnnnnnnnnnnnnnnnnnnnnnnnnnnnnnnnnnnnnnnnnnnnnnnnnnnnnnnnnnnnnnnnnnnnnnnnnnnnnnnnnnnnnnnnnnnnnnnnnnnnnnnnnnnnnnnnnnnnnnnnnnnnnnnnnnnnnnnnnnnnnnnnnnnnnnnnnnnnnnnnnnnnnnnnnnnnnnnnnnnnnnnnnnnnnnnnnnnnnnnnnnnnnnnnnnnnnnnnnnnnnnnnnnnnnnnnnnnnnnnnnnnnnnnnnnnnnnnnnnnnnnnnnnnnnnnnnnnnnnnnnnnnnnnnnnnnnnnnnnnnnnnnnnnnnnnnnnnnnnnnnnnnnnnnnnnnnnnnnnnnnnnnnnnnnnnnnnnnnnnnnnnnnnnnnnnnnnnnnnnnnnnnnnnnnnnnnnnnnnnnnnnnnnnnnnnnnnnnnnnnnnnnnnnnnnnnnnnnnnnnnnnnnnnnnnnnnnnnnnnnnnnnnnnnnnnnnnnnnnnnnnnnnnnnnnnnnnnnnnnnnnnnnnnnnnnnnnnnnnnnnnnnnnnnnnnnnnnnnnnnnnnnnnnnnnnnnnnnnnnnnnnnnnnnnnnnnnnnnnnnnnnnnnnnnnnnnnnnnnnnnnnnnnnnnnnnnnnnnnnnnnnnnnnnnnnnnnnnnnnnnnnnnnnnnnnnnnnnnnnnnnnnnnnnnnnnnnnnnnnnnnnnnnnnnnnnnnnnnnnnnnnnnnnnnnnnnnnnnnnnnnnnnnnnnnnnnnnnnnnnnnnnnnnnnnnnnnnnnnnnnnnnnnnnnnnnnnnnnnnnnnnnnnnnnnnnnnnnnnnnnnnnnnnnnnnnnnnnnnnnnnnnnnnnnnnnnnnnnnnnnnnnnnnnnnnnnnnnnnnnnnnnnnnnnnnnnnnnnnnnnnnnnnnnnnnnnnnnnnnnnnnnnnnnnnnnnnnnnnnnnnnnnnnnnnnnnnnnnnnnnnnnnnnnnnnnnnnnnnnnnnnnnnnnnnnnnnnnnnnnnnnnnnnnnnnnnnnnnnnnnnnnnnnnnnnnnnnnnnnnnnnnnnnnnnnnnnnnnnnnnnnnnnnnnnnnnnnnnnnnnnnnnnnnnnnnnnnnnnnnnnnnnnnnnnnnnnnnnnnnnnnnnnnnnnnnnnnnnnnnnnnnnnnnnnnnnnnnnnnnnnnnnnnnnnnnnnnnnnnnnnnnnnnnnnnnnnnnnnnnnnnnnnnnnnnnnnnnnnnnnnnnnnnnnnnnnnnnnnnnnnnnnnnnnnnnnnnnnnnnnnnnnnnnnnnnnnnnnnnnnnnnnnnnnnnnnnnnnnnnnnnnnnnnnnnnnnnnnnnnnnnnnnnnnnnnnnnnnnnnnnnnnnnnnnnnnnnnnnnnnnnnnnnnnnnnnnnnnnnnnnnnnnnnnnnnnnnnnnnnnnnnnnnnnnnnnnnnnnnnnnnnnnnnnnnnnnnnnnnnnnnnnnnnnnnnnnnnnnnnnnnnnnnnnnnnnnnnnnnnnnnnnnnnnnnnnnnnnnnnnnnnnnnnnnnnnnnnnnnnnnnnnnnnnnnnnnnnnnnnnnnnnnnnnnnnnnnnnnnnnnnnnnnnnnnnnnnnnnnnnnnnnnnnnnnnnnnnnnnnnnnnnnnnnnnnnnnnnnnnnnnnnnnnnnnnnnnnnnnnnnnnnnnnnnnnnnnnnnnnnnnnnnnnnnnnnnnnnnnnnnnnnnnnnnnnnnnnnnnnnnnnnnnnnnnnnnnnnnnnnnnnnnnnnnnnnnnnnnnnnnnnnnnnnnnnnnnnnnnnnnnnnnnnnnnnnnnnnnnnnnnnnnnnnnnnnnnnnnnnnnnnnnnnnnnnnnnnnnnnnnnnnnnnnnnnnnnnnnnnnnnnnnnnnnnnnnnnnnnnnnnnnnnnnnnnnnnnnnnnnnnnnnnnnnnnnnnnnnnnnnnnnnnnnnnnnnnnnnnnnnnnnnnnnnnnnnnnnnnnnnnnnnnnnnnnnnnnnnnnnnnnnnnnnnnnnnnnnnnnnnnnnnnnnnnnnnnnnnnnnnnnnnnnnnnnnnnnnnnnnnnnnnnnnnnnnnnnnnnnnnnnnnnnnnnnnnnnnnnnnnnnnnnnnnnnnnnnnnnnnnnnnnnnnnnnnnnnnnnnnnnnnnnnnnnnnnnnnnnnnnnnnnnnnnnnnnnnnnnnnnnnnnnnnnnnnnnnnnnnnnnnnnnnnnnnnnnnnnnnnnnaggccccagcctccccagaacgatgtgatcgtggctgtcaactggacaggcgtgtactttgtggatnnnnnnnnnnnnnnnnnnnnnnnnnnnnnnnnnnnnnnnnnnnnnnnnnnnnnnnnnnncagggagtgccgtgtctggctctcactgggctgctctgatcttggctgtgctgcgcctcactcaggctgggcaggactgaccccggcggggccctgttctccgtgttggtcctgcaggggagcgaaaacgacagcccccagcttcacactggccaccatcaagggggacgaatacaccttcacctctagcaatgctgaggacattcgtgacctggtggtcaccttcctagaggggctccggaagagatctaagtatgttgtggccctgcaggataaccccaacccc

SEQ ID NO: 32272 - DNA, 126 bp, Macaca Mulatta
agattttagatgctgtgagcctagaggagcggttcaagatgactataccactgcttgtcagacaaattgaaggcctaaaattgcttcaaaaaaccagaaaacccaagcaagatgatgataagaggg

SEQ ID NO: 32273 - DNA, 296 bp, Macaca Mulatta
ccacaggctcattggagagaaaccaacttagtattatgttaatgtacagaccccaaaaccctgattcttggatatcctaaaatatgatttgggatctcctccagagggcctcaaatgacaaattttgtctctaaatcgtcctcttattagaaagatacactccctttctattaatatactctaggtctcaagagtgggaatattgttatcaaggatacttcccctgttaggactgtgtttcttagtgaaagaaagtgaagttataatgctgtaacatcagtacaaagtctgggtca

SEQ ID NO: 32274 - DNA, 142 bp, Macaca Mulatta
tggtggtggccgggtactcctactggacgctggcctacgccctgagcctggcgggcgcccgcaagctgctggcctcacagcctctacgccgcatgctgcctgtgaacgacttcctgcccatcatgttcgaacagcaccccaa

SEQ ID NO: 32275 - DNA, 3309 bp, Macaca Mulatta
  misc_feature (1)...(3309): n = A,T,C or G
gccctcagcatcggaccagagtacttggtatctagatgaatcgacactcactgacaacatcaagaagacactgcacaagttctgtggcccctcccctgtggtcttcanagtgatgtgaactccatgtatctgtcttccacggagccgccagccgctgctgaatgggcatgtctgctgcgccctctgagaggccgtgagccggagggcgtctggaacctgctaagcatcgtgcgggagatgttcaagcggagggacagcaatgctgcccccttgttggaaatcctcactgaccagtgcctcacctatgacagataacaggttggtggtatagcgtacgtacctcagcctcacacagcagtgccagtgggcacacgggccgtagcaacgggcagtcagaggtggcagcccatgcctgtgccagcatgtgtgacgagatggtcacactgtggaggctggccgtgctggaccctgcactcagcccccagcgnggcgccgggaactgtgtacgcagctgcggcagtggcaactgaaggtgattgagaacgtcaagcggggccaacacaagaagacgctggagcggctcttccctggcttccggccagcggtggaggcctgctacttcaactgggaagaggcctacccacttcccggtgtcacctacagcggcactgacaggaagctggcactgtgctgggcccgggccctgccctctcggccaggtgcctcccgctctgggggcctggaggaatcccgggaccggccccgaccccttcctgctgaaccagctgtgcggcccaaggagcctgggaccaagcgaaagggcttgggtgagggggtcccctcatcacagcggggtccccgccgcctctcagctgaagggggagataaagctctgcataagatgggtccaggtgggggcaaagccaaggcactgggtggggctggcagtgggagcaagggctcagcaggtggcgggagcaagcgacggctgagcagtgaagacagctccctggagcctgacctggccgagatgagcctggatgacagcagcctggccctgggcgcagaggccagcaccttcgggggattccctgagagccctccaccctgtcctctccacggtggctcccgaggcccttccgctttcctgccagagcccccagatacnnnnnnnnnnnnnnnnnnnnnnnnnnnnnnnnnnnnnnnnnnnnnnnnnnnnnnnnnnnnnnnnnnnnnnnnnnnnnnnnnnnnnnnnnnnnnnnnnnnnnnnnnnnnnnnnnnnnnnnnnnnnnnnnnnnnnnnnnnnnnnnnnnnnnnnnnnnnnnnnnnnnnnnnnnnnnnnnnnnnnnnnnnnnnnnnnnnnnnnnnnnnnnnnnnnnnnnnnnnnnnnnnnnnnnnnnnnnnnnnnnnnnnnnnnnnnnnnnnnnnnnnnnnnnnnnnnnnnnnnnnnnnnnnnnnnnnnnnnnnnnnnnnnnnnnnnnnnnnnnnnnnnnnnnnnnnnnnnnnnnnnnnnnnnnnnnnnnnnnnnnnnnnnnnnnnnnnnnnnnnnnnnnnnnnnnnnnnnnnnnnnnnnnnnnnnnnnnnnnnnnnnnnnnnnnnnnnnnnnnnnnnnnnnnnnnnnnnnnnnnnnnnnnnnnnnnnnnnnnnnnnnnnnnnnnnnnnnnnnnnnnnnnnnnnnnnnnnnnnnnnnnnnnnnnnnnnnnnnnnnnnnnnnnnnnnnnnnnnnnnnnnnnnnnnnnnnnnnnnnnnnnnnnnnnnnnnnnnnnnnnnnnnnnnnnnnnnnnnnnnnnnnnnnnnnnnnnnnnnnnnnnnnnnnnnnnnnnnnnnnnnnnnnnnnnnnnnnnnnnnnnnnnnnnnnnnnnnnnnnnnnnnnnnnnnnnnnnnnnnnnnnnnnnnnnnnnnnnnnnnnnnnnnnnnnnnnnnnnnnnnnnnnnnnnnnnnnnnnnnnnnnnnnnnnnnnnnnnnnnnnnnnnnnnnnnnnnnnnnnnnnnnnnnnnnnnnnnnnnnnnnnnnnnnnnnnnnnnnnnnnnnnnnnnnnnnnnnnnnnnnnnnnnnnnnnnnnnnnnnnnnnnnnnnnnnnnnnnnnnnnnnnnnnnnnnnnnnnnnnnnnnnnnnnnnnnnnnnnnnnnnnnnnnnnnnnnnnnnnnnnnnnnnnnnnnnnnnnnnnnnnnnnnnnnnnnnnnnnnnnnnnnnnnnnnnnnnnnnnnnnnnnnnnnnnnnnnnnnnnnnnnnnnnnnnnnnnnnnnnnnnnnnnnnnnnnnnnnnnnnnnnnnnnnnnnnnnnnnnnnnnnnnnnnnnnnnnnnnnnnnnnnnnnnnnnnnnnnnnnnnnnnnnnnnnnnnnnnnnnnnnnnnnnnnnnnnnnnnnnnnnnnnnnnnnnnnnnnnnnnnnnnnnnnnnnnnnnnnnnnnnnnnnnnnnnnnnnnnnnnnnnnnnnnnnnnnnnnnnnnnnnnnnnnnnnnnnnnnnnnnnnnnnnnnnnnnnnnnnnnnnnnnnnnnnnnnnnnnnnnnnnnnnnnnnnnnnnnnnnnnnnnnnnnnnnnnnnnnnnnnnnnnnnnnnnnnnnnnnnnnnnnnnnnnnnnnnnnnnnnnnnnnnnnnnnnnnnnnnnnnnnnnnnnnnnnnnnnnnnnnnnnnnnnnnnnnnnnnnnnnnnnnnnnnnnnnnnnnnnnnnnnnnnnnnnnnnnnnnnnnnnnnnnnnnnnnnnnnnnnnnnnnnnnnnnnnnnnnnnnnnnnnnnnnnnnnnnnnnnnnnnnnnnnnnnnnnnnnnnnnnnnnnnnnnnnnnnnnnnnnnnnnnnnnnnnnnnnnnnnnnnnnnnnnnnnnnnnnnnnnnnnnnnnnnnnnnnnnnnnnnnnnnnnnnnnnnnnnnnnnnnnnnnnnnnnnnnnnnnnnnnnnnnnnnnnnnnnnnnnnnnnnnnnnnnnnnnnnnnnnnnnnnnnnnnnnnnnnnnnnnnnnnnnnnnnnnnnnnnnnnnnnnnnnnnnnnnnnnnnnnnnnnnnnnnnnnnnnnnnnnnnnnnnnnnnnnnnnnnnnnnnnnnnnnnnnnnnnnnnnnnnnnnnnnnnnnnnnnnnnnnnnnnnnnnnnnnnnnnnnnnnnnnnnnnnnnnnnnnnnnnnnnnnnnnnnnnnnnnnnnnnnnnnnnnnnnnnnnnnnnnnnnnnnnnnnnnnnnnnnnnnnnnnnnacagggcatctcgggcaagagactccaatatggtgagggcagcagcagagctggccgtgagctgcctgcctcatgcccatgcattgaaccataatgagatccagcgggccctggtgcagtgcaaggaacag

SEQ ID NO: 32276 - DNA, 571 bp, Macaca Mulatta
ggacgcagccatggctctgctccccggtgtgggccaggctcagtatgtcactgtccccgaaagcctcctcatgcctatcccagagggattgaccctgctccaggctgcggccatcccggaggcctggctcaccgcattccagctgttacatcttgtgggtgaggaggcctccatgctcactccacacaatgtggctcaacaccttcataaatcagccaccttgaatcccagcaatcctccagggcactcccaggccctgctgtaccacctgtactgtcaggtcctcagaccatgttagaagggtttaatgttgaggctgagaatcatggttagcagatagaaggtctggataacactagataggagacctctgtacatcttaaccccggagctcagcagcagtcccagcttctcaaaatcatgctgagcttctccctggtgtcccagtgcaacagaaggggccagttgactcatttattcctcctcaatcccattaaggacagtcaagaactcacataagggaatctaagaagacttggtccttgcctttagacagtgcagtgtgactgag

SEQ ID NO: 32277 - DNA, 726 bp, Macaca Mulatta
gcctccacagctttccttgctgatagccagcctccaaaccgcagagccctagctgtttatcctgttttcctgttttactttgtcatcagttggatgattctcacctttactcctcagtaaatcaggaatgggaaattaaaaaccagtgaattgaaagcacatctgaaagatgcaagtcaccatggagctttgtctctggccctattttgtctaattttggaggtatttggtaactgagtaggtgagaagatttatagggagccatacagcagtgtcaccacttatgtgaggaactgatgtttgaaaggctgttcttttctctcttaatgtcatttctttaaaaatacatgtgcatactacacacagtatataatgcctccttaaggcatcatggagtcaccgtggtccatttgagtgacaactagtgacttgggaagcacatggatacatcttacaagctgaatagagttgataactattttcagttttgagaataccagttcaggtgcagctcttaaacacattgccttatgactattagaatatgcctctcttttcgtaaataaaaataaatggtctatatccattttcttttatttctctctcttaagcttaaaaaggcaatgagagaggctaggagggggttcatacatggagaatgagaaaacgtgcattaacccatattcagattttgatcaaaggaaattctccacttgttgctaaaag

SEQ ID NO: 32278 - DNA, 1038 bp, Macaca Mulatta
  misc_feature (1)...(1038): n = A,T,C or G
aagaggaggaggaggaggctgcctcttggtactatgtccccagctacgaggaagtgatgaacacaatctactcagaagcaaggggagaggagcggaacccgaggctgagcatctctctcccatcctatgagtcactgacagggcttgacgagaccacccccacatccaccagggcagatgtggaggccagccctgggaacccccctgacaggcagaactctaagttggccaaacgactgaaaccgctgaaagttcgaaggattaaatctgaaaagcttcacctcaaagactttaggatcaacctcccggacaaaaacatccctcctccctcgatagagcctttgactcctccaccgcagtatgatgaagtccaggagaaggcccccgacacccggccgcccgattgaatggccccacttgagccacgctccctcctgtctctcacacctttcgcccccaagactctaacaaagccacgtgagccacggttgagaagcggaggggccagctgtgcacggagccatttggatggnnnnnnnnnnnnnnnnttctctgtatcaggagtgactttgttgccccacacagcctcctgctgcaggtgctttggaaggagatgctgccttggagctggtgaatctgtggaccacattcaagcgtgtggcacaggcatctccccatcctcttcgctccgaatcacaggcgacacattctcctttccagctaggaaagggttcctcgcggctggtttagattgtggttgtttgttttgcttctaataggactgttttgtttcaaaaaggaaacaagttttgtgtttgctgtctacgctggagtcctgaaccgtgggtaggaaatacgacctggctttgtagaaaggacacagggctgttttgtgaactaagcggtgaggctcaggtggctgctctcgcagagcccctgatgctgtcgttctttgagggcttaaggcctgatgaacttaggcatgtgatgcataatagtcttaattggtacatttaactagtctcttctgtataacag

SEQ ID NO: 32279 - DNA, 463 bp, Macaca Mulatta
gcatgaattcacaaacaaatgactgtaaaagtaaatatacatgttgggcatgattctacccttactgccccaagagacctagtgaaggcctatagacatgaagggaaaattagcttttagttttaaaactctttatcccatcttgattggggcagttgacattttattttgcccagagagtgctgtagtcctttttgtaatgaccctctcaaatggacaataccagaagtgaattatccctgctggctttcttttctctatgaaaagcaactgagtataattgttacgatctactcatttgctgacacatcagttatatcttgtggcatatccattgtcgaaatttgatgaacaggatgtataatatgcaatcctacttctatatcattaagaaaacatcttagttgatgctacagaacaccttgtcaacttcttcctggttaccacacagtgggagggaatt

SEQ ID NO: 32280 - DNA, 833 bp, Macaca Mulatta
  misc_feature (1)...(833): n = A,T,C or G
gtgaaaatgcctcgtgtaaaagcagctcaagctggaagacagggccccgcaaagagacatcttgcagaacagtttgcagttggggagataataactgacatggcaaaaaagaaagggaaagtaggattacctattggccannnnnnnnnnnnnnnnnnnnnnnnnnnnnnnnnnnnnnnnnnnnnnnnnnnnnnnnnnnnnnnnnnnnnnnnnnnnnnnnggaacccagtgacaatggacctctttttactgaattaaagttctaccaacgagctgcaaaaccggagcaannnnnnnnnnnnnnnnnnnnnnnnnnnnnnnnnnnnnnnnnnnnnnnnnnnnnnnnnnnnnnnnnnnnnnnnnnnnnnnnnnnnnnnnnnnnnnnnnnnnnnnnnnnnnnnnnnnnnnnnnnnnnnnnnnnnnnnnnnnnnnnnnnnnnnnnnnnnnnnnnnnnnnnnnnnnnnnnnnnnnnnnnnnnnnnnnnnnnnnnnnnnnnnnnnnnnnnnnnnnnnnnnnnnnnnnnnnnnnnnnnnnnnnnnnnnnnnnnnnnnnnnnnnnnnnnnnnnnnnnnnnnnnnnnnnnnnnnnnnnnnnnnnnnnnnnnnnnnnnnnnnnnnnnnnnnnnnnnnnnnnnnnnnnnnnnnnnnnnnnnnnnnnnnnnnnnnnnnnnnnnnnnnnnnnnnnnnnnnnnnnnnnnnnnnnnnnnnnnnnnnccccatcaagacgtggtgatttggaaatacttggttattgcatgatccaatggcttactggccatcttccttgggaggataaatttgaagatcctaaatatgttagagattccaaaattag

SEQ ID NO: 32281 - DNA, 557 bp, Macaca Mulatta
caagaaaatcaaggtgtaatttttaataaattgttaatcccatgttttgttttgtaatgagcattttaagagcttgactgatttttttatctctcattaaaacacgtttgttttaattgtaggggaaattacttttctcagcattttgcatgttctttctaatcttcattggtctgaatatattggtagtagttactgtaattattcgacaaaaagtatctcagtttaaaaatttttccactatgtcttctttctagtggctaccgttttagtttctagttgaatgtctctgacaagctttcatatggttttgttatattttcatctacatgtacatgtgttattaattttattttaaatgaaaactaatcaccttcatgtggaaatgctctgagaattgtcctcaggcatttggtagtaaccagctaaccaagaagaaacggagaaaccagaacttcatatggcagtccattcagatgaagaatgatgatataaaatctggttccttcttagcaaaattaacaataaacacgaaaagatactaaatgacatcagat

SEQ ID NO: 32282 - DNA, 385 bp, Macaca Mulatta
cagtctcccagacagtcctggcccagccggatgcactgctggtcttcccaggccaagtggctcaactctcctgcacgctcagcccccagcacgtcaccatcagggactatggtgtgtcctggtaccagcagcgggcaggcagtgcccctcgatatctcctctactaccgctcggaggaggatcaccaccggcccgctgacatccctgatcgattctccgcagccaaggatgaggcccacaatgcctgtgtcctcaccatcagtcccgtgcagcctgaagatgacgcagattactactgctcagttggctacagctttggtccctaggggtggggtgtgagaggagtgcctcccctctgcctcccgtttctgcccctgatcttggg

SEQ ID NO: 32283 - DNA, 639 bp, Macaca Mulatta
tcttctctttctccagggttgagttccagaataaattctacagcgggaccggtttcaagttcctacccttctcctttgagcatattcgggaagggaagtttgaagagtgagcccctgtgagggccatgtgccccatgctgccctccccacttccctccacagtgatcagctgtgcttctctgcctgtggttgtgatctgtgggcaccagcgcattcgtggcacccgtctgtgagtcatttagatagaatagtcctccctgggcctcccatcaccctagctttgtgtgtagtgtagtgattttcttgtggtcactcatacccactgggcaccaaccttgccttcttagcttccctccatccagacagcccttcccgcctcctggtggtgagccagtctgcattcccacgccatcccaaagtcctttcatcttccccgtgcattgtagatggaaggagcacccatgacattcatatctagactttgagttccctgcatccgccgctgtagtttctagcaggagtagtggggggaagcaatacagcttctcccctagaaggggacactggtaacatgtcccactcttgggttagcaggggtgggtccaggaaggtgatatttgcgtcctttgcccacccccc

SEQ ID NO: 32284 - DNA, 221 bp, Macaca Mulatta
accccaagggcggcaagggtcctgggcccatgatccgcatcaaggcgcgctaccaaaccatcaccatcctgcccatggagatgtacaaagagttcgctgagcacatcaccaaccactacctggggctgtgtgcagccctcgagcccatcctcagtgccaagaccaaggaggagatggcatctgccctggtgcacatcctgcagagcacgggcaaggtgaag

SEQ ID NO: 32285 - DNA, 1104 bp, Macaca Mulatta
aaggaagtgagcatggcctcagctgcagatctcctggagcaatggcatcatggcagacaggccctggatgtgctggatttggtacccgtaggcctcattaatgctccggagctcagccagcaggcccagcaacttcgcatacagaaaccgatcccggggcctttgctgctggcccttgatgtagctttgcagagtcagtgccatctcctcttgcagctgatcaatctcatgtctctgggtaactccaggtcggtcaggagagaagagggccatggcagccaagagcacatactcaggctcctggagctgcagttttcgtagtgttccatggaagtgaaagagcaactccaaaaactctacctggaaccccactgcgggagatacacgggctgcgtcttcaattgtgtagcgaagaggcccgcagaggaagttttgtgtttggagacagaaagtggtattgagtacgatatgacagatttccacagctgctcccttgagaagggagatctggtcttcaatgggcagagaacggaagacaggcaggtccttggtaaacttgatgacttgctgtaccatgaacgtgttgacgtctgcgaagtgtgtgaccagaggcagcacaggcgccagggtgggcaagggctggtgatggatgaacagatgagctggaggcctaaactgcacaaactgttcaaacatggtgcccatgtggcgggtgtgggcccccaggagtgtctggatcaactcttcttgctcattactcagttgcataggtgtttgctgtgcccgccgctgggcctgctttgctcgccgcaatgccagggcttctgccgacagtatcatgtctttcctcatgccagcatctaagcacttctgcaacctgcaggctgggcagtggcgcctctgaatcttgctgacttcacagcttccagcaaaggggcaggtgggaccaatgcttttgctgactgttctcctgaagaaacccttgcagccctcacaagtcagcgcgttgaagtggtagcctgtggcctggtccccacataccacacagttcctcagctcatcttccctactggccatgacatcacgtgttggggtggctgtcat

SEQ ID NO: 32286 - DNA, 838 bp, Macaca Mulatta
  misc_feature (1)...(838): n = A,T,C or G
aatccaactcagaaatcaggactcatttggacatttgtcattatattttcatntaaatgacactttatcttcaaggtgagtgttgatcccagaagaatctgggaatttttgttttctgattcagacagtagagagtaagtcacttgaggattccacataaatagcagtattcaccttagcattagccattatccttcaaatgagttgcctcctcaaagtggcccttttgcagaaagattgcatcaacatttagattttttccctaaagtactttgttatgcaggtgatcttgggtgatgtaagttagaattaactccttcatctcatatcctggttgctgctattcttctctttttttgaccggggtgtggatattggtgaaggggactagacttctcttcgccagtgtgagaggtagacattgagatccttctgaaatgcacccagccattcttgctttcttcactgtccagataactttcagcatgttatgattccatttaagcgaggataccatattcctaatgcgtgtttcagaagccacacactggaagcagtaagaaagcctgctgcaaaatcatcctcatctgtgtctttcttctttccctttcctttgtccctagggaagtgtgaaatcggctgggcctactactgcacgggagcaggtgccactgccgccatgctgctgtgcacatggctggcttgcttttcaggcaagaaacagaagcactacccatactgagatggagccaccaagagcagacagaggagaagacggactgaaggggcttggagaggtcaaaacatccgcctaccttcaaaaggtggaatagtagtt

SEQ ID NO: 32287 - DNA, 1633 bp, Macaca Mulatta
  misc_feature (1)...(1633): n = A,T,C or G
cagtggtggaagaagaggcggcggcggcgggggtagggagcctggaaacgcgagcggggatggtaggtggtttggacccgccgggccgccgtcgtttccagaaagggtttgactggaggaacctctggagcagctgttggctggctcctctgactgatggcatgttgaggtacatgggacagcagaagcgagggtatccgatccagagggggccactctagaggccaggccaccagcaccatgggccagtgtgtaaccaagcttaagaatccctcatccaccctgggcagcaagaatgcagaccatgaccccagcaacgagtcacacagcaggcggggtgcaggccaccgtgaggagcaggtaccaccctgtggcaagccaggtggagatatccttgtcaacgggaccaagaaggctgaggctgccactgaggcctgccagctgccgacgtcctcgggagatgctgggagggagtccaagtccaatgccgaggagtcttccttgcagaggttggaagaactgttcaggcgctacaaggatgagcgggaagatgcaattttggaggaaggcatggagcgcttttgcaatgacctatgtgtcgaccccacagaatttcgagtgctgctcttggcttggaagttccaggctgcaaccatgtgcaaattcaccagnnnnnnnnnnnnnnnnnnnnnnnnnnnnnnnnnnnnnnnnnnnnnnnnnnnnnnnnnnnnnnnnnnnnnnnnnnnnnnnnnnnnnnnnnnnnnnnnnnnnnnnnnnnnnnnnnnnnnnnnnnnnnnnnnnnnnnnnnnnnnnnnnnnnnnnnnnnnnnnnnnnnnnnnnnnnnnnnnnnnnnnnnnnnnnnnnnnnnnnntagtctttacccagaacaatcctccggtattggaccaatggctaaacttcctaacagagaacccctcggggatcaagggcatctcccgggacacttggaacatgttccttaacttcactcaggtgattggccctgacctcagcaacaaccacagtgaagatgaggcctggccaagtctctttgacacctttgtggagtgggaaatggagcaaaggaaaagagaagaggacgggagaggtgcactcagcttagggcccaagggcttgtgtcctgaggagcagacttagtggctctgtcccaggcacagcagcaaggatctgcctgctgccctgcagccaacagaggaattggaccattttggaaattactgaagatccggatattttctactttacacctttctctgccttgtatctgaaagggctctaaaatgctgtatcatgttttaggcactttcttcatttttttggttattttggttatttcctttttgggggggatctcccagaatatttgaacctggttacatgttgtgtattttttttgaagccttcagatagaataagcctgccatttcttgcacaaatnnnnnnnnnnnnnnnnnnnnnnnnnnnnnnnnnnnnnnnnnnnnnggtaggggagggcatagagcagggaggggatgggactgttaggttgaattaacatgacaaaatgatgcagtgccagatctcagttttgcatattgtttttcagggcaggtctgtactgtgtgtagtgctg

SEQ ID NO: 32288 - DNA, 154 bp, Macaca Mulatta
gagccttcatcgtctggctggccaacggggacaccctccgtgtcttcaagatgaccaagcgggaggatgggggctataccttcacagccaccccagaggacttccctaaaaagcacaaggcgcctgtcatcgacgttggcattgctaacacagg

SEQ ID NO: 32289 - DNA, 835 bp, Macaca Mulatta
  misc_feature (1)...(835): n = A,T,C or G
gggtgttgaaaacagatttgccattctttgatacttgtgtggcaaatttgccttatcagatctcatcgccttttgtcttcaaactgttgctgcaccgaccttttttcagatgtgctatacttatgtttcaaagagaatttgccctccgactggttgcaaaacccggagataagttatactgcagactctcaattaatacacagctgttggcacgtgtggaccatctaatgaaagttggaaagaataacttcagaccaccgcccaaggtggaatccagtgttgtaaggatagaacctaagaatccaccaccacccatcaattttcaggaatgggatggtctagtaaggataacctttgttaggaaaaacaagacactctctgctgcatttaaatcaagtgcagtgcaacaactcttggaaaaaaactacagaattcactgttcagtccataatattataataccagaagatttcagcatagcagataaaatacagcaaatcctaaccagcacaggttttagtgacaaacgggcccgttccatggacatagatgacttcatcagattgctacatggattcaacgcagaaagtattcattnttcctaagggtttgggaacacagaattnttcaaggtcaaggaaaagaaatgaaagttgcatttttttgaattttggagaagaataatgctttttgcttttagaggacataaatttactttggacgggtttttgggttccgatacctaactacctggttgtccaccaattttatggaatccgtgaatttttttaagtttggaaaaagttcctaaagtaatcccaaggttttttttatc

SEQ ID NO: 32290 - DNA, 476 bp, Macaca Mulatta
cgggaggtgcaagtgacatgtgcatcggcgcgtgcccgagccagttccgggaggccaacatgcacgcgcagatcaagatgaacctgcaccgcctgaagcccgacacggtgccagcgccctgctgcgtgcccgccagctacaatcccatggtgctcattcaaaagaccgacaccggggtgtcactccagacctatgacgacttgttagccaaagactgccactgcgtgtgaggagccctggtccttagactgtgcacctgccctggggacacgagctcagttgtcctggcctgtggaatgggctcaagggtcctgagacacccgattcctgcccaaacggctgtatttatatatctgctatttattattaatttattggggtgagcttcctgggaactggggggctggtctgattgaactgtgtatttatttaaaactctggtgataaataaagctgtctgaaccgcacaaaaaaac

SEQ ID NO: 32291 - DNA, 1822 bp, Macaca Mulatta
  misc_feature (1)...(1822): n = A,T,C or G
agccagattctactgcaactgaaagagcaattgccagactagcagtacatcctcttctgaagaaaaagatagatgtgctaaaagnnnnnnnnnnnnnnnnnnnnnnnnnnnnnnnnnnnnnnnnnnnnnnnnnnnnnnnnnnnnnnnnnnnnnnnnnnnnnnnnnnnnnnnnnnnnnnnnnnnnnnnnnnnnnnnnnnnnnnnnnnnnnnnnnnnnnnnnnnnnnnnnnnnnnnnnnnnnnnnnnnnnnnnnnnnnnnnnnnnnnnnnnnnnnnnnnnnnnnnnnnnnnnnnnnnnnnnnnnnnnnnnnnnnnnnnnnnnnnnnnnnnnnnnnnnnnnnnnnnnnnnnnnnnnnnnnnnnnnnnnnnnnnnnnnnnnnnnnnnnnnnnnnnnnnnnnnnnnnnnnnnnnnnnnnnnnnnnnnnnnnnnnnnnnnnnnnnnnnnnnnnnnnnnnnnnnnnnnnnnnnnnnnnnnnnnnnnnnnnnnnnnnnnnnnnnnnnnnnnnnnnnnnnnnnnnnnnnnnnnnnnnnnnnnnnnnnnnnnnnnnnnnnnnnnnnnnnnnnnnnnnnnnnnnnnnnnnnnnnnnnnnnnnnnnnnnnnnnnnnnnnnnnnnnnnnnnnnnnnnnnnnnnnnnnnnnnnnnnnnnnnnnnnnnnnnnnnnnnnnnnnnnnnnnnnnnnnnnnnnnnnnnnnnnnnnnnnnnnnnnnnnnnnnnnnnnnnnnnnnnnnnnnnnnnnnnnnnnnnnnnnnnnnnnnnnnnnnnnnnnnnnnnnnnnnnnnnnnnnnnnnnnnnnnnnnnnnnnnnnnnnnnnnnnnnnnnnnnnnnnnnnnnnncctagattttccacagaatgagcctcagatcaagaatcagtttaataagaagctaccaagaagacttgaaaatacaaaacagcaattgcagctgcctcttcatccttcatgggaagcaagcagaaggcgaaaagaacagcaatctaatattgctgtgtttcaagggaaaaaaattacatttgatgattgattagtgcctctttctgtgaactttttcatctnnnnnnnnnnnnnnnnnnnnnaagacagggtctcactctgttgcccaggctagagtgcaatagtgcaatcacagctcactgcagcctcgaactcctgggctcaagtgatctgcctcccaaagggctggtactgcaggtgcatgcattaccatgccctgctttctcaccccaggccctgcagctattacttaaactcgtatttgaataaatctcttggggggaattatagaatgtttgtttttgtannnnnnnnnnaagtaaattcaagttatgtttatgtaagcctttcacaaatccaatatgtacttaaattgatttttaatatccctcagactgtttcccttatgaagtaatttggggattttagtaatctcatattttctctttagtgcttatcatgtaatgtgcttcactggttcagctctgttgtttccttaaannnnnnnnnnnnnnnnnnnnnnaaataataatggaaacataggaaatcatagctatttaaaccagatcaccctgtttaaaaatcattcttgttagcaaactaaaatagtaacttatggatgtacagataaataaatactgattttattattgttttacgtacttgtgatcatgtactttttgattctaaaatagttgtctaggacaattttgggattcttaattatgttttagttacttaagaaaattgtttaaatgtagcaatacacccaataattggttttatgtttcactgcatataaatatttccattaaatcaagaatgtatatt

SEQ ID NO: 32292 - DNA, 411 bp, Macaca Mulatta
agttagtggaatctatcagttcaaatcaacttttgcaagcaatatgcccatcgtccttcctgggacactaaataaatataatagattcatccaaggaataaacattgtgagttctcaaaaaatgttttcgttacaacctggcataaatgcttttctctggacaaacactgaatgcggcattcttgcgactcaagggtacactgcgtccaggtttatttcagtttcagactgaggtctactaagaggcccagcctcaaactcaagataaaaacagaaaagtcccagtgttgactggagtggaaaagcccgtgtccatttcaagttgctggcatgctgctctaacctgtgctatactagagtactctccatataatgcccccatttaccaacttgctcttaaaaaataccaaa

SEQ ID NO: 32293 - DNA, 413 bp, Macaca Mulatta
agagccaccttccctgccacggtttctccactgtgagctcctcatctacagggtcccaggtgaataatgagtgcttttgtttctctaggccacggaatgaattgtcccgggtctccaaaaagaacatttttcttctatttaagaagctctgctccttccgttaccgcagggatctactgagactctcctatggtgaggccaagaaagctgcccgtgactacgagacggccaagaactacttcaaaaaaagcttgaaggatatgggctatgggaactggattagcaaaccccaggaggaaaagaacttttatctctgcccagtatagtatgctccggtgacagatggattagggtgtgtcatactagggtgagagagaggtaggtcgtagcgttcctcatcacatggtcagggg

SEQ ID NO: 32294 - DNA, 606 bp, Macaca Mulatta
  misc_feature (1)...(606): n = A,T,C or G
gaccatcttgaatgtggacattccctgccagtggctgagttacgagcagagctaccatagatgccgttatgctttgtactaatttggggcataaagagctctggtcctgatggcacgaacgtcccaggaggagtacaaggggagaccccccccacgcacgctgcacccccacgcgnnnnnnnnnnnnnnnnnnnnnnnnnnnnnnnnnnnnnnnnnnnnnnnnnnnnnnnnnnnnnnnnnnnnnnnnnnnnnnnnnnnnnnnnnnnnnnnnnnnnnnnnnnnnnnnnnnnnnnnnnnnnnnnnnnnnnnnnnnnnnnnnnnnnnnnnnnnnnnnnnnnnnnnnnnnnnnnnnnnnnnnnnnnnnnnnnnnnnnnnnnnnnnnnnnnnnnnnnnnnnnnnnnnnnnnnnnnnnnnnnnnnnnnnnnnnnnnnnnnnnnnnnnnnnnnnnnnnnnnnnnnnnnnnnnnnnnnnnnnnnnnnnnnnnnnnnnnnnnnnnnnnnnnnnnnnnnnnnnnnnnnnnnnnnnnnnnnnnnnnnnnnnnnnnnnnnnnnnnnnnnnnnnnnnnnnnnnnnnnnnnnnnnnnnnngttggtttgtcgagagcgcc

SEQ ID NO: 32295 - DNA, 1024 bp, Macaca Mulatta
  misc_feature (1)...(1024): n = A,T,C or G
cctgcgcgtgtggttgaggatgggctggctgcaggtccgggtccgctgggtggcactgcaggcggcgggccatggtggtttggattgagccgggcccggccggggcgccgagtcggagggggtggcagtgagcggcggcagaggctgcggggctcggtttggctgactggggagtcggcaggcggcaggnnnnnnnnnnnnnnnnnnnnnnnnnnnnnnnnnnnnnnnnnnnnnnnnnnnnnnnnnnnnnnnnnnnnnnnnnnnnnnnnnnnnnnnnnnnnnnnnnnnnnnnnnnnnnnnnnnnnnnnnnnnnnnnnnnnnnnnnnnnnnnnnnnnnnnnnnnnnnnnnnnnnnnnnnnnnnnnnnnnnnnnnnnnnnnnnnnnnnnnnnnnnnnnnnnnnnnnnnnnnnnnnnnnnnnnnnnnnnnnnnnnnnnnnnnnnnnnnnnnnnnnnnnnnnnnnnnnnnnnnnnnnnnnnnnnnnnnnnnnnnnnnnnnnnnnnnnnnnnnnnnnnnnnnnnnnnnnnnnnnnnnnnnnnnnnnnnnnnnnnnnnnnnnnnnnnnnnnnnnnnnnnnnnnnnnnnnnnnnnnnnnnnnnnnnnnnnnnnnnnnnnnnnnnnnnnnnnnnnnnnnnnnnnnnnnnnnnnnnnnnnnnnnnnnnnnnnnnnnnnnnnnnnnnnnnnnnnnnnnnnnnnnnnnnnnnnnnnnnnnnnnnnnnnnnnnnnnnnnnnnnnnnnnnnnnnnnnnnnnnnnnnnnnnnnnnnnnagaaaatgaaacagctcgacaagaacaaactacaggcggttgccaaccannnnnnnnnnnnnnnnnnnnnnnnnnnnnnnnnnnnnnnnnnnnnnnnnnnnnnnnnnnnnnnnnnnnnnnnnnnnnnnnnnnnagttctgtggcacttgccctgggtgccctaactgtatggcatgctgttctcatcagtcgaggtgagactagcatcgaaaggcacatcaacaagaaggagagacgtcggctacaggccaagggcagag

SEQ ID NO: 32296 - DNA, 513 bp, Macaca Mulatta
ttgtcagctgttaaatagaccactctgggtaagaaaagattaatgaggatgtactatgaaaataattactgagaaattaagccaaaaataaaattctctccaggcatcgccgaatggaggctgtgcgactgcgaaaagagaaccagatctatagtgctgatgagaagagagcccttgcatcctttaaccaagaagagagacgaaagagagagaacaagattctggccagttttcgggaaatggtttacagaaagaccaaagggaaggatgacaaataaggattttctgattgtccagaagacatttttaacaacaaaaaagaaagtctgggttccacacatacatagaaaaagattattatgttctgagaaagctttacagtgctactgtgccttctatttaattctttcagtccttcaataaaaagctacttattgatataacttcagcaagttctttgggttattttggattgaccataataactttctggtttaaaaattcaaattatgg

SEQ ID NO: 32297 - DNA, 470 bp, Macaca Mulatta
atgagaaaattactttcccttctgacattgatcctcaagttttctatgaactaccagaagtagtacaaaaggaactgctggcagagtggaagagaacaggatcagatttccacattggacataaataagcatattcagcaaaaaagtctgaaaatctagggaataccattattttcagattagcagtttattaagctcttctatattaaaacactaatagatattcaataatggagtaaactgttcgagataaagcaagaatagttgcaggaagtaaattctggcacaaagcataaaaatataacagaagaaataatgtaaaatactatcttttctgtctaaagctgttttatattgcttttcaataaaaagaatacatggtcaacctagaatatttttcatgaattggtggggagatgtatatgcttgtatataaaaaatagccaaatcgttgctatggtaaaggacac

SEQ ID NO: 32298 - DNA, 216 bp, Macaca Mulatta
agggtgtatgggaggccaggagctctggggtctgtctgttgatgcaatcatttagtctttttacagtggagcggagtgggaggtgggcaggaccgggcagcgagttctggaagtctgcgagactgactggagaccacagccactcacccctagacattgcaaaccagaactgacctgcgacctcctgaaaatgatcccattaaaaccaacgttggt

SEQ ID NO: 32299 - DNA, 1410 bp, Macaca Mulatta
  misc_feature (1)...(1410): n = A,T,C or G
tgaagaaggccgaaatgggacggttcaatatttccccggatgaagacagcagcagctacagttcgaacagcgacttcaactactcctaccccaccaagcaagctgctctgannnnnnnnnnnnnnnnnnnnnnnnnnnnnnnnnnnnnnnnnnnnnnnnnnnnnnnnnnnnnnnnnnnnnnnnnnnnnnnnnnnnnnnnnnnnnnnnnnnnnnnnnnnnnnnnnnnnnnnnnnnnnnnnnnnnnnnnnnnnnnnnnnnnnnnnnnnnnnnnnnnnnnnnnnnnnnnnnnnnnnnnnnnnnnnnnnnnnnnnnnnnnnnnnnnnnnnnnnnnnnnnnnnnnnnnnnnnnnnnnnnnnnnnnnnnnnnnnnnnnnnnnnnnnnnnnnnnnnnnnnnnnnnnnnnnnnnnnnnnnnnnnnnnnnnnnnnnnnnnnnnnnnnnnnnnnnnnnnnnnnnnnnnnnnnnnnnnnnnnnnnnnnnnnnnnnnnnnnnnnnnnnnnnnnnnnnnnnnnnnnnnnnnnnnnnnnnnnnnnnnnnnnnnnnnnnnnnnnnnnnnnnnnnnnnnnnnnnnnnnnnnnnnnnnnnnnnnnnnnnnnnnnnnnnnnnnnnnnnnnnnnnnnnnnnnnnnnnnnnnnnnnnnnnnnnnnnnnnnnnnnnnnnnnnnnnnnnnnttccttgttgtgtatggtgttctctctgannnngtcatttgcaagaaatttcaggatccgtgtcctgtggaagctgctttgataattaatgaaacaataaacaccaccttaacacagccaacagctctcgtacctgatttgtcacataacgtgactgaaaatgactcttgcagacctcactattttattttcaactcacagnnnnnnnnnnnnnnnnnnnnnnnnnnnnnnnnnnnnnnnnnnnnnnnnnnnnnnnnnnnnnnnnnnnnnnnnnnnnnnnnnnnnnnnnnnnnnnnnnnnnnnnnnnnnnnnnnnnnnnnnnnnnnnnnnnnnnnnnnnnnnnnnnnnnnnnnnnnnnnnnnnnnnnnnnnnnnnnnnnnnnnnnnnnnnnnnnnnnnnnnnnnnnnnnnnnnnnnnnnnnnnnnnnnnnnnnnnnnnnnnnnnnnnnnnnnnnnnnnnnnnnnnnnnnnnnnnnnnnnnnnnnnnnnnnnnnnnnnnnnnnnnnnntccggagttctgtaactcacttgttgtgtgcatcaaaagatttcagttggtggcgtcatagtctcattacagtgtctatcttggcatttaccaatttacttgtcatctttgtcccaactattagggatatctttggttttattggtnggtgcatctgcagctgctatgttaatttttattcttccttctgccttctatatcaagttggtgaagaaagaacctatgtaatctgta

SEQ ID NO: 32300 - DNA, 855 bp, Macaca Mulatta
ctcacactcttctggtcatggtctctgatctccacctcaaatgacaataaaaaaccggtccaacaaagacagtgctcagcacttcagccatcaggactaatccatcagtgactggaaaagaggctagcgctgaggcctgggctcctgggaccagagtccagcaggtgtgagtgaggctgacttgccgacggccagcaggtgatgtgtctcagccggcaaggcggtcccacagctgtcctcccacagcagcctcaggaggaggctgggtgcctgttctgtggcagcttcagcccagggatatccagctgtcgaggaacacctttataaaatgttgccagagcagcaacacttcccgctgagcacagccccgggaaatctggtaccaagtgagcaaggcggccgggcccacccaagcccgccatgcgcctgggcccgcctggctctgcaggggaggctgctacggctgcccacttcccagcacagtctgtggcgcttgaacccctcagtcctgttctcttcctggctaatagggagacccttctcaggcacccactgtttcaacttgaccctcccaccccctgctcctccacacacccctgcgtcctgctagcctaccctgtcagcctttcaataaacgtgatgcacaaatgtggacacctgagatggagctgaacatttcttcactttgttcttttcctgaagtcaaactcttatcagatactctaattattaccacccaagagaaacaggaaaaaggtttcaatgcttttgtttactgagagtaagagcacctgcgtctggaagacgggctggtaagttggtttggctacagaacagaaagaaaacaaaaacaaa

SEQ ID NO: 32301 - DNA, 293 bp, Macaca Mulatta
aaacgctgccaggttttaggagcagttctggtctcaaaaccatcaggatcctgccaccagggttcttttgaaatagtaccacacgtaaaagggaatttggctttcatttcatctaatcattgaattgtcaggctttgattgataattgtagaaataagtagccttctgttgtgggaataagttataatcagtattcatctctttgttttttgtcactgttttctctctaattgtgtcatttgtactgtttgaaaaatatttcttctataaaattaaactaacctgccttaaga

SEQ ID NO: 32302 - DNA, 147 bp, Macaca Mulatta
ggtgggatggcagctgaaaaatctggtgaagaaattgagagagaatcccacaggagttgtgttactgcttaagaagcgccccactgggtctttcaactttactcctgctcccttgaaaaacctacgttggaagccacctcttgtaca

SEQ ID NO: 32303 - DNA, 635 bp, Macaca Mulatta
  misc_feature (1)...(635): n = A,T,C or G
gtggtgcagctgaaggctgtgttcccacacggtgcaggctttgtgctggccttcgagttcatgctgtcagacctggccgaggtggtgcgccatgcccagaggccactagcccaggcacaggtcaagagctacctgcagatgctgctcaagggcgtcgccttctgccatgccaacaacattgtgcatcgggnggacctgaaacctgccaacctgctcatcagcgcctcaggccagctcaagatagcggactttggcctggcccgagtcttttccccagacagcagccgcctctacacacaccaggtggccaccaggtnnnnnnnnnnnnnnnnnnnnnnnnnnnnnnnnnnnnnnnnnnnnnnnnnnnnnnnnnnnnnnnnnnnnnnnnnnnnnnnnnnnnnnnnnnnnnnnnnnnnnnnnnnnnnnnnnnnnnnnnnnnnnnnnnnnnnnnnnnnnnnnnnnnnnnnnnnnnnnnnnggagctaattgagctgccggaatacaacaagatctcctttaaggagcaggcgccggtgcccctgggggaggtaatgcctgacgcctctccccaggcattagatctgatgggtcagttcctcttctaccctcctcgccagcgcatcgcagcttccaagg

SEQ ID NO: 32304 - DNA, 1001 bp, Macaca Mulatta
  misc_feature (1)...(1001): n = A,T,C or G
agtcgctaatgttccatggaggatcttttctccgtgggagtgaaattaagtgttatagatatgggacggaagattagttattggttgtctttacctggactacgaacgatatgttttattcgaggggagtgatttgtgagagaaacatatttgggggtgggaatttgctgcgatgcagtatatgtgggtgtttgcgcaaaggatgtgaggcaacaaataggattatcggnnnnnnnnnnnnnnnnnnnnnnnntgactactcgatttcacatataaacatttaacagtaaatgtaataactcttgttggtcattttttagagtggggggtcccacaggggtggttggttatcccccaggtgttagcaagtcaaatagggtttatattcccaaaatgggtgccaatatttgaggccgccaaggggggagcccttataccgtgggtaaaaaaaaacccaaccctctttttttgggttctcactaatggatctttccccagtggaagggaatgaattcaggaaatagtttccccggggtgttaattgtttggctttacagtttttcttcacgtgctggaatgaagggttttttttgccgtggctcaacagcttttgaggtacatcttcagtaggataatatctaggcattttgcgaagtttaaccacccgggtaccgccgttcttgtcaccaccaactggttttgtaagagttgcaagaaccttannnnnnnnnnnnnnnnnnnncttggatttagcggctgagtacttcctcttgtacatggcctttatggaatacatggcagatcgggaatacctgccaattcctctgacaaggacagggttgcggctgcaatggggcttccccttcttgggcttctcagccttgaggttaccctttttcaccttgccaccagcatcagccttcttggcttcgggtttcttctctttagtatctggcttctcaactttttcacccgccatcttgcaagatgggaaagagccc

SEQ ID NO: 32305 - DNA, 218 bp, Macaca Mulatta
acccacaactccactggtagcagccactcactcttcattgtgctgggcattcctggcttagaagaccagcacacatggatctctctccccttctttatttcctactttgttgctttccttgggaacagcctcatcatcttcatcatcatcactgaacgcaccctccatgaacccatgtaccttttcctctgcgtgctggctgcggctgacctcatcct

SEQ ID NO: 32306 - DNA, 2740 bp, Macaca Mulatta
  misc_feature (1)...(2740): n = A,T,C or G
ggaggacagatatctcaaggccaggatggaagaatcaccactaagccgagcaccatcccgtggtggagtcaactttctgaatgtagcccggacctacatccccaataccaaggtggaatgtcactacacccttcccccaggcaccatgcccagtgccagtgactggattggcatcttcaaggtnnnngctgcctgtgttcgagattaccacacatttgtgtggtcttccgtgcctgaaagtacaactgatggttcccccattcgcaacagtgtccagnnnnnnnnnnnnnnnnnnnnnnnnnnnnnnnnnnnnnnnnnnnnnnnnnnnnnnnnnnnnnnnnnnnnnnnnnnnnnnnnnnnnnnnnnnnnnnnnnnnnnnnnnnnnnnnnnnnnnnnnnnnnnnnnnnnnnnnnnnnnnnnnnnnnnnnnnnnnnnnnnnnnnnnnnnnnnnnnnnnnnnnnnnnnnnnnnnnnnnnnnnnnnnnnnnnnnnnnnnnnnnnnnnnnnnnnnnnnnnnnnnnnnnnnnnnnnnnnnnnnnnnnnnnnnnnnnnnnnnnnnnnnnnnnnnnnnnnnnnnnnnnnnnnnnnnnnnnnnnnnnnnnnnnnnnnnnnnnnnnnnnnnnnnnnnnnnnnnnnnnnnnnnnnnnnnnnnnnnnnnnnnnnnnnnnnnnnnnnnnnnnnnnnnnnnnnnnnnnnnnnnnnnnnnnnnnnnnnnnnnnnnnnnnnnnnnnnnnnnnnnnnnnnnnnnnnnnnnnnnnnnnnnnnnnnnnnnnnnnnnnnnnnnnnnnnnnnnnnnnnnnnnnnnnnnnnnnnnnnnnnnnnnnnnnnnnnnnnnnnnnnnnnnnnnnnnnnnnnnnnnnnnnnnnnnnnnnggctgagctccaagtggcacaacaggagaaccgtcgcttaaatttggacctgcaggaggccaagagctggcaagaggagcagagtgctcaggcccagagactgaaagacaaggtggcccagatgaaggacaccctaggccaggcccagcagcgggtggnnnnnnnnnnnnnnnnnnnnnnnnnnnnnnnnnnnnnnnnnnnnnnnnnnnnnnnnnnnnnnnnnnnnnnnnnnnnnnnnnnnnnnnnnnnnnnnnnnnnnnnnnnnnnnnnnnnnnnnnnnnnnnnnnnnnnnnnnnnnnnnnnnnnnnnnnnnnnnnnnnnnnnnnnnnnnnnnnnnnnnnnnnnnnnnnnnnnnnnnnnnnnnnnnnnnnnnnnnnnnnnnnnnnnnnnnnnnnnnnnnnnnnnnnnnnnaggcagagaaggacaagatcctgaagctgagtgcagagatacttcgactggagaaggcagttcaggaggagaggacccaaaaccaggtgttcaagactgagctggcccgggaaaaggattctagcctggtnnnnnnnnnnnnnnnnnnnnnnnnnnnnnnnnnnnnnnnnnnnnnnnnnnnnnnnnnnnnnnnnnnnnnnnnnnnnnnnnnnnnnnnnnnnnnnnnnnnnnnnnnnnnnnnnnnnnnnnnnnnnnnnnnnnnnnnnnnnnnnnnnnnnnnnnnnnnnnnnnnnnnnnnnnnnnnnnnnnnnnnnnnnnnnnnnnnnnnnnnnnnnnnnnnnnnnnnnnnnnnnnnnnnnnnnnnnnnnnnnnnnnnnnnnnnnnnnnnnnnnnnnnnnnnnnnnnnnnnnnnnnnnnnnnnnnnnnnnnnnnnnnnnnnnnnnnnnnnnnnnnnnnnnnnnnnnnnnnnnnnnnnnnnnnnnnnnnnnnnnnnnnnnnnnnnnnnnnnnnnnnnnnnnnnnnnnnnnnnnnngaggctgaagatgagaagtcagtcctgatggcagctgtgcagagtgggggtgaggaggccaacttgctgcttcctgaactgggcagcgccttctatgacatggccagnnnnnnnnnnnnnnnnnnnnnnnnnnnnnnnnnnnnnnnnnnnnnnnnnnnnnnnnnnnnnnnnnnnnnnnnnnnnnnnnnnnnnnnnnnnnnnnnnnnnnnnnnnnnnnnnnnnnnnnnnnnnnnnnnnnnnnnnnnnnnnnnnnnnnnnnnnnnnnnnnnnnnnnnnnnnnnnnnnnnnnnnnnnnnnnnnnnnnnnnnnnnnnnnnnnnnnnnnnnnnnnnnnnnnnnnnnnnnnnnnnnnnnnnnnnnnnnnnnnnnnnnnnnnnnnnnnnnnnnnnnnnnnnnnnnnnnnnnnnnnnnnnnnnnnnnnnnnnnnnnnnnnnnnnnnnnnnnnnnnnnnnnnnnnnnnnnnnnnnnnnnnnnnnnnnnnnnnnnnnnnnnnnnnnnnnnnnnnnnnnnnnnnnnnnnnnnnnnnnnnnnnnnnnnnnnnnnnnnnnnnnnnnnnnnnnnnnnnnnnnnnnnnnnnnnnnnnnnnnnnnnnnnnnnnnnnnnnnnnnnnnnnnnnnnnnnnnnnnnnnnnnnnnnnnnnncacactcccttgtctgatgccccaaagccaattcctggggcaccctaccctatataatttggggtttctgtttgttaacctgagtaaaaaaaggggcctgcatagaggcagcagcatggacatcacggcctctcaagtcccttttggttgtcagcttcgttggttcctctttctgttcccccattgccttctgcgccccaccctggccttttccataaccgtaggtattcagtttggagggttttttgtatttttgaggattcctgtattctgtatcctgtcctcg

SEQ ID NO: 32307 - DNA, 842 bp, Macaca Mulatta
ggggacaactcggtggtggccactgctcagaccagacttcgctcgttttcgtgcgcctcgctccgcttttcctccgcaaccatgtctgacaaacccgatatggctgacatcgagaaattcgataagtcgaaactgaagaagacagagacgcaagagaaaaatccactgccttccaaagaaacgattgaacaggagaagcaagcaggcgaatcgtaatgaggcgtgcgccgccaatatgcactgtacattccacaagcattgccttcttattttacttcttttagctgtttaactttgtaacatgcaaagaggttggatcaagtttaaatgactgtgctgcccctttcacatcaaagaactactgacaacaaaggccgcgcctgcctttccaatctgtctatctggcttgtccgggaaagaaagaactttgcttgttggtcgaaagaaaaaatgggaggagaaaaacatggcggtggcgaagaacatgaaaacctcgacgtaaaaccacgcttggccacagagtgatccttgcacgttgggaatagtataataaaatcggaggtgccaaattatttcccacgctcaaattaaatccagaattatccgccaaagatccaacactttcattaaaacgtgtcaaaatataaaaagacctgtaaccactcatacttgctttcatacgacaaatgtaaataagtataccatttgattccgtgaattaatattaaacgaatgaaagcgatcgaatatttcggcgtaggagttcaccttttgagtcccctcagcacaataaccacttttctgattatatataaaaaccaatatgagataccacctcactt

SEQ ID NO: 32308 - DNA, 177 bp, Macaca Mulatta
gatccaacaagggtcatggtacccccttccagtatggacgtcactgttggagaaagcattgttttgccgtgccaggtaacgcatgatcactcgctggacatcgtgtttacttggtcatttaatggacacctgatagactttgacagagatggggaccactttgaaagagttggaggg

SEQ ID NO: 32309 - DNA, 1941 bp, Macaca Mulatta
  misc_feature (1)...(1941): n = A,T,C or G
cattctatctacagagcggaggcaggacctttgacaggagacacatccgttctcctgtgatgtgtcagttagcgtggagaagcaagctggcttggactcgagagccaggatgggnnnnnnnnnnnnnnnnnnnnnnnnnnnnnnnnnnnnnnnnnnnnnnnnnnnnnnnnnnnnnnnnnnnnnnnnnnnnnnnnnnnnnnnnnnnnnnnnnnnnnnnnnnnnnnnnnnnnnnnnnnnnnnnnnnnnnnnnnnnnnnnnnnnnnnnnnnnnnnnnnnnnnnnnnnnnnnnnnnnnnnnnnnnnnnnnnnnnnnnnnnnnnnnnnnnnnnnnnnnnnnnnnnnnnnnnnnnnnnnnnnnnnnnnnnnnnnnnnnnnnnnnnnnnnnnnnnnnnnnnnnnnnnnnnnnnnnnnnnnnnnnnnnnnnnnnnnnnnnnnnnnnnnnnnnnnnnnnnnnnnnnnnnnnnnnnnnnnnnnnnnnnnnnnnnnnnnnnnnnnnnnnnnnnnnnnnnnnnnnnnnnnnnnnnnnnnnnnnnnnnnnnnnnnnnnnnnnnnnnnnnnnnnnnnnnnnnnnnnnnnnnnnnnnnnnnnnnnnnnnnnnnnnnnnnnnnnnnnnnnnnnnnnnnnnnnnnnnnnnnnnnnnnnnnnnnnnnnnnnnnnnnnnnnnnnnnnnnnnnnnnnnnnnnnnnnnnnnnnnnnnnnnnnnnnnnnnnnnnnnnnnnnnnnnnnnnnnnnnnnnnnnnnnnnnnnnnnnnnnnnnnnnnnnnnnnnnnnnnnnnnnnnnnnnnnnnnnnnnnnnnnnnnnnnnnnnnnnnnnnnnnnnnnnnnnnnnnnnnnnnnnnnnnnnnnnnnnnnnnnnnnnnnnnnnnnnnnnnnnnnnnnnnnnnnnnnnnnnnnnnnnnnnnnnnnnnnnnnnnnnnnnnnnnnnnnnnnnnnnnnnnnnnnnnnnnnnnnnnnnnnnnnnnnnnnnnnnnnnnnnnnnnnnnnnnnnnnnnnnnnnnnnnnnnnnnnnnnnnnnnnnnnnnnnnnnnnnnnnnnnnnnnnnnnnnnnnnnnnnnnnnnnnnnnnnnnnnnnnnnnnnnnnnnnnnnnnnnnnnnnnnnnnnnnnnnnnnnnnnnnnnnnnnnnnnnnnnnnnnnnnnnnnnnnnnnnnnnnnnnnnnnnnnnnnnnnnnnnnnnnnnnnnnnnnnnnnnnnnnnnnnnnnnnnnnnnnnnnnnnnnnnnnnnnnnnnnnnnnnnnnnnnnnnnnnnnnnnnnnnnnnnnnnnnnnnnnnnnnnnnnnnnnnnnnnnnnnnnnnnnnnnnnnnnnnnnnnnnnnnnnnnnnnnnnnnnnnnnnnnnnnnnnnnnnnnnnnnnnnnnnnnnnnnnnnnnnnnnnnacaggtgcttatggtgggcccaacaatgttctcccgggtgggagtgccgcggtgaacaaaagtccctactcttgcagagttgacctcagacaatgtcacaagaaaagggacagatggcggaaccctgggaagagcagcagctcgtgttcctgaacaaccttaccagggagagagctgaaatgggaactttgtcccaaaccagcggagacttcaagcaccatcattcctcataactcaagtctcagctacacttcatcatcagagagggattcacaactgtcccatgccaagctcnnnnnnnnnnnnnnnnnnnnnnnnnnnnnnnnctctctctgaaattatcttgcttatttatgtgtgtgtttctcacccatctttccactggaatctaagccttgtgatgtcaggtgttaagatttcaggccctggtgaaaacatgttcaggatgccctttctcccctttgcccagcaagagtggactgattaaagttggacctgaggtttctaagaatatgaaactgagttattctgaatagagggagccgtggcctcccagtgctgccagtta

SEQ ID NO: 32310 - DNA, 164 bp, Macaca Mulatta
  misc_feature (1)...(164): n = A,T,C or G
tgtccagggtgctgcagaaggacgcggagcaggagtcacagatgatagcggagatccaggacatgaagcaggagctctccacggtcaatatgatggacgagtttgccagatacgccaggctggaaagaaagatcaacaagatgacggataagctcaaaacccan

SEQ ID NO: 32311 - DNA, 308 bp, Macaca Mulatta
  misc_feature (1)...(308): n = A,T,C or G
ccatgcccagtcccacgccccctggcagcgctcaaaccagtgaggctgcacagcttccaggaacatgtcttcaagcgagccagcccttgtgagctgtgccatcagctcatnntaggaaactccaagcagggcttgcgatgtaagacgtgcaaagtcagcgtccacctctggtgctctgaggagatctcccaccagcaatgcccagggaagacggtgagcggggacccaagcagagatggccaactgagtgctgccagtactgtcacatgggggaatgagtctccctcggggctgctccttcctgtggg

SEQ ID NO: 32312 - DNA, 560 bp, Macaca Mulatta
gaattcccaactagcaagagcagagaatctacattatggctgatccataagccaccaattcagctaaatgagatgtttttaatctgggctttcacttaaaagtaaaactaaaaacactcatgaaaagagcctacccttcttgatcagagccataccactcttcaccaatgggaagtcaagatacctatgggtaaaagttctctctgatgcatgaaaattcagagtgataaagtaattttaaaataaatatttggagaaagcagtcctgtttgtttatttctatcactaaagacaagctctagatgaatttccaagtcagaagagaagtcttgtgaggcaattctcccatagtcatagagaggattctaagtaaggaaacgtgggtcctgaaaacctctaaattttctctctctgtaggaactcctgatactaggctctaatctgattctatagtatttttcatccaggtttataggataacacaagtaaaagcatggggcattagaattcaggaagtttgtctttcgtcttgttgctgttgatcatttgaagactttgga

SEQ ID NO: 32313 - DNA, 930 bp, Macaca Mulatta
  misc_feature (1)...(930): n = A,T,C or G
ggtggtattggaatgctatgtaagaaaggacttggtctacaccaaagccaatccaacgtttcatcattggaaggtcgataataggaagtttggacttactttccaaagccctgctgatgcccgagcctttgacaggggagtaaggaaagcaatcgaagaccttatagaagnagagaaggcttggctctttgcacattgtgatttctgcagtcagcccttgtgttcctgggaacatgaggatgatgaagtggctgtacttgtttccttgcctctctagaggaggggtttgtcccttttatctccatccctaagacgcaggaagaaattacacattgccagccctctaatagtctcacccatgtactggatgggagcatcctacttgagaaggctgngggcaagtacccggacccctcggaggacgcggactcctcctacgtgcgcttcgccaagggcgaggtccccaagcacgactacaactacccctacgtggactcctcagactttggcctcggtgaggaccccaaaggccgcgggggcagcgtgatcaagacgcagccgtcccggggcaagtcgcggcggcggaaggaggacggagagcgctcgcggtgcgtgtactgcagggacatgttcaaccacgaggagaaccgcaggggtcactgccaggacgcgcccgactccgtgagaacttgcatccgccgggtgagctgcatgtggtgcgcggacagcatgctctatcactgtatgtcggaccccgagggagactatacagacccttgctcgtgcgatactagcgacgagaagttttgcctccggtggatggctcttattgccttgtctttcctggccccctgtatgtgctgttacctgccccttcgggcctgctaccactgcggagtgatgtgtaggtgctgtggcgggaagcacaaa

SEQ ID NO: 32314 - DNA, 121 bp, Macaca Mulatta
ggtgactctggagaagaccttttgtttgggacatcagatggaaaacttgggcttattcagattactacatccaaaccaatacacaagtgggaaattcgaaatgagaaaaagaggggaggta

SEQ ID NO: 32315 - DNA, 653 bp, Macaca Mulatta
ggggagactcacaggctcaagtttaatgtgcctctatcttaattgcctgctatggaaatacagtgctttaaaatacttttcttattttaaaatttgttattgcttctgtctaagtgggtgcgatattgtggggtctacgttataaataaaggcaaggattcactaaagttccagaactcgtcaaacttgtcaccttctctctcgtccctctgaaggcaagccgcggcctttgtccatgcctgctgatgggaactggatggggattgtggacccttttgccagacctcgaggtcatggcaggaaaggggaggacgccctttgtcggtatttcagtaacgagcggattcccccgatcgtcgaagagagctcctctcacccataccggttctccagacccacgaccgagcggcatctggtcccgggtgcggactacatccgaggaagcaggtgctacgtcaactcagatctccacagcagcgccacgattccgttccaggaggaagggaccaaaaagacatcgggcttctcagctacgaagtcctcgtccacagaaccgtccctcctggtcagctggtttacgcgccctaaactgttgacttcctgagagggacctgctcaggccacctgctggctctcccaagtgccttgcttaa

SEQ ID NO: 32316 - DNA, 831 bp, Macaca Mulatta
  misc_feature (1)...(831): n = A,T,C or G
gcacgctggtgctgggagaaggcgctactgaggcggagatcagcatgaccagcactcgttggcggnnnnnnnnnnnnnnnnnnnnnnnnnnnnnnnnnnnnnnnnnnnnnnnnnnnnnnnnnnnnnnnnnnnnnnnnnnnnnnnnnnnnnnnnnnnnnnnnnnnnnnnnnnnnnnnnnnnnnnnnnnnnnnnnnnnnnnnnnnnnnnnnnnnnnnnnnnnnnnnnnnnnnnnnnnnnnnnnnnnnnnnnnnnnnnnnnnnnnnnnnnnnnnnnnnnnnnnnnnnnnnnnnnnnnnnnnnnnnnnnnnnnnnnnnnnnnnnnnnnnnnnnnnnnnnnnnnnnnnnnnnnnnnnnnnnnnnnnnnnnnnnnnnnnnnnnnnnnnnnnnnnnnnnnnnnnnnnnnnnnnagagcccggagggctgtgctaccccaagaagaggaaggatcagggggtgggagactggtaactgatgtcaccaagaaagaagnnnnnnnnnnnnnnnnnnnnnnnnnnnnnnnnnnnnnnnnnnnnnnnnnnnnnnnnnnnnnnnnnnnnnnnnnnnnnnnnnnnnnnnnnnnnnnnnnnnnnnnnnnnnnnnnnnnnnnnnnnnnnnnnnnnnnnnnnnnnnnnnnnnnnnnnnnnnnnnnnnnnnnngcggcctgcaatctccccatagtccggggcccctgccgagccttcatccaactctgggcatttgatgctgtcaagggaaagtgcgtcctcttcacctacgggggctgccagggcaacgggaacaagttctactctgagaaggagtgcagagagtactgcggtgtccctggtgatgg

SEQ ID NO: 32317 - DNA, 726 bp, Macaca Mulatta
cgaggctcgtattcttaagggaaaagttattttccatacttgaagttatatttccaaacctgagaaatgaagaaagattcttctgatattaaatacctacagttactactgaacctcttattaaggatttgtcaaggatagagtacagttgttggggaagtattttatgtatgcattcttagagcaaaaagttttgtttaaattctagaattgaaggtactgatcttataaaaagaaattctagcagttttagaaatacgtgggaaaaactcaaatattctatctgcaccaaaaagtttatttgtagtacataaaatgaatatgtataaaatgttttataataacttgttaataaagtactttctaatacattctattgactctgttagttgaacaaatagctgacttgaacatctatgcaaacttaagatgggcgggattgttgtaaatgctattgttttaaaagagctttctaaatgtaaagtagtgagaatttcaatttgggtagcatgtttgcataagttccaatatttgatgtttgttaagctctactatgggcaactgaagatggataaagaacaatgaaaactgagtcggtgcctgcttccccctcttttcccaggattagaggaaaaaatttattatatgatcaacttcttggttttcaattgcttcgaggcatggtgttattccttattactttagacctgtagttctcaacactga

SEQ ID NO: 32318 - DNA, 821 bp, Macaca Mulatta
  misc_feature (1)...(821): n = A,T,C or G
tcgccgttgctttccgggggtgggaaggaatcttccaccctttcccggggggttttgagggttttcccgcnnnnnnnnnnnnnnnnnnnnggaaggtttagcgcttcgggttaaagaatgtttttgggggaaatttgggcacctggggcggaaatattcgatttgaggtttggggagttggacactgcgcatatcgattttggtggaggtggcaatgacaaatntctggtgtgttcttcgtagaggaactcgattgaggaccagaggtccagtcacaagtaaaaaaccactagccagctgcttcagaaaaaccaccctcttgcccctgtggcgtccagtgaggataatcaaaatggtcccaggggtaatgctggctcgcagttttctcacgtgctgacagaagggttttttgccctggctcaacagctttcgaggcacatcttcagtaggataatatctaggcattttgcgaagtttaaccacccgggtaccgccgttcttgtcaccaccaacttgttttgtaagagttgcaagaaccttctccttctttctcttttcaaccttggatttagcggctgagtacttcctcttgtacatggcctttctggaatacatggcagatcgggaatacctgccaattcctctgacaaggacagggttgcggctgcaatggggcttccccttcttgggcttcttagccttgaggttaccctttttcaccttgccaccagcatcagccttcttggcttcgggtttcttctctttagtatctggcttctcaactttttcacccgccatcttgcaaaatgggaaagagcccc

SEQ ID NO: 32319 - DNA, 305 bp, Macaca Mulatta
  misc_feature (1)...(305): n = A,T,C or G
atggccgggctggggttttggggccaccctgctggacctctcnnnnnnnnnnnnnnnnnnnnnnnnncaccccgggccctgccagaaggatctctggtgttcgtggctctggtnttccgccatggcgaccgggccccgctggcctcctaccccacggacccacacaaggaggtggcctccaccctgtggccacgaggcctgggccagctgaccanggagggggtccgccagcagctggagctgggccgcttcctgaggagccgctatgaggccttcctgagtcctgagtaccggcgggaggaggt

SEQ ID NO: 32320 - DNA, 772 bp, Macaca Mulatta
  misc_feature (1)...(772): n = A,T,C or G
ggattcttcacaaacaagcttcaggaaatattatatatgggatatttatgctacataagaaaacagtaaatcagaagaccacaatctatgaaattcaggatgacagaggaaaaatggatgtagtggggacaggacaatgtcacaatatcccctgtgaagaaggagataagctccaactttactgctttcgacttagaaaaaagaaccagatgtcaaaactgatttcagaaatgcatagttttatccaggtaaagaaaaaaccaaacccaaaaaacaatgaccctaagagcatgaagccaccccaggagcagagtcagcttccaaatccttcagaggccggcaaaaccttccctgagatccatcttcaaactcctcagatgccgccaacaactccatccagcagtttcttcatcaagaaaagtgaagacacaatcaccaaaatgaatgacctcatgaggatgcagatactgaaggaaaagagtcattttccaggaccattcatgaccagcattggcacagctgacagccatctccacactcctcagatgcttccatcaataccaagcagcagttgcttaaccatgttgacaccaagactgaagactggacccgaagaagtttccatattagacggtgtccagagtgaccctcaagaagtgatggtgctgaacgcaacagaatcatttgtgtatgagcccntagagcagaaggaaatgtttcatgccacagtggcaactggaaaatgaagtcttccgagtgaaggtttttaaaa

SEQ ID NO: 32321 - DNA, 156 bp, Macaca Mulatta
ccaaaatggtaaatttaagagttcagacatcttagacaagacttgacttctgggcttcagcaaaacgtggaaacttttttagaagaatttttgctttctttctctctaaattttccttccgtgctttgatgcgggctcgtttctcacattccagtc

SEQ ID NO: 32322 - DNA, 96 bp, Macaca Mulatta
ggaagagatccctggatgtccctatgactccgttgaaatcttcaatggtcccaggattgcctcactctccatgggggaagttctgtgcccctgaaa

SEQ ID NO: 32323 - DNA, 1807 bp, Macaca Mulatta
  misc_feature (1)...(1807): n = A,T,C or G
ggaagttgcaggcaatgagggacattgctatattaaaggaaaagcaggagaaagtaatacagacattacaggaggagaaaaagaaagtccaagatgagacagctgcaaagacacgtgaagtacaggcccagctcctccaggagaaaagactactggagaaacaactgagcgagccagacaagaggctattgggaaagagaaaaagaagagagcttaataagaaagcccaggccgagaagttggcagcagagcggtgctatttttgaatactcctgtggcctcaaaagagagaaccagcagttcaagaaggaattactgcagctaattgagcaagtcccagaaactaacgtgctactcaaagccaattagaaaacaggaagcagcagctgcagcaggaacagtggtatctggagtccttaatccgggggaggcagagatggcaaggaagtcataatcagtgcctaaatagacaggatgttccaaagaccacacccagtcttccccaaggcaccaaatcaaggattaatccaaagtaactcctcctaaaataacactgattagataactggagcaagtactcttaagtgatacattaacctggctaggaaggctttnnnnnnnnnnnnnnnnnnnnnnnnnnnnnnnnnnnnnnnnnnnnnnnnnnnnnnnnnnnnnnnnnnnnnnnnnnnnnnnnnnnnnnnnnnnnnnnnnnnnnnnnnnnnnnnnnnnnnnnnnnnnnnnnnnnnnnnnnnnnnnnnnnnnnnnnnnnnnnnnnnnnnnnnnnnnnnnnnnnnnnnnnnnnnnnnnnnnnnnnnnnnnnnnnnnnnnnnnnnnnnnnnnnnnnnnnnnnnnnnnnnnnnnnnnnnnnnnnnnnnnnnnnnnnnnnnnnnnnnnnnnnnnnnnnnnnnnnnnnnnnnnnnnnnnnnnnnnnnnnnnnnnnnnnnnnnnnnnnnntttatcctcattccttttgaccgacttagcagacaaaagcagtttttataagatttttgtaagtttgtgccagtgaccaggtagctcctagttttctcatgagcgaaaaagcattctgataacagcaagtccagtaagtgctaggcagagtgacctttcatctgatgtgaagcccctacaagtttanaattgagaaggtaagagaagacgaaggagacatctattaggtcagctcttacatttgaaaatgttttctttgaagaaacacatgtagcatggaggtgactgaatgcctccccttatttcaggaaaatgtatccaaaaaaagttgaaatatttggacnnnnnnnnnnnaagtgtcatccatttccctagcagcattctaaaagatagaagtaaaatgatgtttattatcctaagtgctttagttttaggtcatttattttcttacaggtgcactttctagtacgtgaagtatcttttgtaattaacgcgtgccatgtttattcccatttagtagaactataaattatattttaaagtatatatttctaggatagttatatattttgggggggttctgcgacattgaagttgggactagttatttgaatgctgaatcccagtataggaatataatctcacattttaatatgggtcctctatgggaaaataggatcaactttgtttcccagaaattgttagtgatgaaaaacttcaaaataattttcctgaattttcagctttatttacatgtaaagtgaattcccttaaaattggacttaaaaaggattctccttcaatatgtccttaccttctagctttaacaacttttctgttaaatatgtagttt

SEQ ID NO: 32324 - DNA, 250 bp, Macaca Mulatta
taccaccccccagctaccccaatccataaccaactcaaaccattgatggaaacaaagacctcccagtcagcacccttcacgttcattttcttatccctgtaatcattcgctgttccactccagaacagctcctaaagctggccctcccccagtctacttgccgagtgtgaaagctgcaccacctgattgtaccagcactgcaggactgggcagacagacggtggctgctgctgccgccaccaccacctca

SEQ ID NO: 32325 - DNA, 5367 bp, Macaca Mulatta
  misc_feature (1)...(5367): n = A,T,C or G
caggctctgcgtgctgctgctggtatgtgccgcccaggcgtggctcatgtggcgcttcatccactcccagctgcggcactggcgggaatactggaatgagcagagtgnnnnnnnnnnnnnnnnnnnnnnnnnnnnnnnnnnnnnnnnnnnnnnnnnnnnnnnnnnnggttaccatgaaaatggagtggtgaaggcagagaacggaacctccccacggactaagaaactcaagtctccctaaggccaaagtgctaagaacaggaatcctcttggtgggggcccagcagggggcgaggagcccacgcccctccctgcctcctcctccctgcctgtgatgctccgtctcaaacggccgaaacctgtctttcaatgtggggtttcgctttctttcttcttggctttctcttattcttccacagaccattctcaataaagccaaaaatctttctctttctccccctcaggccacctcctgtcnnnnnnnnnnnnnnnnnnnnnnnnnnnnnnnnnnnnnnnnnnnnnnnnnnnnnnnnnnnnnnnnnnnnnnnnnnnnnnnnnnnnnnnnnnnnnnnnnnnnnnnnnnnnnnnnnnnnnnnnnnnnnnnnnnnnnnnnnnnnnnnnnnnnnnnnnnnnnnnnnnnnnnnnnnnnnnnnnnnnnnnnnnnnnnnnnnnnnnnnnnnnnnnnnnnnnnnnnnnnnnnnnnnnnnnnnnnnnnnnnnnnnnnnnnnnnnnnnnnnnnnnnnnnnnnnnnnnnnnnnnnnnnnnnnnnnnnnnnnnnnnnnnnnnnnnnnnnnnnnnnnnnnnnnnnnnnnnnnnnnnnnnnnnnnnnnnnnnnnnnnnnnnnnnnnnnnnnnnnnnnnnnnnnnnnnnnnnnnnnnnnnnnnnnnnnnnnnnnnnnnnnnnnnnnnnnnnnnnnnnnnnnnnnnnnnnnnnnnnnnnnnnnnnnnnnnnnnnnnnnnnnnnnnnnnnnnnnnnnnnnnnnnnnnnnnnnnnnnnnnnnnnnnnnnnnnnnnnnnnnnnnnnnnnnnnnnnnnnnnnnnnnnnnnnnnnnnnnnnnnnnnnnnnnnnnnnnnnnnnnnnnnnnnnnnnnnnnnnnnnnnnnnnnnnnnnnnnnnnnnnnnnnnnnnnnnnnnnnnnnnnnnnnnnnnnnnnnnnnnnnnnnnnnnnnnnnnnnnnnnnnnnnnnnnnnnnnnnnnnnnnnnnnnnnnnnnnnnnnnnnnnnnnnnnnnnnnnnnnnnnnnnnnnnnnnnnnnnnnnnnnnnnnnnnnnnnnnnnnnnnnnnnnnnnnnnnnnnnnnnnnnnnnnnnnnnnnnnnnnnnnnnnnnnnnnnnnnnnnnnnnnnnnnnnnnnnnnnnnnnnnnnnnnnnnnnnnnnnnnnnnnnnnnnnnnnnnnnnnnnnnnnnnnnnnnnnnnnnnnnnnnnnnnnnnnnnnnnnnnnnnnnnnnnnnnnnnnnnnnnnnnnnnnnnnnnnnnnnnnnnnnnnnnnnnnnnnnnnnnnnnnnnnnnnnnnnnnnnnnnnnnnnnnnnnnnnnnnnnnnnnnnnnnnnnnnnnnnnnnnnnnnnnnnnnnnnnnnnnnnnnnnnnnnnnnnnnnnnnnnnnnnnnnnnnnnnnnnnnnnnnnnnnnnnnnnnnnnnnnnnnnnnnnnnnnnnnnnnnnnnnnnnnnnnnnnnnnnnnnnnnnnnnnnnnnnnnnnnnnnnnnnnnnnnnnnnnnnnnnnnnnnnnnnnnnnnnnnnnnnnnnnnnnnnnnnnnnnnnnnnnnnnnnnnnnnnnnnnnnnnnnnnnnnnnnnnnnnnnnnnnnnnnnnnnnnnnnnnnnnnnnnnnnnnnnnnnnnnnnnnnnnnnnnnnnnnnnnnnnnnnnnnnnnnnnnnnnnnnnnnnnnnnnnnnnnnnnnnnnnnnnnnnnnnnnnnnnnnnnnnnnnnnnnnnnnnnnnnnnnnnnnnnnnnnnnnnnnnnnnnnnnnnnnnnnnnnnnnnnnnnnnnnnnnnnnnnnnnnnnnnnnnnnnnnnnnnnnnnnnnnnnnnnnnnnnnnnnnnnnnnnnnnnnnnnnnnnnnnnnnnnnnnnnnnnnnnnnnnnnnnnnnnnnnnnnnnnnnnnnnnnnnnnnnnnnnnnnnnnnnnnnnnnnnnnnnnnnnnnnnnnnnnnnnnnnnnnnnnnnnnnnnnnnnnnnnnnnnnnnnnnnnnnnnnnnnnnnnnnnnnnnnnnnnnnnnnnnnnnnnnnnnnnnnnnnnnnnnnnnnnnnnnnnnnnnnnnnnnnnnnnnnnnnnnnnnnnnnnnnnnnnnnnnnnnnnnnnnnnnnnnnnnnnnnnnnnnnnnnnnnnnnnnnnnnnnnnnnnnnnnnnnnnnnnnnnnnnnnnnnnnnnnnnnnnnnnnnnnnnnnnnnnnnnnnnnnnnnnnnnnnnnnnnnnnnnnnnnnnnnnnnnnnnnnnnnnnnnnnnnnnnnnnnnnnnnnnnnnnnnnnnnnnnnnnnnnnnnnnnnnnnnnnnnnnnnnnnnnnnnnnnnnnnnnnnnnnnnnnnnnnnnnnnnnnnnnnnnnnnnnnnnnnnnnnnnnnnnnnnnnnnnnnnnnnnnnnnnnnnnnnnnnnnnnnnnnnnnnnnnnnnnnnnnnnnnnnnnnnnnnnnnnnnnnnnnnnnnnnnnnnnnnnnnnnnnnnnnnnnnnnnnnnnnnnnnnnnnnnnnnnnnnnnnnnnnnnnnnnnnnnnnnnnnnnnnnnnnnnnnnnnnnnnnnnnnnnnnnnnnnnnnnnnnnnnnnnnnnnnnnnnnnnnnnnnnnnnnnnnnnnnnnnnnnnnnnnnnnnnnnnnnnnnnnnnnnnnnnnnnnnnnnnnnnnnnnnnnnnnnnnnnnnnnnnnnnnnnnnnnnnnnnnnnnnnnnnnnnnnnnnnnnnnnnnnnnnnnnnnnnnnnnnnnnnnnnnnnnnnnnnnnnnnnnnnnnnnnnnnnnnnnnnnnnnnnnnnnnnnnnnnnnnnnnnnnnnnnnnnnnnnnnnnnnnnnnnnnnnnnnnnnnnnnnnnnnnnnnnnnnnnnnnnnnnnnnnnnnnnnnnnnnnnnnnnnnnnnnnnnnnnnnnnnnnnnnnnnnnnnnnnnnnnnnnnnnnnnnnnnnnnnnnnnnnnnnnnnnnnnnnnnnnnnnnnnnnnnnnnnnnnnnnnnnnnnnnnnnnnnnnnnnnnnnnnnnnnnnnnnnnnnnnnnnnnnnnnnnnnnnnnnnnnnnnnnnnnnnnnnnnnnnnnnnnnnnnnnnnnnnnnnnnnnnnnnnnnnnnnnnnnnnnnnnnnnnnnnnnnnnnnnnnnnnnnnnnnnnnnnnnnnnnnnnnnnnnnnnnnnnnnnnnnnnnnnnnnnnnnnnnnnnnnnnnnnnnnnnnnnnnnnnnnnnnnnnnnnnnnnnnnnnnnnnnnnnnnnnnnnnnnnnnnnnnnnnnnnnnnnnnnnnnnnnnnnnnnnnnnnnnnnnnnnnnnnnnnnnnnnnnnnnnnnnnnnnnnnnnnnnnnnnnnnnnnnnnnnnnnnnnnnnnnnnnnnnnnnnnnnnnnnnnnnnnnnnnnnnnnnnnnnnnnnnnnnnnnnnnnnnnnnnnnnnnnnnnnnnnnnnnnnnnnnnnnnnnnnnnnnnnnnnnnnnnnnnnnnnnnnnnnnnnnnnnnnnnnnnnnnnnnnnnnnnnnnnnnnnnnnnnnnnnnnnnnnnnnnnnnnnnnnnnnnnnnnnnnnnnnnnnnnnnnnnnnnnnnnnnnnnnnnnnnnnnnnnnnnnnnnnnnnnnnnnnnnnnnnnnnnnnnnnnnnnnnnnnnnnnnnnnnnnnnnnnnnnnnnnnnnnnnnnnnnnnnnnnnnnnnnnnnnnnnnnnnnnnnnnnnnnnnnnnnnnnnnnnnnnnnnnnnnnnnnnnnnnnnnnnnnnnnnnnnnnnnnnnnnnnnnnnnnnnnnnnnnnnnnnnnnnnnnnnnnnnnnnnnnnnnnnnnnnnnnnnnnnnnnnnnnnnnnnnnnnnnnnnnnnnnnnnnnnnnnnnnnnnnnnnnnnnnnnnnnnnnnnnnnnnnnnnnnnnnnnnnnnnnnnnnnnnnnnnnnnnnnnnnnnnnnnnnnnnnnnnnnnnnnnnnnnnnnnnnnnnnnnnnnnnnnnnnnnnnnnnnnnnnnnnnnnnnnnnnnnnnnnnnnnnnnnnnnnnnnnnnnnnnnnnnnnnnnnnnnnnnnnnnnnnnnnnnnnnnnnnnnnnnnnnnnnnnnnnnnnnnnnnnnnnnnnnnnnnnnnnnnnnnnnnnnnnnnnnnnnnnnnnnnnnnnnnnnnnnnnnnnnnnnnnnnnnnnnnnnnnnnnnnnnnnnnnnnnnnnnnnnnnnnnnnnnnnnnnnnnnnnnnnnnnnnnnnnnnnnnnnnnnnnnnnnnnnnnnnnnnnnnnnnnnnnnnnnnnnnnnnnnnnnnnnnnnnnnnnnnnnnnnnnnnnnnnnnnnnnnnnnnnnnnnnnnnnnnnnnnnnnnnnnnnnnnnnnnnnnnnnnnnnnnnnnnnnnnnnnnnnnnnnnnnnnnnnnnnnnnnnnnnnnnnnnnnnnnnnnnnnnnnnnnnnnnnnnnnnnnnnnnnnnnnnnnnnnnnnnnnnnnnnnnnnnnnnnnnnnnnnnnnnnnnnnnnnnnnnnnnnnnnnnnnnnnnnnnnnnnnnnnnnnnnnnnnnnnnnnntataaaagggacatggattgtgacagtttcgccccatttctttcaaaccccactgcccagcattagggtctgtggcgtgttctgtttttggtttctcccttgtgtcagttctcttctggcccagctgggtggctgtggaaggcagtgaggtggtccaaccacaagcatacctattaagggaagcccagagtttccagccccctcctcgaaaactcccgtctggccccacatagcaagccctgcttctccattattttccccaccgccagatttttttaaaaggcacgcttaccataacctcttttggtctattttgcttcccattcagcccaaagtttatatgataaaggagtttacttttacttcccagtctcaagtgctaacacatacatgtctgactgttgcagaacggtttgagctcctaattcagtgttaccttgtgttagtcgcagcaaccctctcccctgccccttgcctgtccacgtttttctcgctcttccgggttgtgcaataactctcccagccggtggtcctttccacagcctttctgtcccttagaacatctaactgggggagaaatgggacccatgggaggggtagtcatcatccctcacacaagaaatagcagccactttccttttgttgctgtcattctcatcctgggtgggtttctgtggcactcttttagaacatgtagcatcatcttagaggtctatttt

SEQ ID NO: 32326 - DNA, 739 bp, Macaca Mulatta
gggaattacacaataatgagatctggctatttccacattttgaaaaggattcagttatttactgacactggtgagcatcctctttaaaataatgttctcatacttaaactttagagagcaatatctttaaatgaagtattaacactttggaatagtaacattttctgttatttttgattgcttgataaccagtttcaatgatgaaaatgaaaacaagtgctgaagatgaaatggatttaatctggattttgttttgtcacaccttctggaaaatactttgcaaatacgttctaaatttaaaacaatttttttatgatcacatggttcactactaaatgaccctcaaataagccagatgaaaatttgaagaaaaaaggtcacccagttctctgaaaaaaaggatttatatgtggatatttttcccccccaacaacacaatcattcctttagagcccacaaaattggtaaccttaaattgtgtgttttggtaagtaataactgtttcctcatagctagttctcaagctgcatgtaagattttaacgggaagagaaactaggcctggacctgaaggtctcaaatatgttgagaaggaagtatgaactataaggaacttgagatgtagatttattttgcaggaaatacaaggaaaatagggaaagaaatgtttgccgcatcaagtgtaaagaatgatactgaggatttttgcctttttatgaaatgaaaatggcattttacaa

SEQ ID NO: 32327 - DNA, 582 bp, Macaca Mulatta
gtagagtcagctaaaggaatgtgagattttaaattattcaccacctgtttgattacagttgactacaaatgcctgcaagtgtggatttggttgtcccatacattttaatatgtgtatttaaatcagacatcattcatagaaagcatattacatacatgtttatacataagcattacattttttaataaaaatgtatacaggtggggcactgttttggtggaaggcttggagttttttaaatgaatttagagctattagataaccactgtgttaaaggtaactatgtacacacaaagtgggcatccaagaggcatagcagcagtagcagtctttaaaggcttatacactgggaagaaagatgcatcctcttgccatgtggcaatccttttcctttagaaaacaggccagcttcacctgggcaccccgctgcccttcaaggctggtgattgctctgatagtgattccccgttgttgatgtttcatgcagagttgtgtgagagtcctcctcttttctttctttaaaagaagttctttctttgaagaaatccgatacatatacagcctacagtgcaaaacatttaa

SEQ ID NO: 32328 - DNA, 136 bp, Macaca Mulatta
gctggcaaacgcccttctggaaaaggaagtgataaactatgaggacatcgaggctctcattggcccgccgccccacgggccgaagaaaataatcgcaccgcagaggtgggtcgacgcccagagggagaaacaggac

SEQ ID NO: 32329 - DNA, 702 bp, Macaca Mulatta
aaaaaagatgtttattgttctccaactgacactgaagggagcaaacagaatagagggtatctaatttctgtatttccacaaagccactgaaacagtaatttcataagggttccttctgtcacctattttccatttctctcctttgtccccaaacttgcccctgtgcagcagccagctcctgtcaccatctctctttcagaggactcctgatggatttgactcagtgccgctgaagacatcctcaggaggcccagacatggacctgtgagaggcactggctgcctcacctgcctcctcaccttgcatagcacctttgcaagcctgcggtgatttgggtgccagcatcctgcaacactcactgctggaaatctcttcattgtggccttatcagatgtttgaatttcagatgttttttttatagagtacccaaaccctcctttctgcttgcctcaaacctgccaaatatacccacactttgtttgtaaattatgcccttgcttgtatcttgtttcccaaaatggcccatccgccagagccatagctttgtctgctcataattcttacagctctggaatgaagatatttctctcttcttaagtatagaaactatttcctctgtcctctaacttaaaagcagaaacagctgggagctttcctcgcatgccctcacctaatgatctctttaggagagaggctgggtga

SEQ ID NO: 32330 - DNA, 762 bp, Macaca Mulatta
ggaacatcacagccctcactaataacattgctgtcaagtgtagattccccccttcaaaaaaagcttgtgaccattttgtatggcttgtctggaaacttctgtaaatcttatgttttagtaaaatattttttgttattctactttgcctttgtacagtttattttactgtgtttatttcattttcccaatgtgacaatcgtattttaaaattaaaactatggaacattctctcttggtcttcaccatctggcaaattgaatggcaagaggtggatttcaccagtttcttttcactgatgcagatttgtgttaagatagtactgaatggagtatttataaactggccctgagcatgcataaagcatcagtatctgacctttttttaacctcctaggaatttgaaataaatgtgtttgtgttgtccgattagacgatcattggtgtcttgccacaatgtttaaaaattactgtacaggaaagtcacagcaaaaatagcagttgtgactgacatgtaggactttcacagttgtgccacatttttgcctaaaatttgggttatgacctttttcttggttcttgtctgaaaatttcatctgtaacctttcatgtgtgttattaagaaacactgatctgataatcatttgggatttgctgaggcatttgtgagtcttccttataaacctgatgagcagatctcaagcatcccacttgtgtgtcatcagaaaaggtttattcccttttgaaaatagcaagtccctccatt

SEQ ID NO: 32331 - DNA, 439 bp, Macaca Mulatta
  misc_feature (1)...(439): n = A,T,C or G
nnnnnnnnnnnnnnnnnnnnnnnnntnnnnntnttnntcatacatctgcctttattatgagcagcaggtgggacacttccagcaacagtaaaaaaaaaagtaatttacaaaagcaggggttcagtgaagccatctggttgttacccttgggcgctcacacgtagatgccaacccagagcagcaggaaaaggactccaaagcccatgaagagtgaggccaccaaagagatgaggagctctttatagatatcacgagtgtacttggtagaggtgacctcgtaaacgaagaaccaggcggtgaagaacatgccgatggccaaaagcaccacggtcagatgggggaagacagccgggttcactgggctggtgtatctgctcatggcctcaagctccattttgccccgcgcaggctaatccgccgctccgccaccggaagcccc

SEQ ID NO: 32332 - DNA, 176 bp, Macaca Mulatta
tgtaaagaatatctaagaccactaaagaagttcctgcgaaagttgcacctgcccagggaccttccccagaagaagaagctgaagtacatgaagcagagccttgtggtcctaggggaccacatcaacacctttctgcagcattactgccgagcctgggaaatcaaacactggagaaa

SEQ ID NO: 32333 - DNA, 645 bp, Macaca Mulatta
  misc_feature (1)...(645): n = A,T,C or G
gagattngacttgtccattgtgtcctggggctctctcgcntttacctgtggccgccactactaggaggtagacgtggaaacaagcacagaatgggacctgggaatctgcaggaatctgttcaccgaaaagggaggatccagctgaccacagagcgtggattctggactgtgagtttgagggctggaggccgcctctctgccagcacggtgcctctgactttcctcttcgtagatggcaagctacagcgagtggggatttttctggatatgggcatgcagaatgtttccttttttgatgctgaaggtggtttccatgtctatacattcaggagagtctctgctgaggagccactgcgcccgtttttggctccttcaattccacctaatggtgatcagggtgtcttgagtatctgtcctgtgatgaacccaggcactactgatgctccagtccatcctggggaggccaaacaaacccccacttcatatgggtgcacccggtggtttgcccagagtccaggttgtgtcacgtgcctcttggtgtagatgctgtatcttcttaaagtctctatcagagaagatcctggttaatctttttgcaatgcagagagccactgatatgttactgacagaaagaccagaggcccc

SEQ ID NO: 32334 - DNA, 213 bp, Macaca Mulatta
gcgagggtcctgcagaggtacccgttctgcgcctagacaggctcgaagcacgcgtccctctttcctcgcagtccatggcgtggttcctgagactctgcccttggctgctgttgctcggccccgggcttctggcgacagtgcgggcagaatgcagccaggattgcgcgacgtgcagctaccgccttgtgcgccccgccgacatcaacttcctgg

SEQ ID NO: 32335 - DNA, 701 bp, Macaca Mulatta
atctgcgcgggcctgcttggccgtgccccacgccgagcctcgggccgcgtgtgcgctgccgcgccgggcaccttagtcgcagcgtgctggagcgcgagtccaccgacctgtcgcacgtgagcgaggcggcagaggcccttcatccctgccccggcgcttcccagccgtgcaccctcgagcctggtcccggcccgtcttggcggggcccaaaggcaggcaacagcatcctgacagttgatgtgacctgaaaacacttagcgggcacgcttggatgttacagagttggagtcattgttgggggactgtggggagagctttgcctgttaataaaacgcacaaaccatttcacatgcagcgacagcgctgtttcacgtttctcattgtcttgagactctgtgggaagcctctggggcttcacacaggggctccctaggggtgagtgcaggaccctttgcagagctaccaggaaagagggctgaccacacctaaggcagccgggttacaatccgcataaaaatctgagcctggggagcgtgcgacagaggcaggcagactgttttaggcgttcaataaagtcggtcgatgacagacacagatgtgtgttcccagtcgcatttgtgctctggtgtgtaacagatctgtcctcgcctgcttccagctcccagggcccctttgagtctggacagcccagtcagtcccct

SEQ ID NO: 32336 - DNA, 1313 bp, Macaca Mulatta
  misc_feature (1)...(1313): n = A,T,C or G
ggaatttcgagagatgttatttangattaagtaatgtgcagaccatatagcgagtgcttaagtgtcactgaatggggaaatatcncgcaaccaaaacaggatcatttgcggtttgagtgtcatatcctgacacgacnaagaattatcgattgaagaacatatgtcctacatgatactgtattatcatcaggtacgganatgacatcatggggaccatcctctataccccatattgatgatcaatattacagggaatataaatgtggtatatcgtagtttatgaatctacattgtagaactgaaataatatatctaaaaggagatttaaatgtgtggtgtggtaggaaaaagacgattagaattggcgttgtgggctgtagaaaagagtcccaagaagactcgcctgcgagcaatggatcacgaacacgattctcctctgcgaagagtagtccacacattctttatctcgtcgcccgtcctccattcgactgttcttgtgcctagttaataaatgcccgcgatatcctaataggttatgaacttttgtcctgttacaaaagaaagttaattatgcgagtaatgtagatgtgttgggtgtcgccacagtgctgttaatggtgacgggcccagattaagtaccgcattttttgatctgtcttttatgcnctaatagtctcacttcattcatatgtgtatcccntcccttcttaggtggaactacatagatttgtgaggttcagtctgaacgtatgattatacaagattatctatactgtgtgttgattccccgacccttctccaggttgttttatgcccatcccgcgcaacgttgtttgccgttttataccctaatctatggcaaagcttcttattcgattacccttggctcagcccagtaaaatgatcaggaattggaaaggtccaggatccggccttttatttggtcgagaagttcttgtgaagacgaaagggcgcagacacagtctatttaaacttagatccaacctctttgcatcttacaaagttaaacagctaaaagaagtaaaataagaaggcaatgtttgtggaacgtacagtgcatattggcggcgcacgcctcattacgattcgcctgcttgcttctcctgttcaatcgtttctttggaaggcagtggatttttctcttgcgtctctgtcttcttcagtttcgacttatcgaatttctcgatctcagccatatcgggtttgtcagacatggttgcggaggaaaagcggagcgaggcgcacgaaaacgagcgaagtctggtctgagcagtggccaccaccgagttccc

SEQ ID NO: 32337 - DNA, 386 bp, Macaca Mulatta
gaaagtggagacggacctgagcccgaggaagacgcaggcagaggccgtggctgattccaccccagcctgcccagacaactctccttagccgcagccccgtccagttccctaggggttctgcccctccccctctctggggcaccagccccccagggccctgcatcccaccatgtcgatggctgtggaaacctttggcttcttcatggcagccgtggggctgctgatgctgggggtgactctgccaaacagctactggcgagtgtccaccgtgcacgggaacgtcatcaccaccaacaccatcttcgagaacctctggtttagctgtgccaccgactccctgggcgtctacaactgctgggagttcccgtccctgctggccctctctg

SEQ ID NO: 32338 - DNA, 307 bp, Macaca Mulatta
  misc_feature (1)...(307): n = A,T,C or G
ggaggactcggtgctgctgctgaacccagctctgggggaccggctggtggcgggcagcacagatcagctgttgagcgccttcgtcccgcctgaggagccccccttgcagccagcccgctggctggaggcctcagaggaggagcgccaagtgggcctgcggctgcgggtctgccannnnagccagtgacgcaggtgacctggcacgggcgtggggactacctggccgtggtgctggccacccaaggccacacccaggtgctgattcaccagctgagccgtcgtcgcagccagagcccgttccgccgca

SEQ ID NO: 32339 - DNA, 280 bp, Macaca Mulatta
caacttgattccatccagggacatgtcttgggaggcagctaggcttggtctctgcaactaggagcctgtagggaaacatcccgtcagaaatggagaaaacaatacaccctagagactgattagtggagctcctcctaggaggtgaccctagaagaaacatatcttctttcaaaatactgccttaatttttttctgtttcattttgtgaaattgcttggaattcctctaagtagagaataattgatttcagaggtcttgggactgtgagttttataaaatg

SEQ ID NO: 32340 - DNA, 641 bp, Macaca Mulatta
  misc_feature (1)...(641): n = A,T,C or G
ggggcagccctctctgttgcaatagttaaagaacttggattaaacccacagaaggtcaacattgaaggaggggctatagccttgggccaccctcttggagcatctggctgtcgaattcttgtgaccctgttacacacactggagagaacgggcggaattcgtggtgttgcggccctgtgcattgggggtgggatgggaatagcaatgtgtgttcagagaggatgaattgcttaaactttgaacaacctcaatttctttttaaactaataaagtactaggttgttatatgtgaaatcagaggaccaaaacacagatggaaaccatttcctgtatcacaaaaacccaagtttacagcttgttgtactttaatgtgtaatacttaagtctaggtacaagacaattccatttaacattgttataaataaaagagacatcagatcaatcnnnnnnnnnnnnnnnnnnnnnnnnnnnnnncaaaaaactacaataaagacaaaatctaatatatcaaacatatataataaaaaacaatattgaactattaactttcgtctctccccatttttatgattcgtcttcactctttgcaaagaatcctcccccgcccccgccattcttaattttttcacccactcttctaa

SEQ ID NO: 32341 - DNA, 760 bp, Macaca Mulatta
gggaaggtcgtacaaaatacgacataagtagaagactaagaagggcttgtcatatgatctttgtgtatatgcttcatgttatttgaccagaaatgtcttatctctaaaaatttttagtagtaattatttaccaaacttaaaaacatttccataaatataaagctttcctttatatttaagacaaaatataaaggctagaattttgttccttctctgtaacactaaatattttagtgtgaaagtgaatttttttattactatagtcttttcaatctacaagttgtgtttttaatttcttgatatgtcacttctgttcctccctgcttgcatttttttaaaagtagacattgtggcttgagaatttatcaatcatctttccaaaatgaccacattttgcttttagtttgtatggttaagtggtcaagcaaggctctaggagatagtcactgagctggaccttaaacacatctgcgggagctcacaaaatagtgaggagcaaaagaggcattccagaaagatgagtggttaagcagatgtgggggcagggcaagaggagacagctccttgttgccagagattctacacaaaggtgtcatggacactgatgctctattaagaagcttttgtggtgtgtgtggtagagaataaagcttttgatataacaagaaagggatatttcatcatgactcttaagaaaaggtaactggggttgtttaatggttttaattgataattgtcacctgatttgtattttctaacc

SEQ ID NO: 32342 - DNA, 360 bp, Macaca Mulatta
  misc_feature (1)...(360): n = A,T,C or G
ggaggccatgggggtacccctgtgtgcaccagatccagggtctgaaccgccgtgggacgaggagggcatcccgcccacagnnnnnnnnnnnnnnnnnnnnnnnnnnnnnnnnnnnnnnnnccggcctgccccacatccctggccatcgctccttggcccagtttaagagcagggagtttggctggtgctaggcctgggccagggggccgggacacccttgtttctggtggtcttcccgttgtgggagcaggtggagggtggagacctaaactttctgggtccagctgccttcagcccccctcccccagactaacagatccttggaggcaggggttgtggaaataaatctctgcctgctgg

SEQ ID NO: 32343 - DNA, 459 bp, Macaca Mulatta
agggagaggaggtgaatgaactcccagatgaggggagtggctcattgggaggaagctcagttccagaactgacctcagtgcacttgggaggcgtgaagtcctgagcattccatgatttctgctctggccccacctatcctaggatgggattggaagggatggagagtggtgggttcggtgttcttgtactttagtctggctgaacatgaactctgaatattctgtttacctggaagtggcaggggtgggaaagattcacatctttagttctcgtgcccaaaatctttggtagatggagggtaactggggattcagaagatgtggtcgaaggtatatttctgtctagtgtggcagagatgtatttttctaaagtgttggcagggcatttttccctcttacctcagactaagttatttatatattgttgattgaaggttttttaaaattgcttttaaactt

SEQ ID NO: 32344 - DNA, 980 bp, Macaca Mulatta
  misc_feature (1)...(980): n = A,T,C or G
gtttcgtttggagtgggaccccagagactaggaaacgtaaagcaaagtcatgcatctgtcatgtatgtagtacccatatgaatagactccactcttgtctctcctgtgtcttttttggctgcttcactgagaaacatattcacaaacatgcagaaacaaagcagcaccatttagctgtagacgtttatcatggggtcatatattgcttcatgtgtaaggattatgtatatgacaaagacatagaacagattgccaaagaaacaaaagaaaaaattttgagattaacttccacctcaacagatgtttctcatcaacagtttatgacatcagggactgaagacaagcaatcaacctgtgagacaaaggaacaggagccaaaattggtgaaacccaagaaaaagagaagaaaaaagtcagtctatactgtaggcctgagagggctaatcaatcttgggaacacttgttttatgaattgtattgttcaggcacttacccatattcctctactgaaagatttcttcctctctgacaagcacaaatgtataatgacaagccccagcttgtgtctggtctgtgaaatgtcttcgctttttcatgctatgtactctgggagccgaactcctcacattccctataagttactgcatctgatatggatccatgcagaacatttagcagggtacaggcagcaggatgcccatgagttccttattgcaatattagatgtgctgcatagacacagcaaagatgatagtggtgtgcaggaggccaataaccccaactgctgtaactgcatcatagaccaaatctttacaggtggcctgcaatcagatgtcacatgtcaagcctgccatagtgtttccaccaccatagacccatgctgggacatcagtttggacttgcctggctcttgtgccacattcgattcccagaacccaaaaaaggctgatggcacantgagcagggatgaccacataccc

SEQ ID NO: 32345 - DNA, 935 bp, Macaca Mulatta
  misc_feature (1)...(935): n = A,T,C or G
acaaggaaggtataactctaataaccctacttacagataagaaaaccaagactcagaagttaaatggaaaggtngaggtctctgaactaatccagactctcccatgaggttcatttggctgtgggcaagtcttgagcttctttcctcatctgcaaaagttgaaagcattcctaaggtttcttctagctctgcatcctnnnnnnnnnnnnnnnnnnnnnnnnnnnnnnnnnnnnnnnnnnnnnnnnnnnnnnnnnnnnnnnnnnnnnnnnnnnnnnnnnnnnnnnnnnnnnnnnnnnnnnnnnnnnnnnnnnnnnnnnnnnnnnnnnnnnnnnnnnnnnnnnnnnnnnnnnnnnnnnnnnnnnnnnnnnnnnnnnnnnnnnnnnnnnnnnnnnnnnnnnnnnnnnnnnnnnnnnnnnnnnnnnnnnnnnnnnnnnnnnnnnnnnnnnnnnnnnnnnnnnnnnnnnnnnnnnnnnnnnnnnnnnnnnnnnnnnnnnnnnnnnnnnnnnnnnnnnnnnnnnnnnnnnnnnnnnnnnnnnnnnnnnnnnnnnnnnnnnnnnnnnnnnnnnnnnnnnnnnnnnnnnnnnnnnnnnnnnnnnnnnnnnnnnnnnnnnnnnnnnnnnnnnnnnnnnnnnnnnnnnnnnnnnnnnnnnnnnnnnnnnnnnnnnnnnnnnnnnnnnnnnnnnnnnnnnnnnnnnnnnnnnnnnnnnnnnnnnnnnnnnnnnnnnnnnnnnnnnnnnnnnnnnnnnnnnnnnnnnnnnnnnnnnnnnnnnnnnnnnnnnnnnnnnnnnnnnnnnnnnnnnnnnnnnnnnnnnnnnnnnnnnnnnnnnnnnnnnagaccgtgtggtgcgagctttccgctgggaggagctaggtgtgggtcccgaacatctcacagggcagctggtgtccctcaagaaatggatgctggagggtca

SEQ ID NO: 32346 - DNA, 3409 bp, Macaca Mulatta
  misc_feature (1)...(3409): n = A,T,C or G
aggatctaccgctaccaatctcatgactatgccttcagtagtgttgaaaaattacttcatgctctaggaggagatgacttccttggaatgcttaatcgaacacttcttgaaaccttgcaaaaggccggcttctctgagaaattcctcaatgaaatgattgctcctgttatgagggtcaattatggccaaagcacggacatcaatgcctttgtggnnnnnnnnnnnnnnnnnnnnnnnnnnnnnnnnnnnnnnnnnnnnnnnnnnnnnnnnnnnnnnnnnnnnnnnnnnnnnnnnnnnnnnnnnnnnnnnnnnnnnnnnnnnnnnnnnnnnnnnnnnnnnnnnnnnnnnnnnnnnnnnnnnnnnnnnnnnnnnnnnnnnnnnnnnnnnnnnnnnnnnnnnnnnnnnnnnnnnnnnnnnnnnnnnnnnnnnnnnnnnnnnnnnnnnnnnnnnnnnnnnnnnnnnnnnnnnnnnnnnnnnnnnnnnnnnnnnnnnnnnnnnnnnnnnnnnnnnnnnnnnnnnnnnnnnnnnnnnnnnnnnnnnnnnnnnnnnnnnnnnnnnnnnnnnnnnnnnnnnnnnnnnnnnnnnnnnnnnnnnnnnnnnnnnnnnnnnnnnnnnnnnnnnnnnnnnnnnnnnnnnnnnnnnnnnnnnnnnnnnnnnnnnnnnnnnnnnnnnnnnnnnnnnnnnnnnnnnnnnnnnnnnnnnnnnnnnnnnnnnnnnnnnnnnnnnnnnnnnnnnnnnnnnnnnnnnnnnnnnnnnnnnnnnnnnnnnnnnnnnnnnnnnnnnnnnnnnnnnnnnnnnnnnnnnnnnnnnnnnnnnnnnnnnnnnnnnnnnnnnnnnnnnnnnnnnnnnnnnnnnnnnnnnnnnnnnnnnnnnnnnnnnnnnnnnnnnnnnnnnnnnnnnnnnnnnnnnnnnnnnnnnnnnnnnnnnnnnnnnnnnnnnnnnnnnnnnnnnnnnnnnnnnnnnnnnnnnnnnnnnnnnnnnnnnnnnnnnnnnnnnnnnnnnnnnnnnnnnnnnnnnnnnnnnnnnnnnnnnnnnnnnnnnnnnnnnnnnnnnnnnnnnnnnnnnnnnnnnnnnnnnnnnnnnnnnnnnnnnnnnnnnnnnnnnnnnnnnnnnnnnnnnnnnnnnnnnnnnnnnnnnnnnnnnnnnnnnnnnnnnnnnnnnnnnnnnnnnnnnnnnnnnnnnnnnnnnnnnnnnnnnnnnnnnnnnnnnnnnnnnnnnnnnnnnnnnnnnnnnnnnnnnnnnnnnnnnnnnnnnnnnnnnnnnnnnnnnnnnnnnnnnnnnnnnnnnnnnnnnnnnnnnnnnnnnnnnnnnnnnnnnnnnnnnnnnnnnnnnnnnnnnnnnnnnnnnnnnnnnnnnnnnnnnnnnnnnnnnnnnnnnnnnnnnnnnnnnnnnnnnnnnnnnnnnnnnnnnnnnnnnnnnnnnnnnnnnnnnnnnnnnnnnnnnnnnnnnnnnnnnnnnnnnnnnnnnnnnnnnnnnnnnnnnnnnnnnnnnnnnnnnnnnnnnnnnnnnnnnnnnnnnnnnnnnnnnnnnnnnnnnnnnnnnnnnnnnnnnnnnnnnnnnnnnnnnnnnnnnnnnnnnnnnnnnnnnnnnnnnnnnnnnnnnnnnnnnnnnnnnnnnnnnnnnnnnnnnnnnnnnnnnnnnnnnnnnnnnnnnnnnnnnnnnnnnnnnnnnnnnnnnnnnnnnnnnnnnnnnnnnnnnnnnnnnnnnnnnnnnnnnnnnnnnnnnnnnnnnnnnnnnnnnnnnnnnnnnnnnnnnnnnnnnnnnnnnnnnnnnnnnnnnnnnnnnnnnnnnnnnnnnnnnnnnnnnnnnnnnnnnnnnnnnnnnnnnnnnnnnnnnnnnnnnnnnnnnnnnnnnnnnnnnnnnnnnnnnnnnnnnnnnnnnnnnnnnnnnnnnnnnnnnnnnnnnnnnnnnnnnnnnnnnnnnnnnnnnnnnnnnnnnnnnnnnnnnnnnnnnnnnnnnnnnnnnnnnnnnnnnnnnnnnnnnnnnnnnnnnnnnnnnnnnnnnnnnnnnnnnnnnnnnnnnnnnnnnnnnnnnnnnnnnnnnnnnnnnnnnnnnnnnnnnnnnnnnnnnnnnnnnnnnnnnnnnnnnnnnnnnnnnnnnnnnnnnnnnnnnnnnnnnnnnnnnnnnnnnnnnnnnnnnnnnnnnnnnnnnnnnnnnnnnnnnnnnnnnnnnnnnnnnnnnnnnnnnnnnnnnnnnnnnnnnnnnnnnnnnnnnnnnnnnnnnnnnnnnnnnnnnnnnnnnnnnnnnnnnnnnnnnnnnnnnnnnnnnnnnnnnnnnnnnnnnnnnnnnnnnnnnnnnnnnnnnnnnnnnnnnnnnnnnnnnnnnnnnnnnnnnnnnnnnnnnnnnnnnnnnnnnnnnnnnnnnnnnnnnnnnnnnnnnnnnnnnnnnnnnnnnnnnnnnnnnnnnnnnnnnnnnnnnnnnnnnnnnnnnnnnnnnnnnnnnnnnnnnnnnnnnnnnnnnnnnnnnnnnnnnnnnnnnnnnnnnnnnnnnnnnnnnnnnnnnnnnnnnnnnnnnnnnnnnnnnnnnnnnnnnnnnnnnnnnnnnnnnnnnnnnnnnnnnnnnnnnnnnnnnnnnnnnnnnnnnnnnnnnnnnnnnnnnnnnnnnnnnnnnnnnnnnnnnnnnnnnnnnnnnnnnnnnnnnnnnnnnnnnnnnnnnnnnnnnnnnnnnnnnnnnnnnnnnnnnnnnnnnnnnnnnnnnnnnnnnnnnnnnnnnnnnnnnnnnnnnnnnnnnnnnnnnnnnnnnnnnnnnnnnnnnnnnnnnnnnnnnnnnnnnnnnnnnnnnnnnnnnnnnnnnnnnnnnnnnnnnnnnnnnnnnnnnnnnnnnnnnnnnnnnnnnnnnnnnnnnnnnnnnnnnnnnnnnnnnnnnnnnnnnnnnnnnnnnnnnnnnnnnnnnnnnnnnnnnnnnnnnnnnnnnnnnnnnnnnnnnnnnnnnnnnnnnnnnnnnnnnnnnnnnnnnnnnnnnnnnnnnnnnnnnnnnnnnnnnnnnnnnnnnnnnnnnnnnnnnnnnnnnnnnnnnntaatactgttatgtatatgctaaatattggtaaatactaatttctatcatatgtagacttgttttgcaatgagatatatttttacttataataccaatttaggctgggtgcagtggctcatgcctgtattcccagcactttgggaggccaaggcaaacggatcacgacgtcaggagatcaagaccatctggccaacatgctgaaaccccatctctactaaatatacaaaaattagctgggcgtggaggtgcacgcctgtaatcccagctactgtaatcccagctacttgggaggctgaggcaggagaattgcctcaatcgcgaggcggaggttgcagtgagccgaggttgcaccattgcagtccagcctggcgacagagcaagactccgtctc

SEQ ID NO: 32347 - DNA, 764 bp, Macaca Mulatta
ggcggaccacaatgactgtcattctggaaggatttcacagtgtgcagctgcttagatttaagaacactcttcactatgtaatttacagcagcaccttatatttagaacaagtgataattccctttactaagtgaacagattattaaagcccatagcagccttgaaccgtttgtacttgaaaatgtgggtataaaggggaatatatttttttccagaaccgcatttattggcatacacatagaagcagatcttgcggcatgctgaaatttgttgtaaatcccaatctttactgccatgggaaaagctggaattttctaaacttaagtctgtaaatatgctcatcttaagttcatgtaatgtttccgctaactcaccaagaataagctgacgatttaaacaacttttactgtataaaactgaagtgcacggcatggcatcacaatatcttgacattcgttttgtgtcattttgctactttagaaaatagtttctgaactccttccccctttatactgtattaaggcagaaacaaaacttttgaagcattaaagatcttcaccaaaataactattggtaacttcaggaattttgtcgttgccttacgtgaggatgaatagatccaccaagcacgcctataatacaaagtaaactatgattttttatggtgaaattttcctagatggaaaaattgaaaatttaatctggcccattttcatttttccgttatccttaccactttatttttgtaccatgtattttcaata

SEQ ID NO: 32348 - DNA, 471 bp, Macaca Mulatta
  misc_feature (1)...(471): n = A,T,C or G
gatgcgcctggagaaggacaggttctctgtcaacctggatgtgaagcacttctccccagaggaactcaaagttaaggtgttgggagatgtgattgaggtgcatggcaaacatgaagagcgccaggnnnnnnnnnnnnnnnnnnnnnnnnnnnnnnnnnnnnnnnnnnnnnnnnnnnnnnnnnnnnnnnnnnnnnnnnnnnnnnnnnnnnnnnnnnnnnnnnnnnnnnnnnnnnnnnnnnnnnnnnnnnnnnnnnnntctggccctgagcgcaccattcccatcacccgtgaagagaagcctgctgtcaccgcagcccccaagaaatagatgccctttcttgaattgcattttntaaaacaagaaagtttccccgccagtgaatgaaagtcttgtgactagtgctgaagcttattaatgctaagggcaggcccaaattatcaagctaataaaatatcattcagcaacagata

SEQ ID NO: 32349 - DNA, 92 bp, Macaca Mulatta
cacttggcaaagtccctccctttgccctccagtgtgaatcggccacgaattgacctgatcgtgtttgtggttaatcttcacagcaaatacag

SEQ ID NO: 32350 - DNA, 137 bp, Macaca Mulatta
ctccttggtgcccaggcccgaggggtagccatgctgggtgtgttcctggtctccgcagtggcccatgaatatatcttctgcttcgtcctggggttcttctatcccgtcatgctgatactcttccttgttattggagg

SEQ ID NO: 32351 - DNA, 942 bp, Macaca Mulatta
  misc_feature (1)...(942): n = A,T,C or G
ctgagctgtcaccaccgacactctccaggccccggacacgatgcaggccatcaagtgtgtggtggtgggagatggggccgtgggcaagacctgccttctcatcagctacaccaccaacgccttccccnggagagtacatccccaccgtgtttgacaactattcagccaatgtgatggtggacagcaagccggtgaacctggggctgtgggacactgctgggcaggaggactacgaccgtctccggccactctcctacccacagacggacgtcttcctcatctgcttctccctcgtcagcccagcctcctatgagaacgtccgtgccaagtggttcccggaagtgcggcaccactgccccagcacacccatcatcctggtgggcaccaagctggacctgcgggacgacaaggacaccatcgagaaactgaaggagaagaagctggctcccatcacctacccgcagggcctggcactggccaaggagattgactcggtgaaatatctggagtgctcagccctcacccagagaggcctgaaaaccgtgttcgacgaagccatccgggccgtgctgtgccctcagcccacgcggcagcagaagcgcgcctgcagcctcctctaggggttgcaccccagtgctcccacctagatgggtctgatcctccaggatccccacccaaagccttgatggcaccccgactggccacgctgtcccctccctgtggcgtttcttagcagatggctgcagagcttcattgatggtcttttctgtactggaggcctcctgaggccaggaaggtgtgaatttgcaggtgctgcattccaagcccctcatgctcctgccttcctgagggccagaggggagccccaggacccattaagccaaccccgtgttcctgccatcagtaccagctgccgcgtatggaagcatctaacggttcatt

SEQ ID NO: 32352 - DNA, 153 bp, Macaca Mulatta
ccctgtgtgtttcgcttcctccttcagctgggcccatctgtggattcgggataaacaaccagtgaccaccttcttccccttcagcagagtttgcaaacaggacgcttatgacctgcatgatgtttaaaaagatttgagtaattgccagtaaat

SEQ ID NO: 32353 - DNA, 997 bp, Macaca Mulatta
ggacatttgctacaagatcctattgcacccacccactccacctgccaacattatgtctgcaaaactgtaaaaggcaagaaaatgatgatgaaaccttcctgtagctgtgcaaagactatgagcagtttgaggaaaacaagcagttaagcatcctagtgaactgctacaaaaaactatgcgagtatataacacagactacactggcacgggatataatagaagcagttgactgttcttctgatattttggctttgcttaatgatggatcattgttttgtgaggagacagaaaaaccctcagattcatcctttactttgtgtttgacacattcccctttaccttcaacctcagaacccacaactgatcctcaagctagtttatctccaatgtctgaaagcaccctcagcattgctattggcagttctgttatcaatggtttgcctacttataatgggctttcaatagatagatttggtataaatattccttcacctgaacattcaaatacgattgacgtatgtaacactgttgacataaaaactgaggatctgtctgacagcctgccacccgtttgtgacacggtagccactgacttatgttccacaggcattgatatctgcagtttcagtgaagatataaaacctggagactctctgttactgagtgttgaggaagtactccgcagcttagaaactgtttcaaatacagaggtctgttgccctaatttgcagccgaacttggaagccactgtatccaatggaccttttctgcagctttcttcccagtctcttagccataatgtttttatgtccaccagtcctgcacttcatgggttatcatgtacagcagcaactccgaagatagcaaaattgaatagaaaacgatccagatcagagagcgacagtgagaaagttcagccacttccaatttctaccattattcgaggcccaacactgggggcatctgctcctgtgacggtgaaacgggagagcaaaat

SEQ ID NO: 32354 - DNA, 817 bp, Macaca Mulatta
  misc_feature (1)...(817): n = A,T,C or G
ttgttttccgnnnnnnnnnnnnnnnnnnnnccccccatattatttttttcgtttcgaccgggggaaccagggaggccgttttccatgggattaaaaaaaatgaaggccttttttggggagccctaaaccccgattgttggggaattaacaatatttttcttaccccccataaccggacgtagtaaagaaaactttcggcaccccagggtcagatcgtttttgtggcccagagactcatttccctcaaaaatgcttttctccaaagattttttaatataaaatgggggaaacctaaaaggaaaatatcttgggtcccaaaattactaagccgagggagaattcaagctgggaacttctcaagacaaacctacctcccattctattcaatgtcatcctctgctcgctgatatagatgcatattctgattgcttcctttggaaaggcttatcagaaactcaaaagaatgcaaccatttgtctctcacctatctgtgacctagaagcccccttccctgcttcaagttgtccccgcctttctggacggaaccaacgtacatatattgattgatgtcttatgcctccctaaaatgtataaaactaagctgtgccctgaacaccttaggcacatgttgccagtacttcctggggctgtatcacgggcacacatcctgaaccttggcacaacaaactttctaaattaactgagacctgtctcaaattctgaggttcacatactcatatgaataactgactactagataactctagtctaacagccatctcaaagtgaatagatggacaataaaataatctcaccc

SEQ ID NO: 32355 - DNA, 455 bp, Macaca Mulatta
cattttacccttggtcaatcgtttaagctaaccccctttttactgagccttcagtctttgaatttctaaaaaacagaggccatggcagaataatctttgggtaactttcaaaacggggcagccaaacccatgaggcaatgtcaggaaccgaaggataaatgaggtcccaggcagagaatcatacttatcaaggttttacctgtgcattactaataggcctctttaagagttagtttctttgggattgctatgaatgataccctgaatttggcctgcactaatctgatgtttacacgtggacacacaacgtgcaaatcaatgagtacgtttcctgggaagtgtctaagaacaccaaaaagggatccgtacattcagtgtttatggaaggaaggaaagaaagaaggaagtgaagagggagaagggatggaggtcacactggtagaacgtaaccacgg

SEQ ID NO: 32356 - DNA, 812 bp, Macaca Mulatta
catgtacctgttcctctgcatgctatccaccattgacctggtcctctgcacctccactgtgcccaagctccttgcacttttttgggcaaaggatgctgagatcacctttggggcctgtgctgcccagatgttctttatccatggcttctcagctgtagaatctggtatactgctagcaatggcctttgaccgctacttagccatctgccggcctctgcactatgggttgttgctctccccagagtctgtaggcaagctgggggctgcagctgtgcttcgtggcttgggactcatgaccccactcacctgcttgctggcaagactgaggtactgcagtcgagtggtggcccactcctactgtgaacacatggctgtggtgaagctggcttgcggaggaacacagccaaacaacatctatggcatcatcgctgccacactggttgtgggcactgactccatctgtattgctgtctcttatgcactcatcctccgggctgtgttaggcctctcctccaaggaggcaagggctaagacctttggcacttgtggctcccacctgggtgtcatccttctcttctacacaccaggactcttctccttctacacacagcggtttggccagcacgtgccccggcacatccacatcctcctagctgacctctacctggttgtgccacccatgctcaaccccatcatctatggtatgaagaccaagcagatctgggatggggccctccggcttctgaagtggagccctgctcagtcatagtcttcaaccccaaccagagacctttatcttcttctcccctcag

SEQ ID NO: 32357 - DNA, 228 bp, Macaca Mulatta
acagtttggccagctggctctggacttgttggagaaggcattcaagcagaatgagcgcatggccatgacgctgttgacgtatgaactcaggaactggagcaattcgacctgcctgaaactggccgtgtcgggaggattacgaccctttgtttcacatacttgtacccaaatgctactgacggacatgtggatggggcgcctgaaaatgaggaagaactcttggttaaa

SEQ ID NO: 32358 - DNA, 834 bp, Macaca Mulatta
gggctctattcttgcctatcgcagccatgttatgtggtcccaagaagcatctgatgcgggtagcagctccaaagcattggttgctggataaattgaccggtgtgtttgctcctcgtcctttctccggtcctcacatgttgagagagtgtctcccccttatcatcttcctaaggaacagacttaagtatgccctgacaggagatgaagtaaagaagatttgcatgcatcggttcattaagatcgatggcaaggtccgaactgatataacctaccctgctggattcatggatgtcatcagcattgacaagacgggagagaatttccgtctgatctatgacaccaagggtcgcttttctgtacatcgtattaaccctgaggaggccaagttcaggttatgcatagtgagaaagatctttgtggggcacaaaacgaaaccctcgtctggtgacttctgatgcccgcagaatccgcttaccctgattcccctcaacagccgtgatggatacccatttcggattgaatttggagactggcaagatatatggaatttgtacacatttcaactccgggtaacctgtgttatgggtgactgggaggtgctcaatcccggagaaagaattggttgtgaaccaccaaacagaagagtggcaccactgtgaattattttggaagcggagccccccgtggaagaaaagccgcaggggtatataggtttacctaagttataattttcccagaattttatgttttttgtgcaaagggcgaaaaaaacaagacgcatttaatacttcgacaggagaagaagggattcccccccttaaattaggtgttgaa

SEQ ID NO: 32359 - DNA, 216 bp, Macaca Mulatta
taggaataattataccaattttaagagcattccccacctgtccccacacacccaaacaaaatgtggtggtgttgccttcaaaaaagaagttttgtgtcattaacatgacagaagaactttttaaaaaaacataactgtcaagtattctatttgcatttaggagactgttaatctatgctagattgtcattttccctccttctcccacaaaagttta

SEQ ID NO: 32360 - DNA, 512 bp, Macaca Mulatta
  misc_feature (1)...(512): n = A,T,C or G
ggtgattggcaaaggcagtgaaaagtctgatgacaactcctatgatgagaagtacctgattaccacctcagagcagcccatcgctgccctgcaccgggatgagtggctccggccggaggacctgcccatcaagtatgctggcctgtctacctgcttccgtcaggaggtgggctcccacggccgtgacacccgtggcatcttccgagtccatcagtttgagaagnnnnnnnnnnnnnnnnnnnnnnnnnnnnnnnnnnnnnnnnnnnnnnnnnnnnnnnnnnnnnnnnnnnnnnnnnnnnnnnnnnnnnnnnnnnnnnnnnnnnnnnnnnnnnnnnnnnnnnnnnnnnnnncaggttctttgaatcatgctgccagtaagaagcttgacctggaggcctggtttccgggctcaggagccttccgtgagttggtctcctgttctaattgcacggattaccaggctcgccggcttcgaatccgatatgggcaaaccaagaagatgatggacaagg

SEQ ID NO: 32361 - DNA, 159 bp, Macaca Mulatta
tggatggtgctggtggtgacagtgaggcagatgtccttatgatgctccgccgtcttatagggggtcaggtcaaaggaacactggggtggagggttggggttgctgtccccaccacccccaccctggggggctgccccaggagactggaagtgtggtggt

SEQ ID NO: 32362 - DNA, 6953 bp, Macaca Mulatta
  misc_feature (1)...(6953): n = A,T,C or G
gcagagtcgactggatgctcctgtaccaaggcatggtggtgctggctgccagccaggtgtggtggacctgggaggtggaagacgtcttccacaaagtgcaaaaaggggagaagcaggccatgaagaaatacggcaggannnnnnnnnnnnnnnnnnnnnnnnnnnnnnnnnnnnnnnnnnnnnnnnnnnnnnnnnnnnnnnnnnnnnnnnnnnnnnnnnnnnnnnnnnnnnnnnnnnnnnnnnnnnnnnnnnnnnnnnnnnnnnnnnnnnnnnnnnnnnnnnnnnnnnnnnnnnnnnnnnnnnnnnnnnnnnnnnnnnnnnnnnnnnnnnnnnnnnnnnnnnnnnnnnnnnnnnnnnnnnnnnnnnnnnnnnnnnnnnnnnnnnnnnnnnnnnnnnnnnnnnnnnnnnnnnnnnnnnnnnnnnnnnnnnnnnnnnnnnnnnnnnnnnnnnnnnnnnnnnnnnnnnnnnnnnnnnnnnnnnnnnnnnnnnnnnnnnnnnnnnnnnnnnnnnnnnnnnnnnnnnnnnnnnnnnnnnnnnnnnnnnnnnnnnnnnnnnnnnnnnnnnnnnnnnnnnnnnnnnnnnnnnnnnnnnnnnnnnnnnnnnnnnnnnnnnnnnnnnnnnnnnnnnnnnnnnnnnnnnnnnnnnnnnnnnnnnnnnnnnnnnnnnnnnnnnnnnnnnnnnnnnnnnnnnnnnnnnnnnnnnnnnnnnnnnnnnnnnnnnnnnnnnnnnnnnnnnnnnnnnnnnnnnnnnnnnnnnnnnnnnnnnnnnnnnnnnnnnnnnnnnnnnnnnnnnnnnnnnnnnnnnnnnnnnnnnnnnnnnnnnnnnnnnnnnnnnnnnnnnnnnnnnnnnnnnnnnnnnnnnnnnnnnnnnnnnnnnnnnnnnnnnnnnnnnnnnnnnnnnnnnnnnnnnnnnnnnnnnnnnnnnnnnnnnnnnnnnnnnnnnnnnnnnnnnnnnnnnnnnnnnnnagctggcccgggagcagctgtccaagcagtatcactatgattttggactcagagccctgaaatcggtgctggtcatggctggtgagctgaagagaggctcctctgaccttagggagnnnnnnnnnnnnnnnnnnnnnnnnnnnnnnnnnnnnnnnnnnnnnnnnnnnnnnnnnnnnnnnnnnnnnnnnnnnnnnnnnnnnnnnnnnnnnnnnnnnnnnnnnnnnnnnnnnnnnnnnnnnnnnnnnnnnnnnnnnnnnnnnnnnnnnnnnnnnnnnnnnnnnnnnnnnnnnnnnnnnnnnnnnnnnnnnnnnnnnnnnnnnnnnnnnnnnnnnnnnnnnnnnnnnnnnnnnnnnnnnnnnnnnnnnnnnnnnnnnnnnnnnnnnnnnnnnnnnnnnnnnnnnnnnnnnnnnnnnnnnnnnnnnnnnnnnnnnnnnnnnnnnnnnnnnnnnnnnnnnnnnnnnnnnnnnnnnnnnnnnnnnnnnnnnnnnnnnnnnnnnnnnnnnnnnnnnnnnnnnnnnnnnnnnnnnnnnnnnnnnnnnnnnnnnnnnnnnnnnnnnnnnnnnnnnnnnnnnnnnnnnnnnnnnnnnnnnnnnnnnnnnnnnnnnnnnnnnnnnnnnnnnnnnnnnnnnnnnnnnnnnnnnnnnnnnnnnnnnnnnnnnnnnnnnnnnnnnnnnnnnnnnnnnnnnnnnnnnnnnnnnnnnnnnnnnnnnnnnnnnnnnnnnnnnnnnnnnnnnnnnnnnnnnnnnnnnnnnnnnnnnnnnnnnnnnnnnnnnnnnnnnnnnnnnnnnnnnnnnnnnnnnnnnnnnnnnnnnnnnnnnnnnnnnnnnnnnnnnnnnnnnnnnnnnnnnnnnnnnnnnnnnnnnnnnnnnnnnnnnnnnnnnnnnnnnnnnnnnnnnnnnnnnnnnnnnnnnnnnnnnnnnnnnnnnnnnnnnnnnnnnnnnnnnnnnnnnnnnnnnnnnnnnnnnnnnnnnnnnnnnnnnnnnnnnnnnnnnnnnnnnnnnnnnnnnnnnnnnnnnnnnnnnnnnnnnnnnnnnnnnnnnnnnnnnnnnnnnnnnnnnnnnnnnnnnnnnnnnnnnnnnnnnnnnnnnnnnnnnnnnnnnnnnnnnnnnnnnnnnnnnnnnnnnnnnnnnnnnnnnnnnnnnnnnnnnnnnnnnnnnnnnnnnnnnnnnnnnnnnnnnnnnnnnnnnnnnnnnnnnnnnnnnnnnnnnnnnnnnnnnnnnnnnnnnnnnnnnnnnnnnnnnnnnnnnnnnnnnnnnnnnnnnnnnnnnnnnnnnnnnnnnnnnnnnnnnnnnnnnnnnnnnnnnnnnnnnnnnnnnnnnnnnnnnnnnnnnnnnnnnnnnnnnnnnnnnnnnnnnnnnnnnnnnnnnnnnnnnnnnnnnnnnnnnnnnnnnnnnnnnnnnnnnnnnnnnnnnnnnnnnnnnnnnnnnnnnnnnnnnnnnnnnnnnnnnnnnnnnnnnnnnnnnnnnnnnnnnnnnnnnnnnnnnnnnnnnnnnnnnnnnnnnnnnnnnnnnnnnnnnnnnnnnnnnnnnnnnnnnnnnnnnnnnnnnnnnnnnnnnnnnnnnnnnnnnnnnnnnnnnnnnnnnnnnnnnnnnnnnnnnnnnnnnnnnnnnnnnnnnnnnnnnnnnnnnnnnnnnnnnnnnnnnnnnnnnnnnnnnnnnnnnnnnnnnnnnnnnnnnnnnnnnnnnnnnnnnnnnnnnnnnnnnnnnnnnnnnnnnnnnnnnnnnnnnnnnnnnnnnnnnnnnnnnnnnnnnnnnnnnnnnnnnnnnnnnnnnnnnnnnnnnnnnnnnnnnnnnnnnnnnnnnnnnnnnnnnnnnnnnnnnnnnnnnnnnnnnnnnnnnnnnnnnnnnnnnnnnnnnnnnnnnnnnnnnnnnnnnnnnnnnnnnnnnnnnnnnnnnnnnnnnnnnnnnnnnnnnnnnnnnnnnnnnnnnnnnnnnnnnnnnnnnnnnnnnnnnnnnnnnnnnnnnnnnnnnnnnnnnnnnnnnnnnnnnnnnnnnnnnnnnnnnnnnnnnnnnnnnnnnnnnnnnnnnnnnnnnnnnnnnnnnnnnnnnnnnnnnnnnnnnnnnnnnnnnnnnnnnnnnnnnnnnnnnnnnnnnnnnnnnnnnnnnnnnnnnnnnnnnnnnnnnnnnnnnnnnnnnnnnnnnnnnnnnnnnnnnnnnnnnnnnnnnnnnnnnnnnnnnnnnnnnnnnnnnnnnnnnnnnnnnnnnnnnnnnnnnnnnnnnnnnnnnnnnnnnnnnnnnnnnnnngtataatgaaagcaacaccaaaatgaacttggttctcttcgacgacgctctggagcatttaacccgggtgcaccgtatcatccgcatggaccgcggccacgccctgctggtcggggtcgggggctcaggaaagcagtctctttcgaggctggctgctttcacagccggctgtgaggtnnnnnnnnnnnnnnnnnnnnnnnnnnnnnnnnnnnnnnnnnnnnnnnnnnnnnnnnnnnnnnnnnnnnnnnnnnnnnnnnnnnnnnnnnnnnnnnnnnnnnnnnnnnnnnnnnnnnnnnnnnnnnnnnnnnnnnnnnnnnnnnnnnnnnnnnnnnnnnnnnnnnnnnnnnnnnnnnnnnnnnnnnnnnnnnnnnnnnnnnnnnnnnnnnnnnnnnnnnnnnnnnnnnnnnnnnnnnnnnnnnnnnnnnnnnnnnnnnnnnnnnnnnnnnnnnnnnnnnnnnnnnnnnnnnnnnnnnnnnnnnnnnnnnnnnnnnnnnnnnnnnnnnnnnnnnnnnnnnnnnnnnnnnnnnnnnnnnnnnnnnnnnnnnnnnnnnnnnnnnnnnnnnnnnnnnnnnnnnnnnnnnnnnnnnnnnnnnnnnnnnnnnnnnnnnnnnnnnnnnnnnnnnnnnnnnnnnnnnnnnnnnnnnnnnnnnnnnnnnnnnnnnnnnnnnnnnnnnnnnnnnnnnnnnnnnnnnnnnnnnnnnnnnnnnnnnnnnnnnnnnnnnnnnnnnnnnnnnnnnnnnnnnnnnnnnnnnnnnnnnnnnnnnnnnnnnnnnnnnnnnnnnnnnnnnnnnnnnnnnnnnnnnnnnnnnnnnnnnnnnnnnnnnnnnnagctcagtgcaagcgtctggacgggggactggacaagctgaaggaggccaccatccagctggacgagctgaaccagaagctggccgagcagaagatcgtgctggccgagaagtccgccgcctgcgaggccttgctggaggagatcgccgtcaacaccgctgtannnnnnnnnnnnnnnnnnnnnnnnnnnnnnnnnnnnnnnnnnnnnnnnnnnnnnnnnnnnnnnnnnnnnnnnnnnnnnnnnnnnnnnnnnnnnnnnnnnnnnnnnnnnnnnnnnnnnnnnnnnnnnnnnnnnnnnnnnnnnnnnnnnnnnnnnnnnnnnnnnnnnnnnnnnnnnnnnnnnnnnnnnnnnnnnnnnnnnnnnnnnnnnnnnnnnnnnnnnnnnnnnnnnnnnnnnnnnnnnnnnnnnnnnnnnnnnnnnnnnnnnnnnnnnnnnnnnnnnnnnnnnnnnnnnnnnnnnnnnnnnnnnnnnnnnnnnnnnnnnnnnnnnnnnnnnnnnnnnnnnnnnnnnnnnnnnnnnnnnnnnnnnnnnnnnnnnnnnnnnnnnnnnnnnnnnnnnnnnnnnnnnnnnnnnnnnnnnnnnnnnnnnnnnnnnnnnnnnnnnnnnnnnnnnnnnnnnnnnnnnnnnnnnnnnnnnnnnnnnnnnnnnnnnnnnnnnnnnnnnnnnnnnnnnnnnnnnnnnnnnnnnnnnnnnnnnnnnnnnnnnnnnnnnnnnnnnnnnnnnnnnnnnnnnnnnnnnnnnnnnnnnnnnnnnnnnnnnnnnnnnnnnnnnnnnnnnnnnnnnnnnnnnnnnnnnnnnnnnnnnnnnnnnnnnnnnnnnnnnnnnnnnnnnnnnnnnnnnnnnnnnnnnnnnnnnnnnnnnnnnnnnnnnnnnnnnnnnnnnnnnnnnnnnnnnnnnnnnnnnnnnnnnnnnnnnnnnnnnnnnnnnnnnnnnnnnnnnnnnnnnnnnnnnnnnnnnnnnnnnnnnnnnnnnnnnnnnnnnnnnnnnnnnnnnnnnnnnnnnnnnnnnnnnnnnnnnnnnnnnnnnnnnnnnnnnnnnnnnnnnnnnnnnnnnnnnnnnnnnnnnnnnnnnnnnnnnnnnnnnnnnnnnnnnnnnnnnnnnnnnnnnnnnnnnnnnnnnnnnnnnnnnnnnnnnnnnnnnnnnnnnnnnnnnnnnnnnnnnnnnnnnnnnnnnnnnnnnnnnnnnnnnnnnnnnnnnnnnnnnnnnnnnnnnnnnnnnnnnnnnnnnnnnnnnnnnnnnnnnnggtcgcttcctttaacgaccctgacttcctcaagcagctagagatgtccataaagtacgggacccctttcctgttccgcgatgttgatgaatacatcgatcctgtgattgataacgtcttagaaaaaaatataaaagtctcccaaggacggcagtttattatcctgggagacaaggaagttgactatgattcaaatttcagactgtacctaaacaccaagctggccaatcccagatacaccccatccgtgtttgggaaagctatggtcatcaattacannnnnnnnnnnnnnnnnnnnnnnnnnnnnnnnnnnnnnnnnnnnnnnnnnnnnnnnnnnnnnnnnnnnnnnnnnnnnnnnnnnnnnnnnnnnnnnnnnnnnnnnnnnnnnnnnnnnnnnnnnnnnnnnnnnnnnnnnnnnnnnnnnnnnnnnnnnnnnnnnnnnnnnnnnnnnnnnnnnnnnnnnnnnnnnnnnnnnnnnnnnnnnnnnnnnnnnnnnnnnnnnnnnnnnnnnnnnnnnnnnnnnnnnnnnnnnnnnnnnnnnnnnnnnnnnnnnnnnnnnnnnnnnnnnnnnnnnnnnnnnnnnnnnnnnnnnnnnnnnnnnnnnnnnnnnnnnnnnnnnnnnnnnnnnnnnnnnnnnnnnnnnnnnnnnnnnnnnnnnnnnnnnnnnnnnnnnnnnnnnnnnnnnnnnnnnnnnnnnnnnnnnnnnnnnnnnnnnnnnnnnnnnnnnnnnnnnnnnnnnnnnnnnnnnnnnnnnnnnnnnnnnnnnnnnnnnnnnnnnnnnnnnnnnnnnnnnnnnnnnnnnnnnnnnnnnnnnnnnnnnnnnnnnnnnnnnnnnnnnnnnnnnnnnnnnnnnnnnnnnnnnnnnnnnnnnnnnnnnnnnnnnnnnnnnnnnnnnnnnnnnnnnnnnnnnnnnnnnnnnnnnnnnnnnnnnnnnnnnnnnnnnnnnnnnnnnnnnnnnnnnnnnnnnnnnnnnnnnnnnnnnnnnnnnnnnnnnnnnnnnnnnnnnnnnnnnnnnnnnnnnnnnnnnnnnnnnnnnnnnnnnnnnnnnnnnnnnnnnnnnnnnnnnnnnnnnnnnnnnnnnnnnnnnnnnnnnnnnnnnnnnnnnnnnnnnnnnnnnnnnnnnnnnnnnnnnnnnnnnnnnnnnnnnnnnnnnnnnnnnnnnnnnnnnnnnnnnnnnnnnnnnnnnnnnnnnnnnnnnnnnnnnnnnnnnnnnnnnnnnnnnnnnnnnnnnnnnnnnnnnnnnnnnnnnnnnnnnnnnnnnnnnnnnnnnnnnnnnnnnnnnnnnnnnnnnnnnnnnnnnnnnnnnnnnnnnnnnnnnnnnnnnnnnnnnnnnnnnnnnnnnnnnnnnnnnnnnnnnnnnnnnnnnnnnnnnnnnnnnnnnnnnnnnnnnnnnnnnnnnnnnnnnnnnnnnnnnnnnnnnnnnnnnnnnnnnnnnnnnnnnnnnnnnnnnnnnnnnnnnnnnnnnnnnnnnnnnnnnnnnnnnnnnnnnnnnnnnnnnnnnnnnnnnnnnnnnnnnnnnnnnnnnnnnnnnnnnnnnnnnnnnnnnnnnnnnnnnnnnnnnnnnnnnnnnnnnnnnnnnnnaaggttgtcactgagccgcccaatgggctgaaactcaacatgagggcaacttacttcaagatctctcacgaaatgctggaccagagcccgca

SEQ ID NO: 32363 - DNA, 733 bp, Macaca Mulatta
  misc_feature (1)...(733): n = A,T,C or G
ggcacgaggctaactgacttattactgagcaatattacgtgaacaatttcatccangttccaaactcttaaaggatgcttttggaaaacacgcagtatacctagatgatgactaaatgcaaaatccttgggctttggtttaatttttttctaataaggattttaaattactgccaacttcaaaagtgttcttaaagagaaaaataatgttaagaaaaatttgaaagctttggaaaaccaaatttgtaatatcattgtatttttggttaaaaattttgaaataaatttctaaatannnnnnnnnnnnnnnnnnnnnnnnnnnnnnnnnnnnnnnnnnnnnnnnnnnnnnnnnnnnnnnnnnnnnnnnnnnnnnnnnnnnnnnnnnnnnnnnnnnnnnnnnnnnnnnnnnnnnnnnnnnnnnnnnnnnnnnnnnnnnnnnnnnnnnnnnnnnnnnnnnnnnnnnnnnnnnnnnnnnnnnnnnnnnnnnnnnnnnnnnnnnnnnnnnnnnnnnnnnnnnnnnnnnnnnnnnnnnnnnnnnnnnnnnnnnnnnnnnnnnnnnnnnnnnnnnnnnnnnnnnnnnnnnnnnnnnnnnnnnnnnnnnnnnnnnnnnnnnnnnnnnnnnnnnnnnnnnnnnnnnnnnnnnnnnnnnnnnnnnnnnnnnnnnnnnnnnnnnnnnnnnnnnnnnnnnnnnnnnnnnnnnnnnnnnnnnnnnnnnnnnnnnnnnnnnnnnnnnn

SEQ ID NO: 32364 - DNA, 4194 bp, Macaca Mulatta
  misc_feature (1)...(4194): n = A,T,C or G
tcctggaagatactgctctttggtgtaataaacttgatatgtactggcttcctgcttatgtggtgcagttctactaatagtatagnnnnnnnnnnnnnnnnnnnnnnnnnnnnnnnnnnnnnnnnnnnnnnnnnnnnnnnnnnnnnnnnnnnnnnnnnnnnnnnnnnnnnnnnnnnnnnnnnnnnnnnnnnnnnnnnnnnnnnnnnnnnnnnnnnnnnnnnnnnnnnnnnnnnnnnnnnnnnnnnnnnnnnnnnnnnnnnnnnnnnnnnnnnnnnnnnnnnnnnnnnnnnnnnnnnnnnnnnnnnnnnnnnnnnnnnnnnnnnnnnnnnnnnnnnnnnnnnnnnnnnnnnnnnnnnnnnnnnnnnnnnnnnnnnnnnnnnnnnnnnnnnnnnnnnnnnnnnnnnnnnnnnnnnnnnnnnnnnnnnnnnnnnnnnnnnnnnnnnnnnnnnnnnnnnnnnnnnnnnnnnnnnnnnnnnnnnnnnnnnnnnnnnnnnnnnnnnnnnnnnnnnnnnnnnnnnnnnnnnnnnnnnnnnnnnnnnnnnnnnnnnnnnnnnnnnnnnnnnnnnnnnnnnnnnnnnnnnnnnnnnnnnnnnnnnnnnnnnnnnnnnnnnnnnnnnnnnnnnnnnnnnnnnnnnnnnnnnnnnnnnnnnnnnnnnnnnnnnnnnnnnnnnnnnnnnnnnnnnnnnnnnnnnnnnnnnnnnnnnnnnnnnnnnnnnnnnnnnnnnnnnnnnnnnnnnnnnnnnnnnnnnnnnnnnnnnnnnnnnnnnnnnnnnnnnnnnnnnnnnnnnnnnnnnnnnnnnnnnnnnnnnnnnnnnnnnnnnnnnnnnnnnnnnnnnnnnnnnnnnnnnnnnnnnnnnnnnnnnnnnnnnnnnnnnnnnnnnnnnnnnnnnnnnnnnnnnnnnnnnnnnnnnnnnnnnnnnnnnnnnnnnnnnnnnnnnnnnnnnnnnnnnnnnnnnnnnnnnnnnnnnnnnnnnnnnnnnnnnnnnnnnnnnnnnnnnnnnnnnnnnnnnnnnnnnnnnnnnnnnnnnnnnnnnnnnnnnnnnnnnnnnnnnnnnnnnnnnnnnnnnnnnnnnnnnnnnnnnnnnnnnnnnnnnnnnnnnnnnnnnnnnnnnnnnnnnnnnnnnnnnnnnnnnnnnnnnnnnnnnnnnnnnnnnnnnnnnnnnnnnnnnnnnnnnnnnnnnnnnnnnnnnnnnnnnnnnnnnnnnnnnnnnnnnnnnnnnnnnnnnnnnnnnnnnnnnnnnnnnnnnnnnnnnnnnnnnnnnnnnnnnnnnnnnnnnnnnnnnnnnnnnnnnnnnnnnnnnnnnnnnnnnnnnnnnnnnnnnnnnnnnnnnnnnnnnnnnnnnnnnnnnnnnnnnnnnnnnnnnnnnnnnnnnnnnnnnnnnnnnnnnnnnnnnnnnnnnnnnnnnnnnnnnnnnnnnnnnnnnnnnnnnnnnnnnnnnnnnnnnnnnnnnnnnnnnnnnnnnnnnnnnnnnnnnnnnnnnnnnnnnnnnnnnnnnnnnnnnnnnnnnnnnnnnnnnnnnnnnnnnnnnnnnnnnnnnnnnnnnnnnnnnnnnnnnnnnnnnnnnnnnnnnnnnnnnnnnnnnnnnnnnnnnnnnnnnnnnnnnnnnnnnnnnnnnnnnnnnnnnnnnnnnnnnnnnnnnnnnnnnnnnnnnnnnnnnnnnnnnnnnnnnnnnnnnnnnnnnnnnnnnnnnnnnnnnnnnnnnnnnnnnnnnnnnnnnnnnnnnnnnnnnnnnnnnnnnnnnnnnnnnnnnnnnnnnnnngagatggagtctcactctgttgccaggctggaatgcagtgctgtaatcttggctcactgcatcctccgactccctggttcaagcgattctcctgcctcagcctcccaagtagctgggattacaggcacgcaccaccaggcccagctaatttttgtagttttagtagagatggggtttcaccatgttggccaggatggtttcaatctcctgacctcatgatccgcccacctcggcgtcccaaagtgctgggattagaggtgtgagccaccgnnnnnnnnnnnnnnnnnnnnnnnnnnnnnnnnnnnnnnnnnnnnnnnnnnnnnnnnnnnnnnnnnnnnnnnnnnnnnnnnnnnnnnnnnnnnnnnnnnnnnnnnnnnnnnnnnnnnnnnnnnnnnnnnnnnnnnnnnnnnnnnnnnnnnnnnnnnnnnnnnnnnnnnnnnnnnnnnnnnnnnnnnnnnnnnnnnnnnnnnnnnnnnnnnnnnnnnnnnnnnnnnnnnnnnnnnnnnnnnnnnnnnnnnnnnnnnnnnnnnnnnnnnnnnnnnnnnnnnnnnnnnnnnnnnnnnnnnnnnnnnnnnnnnnnnnnnnnnnnnnnnnnnnnnnnnnnnnnnnnnnnnnnnnnnnnnnnnnnnnnnnnnnnnnnnnnnnnnnnnnnnnnnnnnnnnnnnnnnnnnnnnnnnnnnnnnnnnnnnnnnnnnnnnnnnnnnnnnnnnnnnnnnnnnnnnnnnnnnnnnnnnnnnnnnnnnnnnnnnnnnnnnnnnnnnnnnnnnnnnnnnnnnnnnnnnnnnnnnnnnnnnnnnnnnnnnnnnnnnnnnnnnnnnnnnnnnnnnnnnnnnnnnnnnnnnnnnnnnnnnnnnnnnnnnnnnnnnnnnnnnnnnnnnnnnnnnnnnnnnnnnnnnnnnnnnnnnnnnnnnnnnnnnnnnnnnnnnnnnnnnnnnnnnnnnnnnnnnnnnnnnnnnnnnnnnnnnnnnnnnnnnnnnnnnnnnnnnnnnnnnnnnnnnnnnnnnnnnnnnnnnnnnnnnnnnnnnnnnnnnnnnnnnnnnnnnnnnnnnnnnnnnnnnnnnnnnnnnnnnnnnnnnnnnnnnnnnnnnnnnnnnnnnnnnnnnnnnnnnnnnnnnnnnnnnnnnnnnnnnnnnnnnnnnnnnnnnnnnnnnnnnnnnnnnnnnnnnnnnnnnnnnnnnnnnnnnnnnnnnnnnnnnnnnnnnnnnnnnnnnnnnnnnnnnnnnnnnnnnnnnnnnnnnnnnnnnnnnnnnnnnnnnnnnnnnnnnnnnnnnnnnnnnnnnnnnnnnnnnnnnnnnnnnnnnnnnnnnnnnnnnnnnnnnnnnnnnnnnnnnnnnnnnnnnnnnnnnnnnnnnnnnnnnnnnnnnnnnnnnnnnnnnnnnnnnnnnnnnnnnnnnnnnnnnnnnnnnnnnnnnnnnnnnnnnnnnnnnnnnnnnnnnnnnnnnnnnnnnnnnnnnnnnnnnnnnnnnnnnnnnnnnnnnnnnnnnnnnnnnnnnnnnnnnnnnnnnnnnnnnnnnnnnnnnnnnnnnnnnnnnnnnnnnnnnnnnnnnnnnnnnnnnnnnnnnnnnnnnnnnnnnnnnnnnnnnnnnnnnnnnnnnnnnnnnnnnnnnnnnnnnnnnnnnnnnnnnnnnnnnnnnnnnnnnnnnnnnnnnnnnnnnnnnnnnnnnnnnnnnnnnnnnnnnnnnnnnnnnnnnnnnnnnnnnnnnnnnnnnnnnnnnnnnnnnnnnnnnnnnnnnnnnnnnnnnnnnnnnnnnnnnnnnnnnnnnnnnnnnnnnnnnnnnnnnnnnnnnnnnnnnnnnnnnnnnnnnnnnnnnnnnnnnnnnnnnnnnnnnnnnnnnnnnnnnnnnnnnnnnnnnnnnnnnnnnnnnnnnnnnnnnnnnnnnnnnnnnnnnnnnnnnnnnnnnnnnnnnnnnnnnnnnnnnnnnnnnnnnnnnnnnnnnnnnnnnnnnnatagagaagccttatttgccaagctctgactaacttctggatatgaaaataaggaacgtgcccagcataggcatataggcagcagccttactagtaaatcttgccacagaatcatttgaaactagacagagaaagaagttcaatttaaatatttgtcccattgtttgtgattaagatgtaagctccatggagtgtaattaaccctgctttatgaagtcaccatatttataatgggaaaaacattgcctaggaggcaagagatctgaattccagttctgatgctgccactgtgtaaggaagtagttttataacccatgggcaaatcatctgagctttctcatctgtaaagttagggagaggaattaattagttgatctgtaaactatcagcttcaaaacgttatggctcaatctgtagaatatatgcccaattgctaaacagatgttgtgcccagaattttatctagtgactacctcaacatacaggc

SEQ ID NO: 32365 - DNA, 1283 bp, Macaca Mulatta
  misc_feature (1)...(1283): n = A,T,C or G
cagtttcagggcctgagtccccattccctgctctatgggggtgcgggggtgtcatgtcttgcactttccccagcagtctgccacccgtctaccccgtgagaacaagtccttctcattctgtgtcccttgactccacaaccgacggaggctgccttgtccacaagtcagggattcccgtttctggtgcagccnagcccctgtcctcgccactctgggcttgtgctgttcttggtcccttatcttgttgtcacagggctaaccctccccacacacctggctgtcccctgccccacagctcctaggccagggcctgtccctgtccctaacacccagcccctcggttcctcttaccctcttcttggaccctaagccctttctgggtaaccagaaagctcagagacggtctccaggtgacccccagtctgttcctctccccgaatccagagcattgcagtcacagtagaggcaattgctgtcattccgcggcccatgacagcctggcggcccgcatccctcccccgtgatgctctgcacagacaggcccacgtgtgtccccagatgcctgaatcactgctgacggctggggacctggccaccgtgggctcctggggagccactggggagggggcggcggccgcatcttgcctccaagggaacacctgcggacataaataggcagccagcagaggcaagcagcacagagccaccaagcagcgctgcatacggggtccacctgtgtgcaccaggatgcccgacaccatgctgcctgcctgcttcctcggcctactgggcttctcctccgcatgctacttccagaactgcccgaggggcggcaagagggccatgtccgacctggagctgagacagncagtgcctcccctgcggccccgggggcaaaggccgctgcttcgggcccagcatctgctgcgcggacgagctgggctgctttgtgggcacagccgaggcgctgcgctgccaggaggagaactacctgccttcgccctgccagtccggccagaaggcgtgcgggagcgggggccgctgcgccgccttcggcatctgctgcaacgacgnnnnnnnnnnnnnnnnnnnnnnnnnnnnnnnnnnnnnnnnnnnnnnnnnnngagagctgcatgacggagcccgactgccgcgagggctttcaccgccgcgcccgcgccagcgaccggagcaacgccacgcagctggacgggccggccggggccttgctgctgcggctggtgcagctggccggggcgcccgagccctcgagcccgcccagc

SEQ ID NO: 32366 - DNA, 167 bp, Macaca Mulatta
aggcctggcctcgctttcccaaagaagatgaattgtcagaagaacaaatgcatcattaccttaaggaatttggaggcacccctaaggattttgttgaagaaaaggaacttgtgcaacaatataaacccatgataatggcagatctgaacgttgttagtagttgcaca

SEQ ID NO: 32367 - DNA, 187 bp, Macaca Mulatta
tattatctataagcatgaaaacttagcatcatccaaccacagatacatcaaagaattgaaggaaacaatatacaaactaaactgtcatctctttattcaataagatgtgtctttacaagtttaaaaagactggacaccattatcctttatgaataatgcagataaccattttaaaaaacattttact

SEQ ID NO: 32368 - DNA, 311 bp, Macaca Mulatta
actgagtgagccagcagccacctccttcctgaacacatttggcctgctccccccatcagccggctctgcacggccaactctgtgtccactgcccacagcccaagccagcccacagcggatgctgcaaaaatcaataaagtctcccctcctgccgttctgaatgctctaagtgcttgcgcacctcacccagcaaaacaaaagctgtgtggctccccagcctcctctccttggaaggcaatctgtggcatatgtgtgtccaaacaggtcctattggcatctcactccacatcccagccactctatcaagggat

SEQ ID NO: 32369 - DNA, 333 bp, Macaca Mulatta
  misc_feature (1)...(333): n = A,T,C or G
gattttatttggagagaagcaagcatctttgcctctttggagtaggaaattctgacttgaaaaanntgtgtggttgaccccgtttctcgccatgtcttctcccaagacttccaggattaagcaattcctggccgagaaacaaaagcaaaatcactccattccccagtggattcagatgaaaactggtgataaaatcaggtaccactgcaaagggagacactggagaagaaccaagctgggcctataaggaaatgcacaggagacagcacacctatttgtgctgggtcaaggtcatgatcgtctgaccatatcaagatgaaaatgtcgccacta

SEQ ID NO: 32370 - DNA, 125 bp, Macaca Mulatta
tttgtgaagtcactgtggatatttgtaaaacagaaatcttctgtgacgctcagaacttgaggtatataaggggcctgctccctccagaatctgcctgcatgggaggggtctaggaacagtcacgt

SEQ ID NO: 32371 - DNA, 731 bp, Macaca Mulatta
gtataccatcgtagacttcatactggagagaaaccttacaaatgtgaagaatgtgacaaagctttcagtttcaaatcaaaccttgaaagacataggaaaattcatactggagagaagccgtacaagtgtaatgaatgcagcaggacctttagtcggaagtcatcccttacacgccatcgtaggcttcatactggagagaaaccttataagtgtaatgagtgtggcaagaccttcagtcagatgtcatcccttgtataccaccgtagacttcatactggagagaaaccttacaaatgtgaagaatgtgatgaagctttcagtttcaaatcaaaccttgaaagacataagagaattcatactggagagaaaccttacaagtgtaatgattgtggcaagaccttcagtcagacgtcatcccttgtataccatcgtagacttcatactggacagaaaccttacaaatgtgaagaatgtgatgaagctttcagtttcaaatcaaaccttgaaagacataggataattcatactggagagaaactttacaagtgtaatgaatgtggcaagacctttagtcggaagtcatcccttacacgccatcgtagacttcatactggagaaaaaccttacaagtgtaatgagtgtggcaagacctacggtcgaacttcagcccttgtaattcataaggcaattcatagtggagagaaaccttacaagtgtaatgagtgtggcaa

SEQ ID NO: 32372 - DNA, 1545 bp, Macaca Mulatta
  misc_feature (1)...(1545): n = A,T,C or G
gagctggccaggtcactcaactacttgctgtatgtgtccaacttctcactgggtgacagtgggcagcccgtgcagcgggatgtcagtcgccttggggaccacctattcttcgcctctggggagcaggtnccaggttttccaggtgcctatccaaggccctggctgccgccacttcctcacctgtgggcgttgcctaagggcacagcgtttcatgggctgtggctggtgtgggaacatgtgtggccggcagaaggagtgtcctggctcctggcaacaggaccactgtccgcctaagcttactgagnnnnnnnnnnnnnnnnnnnnnnnnnnnnnnnnnnnnnnnnnnnnnnnnnnnnnnnnnnnnnnnnnnnnnnnnnnnnnnnnnnnnnnnnnnnnnnnnnnnnnnnnnnnnnnnnnnnnnnnnnnnnnnnnnnnnnnnnnnnnnnnnnnnnnnnnnnnnnnnnnnnnnnnnnnnnnnnnnnnnnnnnnnnnnnnnnnnnnnnnnnnnnnnnnnnnnnnnnnnnnnnnnnnnnnnnnnnnnnnnnnnnnnnnnnnnnnnnnnnnnnnnnnnnnnnnnnnnnnnnnnnnnnnnnnnnnnnnnnnnnnnnnnnnnnnnnnnnnnnnnnnnnnggagccagtgctgatagcagtgcaacccctctttggcccacgggcaggaggcacctgtctcactcttgaaggccagagtcaatctgtaggcaccagccgggctgtgctggtcaatgggactgagtgtctgctagcacgnnnnnnnnnnnnnnnnnnnnnnnnnnnnnnnnnnnnnnnnnnnnnnnnnnnnnnnnnnnnnnnnnnnnnnnnnnnnnnnnnnnnnnnnnnnnnnnnnnnnnnnnnnnnnnnnnnnnnnnnnnnnnnnnnnnnnnnnnnnnnnnnnnnnnnnnnnnnnnnnnnnnnnnnnnnnnnnnnnnnnnnnnnnnnnnnnnnnnnnnnnnnnnnnnnnnnnnnnnnnnnnnnnnnnnnnnnnnnnnnnnnnnnnnnnnnnnngtgtgagaggcagcttccagagcagcagttgtgccgcctgcctgaatatgtggtccaagacccccagggatgggtggcaggaaatctgagtgcctggggggatggagctgctggctttacactgcctggctttcgcttcctaaccccaccccatccacccagtgccaacctaattccactgaagcctgaggagcatgccattaagtttgannnnnnnnnnnnnnnnnnnnnnnnnnnnnnnnnnnnnnnnnnnnnnnnnnnnnnnnnnnnnnnnnnnnnnnnnnnnnnnnnnnnnnnnnnnnnnnnnnnnnnnnnnnnnnnnnnnnnnnnnnnnnnnnnnnnnnnnnnnnnnnncaggtctgcgtggatggtgaatgtcgcatcctgggtagagtggtgtggccagggccagatggggtcccacagagcacgctccttggtatcctgctgcctttgctgctgcttgtggccgcattggccactgcactggtcttcagctactggtggcagaggaagcagcta

SEQ ID NO: 32373 - DNA, 1146 bp, Macaca Mulatta
  misc_feature (1)...(1146): n = A,T,C or G
ttatctccagaggccagagcttccacctacccaggcagcctggtgatctgccctcactgccccctccccacacccaccctactgggccatgaaggggatgggggcaaacccagctgactgttccaccctctgcccaggaggaccatgcggcagtagcagccatgctgccctttctgctggccacactgggcaccacggccctcaacaacagcaaccccaaggactactgctacagcgcccgcatccgcagcactgtcctgcagggcctgccctttgggggcgtccccaccgttctggctctcgacttcatgtgcttccttnnnnnnnnnnnnnnnnnnnnnnnnnnnnnnnnnnnnnnnnnnnnnnnnnnnnnnnnnnnnnnnnnnnnnnnnnnnnnnnnnnnnnnnnnnnnnnnnnnnnnnnnnnnnnnnnnnnnnnnnnnnnnnnnnnnnnnnnnnnnnnnnnnnnnnnnnnnnnnnnnnnnnnnnnnnnnnnnnnnnnnnnnnnnnnnnnnnnnnnnnnnnnnnnnnnnnnnnnnnnnnnnnnnnnnnnnnnnnnnnnnnnnnnggatgatgagatccgggacaaatgtgggggcgacgccgtgcactacctgtcctttcagcggcacatcatcgggctgctggtggttgtgggcgtcctctccgtaggcatcgtgctgcctgtcaacttctcaggggacctgctnnnnnnnnnnnnnnnnnnnnnnnnnnnnnnnnnnnnnnnnnnnnnnnnnnnnnnnnnnnnnnnnnnnnnnnnnnnnnnnnnnnnnnnnnnnnnnnnnnnnnnnnnnnnnnnnnnnnnnnnnnnnnnnnnnnnnnnnnnnnnnnnnnnnnnnnnnnnnnnnngtgaagcggaccctcttcatcaatggaatctccaaatatgcagagtcagaaaagatcaagaagcattttgagnnnnnnnnnnnnnnnnnnnnnnnnnnnnnnnnnnnnnnnnnnnnnnnnnnnnnnnnnnnnnnnnnnnnnnnnnnnnnnaggaagaaggccgagcggggaaagctgtacttcacaaacctccagagcaaagagaacgtgcccaccatgatcaaccccaagccctgcggccacctctgctgctgtgtggtgcgaggctgtgagcagg

SEQ ID NO: 32374 - DNA, 301 bp, Macaca Mulatta
ctcctgtcccactgcctgctggtcaccctggccgcgcgcttccccgccgacttcacggccgaggcccacgccgcctgggacaagttcctatcggtcgtatcctctgtcctgaccgagaagtaccgctgagcgccgcctccgggacccccgggacaggctgcggcccctcccctccaggttccccagccccacttaccgcgtaatgcgccaataaaccaacgaacgaagcagcgtccacctggtctctgtggtccctgggcggcgggcgcgtggggaggcggagcgggaggaggacgccccg

SEQ ID NO: 32375 - DNA, 148 bp, Macaca Mulatta
gctgtggccccagcacccgcccctggtttgagacagcccactgccccgtgctacctgagaaggctcagcacaggcaccaaccactgcccagcattgccccgtgctgcctgaggattggcacgggcaccaaccactgcccccaactgcc

SEQ ID NO: 32376 - DNA, 7207 bp, Macaca Mulatta
  misc_feature (1)...(7207): n = A,T,C or G
ttacttgtgccaaagtgaaaactgccgccaggaagactcagaccccagtaaccttggatatgagcttatttctgcctttgtcacnnnnnnnnnnnnnnnnnnnnnnnnnnnnnnnnnnnnnnnnnnnnnnnnnnnnnnnnnnnnnnnnnnnnnnnnnnnnnnnnnnnnnnnnnnnnnnnnnnnnnnnnnnnnnnnnnnnnnnnnnnnnnnnnnnnnnnnnnnnnnnnnnnnnnnnnnnnnnnnnnnnnnnnnnnnnnnnnnnnnnnnnnnnnnnnnnnnnnnnnnnnnnnnnnnnnnnnnnnnnnnnnnnnnnnnnnnnnnnnnnnnnnnnnnnnnnnnnnnnnnnnnnnnnnnnnnnnnnnnnnnnnnnnnnnnnnnnnnnnnnnnnnnnnnnnnnnnnnnnnnnnnnnnnnnnnnnnnnnnnnnnnnnnnnnnnnnnnnnnnnnnnnnnnnnnnnnnnnnnnnnnnnnnnnnnnnnnnnnnnnnnnnnnnnnnnnnnnnnnnnnnnnnnnnnnnnnnnnnnnnnnnnnnnnnnnnnnnnnnnnnnnnnnnnnnnnnnnnnnnnnnnnnnnnnnnnnnnnnnnnnnnnnnnnnnnnnnnnnnnnnnnnnnnnnnnnnnnnnnnnnnnnnnnnnnnnnnnnnnnnnnnnnnnnnnnnnnnnnnnnnnnnnnnnnnnnnnnnnnnnnnnnnnnnnnnnnnnnnnnnnnnnnnnnnnnnnnnnnnnnnnnnnnnnnnnnnnnnnnnnnnnnnnnnnnnnnnnnnnnnnnnnnnnnnnnnnnnnnnnnnnnnnnnnnnnnnnnnnnnnnnnnnnnnnnnnnnnnnnnnnnnnnnnnnnnnnnnnnnnnnnnnnnnnnnnnnnnnnnnnnnnnnnnnnnnnnnnnnnnnnnnnnnnnnnnnnnnnnnnnnnnnnnnnnnnnnnnnnnnnnnnnnnnnnnnnnnnnnnnnnnnnnnnnnnnnnnnnnnnnnnnnnnnnnnnnnnnnnnnnnnnnnnnnnnnnnnnnnnnnnnnnnnnnnnnnnnnnnnnnnnnnnnnnnnnnnnnnnnnnnnnnnnnnnnnnnnnnnnnnnnnnnnnnnnnnnnnnnnnnnnnnnnnnnnnnnnnnnnnnnnnnnnnnnnnnnnnnnnnnnnnnnnnnnnnnnnnnnnnnnnnnnnnnnnnnnnnnnnnnnnnnnnnnnnnnnnnnnnnnnnnnnnnnnnnnnnnnnnnnnnnnnnnnnnnnnnnnnnnnnnnnnnnnnnnnnnnnnnnnnnnnnnnnnnnnnnnnnnnnnnnnnnnnnnnnnnnnnnnnnnnnnnnnnnnnnnnnnnnnnnnnnnnnnnnnnnnnnnnnnnnnnnnnnnnnnnnnnnnnnnnnnnnnnnnnnnnnnnnnnnnnnnnnnnnnnnnnnnnnnnnnnnnnnnnnnnnnnnnnnnnnnnnnnnnnnnnnnnnnnnnnnnnnnnnnnnnnnnnnnnnnnnnnnnnnnnnnnnnnnnnnnnnnnnnnnnnnnnnnnnnnnnnnnnnnnnnnnnnnnnnnnnnnnnnnnnnnnnnnnnnnnnnnnnnnnnnnnnnnnnnnnnnnnnnnnnnnnnnnnnnnnnnnnnnnnnnnnnnnnnnnnnnnnnnnnnnnnnnnnnnnnnnnnnnnnnnnnnnnnnnnnnnnnnnnnnnnnnnnnnnnnnnnnnnnnnnnnnnnnnnnnnnnnnnnnnnnnnnnnnnnnnnnnnnnnnnnnnnnnnnnnnnnnnnnnnnnnnnnnnnnnnnnnnnnnnnnnnnnnnnnnnnnnnnnnnnnnnnnnnnnnnnnnnnnnnnnnnnnnnnnnnnnnnnnnnnnnnnnnnnnnnnnnnnnnnnnnnnnnnnnnnnnnnnnnnnnnnnnnnnnnnnnnnnnnnnnnnnnnnnnnnnnnnnnnnnnnnnnnnnnnnnnnnnnnnnnnnnnnnnnnnnnnnnnnnnnnnnnnnnnnnnnnnnnnnnnnnnnnnnnnnnnnnnnnnnnnnnnnnnnnnnnnnnnnnnnnnnnnnnnnnnnnnnnnnnnnnnnnnnnnnnnnnnnnnnnnnnnnnnnnnnnnnnnnnnnnnnnnnnnnnnnnnnnnnnnnnnnnnnnnnnnnnnnnnnnnnnnnnnnnnnnnnnnnnnnnnnnnnnnnnnnnnnnnnnnnnnnaaggacaccagctttccagaatcaggacctagcttaagtgccgaggagagccctggagatggggataacctggtggacccctccctgtctgcaggcagagccaagcctgtcctcatgattgactggcgcaaggccctgctgagccgagcagtattccaaggctattcatcctcaggtannnnnnnnnnnnnnnnnnnnnnnnnnnnnnnnnnnnnnnnnnnnnnnnnnnnnnnnnnnnnnnnnnnnnnnnncttcaaagcacggcttactgggtaaaactcagctatacttgacagtcaacccggctccgcgggacatggtctgtcaggtgcaaccccaccacggtctggaggcacacaccgtcttcagtgtcttctgcatgtctggaaaaccggnnnnnnnnnnnnnnnnnnnnnnnnnnnnnnnnnnnnnnnnnnnnnnnnnnnnnnnnnnnnnnnnnnnnnnnnnnnnnnnnnnnnnnnnnnnnnnnnnnnnnnnnnnnnnnnnnnnnnnnnnnnnnnnnnnnnnnnnnnnnnnnnnnnnnnnnnnnnnnnnnnnnnnnnnnnnnnnnnnnnnnnnnnnnnnnnnnnnnnnnnnnnnnnnnnnnnnnnnnnnnnnnnnnnnnnnnnnnnnnnnnnnnnnnnnnnnnnnnnnnnnnnnnnnnnnnnnnnnnnnnnnnnnnnnnnnnnnnnnnnnnnnnnnnnnnnnnnnnnnnnnnnnnnnnnnnnnnnnnnnnnnnnnnnnnnnnnnnnnnnnnnnnnnnnnnnnnnnnnnnnnnnnnnnnnnnnnnnnnnnnnnnnnnnnnnnnnnnnnnnnnnnnnnnnnnnnnnnnnnnnnnnnnnnnnnnnnnnnnnnnnnnnnnnnnnnnnnnnnnnnnnnnnnnnnnnnnnnnnnnnnnnnnnnnnnnnnnnnnnnnnnnnnnnnnnnnnnnnnnnnnnnnnnnnnnnnnnnnnnnnnnnnnnnnnnnnnnnnnnnnnnnnnnnnnnnnnnnnnnnnnnnnnnnnnnnnnnnnnnnnnnnnnnnnnnnnnnnnnnnnnnnnnnnnnnnnnnnnnnnnnnnnnnnnnnnnnnnnnnnnnnnnnnnnnnnnnnnngggttgtctccctttgaaccacgttagcactgggcagatggagttccggacgctttttcattacaaccttcagagctctgtccagagcctgggatctgtccaggtgcatttacctggtgaccttgctgggcacaatcctgctggggcggagacacagagcccatgctacattagccagctcataatcttcaagaagaacccatatccagggggccaagctcctgagcannnnnnnnnnnnnnnnnnnnnnnnnnnnnnnnnnnnnnnnnnnnnnnnnnnnnnnnnnnnnnnnnnnaaggaaacccgtgatggtcgactttggggaggaagatggcctggnggataataggagaaataaaacagcatttgtattgcttcgggataaagtgaatctccatcagttcactgagctttctgaaaacccacaggaatctctacggatagaaattgaattttccaaacctggtacaagggcatttccggtcatgttgctagtaagntctctgagaaacctactccctctgattttcttgtgaagcagatctacttctgggatgagtcaattgtgcagatttatatacctgctgcttctcagaaagnnnnnnnnnnnnnnnnnnnnnnnnnnnnnnnnnnnnnnnnnnnnnnnnnnnnnnnnnnnnnnnnnnnnnnnnnnnnnnnnnnnnnnnnnnnnnnnnnnnnnnnnnnnnnnnnnnnnnnnnnnnnnnnnnnnnnnnnnnnnnnnnnnnnnnnnnnnnnnnnnnnnnnnnnnnnnnnnnnnnnnnnnnnnnnnnnnnnnnnnnnnnnnnnnnnnnnnnnnnnnnnnnnnnnnnnnnnnnnnnnnnnnnnnnnnnnnnnnnnnnnnnnnnnnnnnnnnnnnnnnnnnnnnnnnnnnnnnnnnnnnnnnnnnnnnnnnnnnnnnnnnnnnnnnnnnnnnnnnnnnnnnnnnnnnnnnnnnnnnnnnnnnnnnnnnnnnnnnnnnnnnnnnnnnnnnnnnnnnnnnnnnnnnnnnnnnnnnnnnnnnnnnnnnnnnnnnnnnnnnnnnnnnnnnnnnnnnnnnnnnnnnnnnnnnnnnnnnnnnnnnnnnnnnnnnnnnnnnnnnnnnnnnnnnnnnnnnnnnnnnnnnnnnnnnnnnnnnnnnnnnnnnnnnnnnnnnnnnnnnnnnnnnnnnnnnnnnnnnnnnnnnnnnnnnnnnnnnnnnnnnnnnnnnnnnnnnnnnnnnnnnnnnnnnnnnnnnnnnnnnnnnnnnnnnnnnnnnnnnnnnnnnnnnnnnnnnnnnnnnnnnnnnnnnnnnnnnnnnnnnnnnnnnnnnnnnnnnnnnnnnnnnnnnnnnnnnnnnnnnnnnnnnnnnnnnnnnnnnnnnnnnnnnnnnnnnnnnnnnnnnnnnnnnnnnnnnnnnnnnnnnnnnnnnnnnnnnnnnnnnnnnnnnnnnnnnnnnnnnnnnnnnnnnnnnnnnnnnnnnnnnnnnnnnnnnnnnnnnnnnnnnnnnnnnnnnnnnnnnnnnnnnnnnnnnnnnnnnnnnnnnnnnnnnnnnnnnnnnnnnnnnnnnnnnnnnnnnnnnnnnnnnnnnnnnnnnnnnnnnnnnnnnnnnnnnnnnnnnnnnnnnnnnnnnnnnnnnnnnnnnnnnnnnnnnnnnnnnnnnnnnnnnnnnnnnnnnnnnnnnnnnnnnnnnnnnnnnnnnnnnnnnnnnnnnnnnnnnnnnnnnnnnnnnnnnnnnnnnnnnnnnnnnnnnnnnnnnnnnnnnnnnnnnnnnnnnnnnnnnnnnnnnnnnnnnnnnnnnnnnnnnnnnnnnnnnnnnnnnnnnnnnnnnnnnngcatcctgcatcagccattgtctctgggagtggcagggcccaaaggaaggcggcaagtgatgatggcacagcctgtccagcccctaagctggaggcccacggggctgaccacagcgggactgctttgatggggaagagccactgctgccctcccnnnnnnnngcacccaacagtggtttggagggactaatgccctggtggtcgagggcccctcagccttggtggagctctgcagtgtgngccatttgtggggacacttctctggcctgcagtttggggacaggatttctagcnnnnnnnnnnnnnnnnnnnnnnnnnnnnnnnnnnnnnnnnnnnnnnnnnnnnnnnnnnnnnnnnnnnnnnnnnnnnnnnnnnnnnnnnnnggtatgcctcatggccttgggttttgcttggaaaagaagagctgacaaccacttttttactgagtctttacgtgaggctaccagggatctggactctgaattggcagaacgttcctggactcgcctccgcttctcttcaagctgcagtattcctgactgtgcaggcgaggttgaaaaagnnnnnnnnnnnnnnnnnnnnnnnnnnnnnnnnnnnnnnnnnnnnnnnnnnnnnnnnnnnnnnnnnnnnnnnnnnnnnnnnnnnnnnnnnnnnnnnnnnnnnnnnnnnnnnnnnnnnnnnnnnnnnnnnnnnnnnnnnnnnnnnnnnnnnnnnnnnnnnnnnnnnnnnnnnnnnnnnnnnnnnnnnnnnnnnnnnnnnnnnnnnnnnnnnnnnnnnnnnnnnnnnnnnnnnnnnnnnnnnnnnnnnnnnnnnnnnnnnnnnnnnnnnnnnnnnnnnnnnnnnnnnnnnnnnnnnnnnnnnnnnnnnnnnnnnnnnnnnnnnnnnnnnnnnnnnnnnnnnnnnnnnnnnnnnnnnnnnnnnnnnnnnnnnnnnnnnnnnnnnnnnnnnnnnnnnnnnnnnnnnnnnnnnnnnnnnnnnnnnnnnnnnnnnnnnnnnnnnnnnnnnnnnnnnnnnnnnnnnnnnnnnnnnnnnnnnnnnnnnnnnnnnnnnnnnnnnnnnnnnnnnnnnnnnnnnnnnnnnnnnnnnnnnnnnnnnnnnnnnnnnnnnnnnnnnnnnnnnnnnnnnnnnnnnnnnnnnnnnnnnnnnnnnnnnnnnnnnnnnnnnnnnnnnnnnnnnnnnnnnnnnnnnnnnnnnnnnnnnnnnnnnnnnnnnnnnnnnnnnnnnnnnnnnnnnnnnnnnnnnnnnnnnnnnnnnnnnnnnnnnnnnnnnnnnnnnnnnnnnnnnnnnnnnnnnnnnnnnnnnnnnnnnnnnnnnnnnnnnnnnnnnnnnnnnnnnnnnnnnnnnnnnnnnnnnnnnnnnnnnnnnnnnnnnnnnnnnnnnnnnnnnnnnnnnnnnnnnnnnncagctggtcttcctggcgctcagcctggtccacctctgtgttcaactctaccatatgatgaataagggctttctcagctactggcgaanaccaagggaactggctggagngctctctgtggttggagtgagcctcacctactatgcagtttccggccaccttgctactcttgctggagacgtcactgaccagtttcacagaggactttgccaagcctttatggacctcacccttatgacatcatggaatcagnnnnnnnnnnnnnnnnnnnnnnnnnnnnnnnnnnnnnnnnnnnnnnnnnnnnnctatcttcatggcattcgaaacgcaatggcatccgggtcctgcatgacgcgacactcgctccccagcatctttgtagcannnnnnnnnnnnnnnnnnnnnnnnnnnnnnnnnnnnnnnnnnnnnnnnnnnnnnnnnnnnnnnnnnnnnnnnnnnnnnnnnnnnnnnnnnnnnnnnnnnnnnnnnnnnnnnnnnnnnnnnnnnnnnnnnnnnnnnnnnnnnnnnnnnnnnnnnnnnnnnnnnnnnnnnnnnnnnnnnnnnnnnnnnnnnnnnnnnnnnnnnnnnnnnnnnnnnnnnnnnnnnnnnnnnnnnnnnnngaggttttctcatgactttaccccgaaaaagaaaatattttcaaagtaaatctcttgtgagacttaaagatgtcactgcttatatgtgggaaaagaccctcacctttctgagactggaaacaccaaagctggaagaggctgagatggttgagtatca

SEQ ID NO: 32377 - DNA, 274 bp, Macaca Mulatta
agatccataatgagatggcatcaacatcagataaaggtgcccaaggaagaaatgacaagaaagattcccacggaagaagtaataaggcatcacatctgaagagtgatgctgaatttaaaaagatatttggccttactaaagatttgagagtgtgccttactcgaattcctgaccgtttgacctctggagaaggttttgattcctttagcagtttggtaaacagtggcacttacaaagagacagagtttatggtgaaggaaggagagagaaaaca

SEQ ID NO: 32378 - DNA, 908 bp, Macaca Mulatta
  misc_feature (1)...(908): n = A,T,C or G
gacatatggcatccaggagaaagatgtcttgccccttctccagataatggaaaacttcgtgaagcaagcataaaatctgtcacagtggatgaaaatggcaagtcatttgcagttgtcttatattcagattttcaagaaaggaaaatacctcttaaacagcttcaagaagtaaaatttgttaaagattgccctaggaatcttatatttgatgatgaagatttggaaaaaccttatttcccaaaccgaaaatttccatcatcttctgttgcttttaaattatctgacgatggagactctattccttataccgtcaataggtatttgagagactaccaaagagaaggagcccagtttctttatggacattacatccatggaagagggtgcattcttggtgatgacatgggacttggaaaaacagtacaggtnnnnnnnnnnnnnnnnnnnnnnnnnnnnnnnnnnnnnnnnnnnnnnnnnnnnnnnnnnnnnnnnnnnnnnnnnnnnnnnnnnnnnnnnnnnnnnnnnnnnnnnnnnnnnnnnnnnnnnnnnnnnnnnnnnnnnntgctcctctttctgtcctctacaactggaaggatgaattggacacctggggatatttcagagtcactattttacatggaaacagaaaagataatgaactaattcgtgtaaagcagaggaaatgtgaaattgctctaacaacttatgaaacactgcgcttatgcctggatgaacttaacagnagtttggaatggtcagctgtcattgtggatgaagctcatagaatcaagaatccaaaagctagaataacagaagttatgaaagctttgaaatgtaatgtccgcattggtctcactggaaccattcttcagaacaacatgaaggaactgtggtgtgttatggactgg

SEQ ID NO: 32379 - DNA, 457 bp, Macaca Mulatta
agaaaactcagacagggagggtgcagggccaggatggttccttaaggcaagcagggttgcagggaggctgggccagccggtctgaggggataggcagggtcctgcagggcctggggcttccattcctcaacccccttccccactggctggggggacgcggcctggcctgcagctgctctcagaggccagggagatcctgaataagtcactgccagccacacagacttgaggaccctgagagagcagcactgggggtgcaagggccccccaaaaccagatcggcatcaccggccactgcctcccagcctcactgagcccacccgccctctctgggtccgtcccatccctgcgccggaggcagcatttcatgggcgtgtctgtcagaggtgggactttccgcctctaccccatgagttcgtctctcaggggactctgtaggtttgctacttttgcatgg

SEQ ID NO: 32380 - DNA, 792 bp, Macaca Mulatta
  misc_feature (1)...(792): n = A,T,C or G
ggggcgcgggggggctaaccttgtgcggagcgagcctgggtgtcagcccagcgtacggcctttcacgagtcttcaagctttcaggctttcttctagtcaagatgagtgataaaccagacttgtcggaagtggagaagtttgacaggtcaaaactgaagaaaactaatactgaagaaaaaaatactcttccctcaaaggaaactatccagcaggagaaagagtgtgttcaaacatcataaaatggggatctcctccaaagagcagatttcaacattgcctgacagtcttggttttaggcttgtttttttttttgtaaccctatgtgtttgtaaagatttcagacatcttctgatttcttctcacctatattccctggctaagagatcaggggtagtgaatgtttccttaagttcctttctaaacttcggattggtatgtaaattccaaatggcagatgctgtcaataatcttgccattgatgacctttgtgtacgtagtccttgcacctcatacaggataagccaattttaactttctacaatggttgcctcaattgtttcataatcttcatgaagttgcatcatttggcagcttatagtttattttcacttcccaatgtagcgttaaaataataaatatttatcgttattgcgaaaaaacacccaataaaaagaaaaaagcccttgttcggccgccttcnnnnnnnnnnnnnnnnnnnnnnaaccattctttttggggccccgggccccgtaaggtaaagtgaacagtggtcctaaccgggttttccaagga

SEQ ID NO: 32381 - DNA, 482 bp, Macaca Mulatta
acgtcttttaggacttggtggggaaacttaaagatgcttcgaaaagcctggaaagagcaactcagttgtaacttggggaagttccgctcccgcccgagtgcagaggaaaaccagaaacgccttgccttgagctgaaccaccgtttgtgcgagctggttgttcttttcagtagaaaagaattttccttttgaatttataccattcatcaattttgacactttaaaaaacacgtgtgaaaaggttaagagggaaagatactgcccaagtattgaatcgtttagtactaactgtccatttattctattttgatctttttcaagtcttctgaaaggaagtagacagtattacaccctgaataaataaggtgttgttttccacaaagagtgatgatattttgtttggatctgaattcaagagttaattattactttgtgtgaagctagataggagtagtagagcttttaacgatagccttttctcag

SEQ ID NO: 32382 - DNA, 1697 bp, Macaca Mulatta
  misc_feature (1)...(1697): n = A,T,C or G
agcgctcggccgggtgcgctaggcgctgtgcnnnnnnnnnnnnnnnnnnnnnnnnnnnnnnnnnnnnnnnnnnnnnnnnnnnnnnnnnnnnnnnnnnnnnnnnnnnnnnnnnnnnnnnnnnnnnnnnnnnnnnnnnnnnnnnnnnnnnnnnnnnnnnnnnnnnnnnnnnnnnnnnnnnnnnnnnnnnnnnnnnnnnnnnnnnnnnnnnnnnnnnnnnnnnnnnnnnnnnnnnnnnnnnnnnnnnnnnnnnnnnnnnnnnnnnnnnnnnnnnnnnnnnnnnnnnnnnnnnnnnnnnnnnnnnnnnnnnnnnnnnnnnnnnnnnnnnnnnnnnnnnnnnnnnnnnnnnnnnnnnnnnnnnnnnnnnnnnnnnnnnnnnnnnnnnnnnnnnnnnnnnnnnnnnnnnnnnnnnnnnnnnnnnnnnnnnnnnnnnnnnnnnnnnnnnnnnnnnnnnnnnnnnnnnnnnnnnnnnnnnnnnnnnnnnnnnnnnnnnnnnnnnnnnnnnnnnnnnnnnnnnnnnnnnnnnnnnnnnnnnnnnnnnnnnnnnnnnnnnnnnnnnnnnnnnnnnnnnnnnnnnnnnnnnnnnnnnnnnnnnnnnnnnnnnnnnnnnnnnncagggcaaggtgaaggagcggagagaacgtattgttgctgcatttgagaagatgaacctctacctgctggaggaagagcagaggctcctccaggctctggagagggaagaggaggagactgccagcagactccgggagagcgtggattgtctggaccggcagggttactccctggagctgctgctgctgccgctggaggagcggagcacacatgggcccctccagatgctgcannnnnnnnnnnnnnnnnnnnnnnnnnnnnnnnnnnnnnnnnnnnnnnnnnnnnnnnnnnnnnnnnnnnnnnnnnnnnnnnnnnnnnnnnnnnnnnnnnnnnnnnnnnnnnnnnnnnnnnnnnnnnnagaggatgtggtgcctgatgccacctccgcatacccctaccttctcctgtacgagagccgccagaggcgctacctcagctcttcgctggagggcagcaggttctgcagcaaggaccgattcatggcttacccctgtgctgtaggccagacgaccttctcctctgggaggcactactgggaggtgggcatgaacatcaccggggatgcgctgtgggccctgggtgtgtgcagagacaacgtgagcaggaaagacagggtccccaagtgccccgaaaatggcttctgggtggtgcagctgtccaagggaaccaagtacttatccaccttgtctgccccaatcccggttatgctgatggagcctcccagccatgtgggcgtcttcctggacttcgaggccggggaggtgtcattctacagcgtgagcgatggatcccacctgcacacctactcccaggctaccttcccgggccccctgcagcctttcttctgcctaggggctccgaagtctggtcagatggtcatctccacagtgaccatgtgggtgaagggatagagatgcaggccggggaactcgggcattgcccctggctctgcagaaggtgtgggccttctgcttactacaggccacctaccagggttctctggcatcaggctggcagccattagacatgcaggggagtttctcaaagtctaaatataattgtgattaaaactgtcaaacattaag

SEQ ID NO: 32383 - DNA, 211 bp, Macaca Mulatta
gagctatgctttattgttcttttctttttatggtctcttcttttctacatcatatgaaaagaacaatgtcaaaaccccagcgtttcccagtctaaacaatttataaaagccagagacctgacagacgttgacattttatttggtattttaacagtactatttaaaggtatgccatgtgcgtcttgaatacagttaccccaataaactttgt

SEQ ID NO: 32384 - DNA, 3147 bp, Macaca Mulatta
  misc_feature (1)...(3147): n = A,T,C or G
aggttgtccttcagcctgcgccagccatcacttaccgcaccactgggggcattctcgacttctatgtgttcttgggaaacactccagagcaagttgttcaagaatatctagagnagcttattgggcggccagcccttccctcctactgggcacttggatttcaccttagtcgttatgaatatggaaccttagacaacatgagagaagtcgtggagagaaatcgcgcagcacagctcccttatgnnnnnnnnnnnnnnnnnnnnnnnnnnnnnnnnnnnnnnnnnnnnnnnnnnnnnnnnnnnnnnnnnnnnnnnnnnnnnnnnnnnnnnnnnnnnnnnnnnnnnnnnnnnnnnnnnnnnnnnnnnnnnnnnnnnnnnnnnnnnnnnnnnnnnnnnnnnnnnnnnnnnnnnnnnnnnnnnnnnnnnnnnnnnnnnnnnnnnnnnnnnnnnnnnnnnnnnnnnnnnnnnnnnnnnnnnnnnnnnnnnnnnnnnnnnnnnnnnnnnnnnnnnnnnnnnnnnnnnnnnnnnnnnnnnnnnnnnnnnnnnnnnnnnnnnnnnnnnnnnnnnnnnnnnnnnnnnnnnnnnnnnnnnnnnnnnnnnnnnnnnnnnnnnnnnnnnnnnnnnnnnnnnnnnnnnnnnnnnnnnnnnnnnnnnnnnnnnnnnnnnnnnnnnnnnnnnnnnnnnnnnnnnnnnnnnnnnnnnnnnnnnnnnnnnnnnnnnnnnnnnnnnnnnnnnnnnnnnnnnnnnnnnnnnnnnnnnnnnnnnnnnnnnnnnnnnnnnnnnnnnnnnnnnnnnnnnnnnnnnnnnnnnnnnnnnnnnnnnnnnnnnnnnnnnnnnnnnnnnnnnnnnnnnnnnnnnnnnnnnnnnnnnnnnnnnnnnnnnnnnnnnnnnnnnnnnnnnnnnnnnnnnnnnnnnnnnnnnnnnnnnnnnnnnnnnnnnnnnnnnnnnnnnnnnnnnnnnnnnnnnnnnnnnnnnnnnnnnnnnnnnnnnnnnnnnnnnnnnnnnnnnnnnnnnnnnnnnnnnnnnnnnnnnnnnnnnnnnnnnnnnnnnnnnnnnnnnnnnnnnnnnnnnnnnnnnnnnnnnnnnnnnnnnnnnnnnnnnnnnnnnnnnnnnnnnnnnnnnnnnnnnnnnnnnnnnnnnnnnnnnnnnnnnnnnnnnnnnnnnnnnnnnnnnnnnnnnnnnnnnnnnnnnnnnnnnnnnnnnnnnnnnnnnnnnnnnnnnnnnnnnnnnnnnnnnnnnnnnnnnnnnnnnnnnnnnnnnnnnnnnnnnnnnnnnnnnnnnnnnnnnnnnnnnnnnnnnnnnnnnnnnnnnnnnnnnnnnnnnnnnnnnnnnnnnnnnnnnnnnnnnnnnnnnnnnnnnnnnnnnnnnnnnnnnnnnnnnnnnnnnnnnnnnnnnnnnnncaagtgagatggaggaagcaaaaagtcgagatggaacttcctggagacaaaattggacttcaccttcgaggaggctacatctttcccacacagcagccaaatataaccactctggccagnnnnnnnnnnnnnnnnnnnnnnnnnnnnnnnnnnnnnnnnnnnnnnnnnnnnnnnnnnnnnnnnnnnnnnnnnnnnnnnnnnnnnnnnnatactgtggccaataaagtgtatcttttatgtgagttttctgtcactcaannnnnnnnnnnnnnnnnnnnnnnnnnnnnnnnnnnnnnnnnnnnnnnnnnnnnnnnnnnnnnnnnnnnnnnnnnnnnnnnnnnnnnnnnnnnnnnnnnnnnnnnnnnnnnnnnnnnnnnnnnnnnnnnnnnnnnnnnnnnnnnnnnnnnnnnnnnnnnnnnnnnnnnnnnnnnnnnnnnnnnnnnnnnnnnnnnnnnnnnnnnnnnnnnnnnnnnnnnnnnnnnnnnnnnnnnnnnnnnnnnnnnnnnnnnnnnnnnnnnnnnnnnnnnnnnnnnnnnnnnnnnnnnnnnnnnnnnnnnnnnnnnnnnnnnnnnnnnnnnnnnnnnnnnnnnnnnnnnnnnnnnnnnnnnnnnnnnnnnnnnnnnnnnnnnnnnnnnnnnnnnnnnnnnnnnnnnnnnnnnnnnnnnnnnnnnnnacatctccttaaagtcttccgagtatgccaatgccttcccctccacacccgtgaacccccttcacctggatgtcacttaccataagaatgaaatgctgcagttcaannnnnnnnnnnnnnnnnnnnnnnnnnnnnnnnnnnnnnnnnnnnnnnnnnnnnnnnnnnnnnnnnnnnnnnnnnnnnnnnnnnnnnnnnnnnnnnnnnnnnnnnnnnnnnnnnnnnnnnnnnnnnnnnnnnnnnnnnnnnnnnnnnnnnnnnnnnnnnnnnnnnnnnnnnnnnnnnnnnnnnnnnnnnnnnnnnnnnnnnnnnnnnnnnnnnnnnnnnnnnnnnnnnnnnnnnnnnnnnnnnnnnnnnnnnnnnnnnnnnnnnnnnnnnnnnnnnnnnnnnnnnnnnnnnnnnnnnnnnnnnnnnnnnnnnnnnnnnnnnnnnnnnnnnnnnnnnnnnnnnnnnnnnnnnnnnnnnnnnnnnnnnnnnnnnnnnnnnnnnnnnnnnnnnnnnnnnnnnnnnnnnnnnnnnnnnnnnnnnnnnnnnnnnnnnnnnnnnnnnnnnnnnnnnnnnnnnnnnnnnnnnnnnnnnnnnnnnnnnnnnnnnnnnnnnnnnnnnnnnnnnnnnnnnnnnnnnnnnnnnnnnnnnnnnnnnnnnnnnnnnnnnnnnnnnnnnnnnnnnnnnnnnnnnnnnnnnnnnnnnnnnnnnnnnnnnnnnnnnnnnnnnnnnnnnnnnnnnnnnnnnnnnnnnnnnnnnnnnnnnnnnnnnnnnnnnnnnnnnnnnnnnnnnnnnnnnnnnnnnnnnnnnnnnnnnnnnnnnnnnnnnnnnnnnnnnnnnnnnnnnnnnnnnnnnnnnnnnnnnnnnnnnnnnnnnnnnnnnnnnnnnnnnnnnnnnnnnnnnnnnnnnnnnnggatccagctatttctggcaatgagacacagccctatcctgccttcactcggggcttggaggatgacgtcttcatcaaatacccaaatgatggagacattgtctggggaaaggnnnaggtctggcccgattttcctggtattgttgtgaatgaatctctagaatgggacagtcaagtgga

SEQ ID NO: 32385 - DNA, 796 bp, Macaca Mulatta
  misc_feature (1)...(796): n = A,T,C or G
gggagtcgctgatcccggtttatatctatagtcccgagtatgtcagtatgtgtgactccctggccaagatccccaaacgggccagtatggtacattctttgattgaagcatatgcactgcataagcaaatgaggatagttaagcccaaagtggcctccatggaggagatggccaccttccacactgatgcttatctgcagcatctccagaaggtcagccaagagggcgatgatgatcatccggactccatagaatatgggctaggttatgactgcccagccactgaagggatatttgactatgcagcagctgtaggaggggctacaatcacagctgcccaatgcctgattgacggaatgtgcaaagtagcaattaactggtctggaggctggcatcatgcaaagaagtaagaaaatgacctttctgttttctgactctttccttgagtcagtttctcagttatataaactcttatgcttattgtattgacatttacagagagacgtgtgtatatgtggcactttacaaggcattctgaagaaatccaagtgaaatagaaaaaagattaccaaacatagtggaaagcacactgctcaaagtcaggacacctgtgctctacacctagtttttctgctaacttgcctaactgacttggactgatgacccctcctaggcctcagtttcttcatcaataaaatgaannnnnnnnnnnnnnnnnnnnnnnnnnnnnnnnntannnttnnnnnnnnnnnnnnnnnnnnaaatataaataaaaaattatatataaaaaatttta

SEQ ID NO: 32386 - DNA, 768 bp, Macaca Mulatta
  misc_feature (1)...(768): n = A,T,C or G
actggagactgagaggaagataaagaaccttgaagagcaaacagaaagaaatggtgatgtggcaaacctgagagaatgaatccaaagtttagtgccctagttgggcaaccccttctcttctcccccnnnnnnnnnnnnnnnnnnnnnnnnnnnnnnnnnnnnnnnnnnnnnnnnnnnnnnnnnnnnnnnnnnntttatatttaatttttacatgaccagaaaacaaatcttcaaggtgtaaaatatctacctgccctctctcagttgtttagattgacaaggtagacgtggatttgatgaaggtgcaaagtgctctcgtttgtggcccaagtctggtctcctcccaaaatactacacgtccagctcctggagatttcagttacttacctgcatgtgttgtataataccagatcactcaaaaaggtgtgtcaaagattttacctgggatatgacaagcaaggtttccggtgcctatttattcattcagtgagacacagagtggagccctcagttttatagatcccaattcttttcatctactacagggtgaggtgcttgcccccgtgtgggcgtggcagttatagggcccaggtgagctgaagacaaaccactgtacatatatatgccttatgtaattattttctttttgtagttagtaataaaacccagcatgtacaaaagtaccatagaacagaacttctaaatactgtacatagatgtatcattaatgtaggtttagatatataactttagaaataagaagcaaaa

SEQ ID NO: 32387 - DNA, 5622 bp, Macaca Mulatta
  misc_feature (1)...(5622): n = A,T,C or G
ngcagatctatgggaccccttccagcagcccctatgagtgtgtgcgccagtcatgcaacatcctcatcagtaccatgaacaagctggccacagccatgcaggagggggagtatgatgcagagcggccccccagcaannnnnnnnnnnnnnnnnnnnnnnnnnnnnnnnnnnnnnnnnnnnnnnnnnnnnnnnnnnnnnnnnnnnnnnnnnnnnnnnnnnnnnnnnnnnnnnnnnnnnnnnnnnnnnnnnnnnnnnnnnnnnnnnnnnnnnnnnnnnnnnnnnnnnnnnnnnnnnnnnnnnnnnnnnnnnnnnnnnnnnnnnnnnnnnnnnnnnnnnnnnnnnnnnnnnnnnnnnnnnnnnnnnnnnnnnnnnnnnnnnnnnnnnnnnnnnnnnnnnnnnnnnnnnnnnnnnnnnnnnnnnnnnnnnnnnnnnnnnnnnnnnnnnnnnnnnnnnnnnnnnnnnnnnnnnnnnnnnnnnnnnnnnnnnnnnnnnnnnnnnnnnnnnnnnnnnnnnnnnnnnnnnnnnnnnnnnnnnnnnnnnnnnnnnnnnnnnnnnnnnnnnnnnnnnnnnnnnnnnnnnnnnnnnnnnnnnnnnnnnnnnnnnnnnnnnnnnnnnnnnnnnnnnnnnnnnnnnnnnnnnnnnnnnnnnnnnnnnnnnnnnnnnnnnnnnnnnnnnnnnnnnnnnnnnnnnnnnnnnnnnnnnnnnnnnnnnnnnnnnnnnnnnnnnnnnnnnnnnnnnnnnnnnnnnnnnnnnnnnnnnnnnnnnnnnnnnnnnnnnnnnnnnnnnnnnnnnnnnnnnnnnnnnnnnnnnnnnnnnnnnnnnnnnnnnnnnnnnnnnnnnnnnnnnnnnnnnnnnnnnnnnnnnnnnnnnnnnnnnnnnnnnnnnnnnnnnnnnnnnnnnnnnnnnnnnnnnnnnnnnnnnnnnnnnnnnnnnnnnnnnnnnnnnnnnnnnnnnnnnnnnnnnnnnnnnnnnnnnnnnnnnnnnnnnnnnnnnnnnnnnnnnnnnnnnnnnnnnnnnnnnnnnnnnnnnnnnnnnnnnnnnnnnnnnnnnnnnnnnnnnnnnnnnnnnnnnnnnnnnnnnnnnnnnnnnnnnnnnnnnnnnnnnnnnnnnnnnnnnnnnnnnnnnnnnnnnnnnnnnnnnnnnnnnnnnnnnnnnnnnnnnnnnnnnnnnnnnnnnnnnnnnnnnnnnnnnnnnnnnnnnnnnnnnnnnnnnnnnnnnnnnnnnnnnnnnnnnnnnnnnnnnnnnnnnnnnnnnnnnnnnnnnnnnnnnnnnnnnnnnnnnnnnnnnnnnnnnnnnnnnnnnnnnnnnnnnnnnnnnnnnnnnnnnnnnnnnnnnnnnnnnnnnnnnnnnnnnnnnnnnnnnnnnnnnnnnnnnnnnnnnnnnnnnnnnnnnnnnnnnnnnnnnnnnnnnnnnnnnnnnnnnnnnnnnnnnnnnnnnnnnnnnnnnnnnnnnnnnnnnnnnnnnnnnnnnnnnnnnnnnnnnnnnnnnnnnnnnnnnnnnnnnnnnnnnnnnnnnnnnnnnnnnnnnnnnnnnnnnnnnnnnnnnnnnnnnnnnnnnnnnnnnnnnnnnnnnnnnnnnnnnnnnnnnnnnnnnnnnnnnnnnnnnnnnnnnnnnnnnnnnnnnnnnnnnnnnnnnnnnnnnnnnnnnnnnnnnnnnnnnnnnnnnnnnnnnnnnnnnnnnnnnnnnnnnnnnnnnnnnnnnnnnnnnnnnnnnnnnnnnnnnnnnnnnnnnnnnnnnnnnnnnnnnnnnnnnnnnnnnnnnnnnnnnnnnnnnnnnnnnnnnnnnnnnnnnnnnnnnnnnnnnnnnnnnnnnnnnnnnnnnnnnnnnnnnnnnnnnnnnnnnnnnnnnnnnnnnnnnnnnnnnnnnnnnnnnnnnnnnnnnnnnnnnnnnnnnnnnnnnnnnnnnnnnnnnnnnnnnnnnnnnnnnnnnnnnnnnnnnnnnnnnnnnnnnnnnnnnnnnnnnnnnnnnnnnnnnnnnnnnnnnnnnnnnnnnnnnnnnnnnnnnnnnnnnnnnnnnnnnnnnnnnnnnnnnnnnnnnnnnnnnnnnnnnnnnnnnnnnnnnnnnnnnnnnnnnnnnnnnnnnnnnnnnnnnnnnnnnnnnnnnnnnnnnnnnnnnnnnnnnnnnnnnnnnnnnnnnnnnnnnnnnnnnnnnnnnnnnnnnnnnnnnnnnnnnnnnnnnnnnnnnnnnnnnnnnnnnnnnnnnnnnnnnnnnnnnnnnnnnnnnnnnnnnnnnnnnnnnnnnnnnnnnnnnnnnnnnnnnnnnnnnnnnnnnnnnnnnnnnnnnnnnnnnnnnnnnnnnnnnagatgatgtcattgagaagcagattgaggatggtctcctgcgaccagagctccgggagagggtcagttacgtcctcctgaggaggcaccgtcaccaaaccaagaagcccatccaccgctcgttagtcgacattgggaagtcagtctccaccacannnnnnnnnnnnnnnnnnnnnnnnnnnnnnnnnnnnnnnnnnnnnnnnnnnnnnnnnnnnnnnnnnnnnnnnnnnnnnnnnnnnnnnnnnnnnnnnnnnnnnnnnnnnnnnnnnnnnnnnnnnnnnnnnnnnnnnnnnnnnnnnnnnnnnnnnnnnnnnnnnnnnnnnnnnnnnnnnnnnnnnnnnnnnnnnnnnnnnnnnnnnnnnnnnnnnnnnnnnnnnnnnnnnnnnnnnnnnnnnnnnnnnnnnnnnnnnnnnnnnnnnnnnnnnnnnnnnnnnnnnnnnnnnnnnnnnnnnnnnnnnnnnnnnnnnnnnnnnnnnnnnnnnnnnnnnnnnnnnnnnnnnnnnnnnnnnnnnnnnnnnnnnnnnnnnnnnnnnnnnnnnnnnnnnnnnnnnnnnnnnnnnnnnnnnnnnnnnnnnnnnnnnnnnnnnnnnnnnnnnnnnnnnnnnnnnnnnnnnnnnnnnnnnnnnnnnnnnnnnnnnnnnnnnnnnnnnnnnnnnnnnnnnnnnnnnnnnnnnnnnnnnnnnnnnnnnnnnnnnnnnnnnnnnnnnnnnnnnnnnnnnnnnnnnnnnnnnnnnnnnnnnnnnnnnnnnnnnnnnnnnnnnnnnnnnnnnnnnnnnnnnnnnnnnnnnnnnnnnnnnnnnnnnnnnnnnnnnnnnnnnnnnnnnnnnnnnnnnnnnnnnnnnnnnnnnnnnnnnnnnnnnnnnnnnnnnnnnnnnnnnnnnnnnnnnnnnnnnnnnnnnnnnnnnnnnnnnnnnnnnnnnnnnnnnnnnnnnnnnnnnnnnnnnnnnnnnnnnnnnnnnnnnnnnnnnnnnnnnnnnnnnnnnnnnnnnnnnnnnnnnnnnnnnnnnnnnnnnnnnnnnnnnnnnnnnnnnnnnnnnnnnnnnnnnnnnnnnnnnnnnnnnnnnnnnnnnnnnnnnnnnnnnnnnnnnnnnnnnnnnnnnnnnnnnnnnnnnnnnnnnnnnnnnnnnnnnnnnnnnnnnnnnnnnnnnnnnnnnnnnnnnnnnnnnnnnnnnnnnnnnnnnnnnnnnnnnnnnnnnnnnnnnnnnnnnnnnnnnnnnnnnnnnnnnnnnnnnnnnnnnnnnnnnnnnnnnnnnnnnnnnnnnnnnnnnnnnnnnnnnnnnnnnnnnnnnnnnnnnnnnnnnnnnnnnnnnnnnnnnnnnnnnnnnnnnnnnnnnnnnnnnnnnnnnnnnnnnnnnnnnnnnnnnnnnnnnnnnnnnnnnnnnnnnnnnnnnnnnnnnnnnnnnnnnnnnnnnnnnnnnnnnnnnnnnnnnnnnnnnnnnnnnnnnnnnnnnnnnnnnnnnnnnnnnnnnnnnnnnnnnnnnnnnnnnnnnnnnnnnnnnnnnnnnnnnnnnnnnnnnnnnnnnnnnnnnnnnnnnnnnnnnnnnnnnnnnnnnnnnnnnnnnnnnnnnnnnnnnnnnnnnnnnnnnnnnnnnnnnnnnnnnnnnnnnnnnnnnnnnnnnnnnnnnnnnnnnnnnnnnnnnnnnnnnnnnnnnnnnnnnnnnnnnnnnnnnnnnnnnnnnnnnnnnnnnnnnnnnnnnnnnnnnnnnnnnnnnnnnnnnnnnnnnnnnnnnnnnnnnnnnnnnnnnnnnnnnnnnnnnnnnnnnnnnnnnnnnnnnnnnnnnnnnnnnnnnnnnnnnnnnnnnnnnnnnnnnnnnnnnnnnnnnnnnnnnnnnnnnnnnnnnnnnnnnnnnnnnnnnnnnnnnnnnnnnnnnnnnnnnnnnnnnnnnnnnnnnnnnnnnnnnnnnnnnnnnnnnnnnnnnnnnnnnnnnnnnnnnnnnnnnnnnnnnnnnnnnnnnnnnnnnnnnnnnnnnnnnnnnnnnnnnnnnnnnnnnnnnnnnnnnnnnnnnnnnnnnnnnnnnnnnnnnnnnnnnnnnnnnnnnnnnnnnnnnnnnnnnnnnnnnnnnnnnnnnnnnnnnnnnnnnnnnnnnnnnnnnnnnnnnnnnnnnnnnnnnnnnnnnnnnnnnnnnnnnnnnnnnnnnnnnnnnnnnnnnnnnnnnnnnnnnnnnnnnnnnnnnnnnnnnnnnnnnnnnnnnnnnnnnnnnnnnnnnnnnnnnnnnnnnnnnnnnnnnnnnnnnnnnnnnnnnnnnnnnnnnnnnnnnnnnnnnnnnnnnnnnnnnnnnnnnnnnnnnnnnnnnnnnnnnnnnnnnnnnnnnnnnnnnnnnnnnnnnnnnnnnnnnnnnnnnnnnnnnnnnnnnnnnnnnnnnnnnnnnnnnnnnnnnnnnnnnnnnnnnnnnnnnnnnnnnnnnnnnnnnnnnnnnnnnnnnnnnnnnnnnnnnnnnnnnnnnnnnnnnnnnnnnnnnnnnnnnnnnnnnnnnnnnnnnnnnnnnnnnnnnnnnnnnnnnnnnnnnnnnnnnnnnnnnnnnnnnnnnnnnnnnnnnnnnnnnnnnnnnnnnnnnnnnnnnnnnnnnnnnnnnnnnnnnnnnnnnnnnnnnnnnnnnnnnnnnnnnnnnnnnnnnnnnnnnnnnnnnnnnnnnnnnnnnnnnnnnnnnnnnnnnnnnnnnnnnnnnnnnnnnnnnnnnnnnnnnnnnnnnnnnnnnnnnnnnnnnnnnnnnnnnnnnnnnnnnnnnnnnnnnnnnnnnnnnnnnnnnnnnnnnnnnnnnnnnnnnnnnnnnnnnnnnnnnnnnnnnnnnnnnnnnnnnnnnnnnnnnnnnnnnnnnnnnnnnnnnnnnnnnnnnnnnnnnnnnnnnnnnnnnnnnnnnnnnnnnnnnnnnnnnnnnnnnnnnnnnnnnnnnnnnnnnnnnnnnnnnnnnnnnnnnnnnnnnnnnnnnnnnnnnnnnnnnnnnnnnnnnnnnnnnnnnnnnnnnnnnnnnnnnnnnnnnnnnnnnnnnnnnnnnnnnnnnnnnnnnnnnnnnnnnnnnnnaggttaatggctgctcctggctagatcacaggaccctgcatgatacatggaatgctccctggtgaggtactgcagagnnnnnnnnnnnnnnnnnnnntttattcccacatcaatgactgctgctccttccttgatcatatctgctgtgatcagatttggaatacctggaaatggagaaaggaaaaaaagcttagtactgaaaacagtctacctgtcagactgttgtctaatttcaatttcaagagacctagaagaactaattaacatgttttattaaaacctgttaaaaatattaactaagga

SEQ ID NO: 32388 - DNA, 173 bp, Macaca Mulatta
aggtgctggtactggaactgaatgatgaggcagcagagcaggctgtggagcaggtggaggccgacctgctgcaagaccaagagggctaccgctggaaggggcacgagcgcctggcagcccgctcagggcctgtgcgctttgagcctggctttcagcccttcgtgttggtgcag

SEQ ID NO: 32389 - DNA, 1284 bp, Macaca Mulatta
  misc_feature (1)...(1284): n = A,T,C or G
ggggtggaggtggtggcagacgtcgagattcttactatgatagaggatatgatcgtgggtatgacagatatgaagactatgattaccggtacagaagacgatcaccttctccttattatagtcgatacagatcacgatcaagatctcgttcctacagcccaagacgctattgataacggaatggttgcaattaaggacatnnnnnnnnnnnnngnnnnnnnnnnnnnnnnnnnnnnnnnnnnnagacttccccaacctttggattcttcctactccttaaaaaaaaaaatcggttgattataacatcctacacttattgtcaattggtgttgactgttttccacccacttttaaattacagctccgtaaaaaaagtaaattggtatgaccatttttgaagagtgcttaaaaccacctatcgaagtaataacacaataaaacacacctaaacgataaaacgacgattgcgaaaaaaatctaacaagaactcaaaagacaatacaaaaataaaaaacccacattattaaccaatcataggacgcttatcttatttacatatccttacaatcgatatctacgatgaggagagtttcagatgaacacaaccctgtggcgtaacctcgttttattcttattacaagaagacacgctcacccataataattctatctatgtgccaatagcagcgtttttgangaatccaccaacgaaccaccagttcccggcatttgtaatatctttattacagannnnaaccacggccaagttatgttctctttgcggaacccaaaacttgtttaagtanntagtaaaaaacgacggggagaagggaacatacgaaatganccgaacacgagaagggtgtgaanaaaagttgatagggagaaaaagggtaaagagacataagngatgatnttatgcaccagaggggagaacaagaacttaaaagtgtttaacaatataacgacccgtacacgtagtcgtaacgaagtaattgctctttaatacaaaagaaaaccaccacgcagacaacccaactcaacatatactattgattttctaccccgtcaaaggcagaaagcgtgtagatgtagaatgtctaacaattaatacatagcattataaaagataatttaggtacgtttggatacaatacgtttgatataatgctgaacttgtgaaaagcaaacttgtggaattaaataaaacatcaaacagataaatatcgaaccctcatgggcgtatagaacaacaataaccgcttctgcaggattgatcgcaaaa

SEQ ID NO: 32390 - DNA, 3829 bp, Macaca Mulatta
  misc_feature (1)...(3829): n = A,T,C or G
gagctgggctggcttccgtcctgatagccaaggctaattctccctcgagttcttgggagatgggcgtttggcgagaaggctggcgttagtgaagcgcgccgggcgtcacggtgagtgcgnnnnnnnnnnnnnnnnnnnnnnnnnnnnnnnnnnnnnnnnnnnnnnnnnnnnnnnnnnnnnnnnnnnnnnnnnnnnnnnnnnnnnnnnnnnnnnnnnnnnnnnnnnnnnnnnnnnnnnnnnnnnnnnnnnnnnnnnnnnnnnnnnnnnnnnnnnnnnnnnnnnnnnnnnnnnnnnnnnnnnnnnnnnnnnnnnnnnnnnnnnnnnnnnnnnnnnnnnnnnnnnnnnnnnnnnnnnnnnnnnnnnnnnnnnnnnnnnnnnnnnnnnnnnnnnnnnnnnnnnnnnnnnnnnnnnnnnnnnnnnnnnnnnnnnnnnnnnnnnnnnnnnnnnnnnnnnnnnnnnnnnnnnnnnnnnnnnnnnnnnnnnnnnnnnnnnnnnnnnnnnnnnnnnnnnnnnnnnnnnnnnnnnnnnnnnnnnnnnnnnnnnnnnnnnnnnnnnnnnnnnnnnnnnnnnnnnnnnnnnnnnnnnnnnnnnnnnnnnnnnnnnnnnnnnnnnnnnnnnnnnnnnnnnnnnnnnnnnnnnnnnnnnnnnnnnnnnnnnnnnnnnnnnnnnnnnnnnnnnnnnnnnnnnnnnnnnnnnnnnnnnnnnnnnnnnnnnnnnnnnnnnnnnnnnnnnnnnnnnnnnnnnnnnnnnnnnnnnnnnnnnnnnnnnnnnnnnnnnnnnnnnnnnnnnnnnnnnnnnnnnnnnnnnnnagatatgaagaagccgaagtccggaaaaaacttgaggaaaaggacaggcaggaggaagcacagcggctacaacagaaaagacaggaaacaggaagagaggatggtggcacgttggctaaaggttctttggagaatgtattggattccaaagacaaaacccaaaannnnnnnnnnnnnnnnnnnnnnnnnnnnnnnnnnnnnnnnnnnnnnnnnnnnnnnnnnnnnnnnnnnnnnnnnnnnnnnnnnnnnnnnnnnnnnnnnnnnnnnnnnnnnnnnnnnnnnnnnnnnnnnnnnnnnnnnnnnnnnnnnnnnnnnnnnnnnnnnnnnnnnnnnnnnnnnnnnnnnnnnnnnnnnnnnnnnnnnnnnnnnnnnnnnnnnnnnnnnnnnnnnnnnnnnnnnnnnnnnnnnnnnnnnnnnnnnnnnnnnnnnnnnnnnnnnnnnnnnnnnnnnnnnnnnnnnnnnnnnnnnnnnnnnnnnnnnnnnnnnnnnnnnnnnnnnnnnnnnnnnnnnnnnnnnnnnnnnnnnnnnnnnnnnnnnnnnnnnnnnnnnnnnnnnnnnnnnnnnnnnnnnnnnnnnnnnnnnnnnnnnnnnnnnnnnnnnnnnnnnnnnnnnnnnnnnnnnnnnnnnnnnnnnnnnnnnnnnnnnnnnnnnnnnnnnnnnggattttacttatccctcattggaacatttaggttcttctaaacctgctgcccagataccacctccctttatagaagtagatgaaaatatagaattgataagtgatcaaaatgagagaatgggaccactgaatatatcttttccagctgaaccagttgctgcttctaaatctgatgtttcacccataattcagccagtgcctagtataaagaatattccacagnnnnnnnnnnnnnnnnnnnnnnnnnnnnnnnnnnnnnnnnnnnnnnnnnnnnnnnnnnnnnnnnnnnnnnnnnnnnnnnnnnnnnnnnnnnnnnnnnnnnnnnnnnnnnnnnnnnnnnnnnnnnnnnnnnnnnnnnnnnnnnnnnnnnnnnnnnnnnnnnnnnnnnnnnnnnnnnnnnnnnnnnnnnnnnnnnnnnnnnnnnnnnnnnnnnnnnnnnnnnnnnnnnnnnnnnnnnnnnnnnnnnnnnnnnnnnnnnnnnnnnnnnnnnnnnnnnnnnnnnnnnnnnnnnnnnnnnnnnnnnnnnnnnnnnnnnnnnnnnnnnnnnnnnnnnnnnnnnnnnnnnnnnnnnnnnnnnnnnnnnnnnnnnnnnnnnnnnnnnnnnnnnnnnnnnnnnnnnnnnnnnnnnnnnnnnnnnnnnnnnnnnnnnnnnnnnnnnnnnnnnnnnnnnnnnnnnnnnnnnnnnnnnnnnnnnnnnnnnnnnnnnnnnnnnnnnnnnnnnnnnnnnnnnnnnnnnnnnnnnnnnnnnnnnnnnnnnnnnnnnnnnnnnnnnnnnnnnnnnnnnnnnnnnnnnnnnnnnnnnnnnnnnnnnnnnnnnnnnnnnnnnnnnnnnnnnnnnnnnnnnnnnnnnnnnnnnnnnnnnnnnnnnnnnnnnnnnnnnnnnnnnnnnnnnnnnnnnnnnnnnnnnnnnnnnnnnnnnnnnnnnnnnnnnnnnnnnnnnnnnnnnnnnnnnnnnnnnnnnnnnnnnnnnnnnnnnnnnnnnnnnnnnnnnnnnnnnnnnnnnnnnnnnnnnnnnnnnnnnnnnnnnnnnnnnnnnnnnnnnnnnnnnnnnnnnnnnnnnnnnnnnnnnnnnnnnnnnnnnnnnnnnnnnnnnnnnnnnnnnnnnnnnnnnnnnnnnnnnnnnnnnnnnnnnnnnnnnnnnnnnnnnnnnnnnnnnnnnnnnnnnnnnnnnnnnnnnnnnnnnnnnnnnnnnnnnnnnnnnnnnnnnnnnnnnnnnnnnnnnnnnnnnnnnnnnnnnnnnnnnnnnnnnnnnnnnnnnnnnnnnnnnnnnnnnnnnnnnnnnnnnnnnnnnnnnnnnnnnnnnnnnnnnnnnnnnnnnnnnnnnnnnnnnnnnnnnnnnnnnnnnnnnnnnnnnnnnnnnnnnnnnnnnnnnnnnnnnnnnnnnnnnnnnnnnnnnnnnnnnnnnnnnnnnnnnnnnnnnnnnnnnnnnnnnnnnnnnnnnnnnnnnnnnnnnnnnnnnnnnnnnnnnnnnnnnnnnnnnnnnnnnnnnnnnnnnnnnnnnnnnnnnnnnnnnnnnnnnnnnnnnnnnnnnnnnnnnnnnnnnnnnnnnnnnnnnnnnnnnnnnnnnnnnnnnnnnnnnnnnnnnnnnnnnnnnnnnnnnnnnnnnnnnnnnnnnnnnnnnnnnnnnnnnnnnnnnnnnnnnnnnnnnnnnnnnnnnnnnnnnnnnnnnnnnnnnnnnnnnnnnnnnnnnnnnnnnnnnnnnnnnnnnnnnnnnnnnnnnnnnnnnnnnnnnnnnnnnnnnnnnnnnnnnnnnnnnnnnnnnnnnnnnnnnnnnnnnnnnnnnnnnnnnnnnnnnnnnnnnnnnnnnnnnnnnnnnnnnnnnnnnnnnnnnnnnnnnnnnnnnnnnnnnnnnnnnnnnnnnnnnnnnnnnnnnnnnnnnnnnnnnnnnnnnnnnnncaggattgccttagattattttccaaagaagaaaaactcacagataacaacagattttactgcagtcattgcagagctcgacgagattctctaaaaaagatagaaatctggaagttaccacctgtacttttagtgcatctgaaacnnnnnnnnnnnnnnnnnnnnnnnnnnnnnnnnnnnnnnnnnnnnnnnnnnnnnnnnnnnnnnnnnnnnnnnnnnnnnnnnnnnnnnnnnnnnnnnnnnnnnnnnnnnnnnnnnnnnnnnnnnnnnnnnnnnnnaatcactacggcggactggatggagaacactacacagcctattgtaaaaatgcagcaagacaacggtggtttaagtttgatgatcatgaagtttctgatatctccgtttcttctgtgaaatcgtcagcagcttacatcctcttttatacttcactgggaccacgagtaactgatgtagccacata

SEQ ID NO: 32391 - DNA, 108 bp, Macaca Mulatta
gatttgaagccaacaacaacagttggtggaatcattgcataaagttttgggaggaaaccagacccttactgtaaatgtagagggcactaaaacattgccagatgatca

SEQ ID NO: 32392 - DNA, 1748 bp, Macaca Mulatta
  misc_feature (1)...(1748): n = A,T,C or G
aggagcatgtccatgtttagatcaccggaagtaacaaagttgnnnnnnnnnnnnnnnnnnnnnnnnnnnnnnnnnnnnnnnnnnnnnnnnnnnnnnnnnnnnnnnnnnnnnnnnnnnnnnnnnngtcctggtttccaccgccccctccaggttacatgcctcttcttgcacaggagccaggagacggnnnnnnnnnnnnnnnnnnnnnnnnnnnnnnnnnnnnnnnnnnnnnnnnnnnnnnnnnnnnnnnnnnnnnnnnnnnntaggcagatacatccacctaaaccgggtgtatatacagaaaccaacagatctgctgaaagaaatataagnnnnnnnnnnnnnnnnnnnnnnnnnnnnnnnnnnnnnnnnnnnnnnnnnnnnnnnnnnnnnnnnnnnnnnnnnnnnnnnnnnnnnnnnnnnnnnnnnnnnnnnnnnnnnnnnnnnnnnnnnnnnnnnnnnnnnnnnnnnnnnnnnnnnnnnnnnnnnnnnnnnnnnnnnnnnnnnnnnnnnnnnnnnnnnnnnnnnnnnnnnnnnnnnnnnnnnnnnnnnnnnnnnnnnnnnnnnnnnnnnnnnnnnnnnnnnnnnnnnnnnnnnnnnnnnnnnnnnnnnnnnnnnnnnnnnnnnnnnnnnnnnnnnnnnnnnnnnnnnnnnnnnnnnnnnnnnnnnnnnnnnnnnnnnnnnnnnnnnnnnnnnnnnnnnnnnnnnnnnnnnnnnnnnnnnnnnnnnnnnnnnnnnnnnnnnnnnnnnnnnnnnnnnnnnnnnnnnnnnnnnnnnnnnnnnnnnnnnnnnnnnnnnnnnnnnnnnnnnnnnnnnnnnnnnnnnnnnnnnnnnnnnnnnnnnnnnnnnnnnnnnnnnnnnnnnnnnnnnnnnnnnnnnnnnnnnnnnnnnnnnnnnnnnnnnnnnnnnnnnnnnnnnnnnnnnnnnnnnnnnnnnnnnnnnnnnnnnnnnnnnnnnnnnnnnnnnnnnnnnnnnnnnnnnnnnnnnnnnnnnnnnnnnnnnnnnnnnnnnnnnnnnnnnnnnnnnnnnnnnnnnnnnnnnnnnnnnnnnnnnnnnnnnnnnnnnnnnnnnnnnnnnnnnncaaagaagacaggatctcgaatctgttgttaaagtgaatgccaggatgaataaaacgagcagaaggtgagaactgaacagatgtctctaaatattggttattttctctcatattaattatgtgatattgagggcatcacatctttgtttggcttctctcttctgtgtctaatccctggtgccctgatcttcacttcaaagaatacatacagtatattcgatctaaatttacatttacatataacccaataaaattctaaggattaattaaactaagttattgataggccatttttatcctaaaagccaatttaatgtcagtataataattttctccaaaagcttgaattaatcattgggaatacagaagatgtatgtgtctgatattatgggaatgttttgaaactgatataaannnnnnnnnnaaagaagtgaagacgttgataatgctatcaaagtaaatcccaaaggaaatgaaaataccactgnnnnnnnnnnnnnnnnnnnnnnnnnnnnnnnnnnnnnnnnnnnnnnnnnnnnnnnnnnnnnnnnnnnnnnnnnnnnnnnnnnnnnnnnnnnnnnnnnnnnnnnnnnnnnnnnnnnnnnngttccaaagacctcaatgacttcatcaaagtgaatccaggaacagaaaaaagtactcaagg

SEQ ID NO: 32393 - DNA, 3406 bp, Macaca Mulatta
  misc_feature (1)...(3406): n = A,T,C or G
ccttgaagataaggatggccaaacaaaataatatcatatctgcagaaagtcagatcttggtaagatttactagtagggaatccaatgttaatgccaagaagcagcggccagttgggatccagtgtgagcctgtggatcaaggnnnnnnnnnnnnnnnnnnnnnnnnnnnnnnnnnnnnnnnnnnnnnnnnnnnnnnnnnnnnnnnnnnnnnnnnnnnnnnnnnnnnnnnnnnnnnnnnnnnnnnnnnnnnnnnnnnnnnnnnnnnnnnnnnnnnnnnnnnnnnnnnnnnnnnnnnnnnnnnnnnnnnnnnnnnnnnnnnnnnnnnnnnnnnnnnnnnnnnnnnnnnnnnnnnnnnnnnnnnnnnnnnnnnnnnnnnnnnnnnnnnnnnnnnnnnnnnnnnnttgtgcccccagctggcagagaagaaacaacagttcagaaacataaaagagaaatttattgtaactcaagtggcctgcttcctggccaactggcagaacaaatacannnnnnnnnnnnnnnnnnnnnnnnnnnnnnnnnnnnnnnnnnnnnnnnnnnnnnnnnnnnnnnnnnnnnnnnnnnnnnnnnnnnnnnnnnnnnnnnnnnnnnnnnnnnnnnnnnnnnnnnnnnnnnnnnnnnnnnnnnnnnnnnnnnnnnnnnnnnnnnnnnnnnnnnnnnnnnnnnnnnnnnnnnnnnnnnnnnnnnnnnnnnnnnnnnnnnnnnnnnnnnnnnnnnnnnnnnnnnnnnnnnnnnnnnnnnnnnnnnnnnnnnnnnnnnnnnnnnnnnnnnnnnnnnnnnnnnnnnnnnnnnnnnnnnnnnnnnnnnnnnnnnnnnnnnnnnnnnnnnnnnnnnnnnnnnnnnnnnnnnnnnnnnnnnnnnnnnnnnnnnnnnnnnnnnnnnnnnnnnnnnnnnnnnnnnnnnnnnnnnnnnnnnnnnnnnnnnnnnnnnnnnnnnnnnnnnnnnnnnnnnnnnnnnnnnnnnnnnnnnnnnnnnnnnnnnnnnnnnnnnnnnnnnnnnnnnnnnnnnnnnnnnnnnnnnnnnnnnnnnnnnnnnnnnnnnnnnnnnnnnnnnnnnnnnnnnnnnnnnnnnnnnnnnnnnnnnnnnnnnnnnnnnnnnnnnnnnnnnnnnnnnnnnnnnnnnnnnnnnnnnnnnnnnnnnnnnnnnnnnnnnnnnnnnnnnnnnnnnnnnnnnnnnnnnnnnnnnnnnnnnnnnnnnnnnnnnnnnnnnnnnnnnnnnnnnnnnnnnnnnnnnnnnnnnnnnnnnnnnnnnnnnnnnnnnnnnnnnnnnnnnnnnnnnnnnnnnnnnnnnnnnnnnnnnnnnnnnnnnnnnnnnnnnnnnnnnnnnnnnnnnnnnnnnnnnnnnnnnnnnnnnnnnnnnnnnnnnnnnnnnnnnnnnnnnnnnnnnnnnnnnnnnnnnnnnnnnnnnnnnnnnnnnnnnnnnnnnnnnnnnnnnnnnnnnnnnnnnnnnnnnnnnnnnnnnnnnnnnnnnnnnnnnnnnnnnnnnnnnnnnnnnnnnnnnnnnnnnnnnnnnnnnnnnnnnnnnnnnnnnnnnnnnnnnnnnnnnnnnnnnnnnnnnnnnnnnnnnnnnnnnnnnnnnnnnnnnnnnnnnnnnnnnnnnnnnnnnnnnnnnnnnnnnnnnnnnnnnnnnnnnnnnnnnnnnnnnnnnnnnnnnnnnnnnnnnnnnnnnnnnnnnnnnnnnnnnnnnnnnnnnnnnnnnnnnnnnnnnnnnnnnnnnnnnnnnnnnnnnnnnnnnnnnnnnnnnnnnnnnnnnnnnnnnnnnnnnnnnnnnnnnnnnnnnnnnnnnnnnnnnnnnnnnnnnnnnnnnnnnnnnnnnnnnnnnnnnnnnnnnnnnnnnnnnnnnnnnnnnnnnnnnnnnnnnnnnnnnnnnnnnnnnnnnnnnnnnnnnnnnnnnnnnnnnnnnnnnnnnnnnnnnnnnnnnnnnnnnnnnnnnnnnnnnnnnnnnnnnnnnnnnnnnnnnnnnnnnnnnnnnnnnnnnnnnnnnnnnnnnnnnnnnnnnnnnnnnnnnnnnnnnnnnnnnnnnnnnnnnnnnnnnnnnnnnnnnnnnnnnnnnnnnnnnnnnnnnnnnnnnnnnnnnnnnnnnnnnnnnnnnnnnnnnnnnnnnnnnnnnnnnnnnnnnnnnnnnnnnnnnnnnnnnnnnnnnnnnnnnnnnnnnnnnnnnnnnnnnnnnnnnnnnnnnnnnnnnnnnnnnnnnnnnnnnnnnnnnnnnnnnnnnnnnnnnnnnnnnnnnnnnnnnnnnnnnnnnnnnnnnnnnnnnnnnnnnnnnnnnnnnnnnnnnnnnnnnnnnnnnnnnnnnnnnnnnnnnnnnnnnnnnnnnnnnnnnnnnnnnnnnnnnnnnnnnnnnnnnnnnnnnnnnnnnnnnnnnnnnnnnnnnnnnnnnnnnnnnnnnnnnnnnnnnnnnnnnnnnnnnnnnnnnnnnnnnnnnnnnnnnnnnnnnnnnnnnnnnnnnnnnnnnnnnnnnnnnnnnnnnnnnnnnnnnnnnnnnnnnnnnnnnnnnnnnnnnnnnnnnnnnnnnnnnnnnnnnnnnnnnnnnnnnnnnnnnnnnnnnnnnnnnnnnnnnnnnnnnnnnnnnnnnnnnnnnnnnnnnnnnnnnnnnnnnnnnnnnnnnnnnnnnnnnnnnnnnnnnnnnnnnnnnnnnnnnnnnnnnnnnnnnnnnnnnnnnnnnnnnnnnnnnnnnnnnnnnnnnnnnnnnnncaaaggtgttaccctggtttcaatgaacctccccccattctttgtatcttctgtgtcggtttgttttagctgatccatgtgtaacacaggagggatcagtggctgaggattgtatttgaaaaccactgaccgctcttgacaattgttaacccactaggctcctttggttagagaagccacagtccttcagcctccaattgctatcaatacttaggaagaccacagctagatggacaaacagcgtggagagcccttagccctgctcctctcaattccattctgtaaagaacaggagtcaggagccgctggcaggagacagcatgtcacccgggactctgccggtgcagaatatgaacaatgccatgttcttgcagaaaacgcttagcctgagtttcataggaggtaatcaccggacaactgcagaatgtagaacactgagcaggacgactggcctgtctccttcacacagtccatgtcaccatgaatcacacaacaaaaaggagaagagatatttttggttcaaagaaagtaaaaaggtactgtagctacatttctttattttgaaccccaaatatttcctcatctttttgttgttgtcattgattgtggtgacatggactcgtttgtagaggacaggtcagctgtctggctcaatgatctacattctgaagttgtctgaaaatgtcttcatgatt

SEQ ID NO: 32394 - DNA, 885 bp, Macaca Mulatta
gccatcctgggaaatggagtcatttggtataataacttttgcctctttctgtttcttcaggaatggctggaacaatatatttcctggctgacctgctagtccccacaaaagccaggttccctgcatttgaactctgaaaggaaagcatgccacctgtaactcactgcatgaccctttctgtatattcaaacccaagctaagtgctttcgttgctttccaaggaaacaaagagtcaaactgtggacttgattttgttagcttttttcagaatttgtctttcattcggttcatttccattatcatttacttttgcttaaaagtatccaaggaagtcttttaactttaatttccatttcttcctaaagggagagtgagtgatatgtacagtgttttgagattgtatacatatgttccagaacttggaggaaatcttatttaagtttatgaatataaccatctgttactgttctaaaaatgtttaaaagaaactcaatatagataaaaataaatatgtgactattattgggtattgcacttcacttttctttaatatttttcctccaattggagggcaaacaattttatgacttgcttttctctaggtgtttcattttgaaagggacaaaaatataactaaatgcttccaggagaaaaattccaagaattgcaatctggacttgggacctaaatatcatttttaaaattcttgatgcctatttagactagaagtaaacatactttcagatttgcctgtttttgtcagcaaggcatacaggcttcagaagccaacatttttaatcaaaaacgtataaaacgtgatgatcattgtgaaaattctgagttgaaggttagttcaagacaagctaacaataacagtttgtgttt

SEQ ID NO: 32395 - DNA, 832 bp, Macaca Mulatta
  misc_feature (1)...(832): n = A,T,C or G
ggctgccatttgtcgatgtagtcaaccactctctggattcagtgccaggtgcctggaggatgaacatttgcttcaagccattagtaaagccaatccagttaatcgctatatgtatgtcatggataccaggccaaaannnnnnnnnnnnnnnnnnnnnnnnnnnnnnnnnnnnnnnnnnnnnnnnnnnnnnnnnnnnnnnnnnnnnnnnnnnnnnnnnnnnnnnnnnnnnnnnnnnnnnnnnnnnnnnnnnnnnnnnnnnnnnnnnnnagtcaatggcactaaagggctttccgtcaatgatttctactccggtttggagagctcaggatggcttcgccatatcaaagctgttatggatgctgcaatcttcttggccaaannnnnnnnnnnnnnnnnnnnnnnnnnnnnnnnnnnnnnnnnnnnnnnnnnnnnnnnnnnnnnnnnnnnnnnnnnnnnnnnnnnnnnnnnnnnnnnnnnnnnnnnnnnnnnnnnnnnnnnnnnnnnnnnnnnnnnnnnnnnnnnnnnnnnnnnnnnnnnnnnnnnnnnnnnnnnnnnnnnnnnnnnnnnnnnnnnnnnnnnnnnnnnnnnnnnnnnnnnnnnnnnnnnnnnnnnnnnnnnnnnnnnnnnnnnnnnnnnnnnnnnnnnnnnnnnnnnnnnnnnnnnnnnnnnnnnnnnnnnnnnnnnnnnnnnnnnnnnnnnnnnngccagtttggaaacttccttggaaattgtcaaaaggaaagagaagagctcaagnnnnnnnnnnnnnnnnttccctgtggccgtttcttttggaagaccaaaagaagtggttaaatcctctctacagttc

SEQ ID NO: 32396 - DNA, 836 bp, Macaca Mulatta
  misc_feature (1)...(836): n = A,T,C or G
gggaacggtccttcctcaaagcgtggttgctgagtacccagtgttgcaaggagttttttaaccggtatttttctcgtttgtcagacctagacaggtggcaatcatgagtgaatggatgaagaaaggccccttagaatggcaagattacatttacaaagaggtccgagtgacagccagtgagaagaatgagtataaaggatgggttttaactacagacccagtctctgccaatatcgtccttgtgaacttccttgaagatggcagcatgtctgtgaccggaattatgggacatgcagtgcagactgttgaaactgtgaatgaaggggaccatagagtgagggagaagctgatgcatttgttcacgtctggagactgcaaagcgtacagcccataggatctggaagagagaaagaacagcctaaagaaatggctttgagaagaaccacatccccatcactgaacagggaaattctccaaggactctctgtgtggctggggtcctgactatagacccaccattatggttccagaaaattgcagcagcttctaatgaaattattccgtccccgtgttcagggatcttattgaaggaactctttaaagcttccctaattgtaaggcccagaaaatggtgaaaaccacttgaatagaaaaaaaactaatttttttactccnnnnnnnnnnnnnnnnnnnaaatgataaagtttccttcttcccgaattggtaaggacctttaaaaggggaaactggaactcctggtagggggcgatgatcggccacggatgttgggcgtgaagtttatagcaatatttcttatttttttgtcatcaaaaaan

SEQ ID NO: 32397 - DNA, 105 bp, Macaca Mulatta
gaaatgtgcctgtggctgccttgcctgtaactcagcaaatgacagaaatgagcatttcaagagaggacaaaataactaccccgaaaacagaggtgtcagagccag

SEQ ID NO: 32398 - DNA, 397 bp, Macaca Mulatta
tagaatgggagctgcacttggggatggtgatggtgttagagattgcagcctaggacaaagcatcaccttgctcaaggggaacaaactgcagcaggttgtacaaaacagagctcacttgacccagcccagggttttacttggtgagcctttccagtagtcctgagtctggggctcagttttaggtttttatttcattaatgtttgtttatttctaataaattttaataaacaagtaatttaggtcaccagaagaccattctttttgtttgtctatttttgttgtcactccctctctcatcatctgtctgccagtctgttcacagatcaccttgtagtccctcgtggtttttactccagtgcttaaagctgacctaaggacttcgatggttccagcctt

SEQ ID NO: 32399 - DNA, 969 bp, Macaca Mulatta
  misc_feature (1)...(969): n = A,T,C or G
ttgtcaggtttggatagaatataattgattggtttgttacttggactaaaaaggcagtagatttgcctgtgtnnnnnnnnnnnnnnnnnnnnnnnnnnnnnnnnnnnnnngcactaatcagaaatatttgatatgtgcattgttgaaaaatactggatacatgtcttgtcagaattgtcgtattaagtaatgtctttccctcttgcttctttggcaaatgatgatacacagtgtttggacttactgaagagttactgaagcctgtgggacttaataaatacagtatgctactccctgttgttattcaacaatacaagtaacaaacaagaaagacaatgcattccattagtctgctattctgtttccttcagcttgatacatagattcatataaagtactgcattttaaaacatctatagactcatattaaatgttatttctatttataatagtcagcaaaagtgaaagacttatgaagtatatgacattctatttttgacttattagtcctagtgtgaaagcatattagcatgacatttttacaacttcagattttaagctcgtgaataaaaatatatctgtgttgatctctagatatttttagtaatacccaaatatatgcagtccttattgttttaatataaactttctgtgttcagtataattttatttttctcaaccttaaatatgaacttaggaaataaggagggaaatacaaagattattgactatacaacctaccagctgaaagaaagatcttcatcaacatctgtatctttccagaggtatacagaattaaaatttgatcttcaagctttaatgatccagttttaagtcaacggcagaaatatgttgaatatttcatcactcaatcttgaactgatttagaagagactctttgctgaaattgaattgcacatatacatgtaaattgtcaacatgtaatttggaattttctgattaataaat

SEQ ID NO: 32400 - DNA, 240 bp, Macaca Mulatta
atcatttcttttgaattaaaaccaacatatcagcaatagtctgctctccccgggaatctctaacatgctctgtttacatcgataaatgcacttaaggaaaacaaacaaagctcatcttaaagtccgaggatttttatgtccacattttccctgtaggccacacggacatgaccaggccctgggggtgggtctggacaagatggtagagcccacgggttaccccatcaagcggccacctca

SEQ ID NO: 32401 - DNA, 767 bp, Macaca Mulatta
  misc_feature (1)...(767): n = A,T,C or G
tggcggccatcccagccctgcatccagaggcggagcccagcatggacgtgatcttggtgggatccagtgagctctcaagccccgtttcgcccggnnnnnnnnnnnnnnnnnnnnnnnnnnnnnnnnnnnnnnnnnnnnnnnnnnnnnnnnnnnnnnnnnnnnnnnnnnnnnnnnnnnnnnnnnnnnnnnnnnnnnnnnnnnnnnnnnnnnnnnnnnnnnnnnnnnnnaaggacaagttcctggatgccctcttcctgtacgacgatgatgggtaccaatcctactgctccatctgctgctccggagagacgctgctcatctgcggaaaccccgattgcacccnnnnnnnnnnnnnnnnnnnnnnnnnnnnnnnnnnnnnnnnnnnnnnnnnnnnnnnnnnnnnnnnnnnnnnnnnnnnnnnnnnnnnnnnnnnnnnnnnnnnnnnnnnnnnnnnnnnnnnnnnnnnnnnnnnnnnnnnnnnnnnnnnnnnnnnnnnnnnnnnnnnnnnnnnnnnnnnnnnnnnnnnnnnnnnnnnnnnnnnnnnnnnnnnnnnnnnnnnnnnnnnnnnnnnnnnnnnnnnnnnnnnnnnnnnnnnnnnnnnnnnnnnnnnnnnnnnnnnnnnnnnnnnnnnnnnnnnnnnnnnnnnnnnnnnnnnnnnnnnnnnnnnnnnnnnnnnnnnnnnnnnnnnnnngtggaggagtgggggccctttgatctccagtacggcgccacacctcccatgggccacacctgcgaccatcctccca

SEQ ID NO: 32402 - DNA, 752 bp, Macaca Mulatta
  misc_feature (1)...(752): n = A,T,C or G
gacttagtatcaggagcactgagctcacagactgacttggactcctactggtggggacctctgttagtcactttacctcatccaaagtataaaggaattggaccaaataatttaccacatagctctaaaacttaatttaaaatgtaattcnnnnnnnnnnnnnnnnnnnnnntaagcaaagaggaaagaagtgaaagagagagagaagaaagaatacagagagatgaccttttgcctttctgttgatgttatatcccttcttcctatattcttaggtctatgagtctgtttccccatcattgggtatctagtccacttcctgcttactgctttgctaatagctggccttgctagaatcattggtttcactgctgttcttcatgtgcttctgtgagatttactccaacaaaaataggactgaatttacttgtgaagtaacattggcaatcttaacttattcatttagcttacctatttttatagctggataaatattgttagtcttagaatagctcacattttttgagaagcatgctttccctgtccatttgtcttataacatgacccagccctattttaagtcattctaaattcagcctcatataatgaaaatacattatgaaaacagatgtttaggagatttcctgtatagcagtcagccaattcatatgctttgtctctgctgacttctgttgccatgcattaacttttcacaatagcagaggaggcaaatatgagcgtacaatcccttt

SEQ ID NO: 32403 - DNA, 220 bp, Macaca Mulatta
aggtcacagtcgaactgttattggaattgaagagaaaaaaaaccgaacattatgcttactaatacttgatcctggatgtccttctcgagaaatgcagaaattgttaaagcaagacgtagaggctagcagtctcaagcaacttcgaaaatctatgggaaatttaaaacataagcaataccagatagtggcagtagagggtgctctttctccagaggagaaa

SEQ ID NO: 32404 - DNA, 838 bp, Macaca Mulatta
tcagctttgtaactgttttcaaggaagtgcttaggattgtgggtttctgattgcatccactagcttctcttttactcgccataaaaatttgtctctgagagactatacattccaatcaatttgaagcatccaagaattcttagaccgagtaagcaatgtccacatctcagcagtccccctctttgctctcctcgtgtcctctcccagacctttcttccagttttctggcttactatgttacttgcctaggaggaacgtccaagtgtgtcttgtacttaggaaactgaaggaaacaaacttttgaaattgagatcctgatctcagaactccaaagtaagctttgaaagcggcatttaagagcacttaaccatggacctcaccaccagtgaggaagtcaggaatacctctagaaaacacgcccttcacactgcgcatgctcattcccccgacgcaccgcgtgtggatgggagcagtatttctcactttaaaatggacaccttgatagtgtgtctttggggttgcacagctcatcaaagttccaaattgtttgttctcacaaacaaaacggtacaatctatttttgtgcgatgttcttgggacctcgttgtgttctgctatctcgaggcacattctcccctccaactttgttaatgctacttgtctctggaacatttttttttcctacctcagagataaatgagatctccatttcccacttaacacaaagtgattatcctttttttccccccaaataagtgacatttggtccaattataatctattttcctattgaactttcagcaataactgagctgtggcactagcagcgctagtagcc

SEQ ID NO: 32405 - DNA, 363 bp, Macaca Mulatta
agcagcccctcccagactcccgttaacccccagggccccagcaccgcttccagggcgattaccatcatctgctttcccacctactttcgaacagagaaaaaaagtctgcaaatcaaggagtttatttggtgcaccgaagactgggccatcccggacagtagtaggagcaaggcccttcggaaccccagtggaggggcccacagagggctgtccatcccaggccccctgacttccagggccctcctagttctgccacccctgaaggcttcactttcaaatgccttggatgttctgggtaagaagagtaagaactctttcttgcagtcagaagagaaggtgctgagtgtggaaaaggatgggtgt

SEQ ID NO: 32406 - DNA, 393 bp, Macaca Mulatta
acagggcagctgggaccgagggggcccaggctggggaggggctgagagtgtgtggccagggtgagggtaagagagggttggtgccttttctggtgtttgagagtgaagcaccctcaaatgggagtgtctgatgacacgtgggagaattgggaggcaggaagaccaggacaggtgagcccatttctgccagtggggtgtttcttgccccctcaggccaaaccctttcttcaaccagagccgccgggcatggcttcccagggcagggcagggcagggcagaccctgatatgagctatgtgcccccagtgctgatcagtttcatgtatgcagggaaggaagaggatgtcaggggcccatgggccggggagctcacccactctacccttgctccagt

SEQ ID NO: 32407 - DNA, 3686 bp, Macaca Mulatta
  misc_feature (1)...(3686): n = A,T,C or G
acctgacagtattattgaaaaggcttctcactcgggcatgatcaaccccagccggcagtggcagacgctgaagcaaaacacaggcgttgcccactttgagtatcagatccgcgtgacctgtgatgactactactatggctttggctgcaataagttctgccgccccagagatgacttctttggacactatgcctgtgaccagaatggcaacaaaacttgcatggaaggctggatgggccccgaatgtaacagagnnnnnnnnnnnnnnnnnnnnnnnnnnnnnnnnnnnnnnnnnnnnnnnnnnnnnnnnnnnnnnnnnnnnnnnnnnnnnnnnnnnnnnnnnnnnnnnnnnnnnnnnnnnnnnnnnnnnnnnnnnnnnnnnnnnnnnnnnnnnnnnnnnnnnnnnnnnnnnnnnnnnnnnnnnnnnnnnnnnnnnnnnnnnnnnnnnnnnnnnnnnnnnnnnnnnnnnnnnnnnnnnnnnnnnnnnnnnnnnnnnnnnnnnnnnnnnnnnnnnnnnnnnnnnnnnnnnnnnnnnnnnnnnnnnnnnnnnnnnnnnnnnnnnnnnnnnnnnnnnnnnnnnnnnnnnnnnnnnnnnnnnnnnnnnnnnnnnnnnnnnnnnnnnnnnnnnnnnnnnnnnnnnnnnnnnnnnnnnnnnnnnnnnnnnnnnnnnnnnnnnnnnnacattgatgactgttctcctaataactgttcccacgggggcacctgccaggacctggttaacggatttaagtgtgtgtgccctccacagtggactggcaaaacgtgccagttannnnnnnnnnnnnnnnnnnnnnnnnnnnnnnnnnnnnnnnnnnnnnnnnnnnnnnnnnnnnnnnnnnnnnnnnnnnnnnnnnnnnnnnnnnnnnnnnnnnnnnnnnnnnnnnnnnnnnnnnnnnnnnnnnnnnnnnnnnnnnnnnnnnnnnnnnnnnnnnnnnnnnnnnnnnnnnnnnnnnnnnnnnnnnnnnnnnnnnnnnnnnnnnnnnnnnnnnnnnnnnnnnnnnnnnnnnnnnnnnnnnnnnnnnnnnnnnnnnnnnnnnnnnnnnnnnnnnnnnnnnnnnnnnnnnnnnnnnnnnnnnnnnnnnnnnnnnnnnnnnnnnnnnnnnnnnnnnnnnnnnnnnnnnnnnnnnnnnnnnnnnnnnnnnnnnnnnnnnnnnnnnnnnnnnnnnnnnnnnnnnnnnnnnnnnnnnnnnnnnnnnnnnnnnnnnnnnnnnnnnnnnnnnnnnnnnnnnnnnnnnnnnnnnnnnnnnnnnnnnnnnnnnnnnnnnnnnnnnnnnnnnnnnnnnnnnnnnnnnnnnnnnnnnnnnnnnnnnnnnnnnnnnnnnnnnnnnnnnnnnnnnnnnnnnnnnnnnnnnnnnnnnnnnnnnnnnnnnnnnnnnnnnnnnnnnnnnnnnnnnnnnnnnnnnnnnnnnnnnnnnnnnnnnnnnnnnnnnnnnnnnnnnnnnnnnnnnnnnnnnnnnnnnnnnnnnnnnnnnnnnnnnnnnnnnnnnnnnnnnnnnnnnnnnnnnnnnnnnnnnnnnnnnnnnnnnnnnnnnnnnnnnnnnnnnnnnnnnnnnnnnnnnnnnnnnnnnnnnnnnnnnnnnnnnnnnnnnnnnnnnnnnnnnnnnnnnnnnnnnnnnnnnnnnnnnnnnnnnnnnnnnnnnnnnnnnnnnnnnnnnnnnnnnnnnnnnnnnnnnnnnnnnnnnnnnnnnnnnnnnnnnnnnnnnnnnnnnnnnnnnnnnnnnnnnnnnnnnnnnnnnnnnnnnnnnnnnnnnnnnnnnnnnnnatagcccgaaacagtagctgcctgcccaacccctgccataatgggggcacatgtgtggtcaacggcgagtcctttacgtgcgtctgcaaggaaggctgggaggggcccatctgtgctcagnnnnnnnnnnnnnnnnnnnnnnnnnnnnnnnnnnnnnnnnnnnnnnnnnnnnnnnnnnnnnnnnnnnnnnnnnnnnnnnnnnnnnnnnnnnnnnnnnnnnnnnnnnnnnnnnnnnnnnnnnnnnnnnnnnnnnnnnnnnnnnnnnnnnnnnnnnnnnnnnnnnnnnnnnnnnnnnnnnnnnnnnnnnnnnnnnnnnnnnnnnnnnnnnnnnnnnnnnnnnnnnnnnngtttcagggagaccttgcatcaccatggggagtgtgataccagatggggccaaatgggatgatgactgtaatacctgccaatgcctgaatggacggatcgcctgctcaaaggtnaggtctggtgtggccctcgaccatgcctgctccacaaagggcacagcgagtgccccagcgggcagagctgcatccccatcctggacgaccagtgcttcgtccacccctgcactggtgtgggcgagtgtcggtcttccagtctccagccagtgaagacgaagtgcacctctgactcctattaccaggataactgtgcgaacatcacatttacctttaacaaggagatgatgtcaccangtcttacgacagaacacatttgcagtgaattgcggaatttgaatattttgaagaatgtttctgctgaatattcaatctacattgcttgtgagccttccccttcagcaaacaatgaaatacatgtggccattntctgctgaagatatacgggatgatggaaacccgatcaaggaaatcactgacaaaataatcgatcttgttagtaaacgtgatggaaacagctcgctcattgctgctgttgcagaagtgagagttcagaggcggcctctgaagaacagaacagnnnnnnnnnnnnnnnnnnnnnnnnnnnnnnnnnnnnnnnnnnnnnnnnnnnnnnnnnnnnnnnnnnnnnnnnnnnnnnnnnnnnnnnnnnnnnnnnnnnnnnnnnnnnnnnnnnnnnnnnnnnnnnnnnnnnnnnnnnnnnnnnnnnnnnnnnnnnnnnnnnnnnnnnnnnnnnnnnnnnnnnnnnnnnnnnnnnnnnnnnnnnnnnnnnnnnnnnnnnnnnnnnnnnnnnnnnnnnnnnnnnnnnnnnnnnnnnnnnnnnnnnnnnnnnnnnnnnnnnnnnnnnnnnnnnnnnnnnnnnnnnnnnnnnnnnnnnnnnnnnnnnnnnnnnnnnnnnnnnnnnnnnnnnnnnnnnnnnnnnnnnnnnnnnnnnnnnnnnnnnnnnnnnnnnnnnnnnnnnnnnnnnnnnnnnnnnnnnnnnnnnnnnnnnnnnnnnnnnnnnnnnnnnnnnnnnnnnnnnnnnnnnnnnnnnnnnnnnnnnnnnnnnnnnnnnnnnnnnnnnnnnnnnnnnnnnnnnnnnnnnnnnnnnnnnnnnnnnnnnnnnnnnnnnnnnnnnnnnnnnnnnnnnnnnnnnnnnnnnnnnnnnnnnnnnnnnnnnnnnnnnnnnnnnnnnnnnnntggctgggaatcgagtgccgcatctcacagctatgcaaaaagctagtcgacagtaccctggttgtctgtccccctgcagccgacacgtctcggatcgggctcccaggagcctgcccagccccctggtctttgagctcccacttctgccagatgtcctaatggtgatgcagtcttagatcatagttttatttatatttattgactcttgagttgtttttgtatattggttttatgatgacgtacaagtagttctgtatttgaaagtgcctttgcagctcagaaccacagcaacgatcacaaatgac

SEQ ID NO: 32408 - DNA, 1780 bp, Macaca Mulatta
  misc_feature (1)...(1780): n = A,T,C or G
gacaggtgtgggaatgtccaactttgatccacatcctgcacaatagtggtcccgccatggctgccacttttttatactatttggagaaaagaccttgtataaattcgaggcccgagtgactaacgtctctgtcacacagaaatgggtacttggtggcatagagaaacccagccactttttcagctacgcttctcactcaggtgcacccnctacgcttctcactcaggtgcaccccttctgctgtcctttccccaacgtactggatcccgagcatggtggatgtcatttgccacactggatgccagctcagcagccctgcacctctctttattctctccaaagctggtctctctgactctcattgtggtagggggaggatggatgctaaaggtagaagctgacctggaaaaagagacacacagggtgactgtggcaaaggacagctggaaaagaagctctatcacttcttcattggcaaccgcaaggcgcctgaggccatggcactcccagaggctgcgcgcagggccaagcttctcaacctcttctggccctgcgtcctgcagcgaagtgtctactgtaagacagtggacttcttcgatgaggcgctcnnnnnnnnnnnnnnnnnnnnnnnnnnnnnnnnnnnnnnnnnnnnnnnnnnnnnnnnnnnnnnnnnnnnnnnnnnnnnnnnnnnnnnnnnnnnnnnnnnnnnnnnnnnnnnnnnnnnnnnnnnnnnnnnnnnnnnnnnnnnnnnnnnnnnnnnnnnnnnnnnnnnnnnnnnnnnnnnnnnnnnnnnnnnnnnnnnnnnnnnnnnnnnnnnnnnnnnnnnnnnnnnnnnnnnnnnnnnnnnnnnnnnnnnnnnnnnnnnnnnnnnnnnnnnnnnnnnnnnnnnnnnnnnnnnnnnnnnnnnnnnnnnnnctccatctccaggtctggttcagggggatcaggaagcctcttctccacctgtggcttcactggccctttgagattttctctcaccatcacttcacttacccttgcagggggccagggtcgagaatatacctgtgttctccctccagggtttcagccggccnnnnnnnnnnnnnnnnnnnnnnnnnnnnnnnnnnnnnnnnnnnnnnnnnnnnnnnnnnnnnnnnnnnnnnnnnnnnnnnnnnnnnnnnnnnnnnnnnnnnnnnnnnnnnnnnnnnnnnnnnnnnnnnnnnnnnnnnnnnnnnnnnnnnnnnnnnnnnnnnnnnnnnnnnnnnnnnnnnnnnnnnnnnnnnnnnnnnnnnnnnnnnnnnnnnnnnnnnnnnnnnnnnnnnnnnnnnnnnnnnnnnnnnnnnnnnnnnnnnnnnnnnnnnnnnnnnnnnnnnnnnnnnnnnnnnnnnnnnnnnnnnnnnnnnnnnnnnnnnnnnnnnnnnnnnnnnnnnnnnnnnnnnnnnnnnnnnnnnnnnnnnnnnnnnnnnnnnnnnnnnnnnnnnnnnnnnnnnnnnnatggcccatgcctttccccgcttcattctgatccggttttgctttgaagagaccccaataacaaaaaaacagcctccagaagccaaacctgtgcctcgatctcccacagcttctcctttgcttccaggagaaagttcactnnnnnnnnnnnnnnnnnngcttcttgtttatacggagacagcagaactcggtggggaaatgagaatcttttctgcaccaaagctgcttctaaagcagaaagcagtggcgctcttggtgtttcatgctgccttatttatattcaaggaagaattaaatcttgcaa

SEQ ID NO: 32409 - DNA, 661 bp, Macaca Mulatta
  misc_feature (1)...(661): n = A,T,C or G
gggggatttgccatcatgttttttataatattctttgcttatgcccagttaggatttcttatttttggatcacaagttgatgacttttccacttttcagaattccatatttgcacaatttcgaattgttcttggagattttaattttgctggtattcagcaagccaatcctatcttgggacccatttacttcatcactttcatcttttttgtgttctttgtcctgctgaatatgttcttggcaattattaatgatacctactctgaagtgaaagctgattattcaataggcagaaggccggattttgaacttggtaaaatgattaaacagagttacaaaaatgttctcgagaaattcagactgaagaaagctcgaaaagatgaagacaagaaaactagcaaaggcagcggagatttggctgaacaagccagaagagaaggctttgacgaaaatgagattcaaaaggcagagcagatgaaaaaatggaaagagaggcttgagaaaaagtattattccacagaaattcaagatgactaccagcctgtcactcaagaagaatttcgagaactctttttatatgctgtggagctggagaaggattacactacatncatttggagctaanatcagtgatgagaaaggtttcagctctctagtatga

SEQ ID NO: 32410 - DNA, 1187 bp, Macaca Mulatta
  misc_feature (1)...(1187): n = A,T,C or G
agtgcatcagagaatttagatgagctgtcttcctccagtagctggttacttaaccagaagcacagtaagaaaaagagaaaagacaggacaagactgaaatcttcatccttgactttcatgagtacatcagcccgaacaaggccacttcagagtttccacaaacgaaaactctacagattgagccctactttttactggactccacagnnnnnnnnnnnnnnnnnnnnnnnnnnnnnnnnnnnnnnnnnnnnnnnnnnnnnnnnnnnnnnnnnnnnnnnnnnnnnnnnnnnnnnnnnnnnnnnnnnnnnnnnnnnnnnnnnnnnnnnnnnnnnnnnnnnnnnnnnnnnnnnnnnnnnnnnnnnnnnnnnnncagatgtgcctcttcattttcactttgaaacactgttaaaaaggactgaaataaaaggcaatcttgctgaaaataaatttgtagatgaatatatcatatctccatcacctgnnnnnnnnnnnnnnnnnnnnnnnnnnnnnnnnnnnnnnnnnnnnnnnnnnnnnnnnnnnnnnnnnnnnnnnnnnnnnnnnnnnnnnnnnnnnnnnnnnnnnnnnnnnnnnnnnnnnnnnnnnnnnnnnnnnnnnnnnnnnnnnnnnnnnnnnnnnnnnnnnnnnnnnnnnnnnnnnnnnnnnnnnnnnnnnnnnnnnnnnnnnnnnnnnnnnnnnnnnnnnnnnnnnnnnnnnnnnnnnnnnnnnnnnnnnnnnnnnnnnnnnnnnnnnnnnnnnnnnnnnnnnnnnnnnnnnnnnnnnnnnnnnnnnnnnnnnnnnnnnnnnnnnnnnnnnnnnnnnnnnnnnnnnnnnnnnnnnnnnnnnnnnnnnnnnnnnnnnnnnnnnnnnnnnnnnnnnnnnnnnnnnnnnnnnnnnnnnnnnnnnnnnnnnnnnnnnnnnnnnnnnnnnnnnnnnnnnnnnnnnnnnnnnnnnnnnnnnnnnnnnnnnnnnnnnnnnnnnnnnnnnnnnnnnnnnnnnnnnnnnnnnnnnnnnnnnnnnnagcttacagtaaaaatgtgaaaggacatgacttgcttttgaaagaataccctaataactttagtagcagtcagcactgtgctgctgcaagtcctcctgagcttccttcagagaaccaggatctgtgtgcatatggcttaccttctttaaatcaaagccaagaaaccaag

SEQ ID NO: 32411 - DNA, 92 bp, Macaca Mulatta
cagagccggggttctcttctttctgacgaccaaccagtgtttcagcagcgtgtcggccgtggaactctttgtggtagagaagaagctcttca

SEQ ID NO: 32412 - DNA, 336 bp, Macaca Mulatta
  misc_feature (1)...(336): n = A,T,C or G
aggtttattgatcatctaatggtgatgtttggtgaaacaccctcttgggacctagagcaaaaatattgccctgataatttggaggtctactttgaagatgaggacagggcagaactataccgggtgcctgccaagagcaccttgctgcaggttctacagcaccannnggtactttgtaaaagccctgacaccagcatttttggtctgtgtaggatcttctcctttttgcaagaattatctccgggggagaaaggtgtaccagatacgatgaatgagccagggcccctggatctcctccctcaccctcctctgctgggaacctagcacacctgaatc

SEQ ID NO: 32413 - DNA, 631 bp, Macaca Mulatta
acagcaggactggctcaccacacacaacactgtcccctgtcggctctacaacccggcagggggaagctaccaccctcgcgagatggtcaagctcaaatgacactacgcctgcacctcctactaccacatcaacctatgttgatgtatctacatcctaccatagcagcccgagctcaactccaacaacccacttttctgtcagctccacaagcttgggccgtagtgaggaatcaacagtagtgcacagcagcccagatgcaactggaacaaaaccctcacccacccattccacagcctcaggtcgtggagaatctacaatctcacccatcagtccaggcgcagctgaaataacaatgttacctggcagtaccacaacaacaggcctcagagagacatctaccaccttccacagtagccccagatcaccgaccacaacactctcacctgccagcgtgacaaacctaggcgtcagtgaagaatccaccacatcccatagccaaccgggctcaactcactcaacagtgtctccggccagcaccaccacgccaggcctcagtgaggaatctaccaccatctacagcagcccaggctcaagtgaaaacacagtgtcccctggcagcagcacgacctc

SEQ ID NO: 32414 - DNA, 679 bp, Macaca Mulatta
aacaccctagcagttcctattgtatatacttgggagccactgagaacagaggacggccagtgagtccaagcctcattcctccttctgcctccccggagccacaggatggatttaggagccactgctcagtgcacgtctcccttccaactgcatcaactaactcttgggggtgttctgctcaccacaccgtccttcggttcttaccgagtcacagactcgcctgcctactacatttcccgggttctctctactcagatcccttccagaaactttatatgggtagaggaagccagggcggcaaatgcgagaccaaatatcattttgccaatgagtctgaggctgtggtctctggatccagtcactacatttttatagaataattaaaccagatgataacggtgttttaaaaaaataataataaaacttgtttccttttgggccacccctaggaagggctgatttcaaaatctgggggcgagcaacctcaaggaacacaatttccctccccatcaacaagaggattttaacagcaaagaagagaggcagcacctcccattggcagaatgaccgctgagccaggctgggtttgggtttcttctcttctgattctgctgctcactgtcatagccttttgtgtatagtgatgtgtctgtatctttaatgtaaatagagagatgat

SEQ ID NO: 32415 - DNA, 898 bp, Macaca Mulatta
gctggctttcggaaggctcttcccacccaagtcatgaggaagggagaagaggattgctgaggagacacgaggaagcttgtgctggagagagatgatctccaccgccgtggcctacccgcatcaacccttcacaatgctggtgctagctctggtggccacgaccaacaagcactaatataagggagaggcggccgagtggcgtgccctgtggaccaatcagagagtagggggccatcacgccacctgaggccagccaatgaaaacgcggcaagctctataaaagcgggcaatcagctgaggtctggtcagaggacacagcagagacaacagtttcaaattcatggcccgaaccaagcagactgcgcgcaagtcgacgggtggcaaggcgccacgcaagcagctggccactaaggtggctcgcaagagcgcacccgccactggcggcgtgaagaagccgcaccgctaccgacctggcacagtggcgcttcgcgagatccgccgctaccagaagtccactgagctgctaatccgcaagctgcccttccagcggctggtgcgcgagatcgctcaggactttaagaccgacctgcgcttccagagctcggccgtgatggcgctgcaggaggcgtgcgagtcttacctggttgggctgttcgaggacaccaacctgtgtgccatccacgccaaacgggtcaccatcatgcccaaggacatccagctggcacgccgtatccgtggggagcgggcctaggagggccatctcgccacctgagaggttgcgcaacgttcaccccaaaggctcttttaagagccacccacctggtcggaagagttgctgtagcaagccaggctcttgggttttgggggttccttccgctggccggtgctggcttaccta

SEQ ID NO: 32416 - DNA, 1697 bp, Macaca Mulatta
  misc_feature (1)...(1697): n = A,T,C or G
tgagttacttcctgtcttactgcaaagctcatggcggcgcgctgctcaccggctaccaggccctgcgcgccgagggctttctatgcgacgtgacactggagaccgagggcagcgaattcccggcgcacaggtcgctcctggcgtgctccagtgactacttcagggccctgttnnnnnnnnnnnnnnnnnnnnnnnnnnnnnnnnnnnnnnnnnnnnnnnnnnnnnnnnnnnnnnnnnnnnnnnnnnnnnnnnnnnnnnnnnnnnnnnnnnnnnnnnnnnnnnnnnnnnnnnnnnnnnnnnnnnnnnnnnnnnnnnnnnnnnnnnnnnnnnnnnnnnnnnnnnnnnnnnnnnnnnnnnnnnnnnnnnnnnnnnnnnnnnnnnnnnnnnnnnnnnnnnnnnnnnnnnnnnnnnnnnnnnnnnnnnnnnnnnnnnnnnnnnnnnnnnnnnnnnnnnnnnnnnnnnnnnnnnnnnnnnnnnnnnnnnnnnnnnnnnnnnnnnnnnnnnnnnnnnnnnnnnnnnnnnnnnnnnnnnnnnnnnnnnnnnnnnnnnnnnnnnnnnnnnnnnnnnnnnnnnnnnnnnnnnnnnnnnnnnnnnnnnnnnnnnnnnnnnnnnnnnnnnnnnnnnnnnnnnnnnnnnnnnnnnnnnnnnnnnnnnnnnnnnnnnnnnnnnnnnnnnnnnnnnnnnnnnnnnnnnnnnnnnnnnnnnnnnnnnnnnnnnnnnnnnnnnnnnnnnnnnnnnnnnnnnnnnnnnnnnnnnnnnnnnnnnnnnnnnnnnnnnnnnnnnnnnnnnnnnnnnnnnnnnnnnnnnnnnnnnnnnnnnnnnnnnnnnnnnnnnnnnnnnnnnnnnnnnnnnnnnnnnnnnnnnnnnnnnnnnnnnnnnnnnnnnnnnnnnnnnnnnnnnnnnnnnnnnnnnnnnnnnnnnnnnnnnnnnnnnnnnnnnnnnnnnnnnnnnnnnnnnnnnnnnnnnnnnnnnnnnnnnnnnnnnnnnnnnnnnnnnnnnnnnnnnnnnnnnnnnnnnnnnnnnnnnnnnnnnnnnnnnnnnnnnnnnnnnnnnnnnnnnnnnnnnnnnnnnnnnnnnnnnnnnnnnnnnnnnnnnnnnnnnnnnnnnnnnnnnnnnnnnnnnnnnnnnnnnnnnnnnnnnnnnnnnnnnnnnnnnnnnnnnnnnnnnnnnnnnnnnnnnnnnnnnnnnnnnnnnnnnnnnnnnnnnnncttggatggaggtgcccgccatgcaggaagcgcgggcccacttctggtgcggtgcggtgggagggaggctcctggccgtcgggggcctgggcgcgggcggtgaggccctggcctcagtggagatgtacgacctgcgtcgggaccgctggacggcagctggggcactaccgcgggctctgcacggtcacgcgggggccgtcggggaccgcggtgttgtgtacatctcggggggcaaggcagggagaggcgagggcggagcgagcagcctccgggacttatacgtcctgggccctgaggagcaggcttggagtaagagggcacccatggggaccgcacgtttcgggcaccacatggcagtgctgcgcggcgctgtgtttgcttttctggggcgatacgagcccttctctgagatcgagcgctacgatcccggcgccgaccagtggactcggttgcggccgctaccctacgaccgcttctgctatgggctgg

SEQ ID NO: 32417 - DNA, 2369 bp, Macaca Mulatta
  misc_feature (1)...(2369): n = A,T,C or G
atgcagcactacggggtgaacggctactcgctgcacgccatgaactcactcagcgccatgtacaacctgcaccagcaggcagcccagcaggcccagcacgcccccgactaccggccttcggtgcatgcgcttacattggctgagcgcctggctgnnnnnnnnnnnnnnnnnnnnnnnnnnnnnnnnnnnnnnnnnnnnnnnnnnnnnnnnnnnnnnnnnnnnnnnnnnnnnnnnnnnnnnnnnnnnnnnnnnnnnnnnnnnnnnnnnnnnnnnnnnnnnnnnnnnnnnnnnnnnnnnnnnnnnnnnnnnnnnnnnnnnnnnnnnnnnnnnnnnnnnnnnnnnnnnnnnnnnnnnnnnnnnnnnnnnnnnnnnnnnnnnnnnnnnnnnnnnnnnnnnnnnnnnnnnnnnnnnnnnnnnnnnnnnnnnnnnnnnnnnnnnnnnnnnnnnnnnnnnnnnnnnnnnnnnnnnnnnnnnnnnnnnnnnnnnnnnnnnnnnnnnnnnnnnnnnnnnnnnnnnnnnnnnnnnnnnnnnnnnnnnnnnnnnnnnnnnnnnnnnnnnnnnnnnnnnnnnnnnnnnnnnnnnnnnnnnnnnnnnnnnnnnnnnnnnnnnnnnnnnnnnnnnnnnnnnnnnnnnnnnnnnnnnnnnnnnnnnnnnnnnnnnnnnnnnnnnnnnnnnnnnnnnnnnnnnnnnnnnnnngcagattccccaggcagcctgaccatcactcctgcggccccagggggtggcctcctgggcccctcccactcctattcctcgtccccgctgagcctcttccgtctgcaggagcaattccgccagcacatggcggccaccaacaacctggtgcactactcatccttcgaagtagggggtccagcccctgctgctgccgcggcggctgctgctgtgccctacctgggcgtcaacatggccccgctgggctcactgcactgccagtcctactaccagtccctgtcagcagccgctgctgcccaccagggtggtgtgggggtcccctctgctgcctgcacccccagcaggnnnnnnnnnnnnnnnnnnnnnnnnnnnnnnnnnnnnnnnnnnnnnnnnnnnnnnnnnnnnnnnnnnnnnnnnnnnnnnnnnnnnnnnnnnnnnnnnnnnnnnnnnnnnnnnnnnnnnnnnnnnnnnnnnnnnnnnnnnnnnnnnnnnnnnnnnnnnnnnnnnnnnnnnnnnnnnnnnnnnnnnnnnnnnnnnnnnnnnnnnnnnnnnnnnnnnnnnnnnnnnnnnnnnnnnnnnnnnnnnnnnnnnnnnnnnnnnnnnnnnnnnnnnnnnnnnnnnnnnnnnnnnnnnnnnnnnnnnnnnnnnnnnnnnnnnnnnnnnnnnnnnnnnnnnnnnnnnnnnnnnnnnnnnnnnnnnnnnnnnnnnnnnnnnnnnnnnnnnnnnnnnnnnnnnnnnnnnnnnnnnnnnnnnnnnnnnntcctcacttttctccctccccttctgccccttagtaagtctatgtgtggaatgtgagatataaatataaatgtataaagctatattttcaggcacctgcctgccccaagccccctgccccactcccatctcttcttccttgccacccctccctgcagacctccgcggcttactcnnnnnnnnnnnnnnnnnnnnnnnnnnnnnnnnnnnnnnnnnnnnnnnnnnnnnnnnnnnnnnnnnnngtcctggtccctgcccccgtctcatcccagcctctgtattctccacccttgatctttctccctgtctctcctgctgcccctggtttcttcctttggtgctggctgtgttggtatcgttagttcttgagctatattttgtttggggttgtggctgggtttggttttagtaattttgctgcttcccgttgctctccttctattccctcccttctgccctgcctgcctgtctcctccctgcacctgcggcctctctgggaagctgttcctttccatgccaaatagaagcaacaaggctctagctggagaccctggggatctggaactgcaggcaggaggtagcactggctcccactcccacccttgcccagcctggcatctagaaggtgtcacgaattactttctcttctgtcttcgcagttttgatgtcctcatccccaagatcaaagaggcagtagtcaggctgggaaggcaatagaatggccagcattcctgcctgtaagccctccaaaagacagaagcccggtgtcagagttcagccaggactgacaacagggctctagagctctctttggtgaaactcccctggttggcgagcggcagcaggggaaaaagtgcttccaaaaacagcaggactggtgctctcctccacaaacccagcctccacgttaagca

SEQ ID NO: 32418 - DNA, 108 bp, Macaca Mulatta
ccaggtttacatcgacatcagcaatatccctgcaactgaagatgagtttctcctctgttactacagcaacagtctgcgttctgtggtggggataagcagacccttcca

SEQ ID NO: 32419 - DNA, 893 bp, Macaca Mulatta
  misc_feature (1)...(893): n = A,T,C or G
ggctgggggctgaatgaatcctgcttatctgtgaaatgcaattaacacatcagctggacctatttcctgaatgcagggtaacccttctgttatttaaagatgtaaaaaatgcgggagacttgagaagaaaggccatggaaggcaccatcgatggatcactgataaatcctacagtgattgtcgatccatttcagatacttgtggcagcaaacaaagcagttcacctctacaaactgggaaaaatgaagacaagaactctatctactgaaattattttcaacctttccccaaataacaatatttcagaggctttgaaaaaatttggtatctcagcaaatgacacttcaattctaattgtttacattgaagagggagaaaaacaaataaatcaagaatacctaatatctcaagtgggaggtcatcaagtttcactgaaaagtcttcctgagataacaaatattacccgaagtccaaaagatatataaactctcttcacaagaaaaaagtattggggacattatttggatgggtaatcatttgttagaaatgtcaaacgaaaaatgttttttgtgaaaattatcagaaaatattttaaccaaacctcacgcatttaccggaataaaataaatgcaacagacacagcagaccgcaatcgtatctaacgaagatattggcaaatatacgcggatatataatctacaatctcaagcgccatagacatgtatcatctgagaaaatataatacataggaaattgacagcagttatacacgaaagtaaacaaacacaaataaacacacctatgggacagactatatagtgcgtgagtatgtccaaatattatgactgttgtaanntgaatgataaaatatgatcggagtgtatgtttacacg

SEQ ID NO: 32420 - DNA, 668 bp, Macaca Mulatta
ggggagggctcggcttccacccgcctcggctgcagccttctcctcctcaggaccctcccaagatgttacctggtttacgagaggttctgggaccaccaacacaccaactaccgcctttccagaccacccacgccagctaccctctgtagtttccgcggccgaaggagaagaaaaaccctcttcacctagcactttgcgtcccccaaagacagtaccaccgcctacctgtcaccctgctgtctccggcttccctgccaccgcctcccgcagcagcctgccaactgcagcgcaacaaccaaccctttcattgggtgagagcacgcgctcaacaacagcctccctgattggcttcagtatgtccgcggccctgccccctgtgcggtgtctaaaggttccgtcccccagcaaagagaacatgttctcttccccgccttttctcttctacagtatctgttacctcagtcagattgaagatgcacatatgtggggaagaaatcgacttccagcctctttcatgtatcccttccgaattagaactctacccagtaccgaacgtaagcgcttctcgctttctgccggggaatccagtgaaacctcgcttccgtggtcccgttccaattaagtccgaaggcaatgatttaattggccgggctggattaatggaccca

SEQ ID NO: 32421 - DNA, 640 bp, Macaca Mulatta
aactctatctttttcatatccatgattggcttctgcagatccacatcttcatttgaatattgaagaatcaaaccaagagtttatggtgaaaagtgaagaactctacgactccctcatgaattgccactggcagcctctggacacagttcactccgaaattccagatgagaccccgaagtgaagcgaggtgttcattaaactctgcaattatcatactaattttgtcttcttttgttttggaaaaaagtagttctcccaggaaggtactggattctgtatataaaaaccaacttccagggcttatgtgtgattgacatgagagaacattaatgtaaataaactttgccagcacatctgttcctggaagtgttatattaagtaagtgccggaagagctcacatggtgatcatggtagagcaagctgtgccataaaacccttggaaacaggtttaatatgaggtgggcttgagctgaactgatggtggcattggctactctgatatgatttgctgctttcgctaacttcaaactctcatggagagaaattgtatccaaagacaatgcatggtttcttgcttgtgtcttgtctagaaaatgttagttagaactggatgtttgatctccgtttcctggccccatg

SEQ ID NO: 32422 - DNA, 557 bp, Macaca Mulatta
gaacagggacagcggggacatctcagggccaggggaccatggaattagccaccagttgggacctggacataggtaagaagggccccaggaaatggagacatgggcctgctggaagcccaaggatgagaatgggacccagggaagacctggtgccgccgcaggccatccgacacctgactcccatcctcaggggaatgaggagtggttcctggtgggccgagtgctggaccgcgtctgcttcctggccatgctctcgctcttcgtctgtggcacggctggcatcttcctcatggcccactacaaccgggtgccagccctgccattccctggagatccacgctcctacctgccctcaccagactgagccaaccaaccaccgcggggcatgtgggagtcacacacgtgggtcacactgagtcttatcagccacgttctcctactgaggtcctaagtgtactctttgggaagtgcccttcagggctgtgtgagccaaacagccctaagaaaagctggggaaagagtctgagctggagtccaggagtggttgggggtgggct

SEQ ID NO: 32423 - DNA, 674 bp, Macaca Mulatta
tggcgcccccgccgcctagcgcccacgggcatggacaagtgcatcccaaaacattccggattcccccatggccaacagcggacctctcgggtgcaccatttgccacgaacgtttggaggacacgcatttcgttcagtgcccgtccgtccccagccacaaattttgcttcccttgctctagagagagtatcaaggcccagggggccaccggcgaggtgtattgccccagcggtgagagatgccccctagtcgggtcgaatgtaccttgggccttcatgcaaggcgaaatcgcgactatcttagctggggatgttaaagtgaaaaaggaaagagacccttgaaccactgggcagccacctcctttgccctagaccagctcctctccaatcctgagggcccctcccccaacccacctcgaccctcccttccctcacccccaaggtgtagaattgtgaatataacaaaactgcaaaaagttagtcttatgtatagacattattttcgtcgtatgtttctatattttgaaacaggtatgtaacttcttcatttgaaggataagctggtttgtgttaagcagtataatatcggttgggtcatttgcatcatattcgttagcatttatttggtggcagaatgtttgcctaggtacagacttaatagcccttagcaacgact

SEQ ID NO: 32424 - DNA, 3658 bp, Macaca Mulatta
  misc_feature (1)...(3658): n = A,T,C or G
actccacaaactgatcagccccttgcaatgtctcaaccacgtgtggaaactgcaccannnnnnnnnnnnnnnnnnnnnnnnnnnnnnnnnnnnnnnnnnnnnnatagcagactgcctcatcccttcccattccaccctctccagccctggaaacctcaccctctagagtccttcctgggcaaactggcctgtgtannnnnnnnnnnnnnnnnnnnnnnnnnnnnnnnnnnnnnnnnnnnnnnnnnnnnnnnnnnnnnnnnnnnnnnnnnnnnnnnnnnnnnnnnnnnnnnnnnnnnnnnnnnnnnnnnnnnnnnnnnnnnnnnnnnnnnnnnnnnnnnnnnnnnnnnnnnnnnnnnnnnnnnnnnnnnnnnnnnnnnnnnnnnnnnnnnnnnnnnnnnnnnnnnnnnnnnnnnnnnnnnnnnnnnnnnnnnnnnnnnnnnnnnnnnnnnnnnnnnnnnnnnnnnnnnnnnnnnnnnnnnnnnnnnnnnnnnnnnnnnnnnnnnnnnnnnnnnnnnnnnnnnnnnnnnnnnnnnnnnnnnnnnnnnnnnnnnnnnnnnnnnnnnnnnnnnnnnnnnnnnnnnnnnnnnnnnnnnnnnnnnnnnnnnnnnnnnnnnnnnnnnnnnnnnnnnnnnnnnnnnnnnnnnnnnnnnnnnnnnnnnnnnnnnnnnnnnnnnnnnnnnnnnnnnnnnnnnnnnnnnnnnnnnnnnnnnnnnnnnnnnnnnnnnnnnnnnnnnnnnnnnnnnnnnnnnnnnnnnnnnnnnnnnnnnnnnnnnnnnnnnnnnnnnnnnnnnnnnnnnnnnnnnnnnnnnnnnnnnnnnnnnnnnnnnnnnnnnnnnnnnnnnnnnnnnnnnnnnnnnnnnnnnnnnnnnnnnnnnnnnnnnnnnnnnnnnnnnnnnnnnnnnnnnnnnnnnnnnnnnnnnnnnnnnnnnnnnnnnnnnnnnnnnnnnnnnnnnnnnnnnnnnnnnnnnnnnnnnnnnnnnnnnnnnnnnnnnnnnnnnnnnnnnnnnnnnnnnnnnnnnnnnnnnnnnnnnnnnnnnnnnnnnnnnnnnnnnnnnnnnnnnnnnnnnnnnnnnnnnnnnnnnnnnnnnnnnnnnnnnnnnnnnnnnnnnnnnnnnnnnnnnnnnnnnnnnnnnnnnnnnnnnnnnnnnnnnnnnnnnnnnnnnnnnnnnnnnnnnnnnnnnnnnnnnnnnnnnnnnnnnnnnnnnnnnnnnnnnnnnnnnnnnnnnnnnnnnnnnnnnnnnnnnnnnnnnnnnnnnnnnnnnnnnnnnnnnnnnnnnnnnnnnnnnnnnnnnnnnnnnnnnnnnnnnnnnnnnnnnnnnnnnnnnnnnnnnnnnnnnnnnnnnnnnnnnnnnnnnnnnnnnnnnnnnnnnnnnnnnnnnnnnnnnnnnnnnnnnnnnnnnnnnnnnnnnnnnnnnnnnnnnnnnnnnnnnnnnnnnnnnnnnnnnnnnnnnnnnnnnnnnnnnnnnnnnnnnnnnnnnnnnnnnnnnnnnnnnnnnnnnnnnnnnnnnnnnnnnnnnnnnngagcaaggaggagtctgggatgtgggaacccttacgtctgtcttccctggagccagcccctgccagaaaccccagctcaccagagcggaaagcaaccttcccggagcaggaactgcagcagctggaaatannnnnnnnnnnnnnnnnnnnnnnnnnnnnnnnnnnnnnnnnnnnnnnnnnnnnnnnnnnnnnnnnnnnnnnnnnnnnnnnnnnnnnnnnnnnnnnnnnnnnnnnnnnnnnnnnnnnnnnnnnnnnnnnnnnnnnnnnnnnnnnnnnnnnnnnnnnnnnnnnnnnnnnnnnnnnnnnnnnnnnnnnnnnnnnnnnnnnnnnnnnnnnnnnnnnnnnnnnnnnnnnnnnnnnnnnnnnnnnnnnnnnnnnnnnnnnnnnnnnnnnnnnnnnnnnnnnnnnnnnnnnnnnnnnnnnnnnnnnnnnnnnnnnnnnnnnnnnnnnnnnnnnnnnnnnnnnnnnnnnnnnnnnnnnnnnnnnnnnnnnnnnnnnnnnnnnnnnnnnnnnnnnnnnnnnnnnnnnnnnnnnnnnnnnnnnnnnnnnnnnnnnnnnnnnnnnnnnnnnnnnnnnnnnnnnnnnnnnnnnnnnnnnnnnnnnnnnnnnnnnnnnnnnnnnnnnnnnnnnnnnnnnnnnnnnnnnnnnnnnnnnnnnnnnnnnnnnnnnnnnnnnnnnnnnnnnnnnnnnnnnnnnnnnnnnnnnnnnnnnnnnnnnnnnnnnnnnnnnnnnnnnnnnnnnnnnnnnnnnnnnnnnnnnnnnnnnnnnnnnnnnnnnnnnnnnnnnnnnnnnnnnnnnnnnnnnnnnnnnnnnnnnnnnnnnnnnnnnnnnnnnnnnnnnnnnnnnnnnnnnnnnnnnnnnnnnnnnnnnnnnnnnnnnnnnnnnnnnnnnnnnnnnnnnnnnnnnnnnnnnnnnnnnnnnnnnnnnnnnnnnnnnnnnnnnnnnnnnnnnnnnnnnnnnnnnnnnnnnnnnnnnnnnnnnnnnnnnnnnnnnnnnnnnnnnnnnnnnnnnnnnnnnnnnnnnnnnnnnnnnnnnnnnnnnnnnnnnnnnnnnnnnnnnnnnnnnnnnnnnnnnnnnnnnnnnnnnnnnnnnnnnnnnnnnnnnnnnnnnnnnnnnnnnnnnnnnnnnnnnnnnnnnnnnnnnnnnnnnnnnnnnnnnnnnnnnnnnnnnnnnnnnnnnnnnnnnnnnnnnnnnnnnnnnnnnnnnnnnnnnnnnnnnnnnnnnnnnnnnnnnnnnnnnnnnnnnnnnnnnnnnnnnnnnnnnnnnnnnnnnnnnnnnnnnnnnnnnnnnnnnnnnnnnnnnnnnnnnnnnnnnnnnnnnnnnnnnnnnnnnnnnnnnnnnnnnnnnnnnnnnnnnnnnnnnnnnnnnnnnnnnnnnnnnnnnnnnnnnnnnnnnnnnnnnnnnnnnnnnnnnnnnnnnnnnnnnnnnnnnnnnnnnnnnnnnnnnnnnnnnnnnnnnnnnnnnnnnnnnnnnnnnnnnnnnnnnnnnnnnnnnnnnnnnnnnnnnnnnnnnnnnnnnnnnnnnnnnnnnnnnnnngacgctccggcaccccagccccactgtcagcgtccagcgtgcgggccccccagagcacagctcacacaaacactcaccctgccctgccccgggccggagggtactgctgacagcactttgcactctgatgacctcaaagcactttcatggctgccctctggcagggcaggtcagtgactctgtaggagcatagcagtccaggagatggggtgaagggacagtcttgagctgtctacatgcatgtgactcctcaaacctcctccagatttctctaatagcaaccacttccccattgccccagcttagcctcttctcccaggggagctactcaggactcatgtagcattaagtcagctgtgaattgtcaggggggtgtcagctagcctcaacctcctggggcgggggacgccgagactccttgggagaagctcatccccacgtcttgnnnnacagcctttgtccagctgtccacagcgagccagactgctcccggggagacagccccggcccccagcacataaagaactgcagcgttggtactgcagtgtgggttgtagagaactctttgtaagcaataaagtttggggtgatgacagatgtt

SEQ ID NO: 32425 - DNA, 648 bp, Macaca Mulatta
  misc_feature (1)...(648): n = A,T,C or G
gggggagggaagaggagaggagtggagtggaggagatgcggcggcggcgctgacaatgagttttcttggaggcttttttggtgcagatttgtgagatcgatattgttcttaatgatggggaaaccaggaaaatggcagaaatgaaaactgaagatggcaaagtagaaaaacactatctcttctatgatggagaatctgtttcaggaaaggtaaacctagcctttaagcaacctgggagagaggctagagcaccaaggaattagaacttgaatttgtaggtcaaattgagcttttcaatgacaagagtaatactcatgaatttgtaaacctagtgaaagaactagccttacctggagaactgactcagagcagaagttatgattttgaatttatgcaagttgaaaagccatatgaatcttacatcggtgccaatgtccgcttgaggtattttcttaaagtgacaatagtgagaagactgacagatttggtaaaagaatatgatcttattgttcaccagcttgccacctatcctgatgttacaactctattagatggaagtgggcattgaagatgtctactatagaatttgatatataatcaagtatctttaaggagtgatgttgaaaattactctatagtagatanata

SEQ ID NO: 32426 - DNA, 2620 bp, Macaca Mulatta
  misc_feature (1)...(2620): n = A,T,C or G
naggatcaaccactatttataatacccaactctctgaaataactgccgtggaagaaattagacagaacattggattttgtccacagttcaattttcaatttgacttcctcactgtgagagaaaacctcagggtatttgctaaaataaaagggattcagccaaaggaagtggaacaagaggtnnnnnnnnnnnnnnnnnnnnnnnnnnnnnnnnnnnnnnnnnnnnnnnnnnnnnnnnnnnnnnnnnnnnnnnnnnnnnnnnnnnnnnnnnnnnnnnnnnnnnnnnnnnnnnnnnnnnnnnnnnnnnnnnnnnnnnnnnnnnnnnnnnnnnnnnnnnnnnnnnnnnnnnnnnnnnnnnnnnnnnnnnnnnnnnnnnnnnnnnnnnnnnnnnnnnnnnnnnnnnnnnnnnnnnnnnnnnnnnnnnnnnnnnnnnnnnnnnnnnnnnnnnnnnnnnnnnnnnnnnnnnnnnnnnnnnnnnnnnnnnnnnnnnnnnnnnnnnnnnnnnnnnnnnnnnnnnnnnnnnnnnnnnnnnnnnnnnnnnnnnnnnnnnnnnnnnnnnnnnnnnnnnnnnnnnnnnnnnnnnnnnnnnnnnnnnnnnnnnnnnnnnnnnnnnnnnnnnnnnnnnnnnnnnnnnnnnnnnnnnnnnnnnnnnnnnnnnnnnnnnnnnnnnnnnnnnnnnnnnnnnnnnnnnnnnnnnnnnnnnnnnnnnnnnnnnnnnnnnnnnnnnnnnnnnnnnnnnnnnnnnnnnnnnnnnnnnnnnnnnnnnnnnnnnnnnnnnnnnnnnnnnnnnnnnnnnnnnnnnnnnnnnnnnnnnnnnnnnnnnnnnnnnnnnnnnnnnnnnnnnnnnnnnnnnnnnnnnnnnnnnnnnnnnnnnnnnnnnnnnnnnnnnnnnnnnnnnnnnnnnnnnnnnnnnnnnnnnnnnnnnnnnnnnnnnnnnnnnnnnnnnnnnnnnnnnnnnnnnnnnnnnnnnnnnnnnnnnnnnnnnnnnnnnnnnnnnnnnnnnnnnnnnnnnnnnnnnnnnnnnnnnnnnnnnnnnnnnnnnnnnnnnnnnnnnnnnnnnnnnnnnnnnnnnnnnnnnnnnnnnnnnnnnnnnnnnnnnnnnnnnnnnnnnnnnnnnnnnnnnnnnnnnnnnnnnnnnnnnnnnnnnnnnnnnnnnnnnnnnnnnnnnnnnnnnnnnnnnnnnnnnnnnnnnnnnnnnnnnnnnnnnnnnnnnnnnnnnnnnnnnnnnnnnnnnnnnnnnnnnnnnnnnnnnnnnnnnnnnnnnnnnnnnnnnnnnnnnnnnnnnnnnnnnnnnnnnnnnnnnnnnnnnnnnnnnnnnnnnnnnnnnnnnnnnnnnnnnnnnnnnnnnnnnnnnnnnnnnnnnnnnnnnnnnnnnnnnnnnnnnnnnnnnnnnnnnnnnnnnnnnnnnnnnnnnnnnnnnnnnnnnnnnnnnnnnnnnnnnnnnnnnnnnnnnnnnnnnnnnnnnnnnnnnnnnnnnnnnnnnnnnnnnnnnnnnnnnnnnnnnnnnnnnnnnnnnnnnnnnnnnnnnnnnnnnnnnnnnnnnnnnnnnnnnnnnnnnnnnnnnnnnnnnnnnnnnnnnnnnnnnnnnnnnnnnnnnnnnnnnnnnnnnnnnnnnnnnnnnnnnnnnnnnnnnnnnnnnnnnnnnnnnnnnnnnnnnnnnnnnnnnnnnnnnnnnnnnnnnnnnnnnnnnnnnnnnnnnnnnnnnnnnnnnnnnnnnnnnnnnnnnnnnnnnnnnnnnnnnnnnnnnnnnnnnnnnnnnnnnnnnnnnnnnnnnnnnnnnnnnnnnnnnnnnnnnnnnnnnnnnnnnnnnnnnnnnnnnnnnnnnnnnnnnnnnnnnnnnnnnnnnnnnnnnnnnnnnnnnnnnnnnnnnnnnnnnnnnnnnnnnnnnnnnnnnnnnnnnnnnnnnnnnnnnnnnnnnnnnnnnnnnnnnnnnnnnnnnnnnnnnnnnnnnnnnnnnnnnnnnnnnnnnnnnnnnnnnnnnnnnnnnnnnnnnnnnnnnnnnnnnnnnnnnnnnnnnnnnnnnnnnnnnnnnnnnnnnnnnnnnnnnnnnnnnnnnnnnnnnnnnnnnnnnnnnnnnnnnnnnnnnnnnnnnnnnnnnnnnnnnnnnnnnngaatctctccacggagtagagaaactcatcccaatccagaagagcccgaagaagaagatgaagatgttcaagctgacagagtccaagcagcaaatacactcactactccaaacttgnnnnnnnnnnnnnnnnnnnnnnnnnnnnnnnnnnnnnnnnnnnnnnnnnnnnnnnnnnnnnnnnnnnnnnnnnnnnnnnnnnnnnnnnnnnnnnnnnnnnnnnnnnnnnnnnnnnnnnnnnnnnnnnnnnnnnnnnnnnnnnnnnnnnnnnnnnnnnnnnnnnnnnnnnnnnnnnnnnnnnnnnnnnnnnnnnnnnnnnnnnnnnnnnnnnnnnnggtggtgttacaagacagcagaacatcggtaaggcaacagcatgacaacagtctcaagttcttggggtactgccctcaggagaactcactgtggcccaagcttacaatgaaagagcacctggagttgtatgcagccgtgaaaggactgggcaaagaagatgatggtcttagtatttcac

SEQ ID NO: 32427 - DNA, 2009 bp, Macaca Mulatta
  misc_feature (1)...(2009): n = A,T,C or G
agagtttggattctgacaaacccatggaaccagtaaaaagatctcctcttcgccaggaaacaaacatggccaacttttcttaccgcttttccatatacaacttgaatgnnnnnnnnnnnnnnnnnnnnnnnnnnnnnnnnnnnnnnnnnnnnnnnnnnnnnnnnnnnnnnnnnnnnnnnnnnnnnnnnnnnnnnnnnnnnnnnnnnnnnnnnnnnnnnnnnnnnnnnnnnnnnnnnnnnnnnnnnnnnnnnnnnnnnnnnnnnnnnnnnnnnnnnnnnnnnnnnnnnnnnnnnnnnnnnnnnnnnnnnnnnnnnnnnnnnnnnnnnnnnnnnnnnnnnnnnnnnnnnnnnnnnnnnnnnnnnnnnnnnnnnnnnnnnnnnnnnnnnnnnnnnnnnnnnnnnnnnnnnnnnnnnnnnnnnnnnnnnnnnnnnnnnnnnnnnnnnnnnnnnnnnnnnnnnnnnnnnnnnnnnnnnnnnnnnnnnnnnnnnnnnnnnnnnnnnnnnnnnnnnnnnnnnnnnnnnnnnnnnnnnnnnnnnnnnnnnnnnnnnnnnnnnnnnnnnnnnnnnnnnnnnnnnnnnnnnnnnnnnnnnnnnnnnnnnnnnnnnnnnnnnnnnnnnnnnnnnnnnnnnnnnnnnnnnnnnnnnnnnnnnnnnnnnnnnnnnnnnnnnnnnnnnnnnnnnnnnnnnnnnnnnnnnnnnnnnnnnnnnnnnnnnnnnnnnnnnnnnnnnnnnnnnnnnnnnnnnnnnnnnnnnnnnnnnnnnnnnnnnnnnnnnnnnnnnnnnnnnnnnnnnnnnnnnnnnnnnnnnnnnnnnnnnnnnnnnnnnnnnnnnnnnnnnnnnnnnnnnnnnnnnnnnnnnnnnnnnnnnnnnnnnnnnnnnnnnnnnnnnnnnnnnnnnnnnnnnnnnnnnnnnnnnnnnnnnnnnnnnnnnnnnnnnnnnnnnnnnnnnnnnnnnnnnnnnnnnnnnnnnnnnnnnnnnnnnnnnnnnnnnnnnnnnnnnnnnnnnnnnnnnnnnnnnnnnnnnnnnnnnnnnnnnnnnnnnnnnnnnnnnnnnnnnnnnnnnnnnnnnnnnnnnnnnnnnnnnnnnnnnnnnnnnnnnnnnnnnnnnnnnnnnnnnnnnnnnnnnnnnnnnnnnnnnnnnnnnnnnnnnnnnnnnnnnnnnnnnnnnnnnnnnnnnnnnnnnnnnnnnnnnnnnnnnnnnnnnnnnnnnnnnnnnnnnnnnnnnnnnnnnnnnnnnnnnnnnnnnnnnnnnnnnnnnnnnnnnnnnnnnnnnnnnnnnnnnnnnnnnnnnnnnnagcatccacaaatccagaagaaatctcaatatatcaaatacctttgttgtgatgatgtgaggacactgcatcagtgggtcaatgggatccgcattgcaaaggcatnnnnnnnnnnnnnnnnnnnnnnnnnnnnnnnnnnnnnnnnnnnnnnnnnnnnnnnnnnnnnnnnnnnnnnnnnnnnnnnnnnnnnnnnnnnnnnnnnnnnnnnnnnnnnnnnnnnnnnnnnnnnnnnnnnnnnnnnnnnnnnnnnnnnnnnnnnnnnnnnnnnnnnnnnnnnnnnnnnnnnnnnnnnnnnnnnnnnnnnnnnnnnnnnnnnnnnnnnnnnnnnnnnnnnnnnnnnnnnnnnnnnnnnnnnnnnnnnnnnnnaggccagaatggagtctatgaatcggccctacacttcacttgtgccccctttatccccgcaacctaagatagtcaccccctacactgcttcacagccttnnnnnnnnnnnnnnnnnnnnnnnnnnnnnnnnnnnnnnnnnnnnnnnnnnnnnnnnnnnnnnnnnnnnnnnnnnnnnagccaatccgcaccttctgcaagctcagcagccccaatgttcgtcaagtacagcacaataacaccgcttcagaatgcctctcagcattcaaggggccctgtttaaactgccaacccccccagtgatggcaccacagtcagttgaagcctcagatcctgggtacccccccatgga

SEQ ID NO: 32428 - DNA, 799 bp, Macaca Mulatta
ttccaggaaccttcactcagaagaaatgctgtggcccttccctttaccaacagaaaatggaacacaagagaccacatagctgaacaaattacagcctccttacaagtgagaaaccttcgaggctacgtagttttcagccaaagaaaaataaccaacagcttctccacagtgtaaactgaaacagggaaaacatgaacatcacaaactgtaccacagaagccggcatggctgtgaggcccaagaccatcactgaaaagatgctcatttgcatgactctggtggtcatcaccaccctcaccacgttgctgaacttggcggtgatcatggctatctgcaccaccaagaagctccaccagcctgccaactacctaatctgttctctggccgtgacggacctcctggtagccgtgctcgtcatgcccctgagcatcatatacattgtcatggaccgctggaagcttggatacttcctctgtgaggtgtggctgagtgtggacatgacctgctgcacctgctccatcctccacctctgtgtcattgccctggacaggtactgggccatcaccaatgctattgaatacgccaggaagaggacggccaagagggcggcgctgatgatcctcaccgtctggaccatctccattttcatctccatgccccctctgttctggaggagccaccgccgcctaagccctccccctagccagtgcaccatccagcacgaccatgtgatctacaccatttactccacgctgggtgcatgttatatccccttgactttaatactgattctctatta

SEQ ID NO: 32429 - DNA, 317 bp, Macaca Mulatta
tggcaaaagtctccagccctacagaaactgagcggtgcatcgagtccctgattgctgttttccagaagtatgctggaaaggatggttataactacactctctccaagacggagttcctaagcttcataaatacagaactagctgccttcacaaagaaccagaaggatcccggtgtccttgaccgcataatgaagagactggataccaacagtgatggacagctagatttctcagaatttctgaatctgattggtggcctagctatggcttgccatgactccttcctcaaggctgtcccttcccagaagcggatctga

SEQ ID NO: 32430 - DNA, 947 bp, Macaca Mulatta
  misc_feature (1)...(947): n = A,T,C or G
nggaagtcattgcatttatattccatctcaatttttaaggtccttacgaaaatcgcactgtctttgagactttgaccattggctggcagctgctccgatctttccnccaaganaatgctgaagagatccctcagagcancctcagcgaattttaccctcgagactctgcgaagcattagctgccgcttctgcgctgctccacactcttgtgaaatactggttctatttctttatccttttgcgctccccaatccccaccttgtgttagagtttactgtgttaccctgtaattaaaaacaaagaataggtaacatattgtgccagtgttgcaacgttttaaactgctaacagaccttaaaataccccgttcagaaaacctgggtcctcagtgctatgtttaaagtagctgcagggatggagtggcgttttcctattgctgtatgtattgtacatagtggagtagttagttacctgataacggtctcattatttgggcctcttagaccttacctctcaactccctcaagagtaccagtctctgaagttataatgctttggtctctacattaggggcaagatccggtctaaaagaagtctcctttgagaagggccaagaggctctttcctgagtgtgtgctttcggtttgttggtgtgcctgtgttgctgggctgtgctgatgctcgaagcagatggttttgactgtctacttgctctttcctgtataatgaatagatgagtgaaagcagttttctttttctctttagtacatatgtattgggattcctgtgtcttacagctctccctctccaaataatacacagaatcctgcaacttttgcacagctggtgtctgtcaggtagcagtgaggccccttgtcttggtgatccttactggatttccaagcagaggagtcacgtgattaaaatcgctaatagagaagttgttt

SEQ ID NO: 32431 - DNA, 370 bp, Macaca Mulatta
atgaattggttctaccatccactgtatccaggcacagtggtctttcaggtaattgctgttgacaatgacactggcatgaatgcagaggttcgttatagcattgtaggagaaaacacaagagatctgtttgaaatcaacgaaacaacaggcaacataataatgaaggagaaatgtgatgttacagaccttggtttacacagagtgttggtcaaagctaatgacttaggacaacctgattctctcttcagtgttgtaactgtcaatctgtttgtgaatgagtcagtgaccaatgctacactgattaatgaactgctacacaaaagcactgaagcaccagtgaccccaaatactgagatagctgatgcatcct

SEQ ID NO: 32432 - DNA, 188 bp, Macaca Mulatta
  misc_feature (1)...(188): n = A,T,C or G
natttcgactgggtctgggatgacttgaataagtcgtcagccaccctgctgagctgtgacaaccgcaaggtcagcttccacatggagtacagctgtggcacagcggccatccggggcaccaaggagctgggggagggccagcacttctgggagatcaagatgacctcgcccgtctacggcaccgacat

SEQ ID NO: 32433 - DNA, 532 bp, Macaca Mulatta
  misc_feature (1)...(532): n = A,T,C or G
ggagcgccgcagggtcatggctgcccaggtggccttgcgtaggcagcaggaggcgcagctaaagaagcacctgatgaggagaggggaagcctctcccaaagctcccaaccacttcagaaagggaaccgctcgaccacaggtccccnnnnnnnnnnnnnnnnnnnnnnnnnnnnnnnnnnnnnnnnnnnnnnnnnnnnnnnnnnnnnnnnnnnnnnnnnnnnnnnnnnnnnnnnnnnnnnnnnnnnnnnnnnnnnnnnnnnnnnnnnnnnnnnnnnnnnnnnnnnnnnnnnnntggcccttgagttcctggacactggctgcctccaggcctctccatgccaccaccagtggtgtgccgcttgctgtaccaagaacctgctctctctctgcctcccttccctggnggctttgaccctggcacctccctccagctgcccactcatgggcccttcaccacctgcccaggatctcacccagtactgacagctcctctttctggagagccccaagggccccctagccaaccccgcac

SEQ ID NO: 32434 - DNA, 1386 bp, Macaca Mulatta
  misc_feature (1)...(1386): n = A,T,C or G
atgaccatgtttgaaaatgtcacccgggccctggtcagacagctaaaccctcgaggggacctgacacctcttgacagcctcatcgacttcaagcgcttccatcccttctgcctggtgctaaggaagaggaagagcacgctcttctggggggcccgttaagaccgcaccgactacactctgctggatgtgcttgagccgggcagctcaccttcannnnnnnnnnnnnnnnnnnnnnnnnnnnnnnnnnnnnnnnnnnnnnnnnnnnnnnnnnnnnnnnnnnnnnnnnnnnnnnnnnnnnnnnnnnnnnnnnnnnnnnnnnnnnnnnnnnnnnnnnnnnnnnnnnnnnnnnnnnnnnnnnnnnnnnnnnnnnnnnnnnnnnnnnnnnnnnnnnnnnnnnnnnnnnnnnnnnnnnnnnnnnnnnnnnnnnnnnnnnnnnnnnnnnnnnnnnnnnnnnnnnnnnnnnnnnnnnnnnnnnnnnnnnnnnnnnnnnnnnnnnnnnnnnnnnnnnnnnnnnnnnnnnnnnnnnnnnnnnnnnnnnnnnnnnnnnnnnnnnnnagggatctataaaccacaaggaggctatagccatccccaagggctgcgtcctggcctttcgagtgagacagctgcccctcacaggcaaagatgagtgggatattccacatatctgcaatgataacatgcaaaccttccctcctggagnnnnnnnnnnnnnnnnnnnnnnnnnnnnnnnnnnnnnnnnnnnnnnnnnnnnnnnnnnnnnnnnnnnnnnnnnnnnnnnnnnnnnnnnnnnnnnnnnnnnnnnnnnnnnnnnnnnnnnnnnnnnnnnnnnnnnnnnnnnnnnnnnnnnnnnnnnnnnnnnnnnnnnnnnnnnnnnnnnnnnnnnnnnnnnnnnnnnnnnnnnnnnnnnnnnnnnnnnnnnnnnnnnnnnnnnnnnnnnnnnnnnnnnnnnnnnnnnnnnnnnnnnnnnnnnnnnnnnnnnnnnnnnnnnnnnnnnnnnnnnnnnnnnnnnnnnnnnnnnnnnnnnnnnnnnnnnnnnnnnnnnnnnnnnnnnnnnnnnnnnnnnnnnnnnnnnnnnnnnnnnnnnnnnnnnnnnnnnnnnnnnnnnnngtggagagcacgatggaacagaacttcctgcaggataaagagggcgtttttcccctgcatcccgagctgctctcctcccttggggaggaggagctgaccctcacagaggccctatttgttttgagcggcctggaagtgcacatatcggggggcgaatatatgtgggacccagacaccctccctcgcctctgtgctctttatgctggcctctctctccttcagcagctgaccaaggcctcctaatttgccttttacgtctgcttcatgactccctaa

SEQ ID NO: 32435 - DNA, 2580 bp, Macaca Mulatta
  misc_feature (1)...(2580): n = A,T,C or G
gtggtggggtcatgatctatattgaccgaatagaagtggttaatatgttggctccttatgcagnnnnnnnnnnnnnnnnnnnnnnnnnnnnnnnnnnnnnnnnnnnnnnnnnnnnnnnnnnnnnnnnnnnnnnnnnnnnnnnnnnnnnnnnnnnnnnnnnnnnnnnnnnnnnnnnnnnnnnnnnnnnnatcaaatagatgaaaacctgaagcaagctctgcagaaagacttaaacctcatggccccaggtctcaccatacaggnnnnnnnnnnnnnnnnnnnnnnnnnnnnnnnnnnnnnnnnnnnnnnnnnnnnnnnnnnggaggctgagaagacaaaactccttatagctgcacagaaacaaaaggttgtggaaaaagaagctgagacagagaggaaaaaggcagttatannnnnnnnnnnnnnnnnnnnnnnnnnnnnnnnnnnnnnnnnnnnnnnnnnnnnnnnnnnnnnnnnnnnnnnnnnnnnnnnnnnnnnnnnnnnnnnnnnnnnnnnnnnnnnnnnnnnnnnnnnnnnnnnnnnnnnnnnnnnnnnnnnnnnnnnnnnnnnnnnnnnnnnngcacaaattgaccccgganatatctggagctcaaaaagtaccaggccattgcttccaacagtaagatctattttggcagcaacatccctaacatgttcgtggactcctcatgtgctttgaaatattcagatattaggactggaagagaaagctcactcccctctaaggaggctcttgaaccctctggagagaacctcatccaaaacaaagagagcacaggttgatgcaagaggtggaaatgttctccatatcaagatgtggcccaaggggttaagtgggaacaatggttatacggactcttcagatttacacggaacttacacttcatctgttctgcctctcctgcgatagtcctgggtagtccactgatgggaggatggagccagctgtctgacacacaaatggtcttttcagccacagtcttatcaagtaacctatatgtgttcctttctaaactgctactcatgagtgaggaaagtctgatgctaagatactgcctgcactggaatgttaaacactaaatatataacaagctgtgttttcctaagtggagatcagttgaataatgtttacattggtcccccagggaaatgtgtgctcagccattcaagagatgactgagaaggatatggtaagttcaagaagactcattgcacnnnnnnnnnnnnnnnnnnnnnnnnnnnnnnnnnnnnnnnnnnnnnnnnnnnnnnnnnnnnnnnnnnnnnnnnnnnnnnnnnnnnnnnnnnnnnnnnnnnnnnnnnnnnnnnnnnnnnnnnnnnnnnnnnnnnnnnnnnnnnnnnnnnnnnnnnnnnnnnnnncagggacttgagctatgatacccaaccagagattcctcatagagattcctaatcactagtttcttgtattcataagctcagagatacagagggcttggtttgaagtttggggtgagatgaaacctttgctctgaacgaaagctctggggccctgcattccctccattgggnnnnnnnnnnnnnnnnnnnnnnnnnnnnnnnnnnnnnnnnnnnnnnnnnnnnnnnnnnnnnnnnnnnnnnnnnnnnnnnnnnnnnnnnnnnnnnnnnnnnnnnnnnnnnnnnnnnnnnnnnnnnnnnnnnnnnnnnnnnnnnnnnnnnnnnnnnnnnnnnnnnnnnnnnnnnnnnnnnnnnnnnnnnnnnnnnnnnnnnnnnnnnnnnnnnnnnnnnnnnnnnnnnnnnnnnnnnnnnnnnnnnnnnnnnnnnnnnnnnnnnnnnnnnnnnnnnnnnnnnnnnnnnnnnnnnnnnnnnnnnnnnnnnnnnnnnnnnnnnnnnnnnnnnnnaaagtcacctggaaagcatccttggtcattgtctccttcccacctggcccagagatgcttaaatccaagttgtttctccagctctcacctcccccaggagatcaggattccactgacgtcctgggcagccagtgaatttaattttccatgagaaacaacagagttaacctgtggcaataggagacctacttcatgtggaccttttttttttccttcagtttaacttctctggagcagtgtgctgcgtagtttggcctgagtttgtgcagcttaagacacctcttgtgtacactatattgaagctccacagaaaagtcatgggaccacttctagaaacctttcagctgtcaggcctgtcagtctcatgacagcttgttggttgtgccaaacactttatttgggaaaggaaagcccagatttgagtgggtctttcccctgggccttatcctatagaggcatttgtaatatggagaaaataatttttcatttttgctcatttaattctataaattctctttatgaatgaattttgtgttctttagttctccttaaaagaacttttgaattataaaaataaattctttacctgtcgaattgttgcctcagatgattgtcgtggaaaatctggatcattgacctctgtgctttcattcctagagatgttttatagttacatgagcaa

SEQ ID NO: 32436 - DNA, 624 bp, Macaca Mulatta
ttcttccttttgtggttcccccacctttaaatgtgtgccgtaaaagtaaacgatgtattctgagagctgaatgaattgtgaagtagctctgaaatacaaggtggcatttaattcttgctcacgtgtctgttggcggagcaaaagactgtgttggggaacaggcttgcattttcagtgttaatctcactttcctctcatctcttttgcagagtaatcccagcggccctgcctggtcctggtggatcctggctgtgctgcccctggagcgcaaggctcagctggccatcctcggcatgacctcactcaaagagcggctccttgccatccgacggatattagtcatcatcacgcgtaagatgaatagtcggcaagagctggctaatgccagggagagaaataattgatttttctctctgtcaaggtttctggaagcccttgtacttttataaatgtcaggcatggacgaatagccgtccactcattgtgctttgtcaagtgcttgtggataaggttccaaaatgggacgcttgccaaacattgagtcctcaaaaatgacaattctgtgtctggtgggatctgatcttgtacaaggttagcctgaagtctgaatggagcccatagttg

SEQ ID NO: 32437 - DNA, 1232 bp, Macaca Mulatta
  misc_feature (1)...(1232): n = A,T,C or G
gggggttccttccacagctggtgcgcgtgcgcaagagtgcgccgaggttgtaccgtcgcaatatatgaaactcagagcgggctgtgagttgagggttcgcgagatcaggggttcctagttgcagcgtgattaccaacaccagctcccttcactgtccaagacagcgattccgcggctcctctcagaactggcgctnnnnnnnnnnnnnnnnnnnnnnnnnnnnnnnnnnnnnnnnnnnnnnnnnnnnnnnnnnnnnnnnnnnnnnnnnnnnnnnnnnnnnnnnnnnnnnnnnnnnnnnnnnnnnnnnnnnnnnnnnnnnnnnnnnnnnnnnnnnnnnnnnntgctcaggtatctgaatattggctttgtgtataaagttcctggagctttcctnnnnnnnnnnnnnnnnnnnnnnnnnnnnnnnnnnnnnnnnnnnnnnnnnnnnnnnnnnnnnnnnnnnnnnnnnnnnnnnnnnnnnnnnnnnnnnnnnnnnnnnnnnnnnnnnnnnnnnnnnnnnnnnnnnnnnnnnnnnnnnnnnnnnnnnnnnnnnnnnnnnnnnnnnnnnnnnnnnnnnnnnnnnnnnnnnnnnnnnnnnnnnnnnnnnnnnnnnnnnnnnnnnnnnnnnnnnnnnnnnnnnnnnnnnnnnnctctggggcattttgtcaaaagtttcaggcatttccagtattgaaaagtgtttaggcccccatgaagccctaagcccactttggggattttgttttcaatggctgagcccagagattcattcaaagaagcagattattagaactgctgtgctgggaacaattcctggcaatcctgcctgaagaagtcagaacatgggtgaatttacaccatccaaacaccagtaaagatatggtgaccctcatagaagatgtgattgaaatgcttgaaggtgaannnnnnnnnnnnnnnnnnnnnnnnnnnnnnnnnnnnnnnnnnnnnnnnnnnnnnnnnnnnnnnnnnnnnnnnnnnnnnnnnnnnnnnnnnnnnnnnnnnnnnnnnnnnnnnnnnnnnnnnnnnnnnnnnnnnnnnnnnnnnnnnnnnnnnnnnnnnnnnnnnnnnnnnnnnnnnnnnnnnnnnnnnnnnnnnnnnnnnnnnnnnnnnnnnnnnnagcatatctactttccaaaccagttgagagccttaagttggagagtaagaaaaaaagatggataatggagaaagaaataccaaggaagactgttttt

SEQ ID NO: 32438 - DNA, 646 bp, Macaca Mulatta
  misc_feature (1)...(646): n = A,T,C or G
tcccagaaaggccaatgcatcacttttctaccgaaacagtagaaggagatgatttcaaatgtctctcctcctcgtggtgaccagtactgcctgtgttgttgtcttactattgattgttttcttgtggtacaaagtttgcaaactgcaatgtagttcagaacctttttgggaagatgattgggcaaaagagacttatatccaatntgagaccctgtttcncaggtctcaaagtgtaggtgagctctggacacgaagtcacagggatgactcagaaaaattgctgctttgttcgaggtcaagtgtggaatctcaggtgacttttaaaagtgaaagttccagaccagagcattattgctaaggttgtgcagctcaggtgcatgtgagctacaaaattagcatctaagggtataattgaccctaggtttggatgacttttggacagactttcacattgtgtgtgaaaatcacaaatggaatgcttttaagtgtgtttaaaaaatagcatgagacctctgaactgaaaagacaaataacgttgattttttttcttgtgtggaaaaggtctacagaaataatttttagagtgttgcttactaaattattaatactttttagggtactgttttagttcttaaaaataagttca

SEQ ID NO: 32439 - DNA, 403 bp, Macaca Mulatta
gtatatgatgaagtcacagagctccaaggacatgtcttaatgcttattgtgaagagtaaaactgtgtttgtgggagcaattaacatccaactctgtagtgtcccactcgatgaagaaaaatggtacccattaggaaacagtataatttgaccattgctatgaacatatgcattattcattaactacttgcatttttttccacttctggccctctgaatctcgtaagtaaggcatctttgttgtcaaagatagcacagggtattaaggacaccaacaaaatcagaattagttttttgcgccgtttattttctacctgtgctttctttgctttttccagaaacttttctccttcagtggagtactgattgcccgacattttgatgtgtaaaataataaaagaccc

SEQ ID NO: 32440 - DNA, 166 bp, Macaca Mulatta
cagaacagcggctttgagctgagctacctggagaaggtgtcagaggtgaaagacacggtgcgccgacagtcactgctacaccatctctgctccctagtgctccagactcggcctgagtcctccgacctctattcagaaatccctgccctgacccgctgtgccaagg

SEQ ID NO: 32441 - DNA, 144 bp, Macaca Mulatta
aggagaggccattcccctggtactggccctgtttgcctttgttggcttcatgctgatccttgtggtcgtgccactgttcgtctggaaaatgggccggctgctccagtactcctgttgccctgtggtggtcctcccagacacctt

SEQ ID NO: 32442 - DNA, 175 bp, Macaca Mulatta
tcctgagctgcctgtcaaggtcactggcctcttgttcctcctgatcttgagacggatccttggggcccacacaggcatgcgttctccttagccggacttccctgtatttgctcctggctgcagcagcacaggctgaggcccgacaccagatgttcaatgtgatcttgcagtcagg

SEQ ID NO: 32443 - DNA, 1244 bp, Macaca Mulatta
caaataaaacagaatagatttcctaatgagatacatattatatactataacacagcttttttagaaggtgagttttaaagaagtctcttaattctgatctaggtcatttttaaaacccctgcaaagaactcaccgcaagcccctttttgtagtgttctccactaatactggttatcctgtgttctccactaatactggttatcctgtgttctccactaatactggttatcctgtgctacagagaaaatcaaagtagtcatgagctccagtttttgtattgcaattaagactcttacctacaaaacgagattcagtaaactttttactcaaccaaattaaaatttttaaggaaaattagcagttggtctattcagaatccaacctttttatattttatattgcactttagtgtattttctgtaactgtagtagatctgcctcccctgtggaaattggggtctgttggtgggcgtgttcctgaagcacagcttcactgaaaagtgtttcctccctaaggccttggtgccctgaacctctgatgcctaccgggtgttcctgatttgggtttcctttaaataccccctttttgagtgactttctgatgggaggaaaatagcagtaatcatttttttgtgtgcagactctcatttatttttagccattgtcgttttcattcattttgtataatataaaccatgtgtcttgtcaaagtgaaagacattttaaatctgtagcatgggctagtgggcaggtgcgcacagtcgaggccacacctgatccgttttctgtgcactgtagccttagtgtcacctttcttctgtgtctccctgtggtacactccagcagttgccttttttatcatttctactgaagttgggaaattcagcccgagaaagtgacagatgaaaggagacaatggttgtgtagggagatggagaaaatgcttaatctgaggatgagacagggtttttggtttttgtgggggcatatggaaaaaaaaaacattaaatgaggcagtttaaatgataatacgaaggtgtgctacagaaaatctggtattcttgctaacattgccccttcactgttgcttaattgtgaatagccaaaagctatatgttacggctttgttgtgtgaaggtaactaagcaaaagtgttccatggactttaaaatacatccaatgcagaagtccatttattttgagtttgcccattttaataactttttgttgggaaaatctaataa

SEQ ID NO: 32444 - DNA, 941 bp, Macaca Mulatta
ggggggaaaacttcattccttgatttgtgtttgtcttggccttcctggtgtgcagtactgctgtagaaaagtattaatagcttcatttcatataaacataagtaactcccaaacacttatgtagaggactaaaaatgtatctggtatttaagtaatctgaaccagttctgcaagtgactgtgttttgtattactgtgaagataagaaaatgtagttaattacaatttaaacagtgttccacataacttcttaatttctacattccctcccttactcttcaggggtttcctttcagtaagcaacttttccatgctcttaatgtattcctttctagtaggaatccggaagtattagattgaatggaaaagcacttgccatctctggctggggtcacaaattgaaatggctcctatatcacataaggaggtcttgtatatctgtggcaacagggagtttccttattcactctttatttgctgctgtttaagttgccaacctcccttcccaataaaaattcacttacacctcctgcctttgtagttctggtattcactttactatgtgatagaagtagcatgttgctgccagaatacaagcattgcttttggcaaattaaagcgcatgtcatttcttaatacactagaaaggggaaaataaagtacacaagtccaagtctaaaccctttagtacttttccatgcagatttgtgcacatgtggagagggtgtccaggtttgtctagtgattgttatttagaggagttggaccactaattggtgtggttgcctaatcattgactgtagtccccaaaaagccttgtgaaaatgtttatgccctatgttacagcaggagtacaggaaattaaatttctttttttagccaaaaaaacaacaaaaaacttcgggggggcccgttcccattcggccctatgtgagtcgtatt

SEQ ID NO: 32445 - DNA, 547 bp, Macaca Mulatta
tctttttagtatcctatggattaatgcctgctttatacacaggtgtttgatacatttggcttcatctgaatcaagtgcagaaaatgacactaccaattaactccttgaagcagaacctccttaaaactcttatcaatcgggctgaggcatgtgttcatattgcagagacccatttgtctgtgtattttcacaggtgacattgtgattatacacgagaaaaaagaagaaggatggtggtttggatctttgaatgggaaaaaaggccattttcctgccgcttatgtggaggagttaccttcaaatgctggcaacacagctacaaagacataaaacaagactctgaacatactaccttcacactctgtaaccaacaatacaatgtggttcaaataagaataaagtgctattatctttacaggtttttcttttgaaatggatggagttttacctgtacgtcacagcactttgcattcatgattattagcttgaaacagtcagctaaaagatggatgggtggaggcagacaaggaagaggctccttggttcc

SEQ ID NO: 32446 - DNA, 646 bp, Macaca Mulatta
atgtgccacacgagggagctggccttcagatcagcaaggagtatgagcgcttctccaagtacatgcccagcgtcaaggtgtctgtgttcttcgggggtctctccatcaagaaggatgaagaagtgttgaagaagaactgtccccatgtcgtggtggggaccccgggccgcatcctggcgctcgtgcggaacaggagcttcagcctaaagaatgtgaagcactttgtgctggacgagtgtgacaagatgctggagcagctggacatgcggcgggatgtgcaggagatcttccgcctgacaccacacgagaagcagtgcatgatgttcagcgccaccctgagcaaggacatccggcctgtgtgcaggaagttcatgcaggatcccatggaggtgtttgtggacgacgagaccaagctcacgctgcacggcctgcagcagtactacgtcaaactcaaagacagtgagaagaaccgcaagctctttgatctcctggacgtgctggagtttaaccaggtgataatcttcgtcaagtcagtgcagcgctgcatggccctggcccagctcctcgtggagcagaacttcccggccatcgccatccaccggggcatggcccaggaggagcgcctgtcacgctatcagcagttcaa

SEQ ID NO: 32447 - DNA, 524 bp, Macaca Mulatta
gctggggctcgcagtcaggtacgctggacggagttccagccgcggcccccgggcagccagctcaacttcagttaaatgctaccgagagtgacgacggacgcaacttcttctgcagtgccactctcgaggtggacggcgagttcttgtgtaggaacagtagcgtccagctgcgtgtcctgtatggtcccaaaattgaccgagccacatgcccccagcacttgaagtggaaagacaaaacgagacacgttctgcagtgccaagccaggggcaaaccgtaaccccagctgcggtgtttgaaggaaggctccaaccgggaggtgccggtggggatcccgttcttcgtcaatgttacacataatggcacttatcaatgcccagcgtccagctcacgaggcaaataacaccctggtcgtggtgatggatattgaggctccgaagtcccactttgtccctgtcttcttggcggtgttaggtgacctgggcgtggtgactgtcgtagtggccttaatgtacgtcttccagga

SEQ ID NO: 32448 - DNA, 274 bp, Macaca Mulatta
  misc_feature (1)...(274): n = A,T,C or G
agggaaggatcgaatcatatttgtaaccaaagaagatcatgaaactccaagcaatgcagaactggtggccgatgaccccaatgatccatacgaggagcngattgatactgccaaatggaaacattaactggaactgcccatgccttgggggaatggccagcggtccctgtggagaacagtttaagtcagccttttcctgcttccactannnnnnnnnnnngatcaaggggtcagactgtgtagaccagttccgggccatgcaggaatgcatgca

SEQ ID NO: 32449 - DNA, 780 bp, Macaca Mulatta
gggagtcgagaagcagctacccaaggtaccgtaggttccgatgaaaccgaggaccagagagggaaagtgacctcaaagtcacagactaattttttagagctggacaagaatccaagcctgcaactgcagagaccagagatctttctgctatctatactcttgggaagcacatcctaagatctttgcaaattatccggtggaaggaatgcctaaagtcaaaagaagccggaaagcacccccagatggctgggagttgattgagccaacgctggatgaattagatcaaaagatgagagaagctgaaacagaaccgcatgagggaaaaaggaaagtggaatctctgtggcccatcttcaggatccaccaccagaaaacccgctacatctttgacctcttttacaagcggaaagccatcagcagagaactctatgaatattgtattaaagaaggctatgcagacaaaaacctgattgcaaaatggaaaaagcaagggtatgagaacttgtgctgcctgcggtgcattcagacaagggacaccaacttcgggacgaactgcatctgccgtgtgcccaaaagcaagctggaagtgggccgcatcatcgagtgcacacactgtggctgccgtggctgctctggctgaagctagcgctctccaccctggactctggacttcgcaggttcctgcctgtggcgccaccccctttctgggagcagcgagcagtgccccaggcccaaagtttggatcacgggttctctacggggaaaagctttccctggtcc

SEQ ID NO: 32450 - DNA, 739 bp, Macaca Mulatta
  misc_feature (1)...(739): n = A,T,C or G
ctgagccttctctttttctgcatctactggggtcagtatgccaccgatggcattggcaacgagagtgtgaagatcttggngccaagctgctcttctcctccagcttcctcatcttcctgctgatgctcatcctcctggggaagggattcacggtgacacggnggggccgcatcagccacgcgggctccgtgaagttgtctgtctacatgaccctctacacgctcactcatgtggtgctgctcatctacgaggcnnnnnnnnnnnnnnnnnnnnnnnnnnnnnnnnnnnnnnnnnnnnnnnnnnnnnnnnnnnnnnnnnnnnnnnnnnnnnnnnnnnnnnnnnnnnnnnnnnnnnnnnnnnnnnnnnnnnnnnnnnnnnnnnnnnnnnnnnnnnnnnnnnnnnnnnnnnnnnnnnnnnnnnnnnnnnnnnnnnnnnnnnnnnnnnnnnnnnnnnnnnnnnnnnnnnnnnnnnnnnnnnnnnnnnnnnnnnnnnnnnnnnnnnnnnnnnnnnnnnnnnnnnnnnnnnnnnnnnnnnnnnnnnnnnnnnnnnnnnnnnnnnnnnnnnnnnnngcggccaacaagaactccccgtaccacgtgcgcacgtcgcagatcgcatccgctggagtccctggaacgggagggaaccaatccgctgacaaggcctttccgcagcacgtctatgggaacgtgacgtttatcagcgactcggtgcccaacttcacggagctcttctccat

SEQ ID NO: 32451 - DNA, 448 bp, Macaca Mulatta
  misc_feature (1)...(448): n = A,T,C or G
ctgccccgtgagggggctgaaggccagatcatgctgtcaggggactcaggcaaggcagctcagggcccatttgctatggatccagattctggcttcctgctggtgaccagggccctggaccgagaggagcaggcagagtaccagctacaggtnnnnnnnnnnnnnnnnnnnnnnnnnnnnnnnnnnnnnnnnnnnnnnnnnnnnnnnnnnnnnnnnnnnnnnnnnnnnnnnnnnnnnnnnnnnnnnnnnnnnnnnnnnnnnnnnnnnnnnnnnnnnnnnnnnnnnnnnggcatccccttcctcttccttgaggcttcagaccaggatgagccaggcacagccaactcggatcttcgattccgcatcttgagccaggctccagcccagcctttcccagacatgttccagctggagactcggcagggggctctggccctcagccccaagg

SEQ ID NO: 32452 - DNA, 754 bp, Macaca Mulatta
  misc_feature (1)...(754): n = A,T,C or G
tgtcaggaatctggtctttctgtagacccaagtcagaaagaaccatttgtggagttaaatagaatattagaggcattaaaggtcagagttctgagacctgctctggagtnnnnnnnnnnnnnnnnnnnnnnnnnnnnnnnnnnnnnnnnnnnnnnnnnnnnnnnnnnnnnnnnnnnnnnnnnnnnnnnnnnnnnnnnnnnnnnnnnnnnnnnnnnnnnnnnnnnnnnnnnnnnnnnnnnnnnnnnnnnnnnnnnnnnnnnnnnnnnnnnnnnnnnnnnnnnnnnnnnnnnnnnnnnnnnnnnnnnnnnnnnnnnnnnnnnnnnnnnnnnnnnnnnnnnnnnnnnnnnnnnnnnnnnnnnnnnnnnnnnnnnnnnnnnnnnnnnnnnnnnnnnnnnnnnnnnnnnnnnnnnnnnnnnnnnnnnnnnnnnnnnnnnnncagtttctcagcaggttgtgtggcgctgccagctttaattaacatcaaagccgtgattgaacagaggcagtgtactggagtttggaaccagaaagatgaattaccnnnnnnnnnnnnnnnnnnnnnnnnnnnnnnnnnnnnnnnnnnnnnnnnnnnnnnnnnnnnnnnagcaaacgacagataacaatccacccatgaaattggtctgtggtcatattagatcaagagatgccctttataaaatgtttaatggtagcaaattaaaatgtccctactgtccaatggaacaaagtccaggagatgccaaacagatatttt

SEQ ID NO: 32453 - DNA, 1129 bp, Macaca Mulatta
  misc_feature (1)...(1129): n = A,T,C or G
agaatcttatgcgcaagggccttatatgacaatgtcccagagtgtgccgaggaactggcctttcgcaagggagacatcctgaccgtcatagagcagaatacagggggactggaaggatggtggctgtgctccttacatggtcgacaaggcattgtcccaggcaaccgggtgaagcttctgattggtcctgtgcaggagaccacctccagtcacgaccagcctgcctctggactgatgcagcagacctttggccaacagaagctctatcaagtgccaaacccacaggctgctccccgagacaccatctaccaagtgccaccttcctaccaaaatcagggaatttaccaagtccccactggccatggcacccaagaacaagaggtatatcaggtgccaccatcagtgcagagaagcattgggggaaccagtgggccccacgtgggtaaaaaggtnnnnnnnnnnnnnnnnnnnnnnnnnnnnnnnnnnnnnnnnnnnnnnnnnnnnnnnnnnnnnnnnnnnnnnnnnnnnnnnnnnnnnnnnnnnnnnnnnnnnnnnnnnnnnnnnnnnnnnnnnnnnnnnnnnnnnnnnnnnnnnnnnnnnnnnnnnnnnnnnnnnnnnnnnnnnnnnnnnnnnnnnnnnnnnnnnnnnnnnnnnnnnnnnnnnnnnnnnnnnnnnnnnnnnnnnnnnnnnnnnnnnnnnnnnnnnnnnnnnnnnnnnnnnnnnnnnnnnnnnnnnnnnnnnnnnnnnnnnnnnnnnnnnnnnnnnnnnnnnnnnnnnnnnnnnnnnnnnnnnnnnnnnnnnnnnnnnnnnnnnnnnnnnnnnnnnnnnnnnnnnnnnnnnnnnnnnnnnnnnnnnnnnnnnnnnnnnnnnnnnnnnnnnnnnnnnnnnnnnnnnnnnnnntgatcataaaacattttgaaaggaaacagccttgagatctgtgattactaagacatacataacattcttatcgcattagaaagcaagaatggactgttgcttgtcttgttcctcttgtcttgtcccctgaattcctgttcatctttgattgtatgtgggacatcgcatttttaatacatttgtagaaataatgtgaagcctataaagacgttttctgcctccagagaga

SEQ ID NO: 32454 - DNA, 381 bp, Macaca Mulatta
  misc_feature (1)...(381): n = A,T,C or G
ggagacagaatctctagccgacattgttttgtggggagccctatacccattactgcaagatcctgcctacctccctgngaggagctgagtggcctgcacagctggttccagacactgagtactcaggagccatgtcagcgagctgcagagactgtactgaaacagcaaggtgtcctggctctccggccttacctccaaaagcagccccagcccagccctgctgagggaagggctgtcaccaatgagcctgaggtttggaacagggcnnnnnnnnnnnnnnnnaggacacggggatccctgccgacatctggcgcttctatctgctgtacattcggcctgagggccaggacagtgctttctcctggacggacctgctgctga

SEQ ID NO: 32455 - DNA, 630 bp, Macaca Mulatta
agagggcgcagccaactcccgggggcacggcaggctgagagcgcggcgcccgggcctggcgccaagcctgagcccgccagacgggaggcggccccgccgcgggctcggctccggccccagccccgccagcatggccggccggaccgtacgggccgagacccagagccgggccgaagataacatcaagaaggtaatggcgaccatcgagaaggtccggaaatggaagaagcaatgagtgactgtgggtgacacttcccttcgtatcttcaagtgagtgccagtggtggacccccaggaggaggagcgaaggcgggcaggtggcaaggcaaagagatcccgtggccgggaacgtcggggcaggggcgccagtccccgagggggtggccctctcatcctgctggatctcaatgatgagaacagcaaccagagtttccattcggaaagttccctgcaaaaaggcacagagcccagtcctgagggcagcccccagcccagccgccctatgtcacctgccagacccccagaaggggtccctgaagaggctcagcccccacggctgggccaagagaaaaatcccggggggcataactgctggcagcactgacgaaaccccaatgctgaccaaggagg

SEQ ID NO: 32456 - DNA, 4489 bp, Macaca Mulatta
  misc_feature (1)...(4489): n = A,T,C or G
agtctcgtagtgtggataagcaacatgctgtcatcaactatgatgcctctacggatgaacatttagtgaaagatttgggcagtctaaatgggnnnnnnnnnnnnnnnnnnnnnnnnnnnnnnnnnnnnnnnnnnnnnnnnnnnnnnnnnnnnnnnnnnnnnnnnnnnnnnnnnnnnnnnnnnnnnnnnnnnnnnnnnnnnnnnnnnnnnnnnnnnnnnnnnnnnnnnnnnnnnnnnnnnnnnnnnnnnnnnnnnnnnnnnnnnnnnnnnnnnnnnnnnnnnnnnnnnnnnnnnnnnnnnnnnnnnnnnnnnnnnnnnnnnnnnnnnnnnnnnnnnnnnnnnnnnnnnnnnnnnnnnnnnnnnnnnnnnnnnnnnnnnnnnnnnnnnnnnnnnnnnnnnnnnnnnnnnnnnnnnnnnnnnnnnnnnnnnnnnnnnnnnnnnnnnnnnnnnnnnnnnnnnnnnnnnnnnnnnnnnnnnnnnnnnnnnnnnnnnnnnnnnnnnnnnnnnnnnnnnnnnnnnnnnnnnnnnnnnnnnnnnnnnnnnnnnnnnnnnnnnnngggtgcagcatagatgccaagcaagttgaggaacaatctgcagctgcaaatgaagaagtactttttcctttctgtagggaaccaagttattttgaaatcnnnnnnnnnnnnnnnnnnnnnnnnnnnnnnnnnnnnnnnnnnnnnnnnnnnnnnnnnnnnnnnnnnnnnnnnnnnnnnnnnnnnnnnnnnnnnnnnnnnnnnnnnnnnnnnnnnnnnnnnnnnnnnnnnnnnnnnnnnnnnnnnnnnnnnnnnnnnnnnnnnnnnnnnnnnnnnnnnnnnnnnnnnnnnnnnnnnnnnnnnnnnnnnnnnnnnnnnnnnnnnnnnnnnnnnnnnnnnnnnnnnnnnnnnnnnnnnnnnnnnnnnnnnnnnnnnnnnnnnnnnnnnnnnnnnnnnnnnnnnnnnnnnnnnnnnnnnnnnnnnnnnnnnnnnnnnnnnnnnnnnnnnnnnnnnnnnnnnnnnnnnnnnnnnnnnnnnnnggaaataaacatgatgatggtacgcagagtgattcagagaatgctggggctcacaggcgctgtagcaaacgtgcaactcttgaggaacacttaagacgccaccattcagaacacaaaaagctacagaaggtccaggctactgaaaagcatcaagaccaagctgttgtnnnnnnnnnnnnnnnnnnnnnnnnnnnnnnnnnnnnnnnnnnnnnnnnnnnnnnnnnnnnnnnnnnnnnnnnnnnnnnnnnnnnnnnnnnnnnnnnnnnnnnnnnnnnnnnnnnnnnnnnnnnnnnnnnnnnnnnnnnnnnnnnnnnnnnnnnnnnnnnnnnnnnnnnnnnnnnnnnnnnnnnnnnnnnnnnnnnnnnnnnnnnnnnnnnnnnnnnnnnnnnnnnnnnnnnnnnnnnnnnnnnnnnnnnnnnnnnnnnnnnnnnnnnnnnnnnnnnnnnnnnnnnnnnnnnnnnnnnnnnnnnnnnnnnnnnnnnnnnnnnnnnnnnnnnnnnnnnnnnnnnnnnnnnnnnnnnnnnnnnnnnnnnnnnnnnnnnnnnnnnnnnnnnnnnnnnnnnnnnnnnnnnnnnnnnnnnnnnnnnnnnnnnnnnnnnnnnnnnnnnnnnnnnnnnnnnnnnnnnnnnnnnnnnnnnnnnnnnnnnnnnnnnnnnnnnnnnnnnnnnnnnnnnnnnnnnnnnnnnnnnnnnnnnnnnnnnnnnnnnnnnnnnnnnnnnnnnnnnnnnnnnnnnnnnnnnnnnnnnnnnnnnnnnnnnnnnnnnnnnnnnnnnnnnnnnnnnnnnnnnnnnnnnnnnnnnnnnnnnnnnnnnnnnnnnnnnnnnnnnnnnnnnnnnnnnnnnnnnnnnnnnnnnnnnnnnnnnnnnnnnnnnnnnnnnnnnnnnnnnnnnnnnnnnnnnnnnnnnnnnnnnnnnnnnnnnnnnnnnnnnnnnnnnnnnnnnnnnnnnnnnnnnnnnnnnnnnnnnnnnnnnnnnnnnnnnnnnnnnnnnnnnnnnnnnnnnnnnnnnnnnnnnnnnnnnnnnnnnnnnnnnnnnnnnnnnnnnnnnnnnnntcagactccaaagggaggtgacaagaaggaatcctccaagtcattagtgcgacaagggagcttcactatagaaaaacccagcccaaacatacccatagaacttattcctcatataaataaacagacttcctctactccttcttctttagcattaacatctgcaagtagaatacgagaaagaagtgagtctttagatcctgattctagtatggacacaacccttattctaaaagacacagaagcagtcatggcttttctagaagctaaactacgtgaagataataaaactgatgaaggaccagacactcccagttataatagagacaattctatttcaccagaatctgatgtagatacagctagtacaatcagtctggttactggagaaactgnnnnnnnnnnnnnnnnnnnnnnnnnnnnnnnnnnnnnnnnnnnnnnnnnnnnnnnnnnnnnnnnnnnnnnnnnnnnnnnnnnnnnnnnnnnnnnnnnnnnnnnnnnnnnnnnnnnnnnnnnnnnnnnnnnnnnnnnnnnnnnnnnnnnnnnnnnnnnnnnnnnnnnnnnnnnnnnnnnnnnnnnnnnnnnnnnnnnnnnnnnnnnnnnnnnnnnnnnnnnnnnnnnnnnnnnnnnnnnnnnnnnnnnnnnnnnnnnnnnnnnnnnnnnnnnnnnnnnnnnnnnnnnnnnnnnnnnnnnnnnnnnnnnnnnnnnnnnnnnnnnnnnnnnnnnnnnnnnnnnnnnnnnnnnnnnnnnnnnnnnnnnnnnnnnnnnnnnnnnnnnnnnnnnnnnnnnnnnnnnnnnnnnnnnnnnnnnnnnnnnnnnnnnnnnnnnnnnnnnnnnnnnnnnnnnnnnnnnnnnnnnnnnnnnnnnnnnnnnnnnnnnnnnnnnnnnnnnnnnnnnnnnnnnnnnnnnnnnnnnnnnnnnnnnnnnnnnnnnnnnnnnnnnnnnnnnnnnnnnnnnnnnnnnnnnnnnnnnnnnnnnnnnnnnnnnnnnnnnnnnnnnnnnnnnnnnnnnnnnnnnnnnnnnnnnnnnnnnnnnnnnnnnnnnnnnnnnnnnnnnnnnnnnnnnnnnnnnnnnnnnnnnnnnnnnnnnnnnnnnnnnnnnnnnnnnnnnnnnnnnnnnnnnnnnnnnnnnnnnnnnnnnnnnnnnnnnnnnnnnnnnnnnnnnnnnnnnnnnnnnnnnnnnnnnnnnnnnnnnnnnnnnnnnnnnnnnnnnnnnnnnnnnnnnnnnnnnnnnnnnnnnnnnnnnnnnnnnnnnnnnnnnnnnnnnnnnnnnnnnnnnnnnnnnnnnnnnnnnnnnnnnnnnnnnnnnnnnnnnnnnnnnnnnnnnnnnnnnnnnnnnnnnnnnnnnnnnnnnnnnnnnnnnnnnnnnnnnnnnnnnnnnnnnnnnnnnnnnnnnnnnnnnnnnnnnnnnnnnnnnnnnnnnnnnnnnnnnnnnnnnnnnnnnnnnnnnnnnnnnnnnnnnnnnnnnnnnnnnnnnnnnnnnnnnnnnnnnnnnnnnnnnnnnnnnnnnnnnnnnnnnnnnnnnnnnnnnnnnnnnnnnnnnnnnnnnnnnnnnnnnnnnnnnnnnnnnnnnnnnnnnnnnnnnnnnnnnnnnnnnnnnnnnnnnnnnnnnnnnnnnnnnnnnnnnnnnnnnnnnnnnnnnnnnnnnnnnnnnnnnnnnnnnnnnnnnnnnnnnnnnnnnnnnnnnnnnnnnnnnnnnnnnnnnnnnnnnnnnnnnnnnnnnnnnnnnnnnnnnnnnnnnnnnnnnnnnnnnnnnnnnnnnnnnnnnnnnnnnnnnnnnnnnnnnnnnnnnnnnnnnnnnnnnnnnnnnnnnnnnnnnnnnnnnnnnnnnnnnnnnnnnnnnnnnnnnnnnnnnnnnnnnnnnnnnnnnnnnnnnnnnnnnnnnnnnnnnnnnnnnnnnnnnnnnnnnnnnnnnnnnnnnnnnnnnnnnnnnnnnnnnnnnnnnnnnnnnnnnnnnnnnnnnnnnnnnnnnnnnnnnnnnnnnnnnnnnnnnnnnnnnnnnnnnnnnnnnnnnnnnnnnnnnnnnnnnnnnnnnnnnnnnnnnnnnnnnnnggctctgaacaacatggggatctcccagtgctatgttgccatctccaccaaaacagaagtccagccctgtgaataaccatagcagcccgggtcagacaccaacacttggccaaccagaagctagggctcttcatcctgctgctatttcagtctcagctgaatttgagaatgctgaatctgaggctgatttcagtatacatttcaatagattcaaccccgatggggaagaggaagatgttacagtacatgaatgactttctcttgagtgttgaaaaatcattacctgtggaatgactaggaatattggaagcagcatagtgttgacgtacacaaaacaagacagcttggtcagctacaa

SEQ ID NO: 32457 - DNA, 143 bp, Macaca Mulatta
aggtacttccattcaaccaacccttggtgccaatggtgtgatattagacaaccagcctatagtcaaaaaaaggcgaggaaggaggaagaatgtagaaggtgttgacatcttcttttttaacagaagtaaaccacctaatcatg

SEQ ID NO: 32458 - DNA, 126 bp, Macaca Mulatta
gagcacccccgcatgggcaccctggacgtctgccccttcattcccgtgaggggcgtcagcatggacgagtgtgtgctctgtgcccaggcctttggccagcggctggcagaggagctggacgtgcca

SEQ ID NO: 32459 - DNA, 635 bp, Macaca Mulatta
ggaagtcaccccatggctatagggaaattagcctgaggcttagctttcattatcactgtctcccagggtgtgcttgtcaaagagatactctgccaagccagattcgggtgctcccatcttgcgcaagttggtcacgtggtcacccaattctttgatggctttcacctgctcattcaggtaatgtgtctcaatgaagtcacacaactacaaaacaatgggcaagacagttagtgggcagctttcccaatccctaaggcaaatgatttcctctttttcctgggtttccagtactcacatgggggtcatttttgtcagtggccagtttgtgcagttccagtagtgactgattcacatttttttccaaatgtaaagcacactccattgcattcagcccgctctcccagtcgtcatagtctggtttcttaatatcctgaaggaagattcggccacctcgttggttctgcagcttcatcagtttctcggcatgttccctttcctcatgagattggtgaagaaagtatttggcaaagttcttcaaagccacatcatcgcggtcaaagtagtaagacatggacaggtaaacgtaggaagcgtagagctccagttgatctggcggttgatggcggcctctgagt

SEQ ID NO: 32460 - DNA, 464 bp, Macaca Mulatta
ctggagggttaaagccggcaaaaatcaacataactgccaaagccccctttacagaatacaaccagagtcatacaaaagcccttttacctgaagacagtggaatgcaccaggtgttaagaattgatgtgacgctttctccaagggaccccaaagctccagggcagtttgggcgtcctgtagttgtcccccatggaaaggagaaggaggcagaaagaagatggaaagaagggaacttcaatgtctaccttagcgatttgatcccagtggatagagccattgaagacaccagacctgctgatgtacagagcagctagttcacaataacctcccaaccaccagtgtcatcatgtgctttgtggatgaagtgtggtccactctcctgagatctgttcacagtgtcctcaatcgctctcctccatacctcatcgaggagattctgctggtagatgacttcagcaccaaag

SEQ ID NO: 32461 - DNA, 823 bp, Macaca Mulatta
gataatgtggtttttgtatggtgtttgagggaaggaataatctttctttgtagtatttcaagatgtttacttttcaactggtgcgcactgaatgcatgtttagaagagtggcatgaatagtgcatcacttttgtcatttttcccctgctcagattcttagctcttaaaattcaaaggtgggatattctaactggtagtggtgcaccatttttcacccaaatattacaagcactttaaaccacatttttattgtttgatgcttcattttcagactttttaatgtcagtcattacatttgcatcccatgagaaaaatgtttccagaacaacagtgtggaatagttctgaattatgctgttataaagatagaaaaaaagtcctaatgcctttaacaaatctacttcttactccacccaacatgtctttgcaaagcaagaagtctttgtaagacacttgaacaaagtccttcaattctatagcagaggaaataaaatcccccagaagccaaagggttcaccttcacattgctagttcgcgacagacccagctgtgcttctttagagataaaatacattccctttggtatcacaggaagttactggggatgacttggcctcattacttagctaatgacgataaaatttcttaattatttgaagtaacattgtattcatgtttgcatttttaatttgaatagaaaataatcacattttcaacccatttatataaattgttaatgtttctttagagctgtataactacagcttgaactagcaaggaagtcattggtttgacaactagaaattatgcttttcctggtgcat

SEQ ID NO: 32462 - DNA, 376 bp, Macaca Mulatta
gatgctggcccctttggagagctgagctgcccctggtgcactgaccccaccctcgcagacacctgccctgccctgccacctgtctgtctgtctgtcccaaagcagttctggtatgaacttgaggacacatgtccagtgggaggtgacaccacctctcgatattcaataaagctgctgagaatctagcctcaactggttgccagatgactcctccttgcagctggggaggtggggaggtaaacatgactgggcagagcttagcagcggcctggcaggagacacccaggattggggagatgagactgcaggagaaggaagctcagggtgtgctggaggcgagtgtacggggtgtaatggaaggggaggcagaaaaaga

SEQ ID NO: 32463 - DNA, 682 bp, Macaca Mulatta
catccactttcctacggccttacgcggtaaagcccccaaaggttgctttcacaaccaaaatttatcaccctaatatcaacagcaatggcagcatctgccttgatatcctgcggtctcagtggtctccagcgttgactgtgtcaaaagttctcttgtcccatctgctcgctgctctgcgaccccaaccccgatgaccctctggtgccagagatagcccacacctacaaggccgacagagagaagtacaacagactagcaagagagtggacacaaaaatatgctatgtaagtgcctcggaggttttacgtgagacgttgaagctggcagagaggtcttcccttaaaactttgggctgttggctgagccactcaaagagcgtcatctgttcttcaaacaaatgttggtcacccactctctccagctgcagcatgctggtgccattttcagcatttatggctttgacagtgccacctctttgatgccaaatcagcagccattgttgttatgatctgcagtcttcctgatgacactggaatctctctctctgccgcctcagtttgtctgttggtctcttggggggccaggccctgcacgtctcttcctacctggcctcaaacggtgctgctgcccatgatggtaccaaaacaggtcctcagcctggcccatcaccacataccctttg

SEQ ID NO: 32464 - DNA, 333 bp, Macaca Mulatta
actcggagatttcgatgttttcaaaactctggggctgccaggtttgctgagggcgaggcagaaaccagggctgagaacactaaccctgcggtctagaggaggggcagctccggctgttttgatttttctctgcatgtggcgaatgcaccggcccgctccttcctcgcctccctcggccttattgcagctgacttctgtttcctcctgcctttcttccttgtgtgggaagggaagagttgggcagccgggtcctgacttgcaagtttcaaaatcgatatttccttcccaccctctgagagaaaagtctgtttttgatgccatttctgcctccta

SEQ ID NO: 32465 - DNA, 824 bp, Macaca Mulatta
gcctcatctcctaagcactcctttcccctgctgtccccttcgaccctcagccctctggtgccgctctgcccgatgcacagccacctcagccagcccccaggtagaaacatgtgggttaagctcttcctgccccattcagcttcactcccaccctttcagcatcctgccccttcaccttgacctgggttcccccactcccattccctggcctctgccataatttgctgttcaattgctccctccttcctgaggggcctcagggcatgtggggggtaggctgagaccccaccaccaaaggttgagtgaggtcctcttgattgaggacttcaccccttgattaaagcaacttctgcttcagtggttcctgtgtgtgttgagaatgggacttgggccattcagctcagagcaggaagggaggagaagtgatgctgaggaagctttagctgtatcaaatttgagggctcctcttcgtagtgaccagcagaatgctgtttctaaaatttatgtgcagttagttactctaagcaaggaggaaagggctagacttaggactaggtacctaagttcatttatggagttaggagggctgggagggtgtagcctctgccaaccctgcctctgcttcctatagcttccactgctctttattccagtttttggagccagagtaatgatatgatcaccaccccagccaattttctgatgcactggccagagtcttcccgtaagacctgggacctctcagaggaaacatttactaaataaggggaaactaaagtggcatactagtaaaggatagaaggtacaaaagctactcccaaacc

SEQ ID NO: 32466 - DNA, 133 bp, Macaca Mulatta
ctacattattcattactatcttatggatgatacggtggaaattcgagaggtccacgaacggaatgatggaagagatcctttcccactcctgatgaaccgccagcgtatgcccaaagttttggtggaaaatgca

SEQ ID NO: 32467 - DNA, 221 bp, Macaca Mulatta
atgtcacagaggaaggccagagggctgccagccatgccaggggtgggccacagccagactcaggccaaagcacggttgctgccaggcgctgacaggaagaggagccgcctcagcaggacaaggcaggacccgtgggaagaaagaagctggagcaatcagagatggagcagagctacccctggccctcgagggaccagggctgggggcctggctcttggcag

SEQ ID NO: 32468 - DNA, 681 bp, Macaca Mulatta
  misc_feature (1)...(681): n = A,T,C or G
gggaagcatttgatttacattatttatacagttgggatctaattacggaaaatgtgttttgtagttctggatagactatttcttccgcgtgtttcctcctcaaaacatacacacagagcaaactccttttcataaaagccctcatatccactggtagtccccattcgcatcatgctctccatgtgtactgccagagtcaattatgtttgaaagcctttggtggatgttatggggcaaagtatgatttacacagaagcaactgtcaaatccgtggtgcaaccactatctccagtgaaatattgtataacaccatttggaactactgaaaagacaggcttttctacaggggctcttccttattgcaccatttttgtatttaccatagaaactaagcatcagaatttatgtgcaaagaatatgttatttttccttttgctctgaaatactgagatttggggaagcaannnnnnnnnnnnnnnnnnnnnaataactatcttttgataacacattcggcggttatgatgttggaatttagcagaactatcaaatcccaaattgttttcaaatcaagatgtttaaattataagttgctttgttttccaagtagtatgaatgacaatattcatctgtgaaatatgtttgcgtaatttggacaatttataaacccaacatttacttttt

SEQ ID NO: 32469 - DNA, 466 bp, Macaca Mulatta
aaatggggatggggcgagctaagccacactgaaatgatcaaggtgtggattcttgagacctgctgacaggtctcaagaataagagatctcaactcctccctccctccttcttccaggagtcagttatctgttgatgggccaggtggaagagaacagaggccccgtccttcctccagagagctttgtggttctccaccggcccaaccaggaccagatcctcaccaacctaagcaagaggaagtgcccctcccaacctgtgcgggctgctgagtcccaggactgagacccaggccagccccggcccctagccctcaggccctctttcttatccaaataaatgtttcttaactgaggaaggggtcagatctccatgcttatggtattggggtccagcttgaggatttcttttcattcattcattcattcaacacatatttactatacagaataatcttttaagaatgtg

SEQ ID NO: 32470 - DNA, 860 bp, Macaca Mulatta
ggggagttggggtttgaccggagctagtgaggatccagcccaggctccagttgtccgcggctcctcctcctgtcgcttcccgtgtgattactgggactcagatggaccacacatccccgacctacatgcttgctaacttaacccacttgcattctgaacaacttctgcagggcttgaatcttcttcgccaacatcacgaactctgtgacatcattcttcgagtaggtgatgttaaaatccatgctcacaaagtggtacttgccagcgtcagcccgtatttcaaagctatgttcactggaaacctttctgaaaaagagaacagtgaggttgagtttcaatgcattgatgaaactgctctccaggccattgtggagtatgcctatacagggactgtttttatttctcaggacacagttgaatctcttctgccagcagcaaaacctactccagataaaacttgttcctgaaagaatgttggtgcattttcttaaaagcccacttgattcctggtaaattgtattggaattttcccgtttttgccaaaaacgtattggttgccatgaaccttttattttggcagcccactaaattcctttggcccagaatttttgaagcttgttttgccaaatctaaaaagttttttttgagctttcaacattgcttaacttggaatgaaaattggttttcctaaggacatgttttgaaatggtagcctcaccccaaaaaaaccgggtttttttaatggcattaaaaattccttgggatccaagttgttggatggtactaaagaaaccccccgcataaatacttttgtcccccattttcccctagaacgtgtggtaaccaatataccctatttg

SEQ ID NO: 32471 - DNA, 464 bp, Macaca Mulatta
agagtgaggagtttcagggccatggcaaacatagctgtgcccttgaagagaatagtaatgatgggaatttacaggtttatgactgaattctgtttgacattaaagacaatttgaattcacctagttttctgtgctaatgtttatcaggagatttactttccaatcaagaggcaatgttgacatttatttctacagtgaatgtagctttgagtgctagaagaattgacggctattccaagttcatatcaaaggagacctgacccagggcactcatagccccaactgtcctcccttaaggctatggcataatttagcaggcagaaatctcataacacaaagaccatgacagttaaaagttacactattttcagcattcggttgacttatgacaaaatacatatattccatgctacttgaagtataatagtatatttgttattggtcatttaattcagatactctta

SEQ ID NO: 32472 - DNA, 1388 bp, Macaca Mulatta
gggacacttcgctgccgaaacgaagcctgacaagagttccatcagcaggatgtgggggctcaaggttctgctgctacctgtgatgagctttgctctgtaccctgaggagatactggacacccactgggagttatggaagaagacccacaggaagcaatacaacagcaaggtggatgaaatctctcggcgtttaatttgggaaaaaaatctgaagtatatttccatccataaccttgaggcttctcttggtgtccatacatatgaattggctatgaaccacttgggggacatgaccaatgaagaggtggttcagaagatgactggactcaaagtacccgcctctcattcccgcagtaatgacaccctttatatcccagactgggaaggtagagccccagactctgtcgactatcgaaagaaaggatatgttactcctgtcaaaaatcagggtcagtgtggttcctgttgggctttttagctctgtgggtgcccctggagggccaacttaagaagaaaactggcaaactctttaaatcctgagtccccagaaccctattggattgtgtgtctgagaattatggctgccggagggggctacatgaccaatgccttccaatatgtgcagaagaaccggggtattgactctgaagatgcctacccatatgtgggacaggaggagagctgtatgtacaacccaacaggcaaggcagctaaatgcagagggtacagagagatccccgaggggaatgagaaagccctgaagagggcagtggcccgagtgggacctgtctctgtggccattgatgcaagcctgacctccttccagttttacagcaaaggtgtgtattatgatgaaagctgcaatagcgataatctgaaccatgcggttttggcagtgggatatggaatccagaagggaaacaagcactggataattaaaaacagctggggagaaaactggggaaacaaaggatatatcctcatggctcgaaataagaacaacgcctgtggcattgccaacctggccagcttccccaagatgtgactccagccagccaaaccatcctgccttttccatttcttccgcaatggtgcagtgtaacgatgcactttggaaaggagttggggtgccatttttgaaccaaatggggtgatgctgagattgtctggttcagtttccccatttgtttgggcctcaaaagatccctcccaactttgccttctctccccaccatgaacttttttcactgggggccttcagggaattttccctgaaagggtgtggtacttctttaaggctaaaaaaatttgaatttacgccctggcccctgaaaatggggttggttccaaagggcctaaatgcctgttcacaggaaaaaagccttgga

SEQ ID NO: 32473 - DNA, 662 bp, Macaca Mulatta
cacacagcaatcgagatgagacgccacgcagatccctgctgcgagagagggagacacccagaggagcaggtgggaagacgaagccagccagagcccctctgctcagcctcagcgtgccctgtgatcgcctggcccagcaggagctacttcagccaagagggactgttacccaagagaggtatcctcagaccctcctgccccaggtcgggagacagcagctttggagacacaaaagagacagagcctcggccagagagagtcccccagaagaggctgggtggttgcacaggccaggtgcacaggttggaaatgcactgaactctgggtgccaagagatgtaaggcttcgagacatgctactgaatttggagggcaggcacgaagaacagcgagatagtcacagggagacaacaatagatcctacaggcctgtctgtctcctgccccatgatgaccctcaggaattgcagaggctccactgtcacaaggagagcaggctgagtttggagcacggtccatccggcagtcctggggcgtctgccctctgctggtgcccctggtggcagtccctccaggtagggctggagcccactggcgcccaatacaaaacatccaggtgggtcacatctacttctggcgggcgcagggcagagaaacccctact

SEQ ID NO: 32474 - DNA, 600 bp, Macaca Mulatta
cagagctaagactggtctcacaccactaatggaagctgcctctggtggatatccggaggtggtccgagttctcttggataaaggtgctgatgttaatgcccctccagttccttcctcaagagatacagctttaaccatagcagcagataaagggcattacaaattctgtgagcttcttattggcaggggagctcatattgatgtacgtaacaagaaggggaacactccattgtggctagcagcaaatggtggacacctcgatgtggttcagttactggtgcaagcaggtgcagatgtggatgcagcagataaccgcaagataactcctcttatggcagcatttagaaagggtcatgtgaaggtggtgcgctacttagtcaaagaagtcaatcagtttccatcagattctgaatgtatgagatacatagcaaccatcactgataaggagatgctgaagaagtgtcatctttgtatggagtcaatagacaagccaaagatagacaggctgctgaagcaaacaaaaacgccagcattttgttagaggagttagccttggaaaagttaagggaagaaagtcggaggctggctttggctgcgaaa

SEQ ID NO: 32475 - DNA, 835 bp, Macaca Mulatta
gtgtccctcacacgtgtgctgcttggtgacagtagtggtagaggggtctgcagggtgagttgcttcccccagctgcagaaccgtgatctgcagattcagaactagcttgttgcctctgaggttctgttttctttcttcaatgagacacatcgtttctctgttgggagttgggtatagtcaaaatcacctcttcaaaaagcaactgttttctcctttctcctgacagctgtgcctcccacaaggattaccccttccatgaggagttttgaagctgtggatgcctgctcatccctaagtgacctatacctgtgtttcctgcctcattttttttttcttgaaaatgtagtatggcctctgtcactcagcagcgggacagcaacctgtagagtggccagcgagggcgtgtctagcttgatgttggatctgaagagccctgtcagtagagtagaagtctcttctagtttgctttgcccttctttttgccccgctggggaaagtacaacctgaatactcttttctgaccaaagagaagcaaaatctaccaggtcaaaatagtgctactaacagttgagttttgactgcttggaactgtaatcctttcagcaagacttctctttgcctcaaataaaaagtgcttttgtgcgcttggttttgtgagctttggttttttaaaacaatagcaaccttctactcactttcaaccatcactttccagataacccgtaaagcaggcccgtcagtgatgcaaaaggagtgaggacttggcttttctacaagtcctcatctacaagttgggggcccccaccccagtactttacccatttagctttagggc

SEQ ID NO: 32476 - DNA, 245 bp, Macaca Mulatta
tttataaagtctcaaatacggatttcagaaagcatttaatcaatatcaaatggcaatcataatttgtatttaaccctttaactattgacagaaactctaggaaattatgtattcacttaaggattttaacaagtagcttttggagtagattaaattattaggttgagacaatataaattcagtatctgagcaacataaagtcttattttaattattggcagtagcttagttttaggctgcttgct

SEQ ID NO: 32477 - DNA, 1297 bp, Macaca Mulatta
  misc_feature (1)...(1297): n = A,T,C or G
actccgcctccgggttgtcagggtaaccgtagcgacgcctgcccnnnnnnnnnnnnnnnnnnnnnnnnnnnnnnnnnnnnnnnnnnnnnnnnnnnnnnnnnnnnnnnnnnnaccagnaaatcacgccaccctcaaagcctcatccacctgtcgtgggcaaagtgactcatcacagcattgaattatactgggatctggaaaagaaagccaaacgccaaggacctcaggagcagtggttcaggttctcgattgaagaagaagaccccaaaatgcactcttacggtatcatttatacnnnnnnnnnnnnnnnnnnnnnnnnnnnnnnnnnnnnnnnnnnnnnnnnnnnnnnnnnnnnnnnnnnnnnnnnnnnnnnnnnnnnnnnnnnnnnnnnnnnnnnnnnnnnnnnnnnnnnnnnnnnngagagcccataagtagcgagcacttgcatcgggctgttaatgtgaatgatgaagatttgcttgtacgaatacttcaaggagnnnnnnnnnnnnnnnnnnnnnnnnnnnnnnnnnnnnnnnnnnnnnnnnnnnnnnnnnnnnnnnnnnnnnnnnnnnnnnnnnnnnnnnnnnnnnnnnnnnnnnnnnnnnnnnnnnnnnnnnnnnnnnnnnnnnnnnnnnnnnnnnnnnnnnnnnnnnnnnnnnnnnnnnnnnnnnnnnnnnnnnnnnnnnnnnnnnnnnnnnnnnnnnnnnnnnnnnnnnnnnnnnnnnnnnnnnnnnnnnnnnnnnnnnnnnnnnnnnnnnnnnnnnnnnnnnnnnnnnnnnnnnnnnnnnnnnnnnnnnnnnnnaggtagacgtcgtggacactggttcaggatggaccccactcatgagagtctctgcggtgtcgggaaatcagagggtggcctctcttctaattgatgctggagccaatgtgaatgtgaaggacagaaatggaaagacgccccttatggtnnggtggctgtgttaaataatcatgaagagttagttcagttacttcttgacaaaggggcagatgcaagtgtaaaaaatgannnnnnnnnnnnnnnnnnnnnnnnnnnnnnnnnnnnnnnnnncagagtgtaatctccttattagaagaaaggaaaaaaaagcagaggccaaagaagtcttgtgtctgctgatgagagcaccactcatctgcgaaatgcacgtaaaacaaagtgaacagtgactgttaaactagggatgggaaattctgcatcttggagggctgtacatttatttatttattgaagattcactgatcccactttgaaatacatctttttacctaa

SEQ ID NO: 32478 - DNA, 252 bp, Macaca Mulatta
gaactcctgaacaagacctgctcagaggggctctcctgagtggaagccactcacatgcctggcctcatgctgccccctcccccgtggacaccagctgttcccaggagtggcacatcagtggctgagcagctccatacatatttgttctcttactttgcaagtgtctgcggttttatgacttggcattttagaaactcctcattgtccaggttcctcatgtagaataggtcattaaacatcagcatttccaga

SEQ ID NO: 32479 - DNA, 1157 bp, Macaca Mulatta
  misc_feature (1)...(1157): n = A,T,C or G
gaacttgaagagtccagacaaaaatgtccaccttggtggtacagatttgcacacaaattcttgatctggaattgctctccatattggataaaattcaaaaagtgtatctattttattgtaatggatccttttgtagatcttgcaattaccatttgcatagttttaaacacattatttatggctatggaacatcacccaatgactgaggaattcaaaaatgtacttgctataggaaatttggtnnnnnnnnnnnnnnnnnnnnnnnnnnnnnnnnnnnnnnnnnnnnnnnnnnnnnnnnnnnnnnnnnnnnnnnnnnnnnnnnnnnnnnnnnnnnnnnnnnnnnnnnnnnnnnnnnnnnnnnnnnnnnnnnnnnnnnnnnnnnnnnnnnnnnnnnnnnnnnnnnnnnnnnnnnnnnnnnnnnnnnnnnnnnnnnnnnnnnnnnnnnnnnnnnnnnnnnnnnnnnnnnnnnnnnnnnnnnnnnnnnnnnnnnnnnnnnnnnnnnnnnnnnnnnnnnnnnnnnnnnnnnnnnnnnnnnnnnnnnnnnnnnnnnnnnnnnnnnnnnnnnnnnnnnnnnnnnnnnnnnnnnnnnnnnnnnnnnnnnnnnnnnnnnnnnnnnnnnnnnnnnnnnnnnnnnnnnnnnnnnnnnnnnnnnnnnnnnnnnnnnnnnnnnnnnnnnnnnnnnnnnnnnnnnnnnnnnnnnnnnnnnnnnnnnnnnnnnnnnnnnnnnnnnnnnnnnnnnnnnnnnnnnnnnnnnnnnnnnnnnnnnnnnnggtcctaaacctatttctggccttattattgagttcatttagttcagacaatcttacagcaattgaagaagaccctgatgcaaacaacctccagattgcagtgaccagaattaaaaagggaataaattatgtgaagcaaaccttacgtgaatttattctaaaaacattttccaagaaaccaaagatttccagggagataagacaaacagaagatctgaatactaagaaggaaaactatatttctaactatacacttgctgaaatgagcaaaggtcacaatttcctcaaggaaaaagataaaatcagtggttttggaagctgcgtggacaaatacttgatggaagacagtgatggtcaatcgtttattcacaatcccagcctcacagt

SEQ ID NO: 32480 - DNA, 641 bp, Macaca Mulatta
  misc_feature (1)...(641): n = A,T,C or G
ggggaaccaggcgttgggcaaaaaagtcgaactggcggagctcttgggaactggggcgatggtctcttaggatcggaggattggaaccatccgatttttacctgaaattccttagtctctcctgtgttggggaaatggttttccaaatctgttcggaattggtttagcaccgctttgggcttggggcctgagaaatatttttctttgtgatgccccagaggcacctgagacagaacaaaggatcagtcagtttctaagagcccagcccccactctaatatttcctttccaactgtcatttccctctcccgagagtcccctctcaccatgtctggctggcggcgacccagatgccatgagatggccatttgaagacaggcctgctggacatcaggtcaccttgccttcagggacctgggctttcagctgtccatacctggccctggttgatggcggcatgctgggcagtgcatgtgaagacgcacatgagacagcgtctcgccacgtagcccaggctggccttcaaatcctagcctcaagccatctnnnnnnnnnnnnnnnnnnnnnnnnnnnnnncacaggggtgtgacatcacacctggctatattcttaacattgttttgtaccggttcagccccagan

SEQ ID NO: 32481 - DNA, 352 bp, Macaca Mulatta
  misc_feature (1)...(352): n = A,T,C or G
aaaacaccactggctaagaaattggcagaaacacctcccaaattgcagtgtcatatctcaggatgattttttcaagnagccagagtctgagatagagacagataaaaatggatttttgcagtatgatgngtgcttgaagctcttaacatggaaaaaatgatgtcaaccatttcctgctggatggaaagtgcaagacgctctgtggtatcaacagaccgggaaagtgctgaggaaattcccattttaatcatcgaaggttttcttctttttaattataagngccccttgacactatatggaatagaagctatttcctgactattccatatgaagaatgtaaaaggaggaggag

SEQ ID NO: 32482 - DNA, 127 bp, Macaca Mulatta
aaaggaagaattcagggaacttcgagaacagccaagtgaccctcaagctgaacaagagcttattaatagtattgaacaagtatatttttctgcggattcatttgatgttgttaaatatgagctggag

SEQ ID NO: 32483 - DNA, 102 bp, Macaca Mulatta
gcctctgtgttctatgcctgagagtactgagataatgaaaagaccgaagtactacagcagtgacagcagttatgatagtagcagcagctcttcagaatctga

SEQ ID NO: 32484 - DNA, 449 bp, Macaca Mulatta
  misc_feature (1)...(449): n = A,T,C or G
ggatcaagcaataaaaaaatgaataccacaaattttataatggaggttactgaaccagcattcagaagtttaaggtcctcctaggtatgagtacttttagtagtggatcactgtggacagggtgcagctctaccagttcctgtttcttctgagccagaccctcctcaaggaagggaccaattaattttaaaactcacttgaagcacagctggtcatggggcttggtataaagttcctatttccaccctgatacttccaattcctggaaccccagcccactcccccatccctcctctctatgaaactagtataatgattttgaattggtacagtgtgtttaactgtaactaagttcaacagactattattatctttgtaatgaattaacctagcaataaaaattattctgttcnnnnnnnnnnnnnnnnnnnnnnnnnnnnnnnnntgtc

SEQ ID NO: 32485 - DNA, 177 bp, Macaca Mulatta
ggtttgctgagaagcacaactttgcaaaacctaatgacagccgtgctctccacctgatgaccaaatgtgcccagactgtgatggaagaactagaggatattgtgattgcatatggacagagtgatgagtacagctttgtgttcaagcggaaaaccaattggtttaaaagaagagcca

SEQ ID NO: 32486 - DNA, 647 bp, Macaca Mulatta
  misc_feature (1)...(647): n = A,T,C or G
nagaggagaaagtggagcggggagggaatcctagcttattttcccttttctatgaggacttgacataggttctgctgagttgtcactgctgctccacactcacctagagatgctgtctccactttccgtcctgtctgggtctgaaaacagtgggtctgaagatagtgcacacaaagcccatgtgactggtttgaaggacccagagcataaaggtctctcaggaaaccatgtccagaaccctagcagcggtacagtgagctgtctccaacccttatccccgggtttaagggtggtttatggccacacatggaggattttttttgttgttgttgtttgagattgagtttcactcttagttgcccaggctggagtgcaatggcatgatctcgtctcactgcaacctccaccacctggttcaagcaattttcctgcctcagctttccgagtagctgggattacaggtgcctgccaccacgcccggctaattttgtatttttagtagagacagggtttctccatgttggtcaggctggtctcgaactcccgacctcaggtgatctgcccgcgttggcctcccaaagtgctgggattataggcatgagccactgcacccggcagagttttataatgaaaaattaattaatatt

SEQ ID NO: 32487 - DNA, 780 bp, Macaca Mulatta
atgccagtccagaggagttttaagggagtttttaagtcccagcttttcttctttccagttctctcccacatttgcttttcaggtaattgcacaaaagagaggagtaatgcacaaaaagcctaacaatctggcgtttagaaaaatgggaagaagtcgttattcattctccgtttttttctttggagtacatgtcagtagtctgattttatacagatgactttcagtgaataaattgtattgctgataattttagtaacaaagtgtctgattatggcctcaagttgattctttggagtaaaatatgaggcatattttcagaatactatcaaagatgagattgtgcaactacataaactgaaaatggaatttagatgttgaacatggtggataaccttttgcttaataattccctggtgcccaggtatgcccaggaaccctgttgtataatttctgtaatatataaatataacctcttagttctttagctgtcttcattatttttgtatttaatttcagcctatggaataaacaagttttaagtaagagaaaacattgctgggaattggatttagcctgagcagtagagcacatattctcccttggtttccttgcagggtacggtatatcttgaatgtcactcgagagatagataacttcttcccaggagtctttgagtatcataacattcgggtatatgatgaagaggcaacggatctcctggcttactggaacgacacttacaaattcatctctaaagcaaagtgagtaatagtcctgccc

SEQ ID NO: 32488 - DNA, 650 bp, Macaca Mulatta
  misc_feature (1)...(650): n = A,T,C or G
cagaaaactgcacattacctagntagagttgctgactcctcgcctctgaagccacctcatggacccattcctaggagcctttgctttcaaaatttagcatttggatagaaatactgacaagagtaaggaaatgcgtcttatctcgttttaactttacgaattgaaaaaaatagtaatattttacttgaacacaaagaatgtatacatgctcttaactatgatttaaaactagaacatgatttattttgagtattctaaataagatgtggatttttcattttttaggtaaggttattttcagtagtagtgaattaataattgcttgtttttatttttttctagaacatcttcctaaactccaacccagaccatattcgtgtgcaagctcaagtttatttcacccagggaagctccattttgtcttcaacgttgtggaatttctgtctactgccccaacagaggttctgcggaagggagtgtgcacaggctggctggccttgttggttgcttccgttcttcagccaaacacatatgcatcccatgaagacagcaggaaagccgtggctcctaagatatccatctcgcctcgaacagcaaattatttccacttaccaaatgacccctcaatccccatcataatggtggggcca

SEQ ID NO: 32489 - DNA, 1927 bp, Macaca Mulatta
  misc_feature (1)...(1927): n = A,T,C or G
gccccaaagaaaggctccaagaaggcggtgacaaaagcccagaagaaggacggcaagaagcgcaagcgcagccgcaaggagagctactccgtgtacgtgtacaaggttctgaagcaggtccaccccgacaccggcatctcgtccaaggccatgggaatcatgaattccttcgtcaatgacatcttcgagcgcatcgcgggtgaggcttcccgcctggcgcattacaacaagcgctcgaccatcacctccagggagatccagacggctgtgcgcctgctgctccccggggagctggccaagcacgcggtatcggagggcaccaaggccgtcaccaagtacaccagctccaannnnnnnnnnnnnnnnnnnnnnnnnnnnnnnnnnnnnnnnnnnnnnnnnnnnnnnnnnnnnnnnnnnnnnnnnnnnnnnnnnnnnnnnnnnnnncagatgacatttatattgcaagagattgaatgcagaaacaagaattcagctgtcttttattaaacaagacattagagagatttgcaaaaatgtaaaacagtgtcactattctttttattttaaaaatatagctatttttcataaaataaggggctaacatacaatgggtttattnnnnnnnnnnnnnnnnnnnnnnnnnnnnnnnnnnnnnnnnnnnnnnnnnnnnnnnnnnnnnnnnnnnnnnnnnnnnnnnnnnnnnnnnnnnnnnnnnnnnnnnnnnnnnnnnnnnnnnnnngctatagatcaaggttcaaaagagagctccctggaaaactccttggtgctttgttcactgaaatgttgtttcaggagagcatatttcatcttaatggctgtcattgctgggaatccaaacgctaattcccaaggcattctcaaattatcatctgtatcnnnnnnnnnnnnnnnnnnnnnnnnnnnnnnnnnnnnnnnnnnnnnnnnnnnnnnnnnnnnnnnnnnnnnnnnnnnnnnnnnnnnnnnnnnnnnnnnnnnnnnnnnnnnnnnnnnnnnnnnnnnnnnnnnnnnnnnnnnnnnnnnnnnnnnnnnnnnnnnnnnnnnnnnnnnnnnnnnnnnnnnnnnnnnnnnnnnnnnnnnnnnnnnnnnnnnnnnnnnnnnnnnnnnnnnnnnnnnnnnnnnnnnnnnnnnnnnnnnnnnnnnnnnnnnnnnnnnnnnnnnnnnnnnnnnnnnnnnnnnnnnnnnnnnnnnnnnnnnnnnnnnnnnnnnnnnnnnnnnnnnnnnnnnnnnnnnnnnnnnnnnnnnnnnnnnnnnnnnnnnnnnnnnnnnnnnnnnnnnnnnnnnnnnnnnnnnnnnnnnnnnnnnnnnnnnnnnnnnnnnnnnnnnnnnnnnnnnnnnnnnnnnnnnnnnnnnnnnnnnnnnnnnnnnnnnnnnnnnnnnnnnnnnnnnnnnnnnnnnnnnnnnnnnnnnnnnnnnnnnnnnnnnnnnnnnnnnnnnnnnnnnnnnnnnnnnnnnnnnnnnnnnnnnnnnnnnnnnnnnnnnnnnnnnnnnnnnnnnnngggaagattaacttgtatcacaggagaggagactggaagttgatactatgcannnnnnnnnnnnnnnnnnnagtcacctattctttggagggaccattcatcttttccaaaaataatttcctttcccctacattgcctacatcccccttcctgtcttccctatgaagagagtatataaacttctagatctcactggatttgggggcattcacttctttttcatatgatacctccatgaacaaaatannnnnnnnnnnnnnnnnnnnnnnnnnnnnnnnnnnnncccaggctgtagtgcagtggccggatctcagctcactgcaagctccgcctcctgggtttacaccattctcctgcctcagcctcccaagtagctgggactacaggcgcccgccaccacgcccagctaa

SEQ ID NO: 32490 - DNA, 303 bp, Macaca Mulatta
ggcatcctgaagatgtatatgcaggttccctaaagatggtctgtctccacccatggccttgcctgtctatgacccttcagaccactgggcacaactggcatgcctcagtccatggacgaataaaagattttcaaatgcagattggcattcccttcaagttgccccaagccatgtacactggcaaccccagctggtcaggctgagagtccatctctaaatgccagctgatcagtagcaaccagcagggacctggtgagattatagcccatgggcacagggtcagagctcagccaggccagcttg

SEQ ID NO: 32491 - DNA, 839 bp, Macaca Mulatta
  misc_feature (1)...(839): n = A,T,C or G
ggaaccggtttaaaatggggaaggtgaaaaagaattaaaggagcccaagtgcggataacccagacagttttaatgataggctggttcttcaacaagagatgtcttacagagacttaatctatattccaaggagaattataaccatgcaacacagaccaattaagccaaatgcaaaataaactagattcttaccacaactacccctataaacactgcaactgttctttccaacaggaccctaatcttatgtgaaaacacctactatgggggaaccagaaacctagctatgtggccaaaaggaaaaaatagcaattcagtggttaattggtgaaagcaggaaatttgtgccctttactgnnnnnnnnnnnnnnnnnnnnnnnnnngtgttgctggtgttgctgttgttgctgctgcggcannnnnnnnnnnnnnnnnnactgccgctgctgctgccgctgctgctgctttggtcttcttagttttgttctttttgtctctcttcttcagcccatccatgttagctctcagtaggtttgaataagccatctgaaatttattcacttccttggagctcaccacagtgctgatcttctttttcccatcggtagctcttaacagacacttgttgtctgcgggctcaaagccctccacagtacctttctttggaatgggtttcgttcgaccgtcatacttcttcaaggtgatatagacgctgcccgacgtccggcacttctggaaaagtctggtcagctccgtcaggaactgctcgctctccaacaacaccatcgcggcgacgcttcgctccactccctccgctgaagcccctagcagtcccttcc

SEQ ID NO: 32492 - DNA, 616 bp, Macaca Mulatta
tcaggcttcagtgtccactgcctcttccccacaggtgatccccatcgccttgctgagcctcctattccggtgctcgattactgaggctcaggcacacctggctgcaactccttctgtctgtgaggctgtcaggagtgctcttgctgggccaggtcagaagcgcaccgcggaccccctggagatcctagagcctgacggtcagtgaacccgtgtttctgggtgggtgaaaggggcccaaccctgcccacttcagcccagccggcccaaggggacttgtgctagtagcatatgtgggaggaagaagtcccgtttccaggggcaccagcagcccaggatagggagaaagattctctccattttgggggagagttcttgctcttgacctagtggtttctactctcagcgacttattccgatttgagaaataaaatgaaatgtcttattttggaaagttaacctttcaaagtcagtaaatcaaatagtagattagaggtgggacaggatgggtggcatgggttggtcttaacagcagatttgtttctttaattctgcccccaactcaatttcattggtccctaatacaagccttatactaacatgaatatattttcattac

SEQ ID NO: 32493 - DNA, 548 bp, Macaca Mulatta
aagcgaatttatttcacgacttcgatacaaagcaacagggttattcatgtcaaccaatggaaacttagaggatctgaagcttctgaggatacaggtcatggaggatgttggggccgatgatcagatttggatctatcaagaaggatgcatcaaatgcaggatagcagaagactgctgcctgacgattgtgggcagcctggtaacatccggctccaagctaggcctggccctggaccagaatgctgacagccagttctggagcttgaagtccgacggcaggatttatagcaagttgaagccaaatttagttttagatgtcaaagggggcacacagtatgatcaaaatcacattatcctcaacactgtcagcaaagagaagtctacacaagtgtgggaagccatggtcctataaacctgaacaaagaaggaagaagaatcttctggaggtccttccagtcaccttatcaatcaacaaggacaatgctgatggaagatccaactggaaagtggatcaactcctccttcatcgattctaaattcaaccttaa

SEQ ID NO: 32494 - DNA, 356 bp, Macaca Mulatta
tgttaaacctggattaaattctgctttcaatatattaataactatttttataaaatgatttatttcttgctttctttgtgtttctcatgaattcaggtttccctaggacttctgcatgcccatgccacacatatcctgtggcccccagagcgctggcagaaattagaatctgttcttcctccagagcgcttaccagtacagagagaagaggaatgactgcatgaatctacctgagttgctggcattgggatgccagttactggagaggaatggaaaaacaaaacctccaaaagggaaaaacttccaacaatacgatgctgtgtgagaaaaatttacagcacattaagacgatctgt

SEQ ID NO: 32495 - DNA, 820 bp, Macaca Mulatta
  misc_feature (1)...(820): n = A,T,C or G
ggggatctcacaactcttcaggccttacaacaaaacctacaaaacttgcagtcactgcaagtaactgcagggttgatgggaatgcctactggcctttcttctggaggagaagctaaaaacatggctgctatgttccccatgctgctgtcaggaatggctggattaccaaatctattgggcatgggaggactcctgacaaagcctacagaatctgggacagaagacaaaaagggaagtgactctaaggagtcnnnnnnnnnnnnnnnnnnnncagagagccaaagttcagagaatggtggagaaaactctgtgtcaagttctccttccacgtcctctactgctgcattaaatacagctgcagctgccaacccattagctcttaacccactattactatctaatatcctttatccagggatgcttctcactccaggccttaatcttcatattccaactttgtccccgtccaatacttttgatgtacnnnnnnnnnnnnnnnnnngttgacttaagctcgtctaagtctgtagaaattaaaggaagaagattccagaaattaaagatcagggaaaaaccaaaggaaggaactggaacccaagtcccctctcaatggaaaacagcaccaaatgaagggtttcaaaaaaaacctgaagctttcatctgggatcctgataataaaaatcatccgtccatcttgaagggattcacaatttcctaataaatgaaaaaactgaattccccaaacatccctgccccttaaaaattatgaaactggatttttgggaatttttcttccttttaataaagttaaatttgtaaa

SEQ ID NO: 32496 - DNA, 741 bp, Macaca Mulatta
gtatgtgacccaccccttcaggcctgactgtcccctggggaaaagttttgaggagctcccagtttcacctgagattcctcccagaaaatcccaatacctacgttcgaggatgccagaagggacctgcctagaagccgaagagcagcttctcgtttctggtcaaagtctagaaagtctagcaccagaccatgtgtgggaggcagcggccccaaatccctatttgaaaaattcagtgacaaccagggaatttcttgtgtctcagaaacttccagagcacaccaaaggagaagtctaaatgcgaccatagcatgagaccctcagggcctcagtgtagatggcccttgccagagaagatgtcaagactcagcatgcagcgcttgcttggccccgccacatcctgcctgggttaaagtctcccctgcccttgagctgccagttgaacttggtcggcacaggtgtgaccttgtgctgggaagaagggatggtgataagcccaagttttggaaaggaacagcaatctcttttcttttgttcagacaccaagctctcacagaagctgtgcctcctgacagattggctttggaggaagggcccaggttctgagcccaaaggacccccaaggtggacatacctggcctcctaggaattgggtcatggtgccagcctttgctggggctacgcctcagagttccagaggcctttccctgctgccagaggacagctgttttgttggcttttggg

SEQ ID NO: 32497 - DNA, 770 bp, Macaca Mulatta
  misc_feature (1)...(770): n = A,T,C or G
gggctctcggctccttgtggcccaaaggcctaagcagggtccggcggtctggcctagggatattccccgttgcccctttggggcgggatggctgcggaggaagaggacgaggtggagtggatggtggagagcatcgcgggattcctgcgaggcccagactggtccatccccatcttggactttgtggaacagaaatgtgaagtttttgatgatgaagaagaaagcaaattgacctatacagagattcatcaggaatacaaagaactagttgaaaagctgttagaaggttacctcaaagaaattggaattaatgaagatcaatttcaagaagcatgcacttctcctcttgcaaagacccatacctcacaggccattttgcaacctgtgttggcagcagaagattttactatctttaaagcaatgatggtccagaaaaacattgaaatgcagctgcaagccattcgaataattcaagagagaaatggtgtattacctgactgcttaaccgatggctctgatgtggtcagtgaccttgaacaggaagagatgaaaatcctgagggaagttcttagaaaatccaaagaggaatatgaccaaggaagnnnnnnnnnnnnnnnnnnnnncagtttatcagaggctaaaaacagaagagccccacagtgccattccagtgaaagctgcaaataatgaattaattcccaaaggggaatgttgaacatttttaaacaccccacccctcagaaagtttaaggttgcaatttttgctaaat

SEQ ID NO: 32498 - DNA, 132 bp, Macaca Mulatta
gttggagttggaggtgctgactttagcgccatggagtttctggatggtgatggtggaagtctccgctccccatcaggcgaagtggccatcagagatattgtccagtttgtgcctttcagacagttccagaat

SEQ ID NO: 32499 - DNA, 123 bp, Macaca Mulatta
caggtgcgctcccctggggccccagggcccctgactctgaaggaggtggaggagttggagcagctgacccagcagctaatgcaggacatggagcatcctcagaggcagaatgtggccgtcaac

SEQ ID NO: 32500 - DNA, 473 bp, Macaca Mulatta
  misc_feature (1)...(473): n = A,T,C or G
aaaaattgatggaaccagaacaccccgagatgagaggagaagagcccagcacaatgaannnnnnnnnnnnnnnnnnnnnnnnnnnnnnnnnnnnnnnnnnnnnnnnnnnnnnnnnnnnnnnnnnnnnnnnnnnnnnnnnnnnnnnnnnnnnnnnnnnnnnnnnnnnnnnnnnnnnnnnnnnnnnnnnnnnnnnnnnnnnnnnnnnnnnnnnnnnnnnnnnnnnnnnnnnnnnnnnnnnnnnnnnnnnnnnnnnnnnnnnnnnnnnnnnnnnnnnnnnnncagatcgaggagctgaagaatgagaacgccctgcttcgagcccagctgcagcagcacaacctggagatggtgggcgagagcacccggcagtgnnnnnnnnnnnnnnnnnnnnnnnnnnnnnnnnnnnnnngcctctgctgcccctttccccagcccttagcacagagagggacacacgcccctcccccagctgc

SEQ ID NO: 32501 - DNA, 2990 bp, Macaca Mulatta
  misc_feature (1)...(2990): n = A,T,C or G
gttgagagaatatcagcagaggaacagccctggtgttcctacaggagcnnnnnnnnnnnnnnnnnnnnnnnnggcagtaaccctgagacaaccacttctggtggttgccactcacctgaggatnnnnnnnnnnnnnnnnnnnnnnnnnnnnnnnnnnnnnnnnnnnnnnnnnnnnnnnnnnnnnnnnnnnnnnnnnnnnnnnnnnnnnnnnnnnnnnnnnnnnnnnnnnnnnnnnnnnnnnnnnnnnnnnnnnnnnnnnnnnnnnnnnnnnnnnnnnnnnnnnnnnnnnnnnnnnnnnnnnnnnnnnnnnnnnnnnnnnnnnnnnnnnnnnnnnnnnnnnnnnnnnnnnnnnnnnnnnnnnnnnnnnnnnnnnnnnnnnnnnnnnnnnnnnnnnnnnnnnnnnnnnnnnnnnnnnnnnnnnnnnnnnnnnnnnnnnnnnnnnnnnnnnnnnnnnnnnnnnnnnnnnnnnnnnnnnnnnnnnnnnnnnnnnnnnnnnnnnnnnnnnnnnnnnnnnnnnnnnnnnnnnnnnnnnnnnnnnnnnnnnnnnnnnnnnnnnnnnnnnnnnnnnnnnnnnnnnnnnnnnnnnnnnnnnnnnnnnnnnnnnnnnnnnnnnnnnnnnnnnnnnnnnnnnnnnnnnnnnnnnnnnnnnnnnnnnnnnnnnnnnnnnnnnnnnnnnnnnnnnnnnnnnnnnnnnnnnnnnnnnnnnnnnnnnnnnnnnnnnnnnnnnnnnnnnnnnnnnnnnnnnnnnnnnnnnnnnnnnnnnnnnnnnnnnnnnnnnnnnnnnnnnnnnnnnnnnnnnnnnnnnnnnnnnnnnnnnnnnnnnnnnnnnnnnnnnnnnnnnnnnnnnnnnnnnnnnnnnnnnnnnnnnnnnnnnnnnnnnnnnnnnnnnnnnnnnnnnnnnnnnnnnnnnnnnnnnnnnnnnnnnnnnnnnnnnnnnnnnnnnnnnnnnnnnnnnnnnnnnnnnnnnnnnnnnnnnnnnnnnnnnnnnnnnnnnnnnnnnnnnnnnnnnnnnnnnnnnnnnnnnnnnnnnnnnnnnnnnnnnnnnnnnnnnnnnnnnnnnnnnnnnnnnnnnnnnnnnnnnnnnnnnnnnnnnnnnnnnnnnnnnatggngcaggtaatggagtcagttaggcaactacaaatggagagagataaatatgcagagaatctcaaaggagagagcgccatgtggcggcagaggatgcagcagatgtcagagcaggtnnnnnnnnnnnnnnnnnnnnnnnnnnnnnnnnnnnnnnnnnnnnnnnnnnnnnnnnnnnnnnnnnnnnnnnnnnnnnnnnnnnnnnnnnnnnnnnnnnnnnnnnnnnnnnnnnnnnnnnnnnnnnnnnnnnnnnnnnnnnnnnnnnnnnnnnnnnnnnnnnnnnnnnnnnnnnnnnnnnnnnnnnnnnnnnnnnnnnnnnnnnnnnnnnnnnnnnnnnnnnnnnnnnnnnnnnnnnnnnnnnnnnnnnnnnnnnnnnnnnnnnnnnnnnnnnnnnnnnnnnnnnnnnnnnnnnnnnnnnnnnnnnnnnnnnnnnnnnnnnnnnnnnnnnnnnnnnnnnnnnnnnnnnnnnnnnnnnnnnnnnnnnnnnnnnnnnnnnnnnnnnnnnnnnnnnnnnnnnnnnnnnnnnnnnnnnnnnnnnnnnnnnnnnnnnnnnnnnnnnnnnnnnnnnnnnnnnnnnnnnnnnnnnnnnnnnnnnnnnnnnnnnnnnnnnnnnnnnnnnnnnnnnnnnnnnnnnnnnnnnnnnnnnnnnnnnnnnggtggagctgaagagctaagaggctcagagtctgcagcagcagcaagaccagcacctgggtcacctgcagcagtacatggctgcctttcagcagttgaccaccaagaaggaggcgctgcaaaggtagttactgctgcagaccttgctcatggatcagttgcagcagcaggaagcttagggcaaaacagtggccgagatggcccaccaagagctgcaggnnnnnnnnnnnnnnnnnnnnnnnnnnnnnnnnnnnnnnnnnnnnnnnnnnnnnnnnnnnnnnnnnnnnnnnnnnnnnnnnnnnnnnnnnnnnnnnnnnnnnnnnnnnnnnnnnnnnnnnnnnnnnnnnnnnnnnnnnnnnnnnnnnnnnnnnnnnnnnnnnnnnnnnnnnnnnnnnnnnnnnnnnnnnnnnnnnnnnnnnnnnnnnnnnnnnnnnnnnnnnnnnnnnnnnnnnnnnnnnnnnnnnnnnnnnnnnnnnnnnnnnnnnnnnnnnnnnnnnnnnnnnnnnnnnnnnnnnnnnnnnnnnnnnnnnnnnnnnnnnnnnnnnnnnnnnnnnnnnnnnnnnnnnnnnnnnnnnnnnnnnnnnnnnnnnnnnnnnnnnnnnnnnnnnnnnnnnnnnnnnnnnnnnnnnnnnnnnnnnnnnnnnnnnnnnnnnnnnnnnnnnnnnnnnnnnnnnnnnnnnnnnnnnnnnnnnnnnnnnnnnnnnnnnnnnnnnnnnnnnnnnnnnnnnnnnnnnnnnnnnnnnnnnnnnnnnnnnnnnnnnnnnnnnnnnnnnnnnnnnnnnnnnnnnnnnnnnnnnnnnnnaggagtatatcagcaggctggcccaagacaaggagcatatgaaggtnaggtgaagctgctggagttgcaggagctggtcttacggcttgtgggcgaccgcagcgagtggcatggcagattcctggcagctgcccagaaccctgcccatgagcccgctccaggggccccagccccccaggagcttggggctgccgaccagcagggtgnnnnnnnnnnnnnnnnnnnnnnnnnnnnnnnnnnnnnnnnnnnnnnnnnnnnnnnnnnnnnnnnnnnnnnnnnnnnnnnnnnnnnnnnnnnnnnnnnnnnnnnnnnnnnnnnnnnnnnnnnnnnnnnnnnnnnnnnnnnnnnnnnnnnnnnnnnnnnnnnnnnnnnnnnnnnnnnnnnnnnnnnnnnnatgaggtgaagatcactgtcatctaaaagccggcc

SEQ ID NO: 32502 - DNA, 113 bp, Macaca Mulatta
cagggcaccctggagatcctgtaccctgatgcccatctctcagctgaggactttaatatctatggccatgggggccgccagttctggctggtcagctcctgcttcttcttcct

SEQ ID NO: 32503 - DNA, 432 bp, Macaca Mulatta
aaacctctaatttattttgtcgaatttttattatttgttttcccgccaagcggaaaaggttttattttgtaattattgtgatttcctgtggccccagcctggcccagcttccccgggaggggcctgcttgcctcagctcctgctgcaccaacccagccgctgcccggcacccaccgtcctgaccccaggggctgcccactcccagtgtcttcctgtgggggaagagcacagccctctcgccccttccctgagggatgatgccacaccaagctgtgccaccctgggctctgtgggctgcactctgtgcccacgggcactgctgagtggcccagcctccctcactggggtgggcgcagcacagggatccgactgaattttcccactgcacccctcctgctgcagaggggcaggccctgcactgtcctgccccac

SEQ ID NO: 32504 - DNA, 655 bp, Macaca Mulatta
  misc_feature (1)...(655): n = A,T,C or G
atttattataaaaaacaaagggaaaaaagcagttaccttgagaggaatctcacttctgcttccaacccaaatcatccaccagaggtnaggttctgactctagatcctacgttacacatgaagccaaagcagcagatttcagggattcaaccgcatggccttccgaatgcccttgatgacagaatatccttttccccggactctgttctagagcctagtatgtctagtccctctgacatagactcattttcacaagcaagtaatgtcacttctcagttacctggatttccaaaatatccctcacacacaaaagcttctccggtggactcttggaaaaatcagacattccaaaacgaaagtaggaccagttccacgtttccgtcagtatataccattactagtaatgatatctcggtcaacactgtagatgaagaaaacactgtcatggtcgcttcggcctcagtcagtcagtcccagcttccaggtacagccaacagtgtcccagaatgcatttcattgacttccttggaagatcctgtgatattgtctaagngattaggcagaaccctgaggaaaagcatgctcgaccattgcggatcttcgagcttatatgaatacgaaataatagtttgaaacaaaagctggaagcaaaagaa

SEQ ID NO: 32505 - DNA, 2095 bp, Macaca Mulatta
  misc_feature (1)...(2095): n = A,T,C or G
agcttcggcagttatcccgtgtgaaccatcctaatattgtaaagctttatggagcctgcttgaatccagtngtgtgtcttgtgatggaatatgctgaagggggctctttatataatgnnnnnnnnnnnnnnnnnnnnnnnnnnnnnnnnnnnnnnnnnnnnnnnnnnnnnnnnnnnnnnnnnnnnnnnnnnnnnnnnnnnnnnnnnnnnnnnnnnnnnnnnnnnnnnnnnnnnnnnnnnnnnnnnnnnnnnnnnnncttactgctggttgcaggggggacagttctgaaaatttgtgattttggtacagcctgtgacattcagacacacatgaccaataacaaggggagtgctgcttggatggcacctgaagtttttgaaggtannnnnnnnnnnnnnnnnnnnnnnnnnnnnnnnnnnnnnnnnnnnnnnnnnnnnnnnnnnnnnnnnnnnnnnnnnnnnnnnnnnnnnnnnnnnnnnnnnnnnnnnnnnnnnnnnnnnnnnnnnnnnnnnnnnnnnnnnnnnnnnnnnnnnnnnnnnnnnnnnnnnnnnnnnnnnnnnnnnnnnnnnnnnnnnnnnnnnnnnnnnnnnnnnnnnnnnnnnnnnnnnnnnnnnnnnnnnnnnnnnnnnnnnnnnnnnnnnnnnnnnnnnnnnnnnnnnnnnnnnnnnnnnnnnnnnnnnnnnnnnnnnnnnnnnnnnnnnnnnnnnnnnnnnnnnnnnnnaggctcattcatggacattgcttctacaaatacgagtaataaaagtgacactaatatggagcaagttcctgccacaaatgatactattaagcgcttagagtcaaaattgttgaaaaatcaggcaaagcaacagnnnnnnnnnnnnnnnnnnnnnnnnnnnnnnnnnnnnnnnnnnnnnnnnnnnnnnnnnnnnnnnnnnnnnnnnnnnnnnnnnnnnnnnnnnnnnnnnnnnnnnnnnnnnnnnnnnnnnnnnnnnnnnnnnnnnnnnnnnnnnnnnnnnnnnnnnnnnnnnnnnnnnnnnnnnnnnnnnnnnnnnnnnnnnnnnnnnnnnnnnnnnnnnnnnnnnnnnnnnnnnnnnnnnnnnnnnnnnnnnnnnnnnnnnnnnnnnnnnnnnnnnnnnnnnnnnnnnnnnnnnnnnnnnnnnnnnnnnnnnnnnnnnnnnnnnnnnnnnnnnnnnnnnnnnnnnnnnnnnnnnnnnnnnnnnnnnnnnnnnnnnnnnnnnnnnnnnnnnnnnnnnnnnnnnnnnnnnnnnnnnnnnnnnnnnnnnnnnnnnnnnnnnnnnnnnnnnnnnnnnnaggcaagaactagttgcagaactggaccaggatgaaaaggaccagcaaaatacatctcgcctggtacaggaacataaaaagcttttagatgaaaacaaaagcctttctacttactaccagcaatgcaaaaaacaactagaggtcatcagaagtcagcagcagaaacgacaaggcacttcatgattctctgggaccgttacattttgaaatatgcaaagaaagactttttttaaggaaaggaaaaccttaaaatgacaattcatgagtgttagctttttggcgtgttctgaatgccaactgcctatatttgctgcatttgtttcattgtttattttccttttctcatggtggacatacaattttactgtttcattgcataacatggtagcatctgtgacttgaatgagcagcactttgcaacttcaaaacagatgcggtgaactgtggctgtatatgcatgctcattgtgtgaaggctagcctaacagaacagaacaggaggtatcaaactagctgctatgtgcaaacatcgtccattttttcatattagaggtggaacctcaagaatgactttattcttgtatctcatctcaaaatactaataatttttttcccaaaagatggtatataccaagttaaagacagggtattataaatttagagtgattggtggtatattatggaaatacagaatctttggggatagttcagtgtaagggctttgatgccagcatccttggatcagtactgaactcagttccatccgtaaaatagtaaaggtaagtggcagctgctctatt

SEQ ID NO: 32506 - DNA, 863 bp, Macaca Mulatta
  misc_feature (1)...(863): n = A,T,C or G
gtgagtctctggggcaggctgcttcccttcagcctaactcaactgggcactgtccccctggttggctgtcaattccaatatttctgctttctttgattctccttttatgtgtagttgtctctcttcagactctcagcccagaagaaaattctcccgataaaacaacagctcgatccaaattgtgcttctccccagaattcacgcctctccctgggggaagagttgaggaagtgcagaaaaggcgacttcgttagaccgctcttttttctgtacttcctgagttgccagggaatctaatatccccaaattagggcaattggaacgaagtgaaggacacagaagtatattggaagaggcagagcatgcggtggtagggggaggaccctggaaagggactggtttgaggttgtcccaggtctgggaagctgagggcaagtccagtcccaatggtcctgactttgagcgctgggtattggaaatggatgcaaagtacaatgtgtttttctccagtgctgtccatgcttctcatcttgtgaaatggccaggatcctcccctttgaaacctgctctgtaggagccacccttttcctttgtggttttatggagacctctccttcctaccctcctgcactgtttaagtactgtttaccatttttcattcacttctcttaaacttgtgaatgcttcnnnnnnnnnnnnnnntttgatgcaggcacttattgtaaattttaggaacccctgtgtagctattaatgagtaattatgcactaaatatgaaccctttgtttcttgtttattgagtttgtaggtaaaatgtatttttctacattattgcttattgcttagtaaaatttatttcataa

SEQ ID NO: 32507 - DNA, 126 bp, Macaca Mulatta
ttagaggcattcagaagtccagtatttcgacatggaacagataagaatggattcagcttgggtttcagtaaaaacatgcgacaagtttttggtgatgagaagaagtactggttgctacccattttt

SEQ ID NO: 32508 - DNA, 562 bp, Macaca Mulatta
  misc_feature (1)...(562): n = A,T,C or G
tataacgtgagggctgaatgcagcccgttctctggagaacttcctcacacaccgcagcaaagagaagactaaaagacaaacctgggtgcagccggagagnnnnnnnnnnnnnnnnnnnnnnnnnnnnnnnnnnnnttcaacctagggactccacataccccagctgggtctcattgttccagaactgcattagttaagattacccaaacttggatttcaaaggaatactttcattgttccgtctgtaacacgaagtaattggggccagctggatgtcaggatgcgtgtggttaccattgtaatcttgctctgcttttgcaaagctgctgagctgcgcaaagcaagctcaagcactgtgagaagccgagtgaatcatggccgggcgggtggaggccggagaggctccaacccggtcaaacgctatgcaccaagaatcccgtgtgacgtgtacacatatctccatgagaaatacttagattgtcaagaaagaaaattagtttattaaggcctggttggcctcaggatttgctgcacatgctgctagacaagaaacaagatccgc

SEQ ID NO: 32509 - DNA, 444 bp, Macaca Mulatta
tgccagagtggccaccttgcttatcctgtggccccggccctggtgatcaccatggcagctgggaagggagtcccgttgagcccatcggctgaaaacagatggcgacttagcgaacctgagctgggccggggctgcaagccagtgctgctggagaagacaaaccgcctgggccccgaggctgctgtgggcagggcaggccgggatgtgggcagtgtggagctggcactgttggcagccccaggcaagcccctgcctggcaagccactgcccctgaaggcgcgtggggagcagagtcagagcgccttcacggagctgccgaggatgaaggactggcaggtggatcctcaggcccgagagagggagcacgatgaccccacaggccagcctggcgtcaaggagctgacccaggacgtccccagaggcccagccggcagcaaagtcttc

SEQ ID NO: 32510 - DNA, 914 bp, Macaca Mulatta
  misc_feature (1)...(914): n = A,T,C or G
gttttctctttctttgatttgatccgctactgtgtcagtgtttgcaatcagattgcgtctcacctgcacatacatgtcttcagaatcaaggtttctacagctcattctaatcatcattaatgatgtaattggtattatataggaacaccatgttttctgcaggaaggaatctgaacatattaaggagaatgggggtggataagaacaaatataatttataataatcaatgttgtataacttttattctttattattggtaacactccctaactatcctgtgtgagaatgggaatttcaagtcccatcttgtaaattgtatatgttatcatgcagggtttgggccaagaaagcatgcagaaaaaaaatgccatgtgattgtaattatcctggattcagaataacattgtgatggggagccagatccacagtggtggggagttctaatgttgactatttgcaggccaaaagatgattgctttataattttaacaaatcatcgtcttttagtaacatccttgtttagtgtcttctcaagctttctttactaaggagttcagcttgtgacacagatacatcccactagcttgtgaggtggaactagtaataaagaccttgaatttggattgaaaggtttcctatttttacattgttgaggaagtnnnnnnnnnnnnnnnnnnnnnnnnattgctcaagaaatgattctctcacaggcttgggaaatcctgttagcatgcagaataatgtggtaactttgtcaatttcccattttatttttttaaataaatatatgatctgaaagccaactttttctcagttttattcagtgaaaagataaactaagttttaatattatttttttaaatttaagcaaaatttatttctgttctttaataaataagaaaatttggtccac

SEQ ID NO: 32511 - DNA, 2156 bp, Macaca Mulatta
  misc_feature (1)...(2156): n = A,T,C or G
gtgttcgacctacaccacaaaatgatgctataacggtacactttaaaccaattacattaaaagcatcagaaagtaaatacaccaaggttgcgagcattagttttgatggcaannnnnnnnnnnnnnnnnnnnnnnnnnnnnnnnnnnnnnnnnnnnnnnnnnnnnnnnnnnnnnnnnnnnnnnnnnnnnnnnnnnnnnnnnnnnnnnnnnnnnnnnnnnnnnnnnnnnnnnnnnnnnnnnnnnnnnnnnnnnnnnnnnnnnnnnnnnnnnnnnnnnnnnnnnnnnnnnnnnnnnnnnnnnnnnnnnnnnnnnnnnnnnnnnnnnnnnnnnnnnnnnnnnnnnnnnnnnnnnnnnnnnnnnnnnnnnnnnnnnnnnnnnnnnnnnnnnnnnnnnnnnnnnnnnnnnnnnnnnnnnnnnnnnnnnnnnnnnnnnnnnnnnnnnnnnnnnnnnnnnnnnnnnnnnnnnnnnnnnnnnnnnnnnnnnnnnnnnnnnnnnnnnnnnnnnnnnnnnnnnnnnnnnnnnnnnnnnnnnnnnnnnnnnnnnnnnnnnnnnnnnnnnnnnnnnnnnnnnnnnnnnnnnnnnnnnnnnnnnnnnnnnnnnnnnnnnnnnnnnnnnnnnnnnnnnnnnnnnnnnnnnnnnnnnnnnnnnnnnnnnnnnnnnnnnnnnnnnnnnnnnnnnnnnnnnnnnnnnnnnnnnnnnnnnnnnnnnnnnnnnnnnnnnnnnnnnnnnnnnnnnnnnnnnnnnnnnnnnnnnnnnnnnnnnnnnnnnnnnnnnnnnnnnnnnnnnnnnnnnnnnnnnnnnnnnnnnnnnnnnnnnnnnnnnnnnnnnnnnnnnnnnnnnnnnnnnnnnnnnnnnnnnnnnnnnnnnnnnnnnnnnnnnnnnnnnnnnnnnnnnnnnnnnnnnnnnnnnnnnnnnnnnnnnnnnnnnnnnnnnnnnnnnnnnnnnnnnnnnnnnnnnnnnnnnnnnnnnnnnnnnnnnnnnnnnnnnnnnnnnnnnnnnnnnnnnnnnnnnnnnnnnnnnnnnnnnnnnnnnnnnnnnnnnnnnnnnnnnnnnnnnnnnnnnnnnnnnnnnnnnnnnnnnnnnnnnnnnnnnnnnnnnnnnnnnnnnnnnnnnnnnnnnnnnnnnnnnnnnnnnnnnnnnnnnnnnnnnnnnnnnnnnnnnnnnnnnnnnnnnnnnnnnnnnnnnnnnnnnnnnnnnnnnnnnnnnnnnnnnnnnnnnnnnnnnnnnnnnnnnnnnnnnnnnnnnnnnnnnnnnnnnnnnnnnnnnnnnnnnnnnnnnnnnnnnnnnnnnnnnnnnnnnnnnnnnnnnnnnnnnnnnnnnnnnnnnnnnnnnnnnnnnnnnnnnnnnnnnnnnnnnnnnnnnnnnnnnnnnnnnnnnnnnnnnnnnnnnnnnnnnnnnnnnnnnnnnnnnnnnnnnnnnnnnnnnnnnnnnnnnnnnnnnnnnnnnnnnnnnnnnnnnnnnnnnnnnnnnnnnnnnnnnnnnnnnnnnnnnnnnnnnnnnnnnnnnnnnnnnnnnnnnnnnnnnnnnnnnnnnnnnnnnnnnnnnnnnnnnnnnnnnnnnnnnnnnnnnnnnnnnnnnnnnnnnnnnnnnnnnnnnnnnnnnnnnnnnnnnnnnnnnnnnnnnnnnnnnnnnnnnnnnnnnnnnnnnnnnnnnnnnnnnnnnnnnnnnnnnnnnnnnnnnnnnnnnnnnnnnnnnnnnnnnnnnnnnnnnnnnnnnnnnnnnnnnnnnnnnnnnnnnnnnnnnnnnnnnnnnnnnnnnnnnnnnnnnnnnnnnnnnnnnnnnnnnnnnnnnnnnnnnnnnnnnnnnnnnnnnnnnnnnnnnnnnnnnnnnnnnnnnnnnnnnnnnnnnnnnnnnnnnnnnnnnnnnnnnnnnnnnnnnnnnnnnnnnnnnnnnnnnnnnnnnnnnnnnnnnnnnnnnnnnnnnnnnnnnnnnnnnnnnnnnnnnnnnnnnnnnnnnnnnnnnnnnnnnnnnnnnnnnnnnnnnnnnnnaatttcacattgaaaagaacatttaaggtagagaatacaggacaacttcaaattcacatagaaaccattgaaatcagtggatactcctgcgaaggatatggctttaaagtggttaattgtcaggagtttgccctaagtgccaatgcctctagagatataatcatattg

SEQ ID NO: 32512 - DNA, 359 bp, Macaca Mulatta
ttgatttctaagcattggaagactgggacagactaaattaactactaagagcattctgtcactgcaccatgaggttgcccaattttcttctcaccctggaaatcctcattcatagtttccgacttaaatatgatgaaagggagatcaagagctctataaagtgtcctgaatgttaggacaggcactcatcccaagcaatagaatgtttcccttacattacattacattagtgctctgcctgcaccaataagagaatatgactgggtgtatcatagtcgtccatccatgcctcaggcccacttccctgatagtggacagggagaataggcaatgccgatgccttgacattctggacactt

SEQ ID NO: 32513 - DNA, 4915 bp, Macaca Mulatta
  misc_feature (1)...(4915): n = A,T,C or G
gaatttagcttgggttaaatcatataacatctgctttgaattggaagattgcaatgaaatttttattcagctttttaggactctcttctcagtgatcaannnnnnnnnnnnnnnnnnnnnnnnnnnnnnnnnnnnnnnnnnnnnnnnnnnnnnnnnnnnnnnnnnnnnnnnnnnnnnnnnnnnnnnnnnnnnnnnnnnnnnnnnnnnnnnnnnnnnnnnnnnnnnnnnnnnnnnnnnnnnnnnnnnnnnnnnnnnnnnnnnnnnnnnnnnnnnnnnnnnnnnnnnnnnnnnnnnnnnnnnnnnnnnnnnnnnnnnnnnnnnnnnnnnnnnnnnnnnnnnnnnnnnnnnnnnnnnnnnnnnnnnnnnnnnnnnnnnnnnnnnnnnnnnnnnnnnnnnnnnnnnnnnnnnnnnnnnnnnnnnnnnnnnnnnnnnnnnnnnnnnnnnnnnnnnnnnnnnnnnnnnnnnnnnnnnnnnnnnnnnnnnnnnnnnnnnnnnnnnnnnnnnnnnnnnnnnnnnnnnnnnnnnnnnnnnnnnnnnnnnnnnnnnnnnnnnnnnnnnnnnnnnnnnnnnnnnnnnnnnnnnnnnnnnnnnnnnnnnnnnnnnnnnnnnnnnnnnnnnnnnnnnnnnnnnnnnnnnnnnnnnnnnnnnnnnnnnnnnnnnnnnnnnnnnnnnnnnnnnnnnnnnnnnnnnnnnnnnnnnnnnnnnnnnnnnnnnnnnnnnnnnnnnnnnnnnnnnnnnnnnnnnnnnnnnnnnnnnnnnnnnnnnnnnnnnnnnnnnnnnnnnnnnnnnnnnnnnnnnnnnnnnnnnnnnnnnnnnnnnnnnnnnnnnnnnnnnnnnnnnnnnnnnnnnnnnnnnnnnnnnnnnnnnnnnnnnnnnnnnnnnnnnnnnnnnnnnnnnnnnnnnnnnnnnnnnnnnnnnnnnnnnnnnnnnnnnnnnnnnnnnnnnnnnnnnnnnnnnactgttggtagagaaaatctttgctcagtatcttgtcccccacaacctggaaacagaagagagaatgaaatgcttatattacttatatgctagtttggatccaaatgctgtaannnnnnnnnnnnnnnnnnnnnnnnnnnnnnnnnnnnnnnnnnnnnnnnnnnnnnnnnnnnnnnnnnnnnnnnnnnnnnnnnnnnnnnnnnnnnnnnnnnnnnnnnnnnnnnnnnnnnnnnnnnnnnnnnnnnnnnnnnnnnnnnnnnnnnnnnnnnnnnnnnnnnnnnnnnnnnnnnnnnnnnnnnnnnnnnnnnnnnnnnnnnnnnnnnnnnnnnnnnnnnnnnnnnnnnnnnnnnnnnnnnnnnnnnnnnnnnnnnnnnnnnnnnnnnnnnnnnnnnnnnnnnnnnnnnnnnnnnnnnnnnnnnnnnnnnnnnnnnnnnnnnnnnnnnnnnnnnnnnnnnnnnnnnnnnnnnnnnnnnnnnnnnnnnnnnnnnnnnnnnnnnnnnnnnnnnnnnnnnnnnnnnnnnnnnnnnnnnnnnnnnnnnnnnnnnnnnnnnnnnnnnnnnnnnnnnnnnnnnnnnnnnnnnnnnnnnnnnnnnnnnnnnnnnnnnnnnnnnnnnnnnnnnnnnnnnnnnnnnnnnnnnnnnnnnnnnnnnnnnnnnnnnnnnnnnnnnnnnnnnnnnnnnnnnnnnnnnnnnnnnnnnnnnnnnnnnnnnnnnnnnnnnnnnnnnnnnnnnnnnnnnnnnnnnnnnnnnnnnnnnnnnnnnnnnnnngaccttaattcccattttacatcaaaaagcaaagaggggtactccacaccaagcaaaacaggctgtgcactgtatacacgccatattcacaaataaagaagtccagcttgcacagatttttgannnnnnnnnnnnnnnnnnnnnnnnnnnnnnnnnnnnnnnnnnnnnnnnnnnnnnnnnnnnnnnnnnnnnnnnnnnnnnnnnnnnnnnnnnnnnnnnnnnnnnnnnnnnnnnnnnnnnnnnnnnnnnnnnnnnnnnnnnnnnnnnnnnnnnnnnnnnnnnnnnnnnnnnnnnnnnnnnnnnnnnnnnnnnnnnnnnnnnnnnnnnnnnnnnnnnnnnnnnnnnnnnnnnnnnnnnnnnnnnnnnnnnnnnnnnnnnnnnnnnnnnnnnnnnnnnnnnnnnnnnnnnnnnnnnnnnnnnnnnnnnnnnnnnnnnnnnnnnnnnnnnnnnnnnnnnnnnnnnnnnnnnnnnnnnnnnnnnnnnnnngtaaatctcatatgtctcgcttgcgattagctgctggtagtgccataatgaagcttgctcaggaaccttgttaccatgaaattattaccccagaacagtttcagctctgtgcacttgttattaatgngatgaatgttaccaagtaaggcagatatttgctcagaagctacataaggcacttgtgaagttactgctcccattggagtatatggcgatctttgccttgtgtgccaaagatcctgtgaaggagagaagagcacacgcacgacagtgtttactgaaaaatatcagtatacgcagggaatacattaaacagaaccctatggctactgnnnnnnnnnnnnnnnnnnnnnnnnnnnnnnnnnnnnnnnnnnnnnnnnnnnnnnnnnnnnnnnnnnnnnnnnnnnnnnnnnnnnnnnnnnnnnnnnnnnnnnnnnnnnnnnnnnnnnnnnnnnnnnnnnnnnnnnnnnnnnnnnnnnnnnnnnnnnnnnnnnnnnnnnnnnnnnnnnnnnnnnnnnnnnnnnnnnnnnnnnnnnnnnnnnnnnnnnnnnnnnnnnnnnnnnnnnnnnnnnnnnnnnnnnnnnnnnnnnnnnnnnnnnnnnnnnnnnnnnnnnnnnnnnnnnnnnnnnnnnnnnnnnnnnnnnnnnnnnnnnnnnnnnnnnnnnnnnnnnnnnnnnnnnnnnnnnnnnnnnnnnnnnnnnnnnnnnnnnnnnnnnnnnnnnnnnnnnnnnnnnnnnnnnnnnnnnnnnnnnnnnnnnnnnagccaaagcctgctggagtactaggtgcggtaaataagcctttatcagcaacgggaaggaaaccctatgttagaagcactggcactgagactggaagcaatattaatgtaaattcagagctgaacccttcaaccggaaatcgatcaaggcaacttttctctccaattattttnnnnnnnnnnnnnnnnnnnnnnnnnnnnnnnnnnnnnnnnnnnnnnnnnnnnnnnnnnnnnnnnnnnnnnnnnnnnnnnnnnnnnnnnnnnnnnnnnnnnnnnnnnnnnnnnnnnnnnnnnnnnnnnnnnnnnnnnnnnnnnnnnnnnnnnnnnnnnnnnnnnnnnnnnnnnnnnnnnnnnnnnnnnnnnnnnnnnnnnnnnnnnnnnnnnnnnnnnnnnnnnnnnnnnnnnnnnnnnnnnnnnnnnnnnnnnnnnnnnnnnnnnnnnnnnnnnnnnnnnnnnnnnnnnnnnnnnnnnnnnnnnnnnnnnnnnnnnnnnnnnnnnnnnnnnnnnnnnnnnnnnnnnnnnnnnnnnnnnnnnnnnnnnnnnnnnnnnnnnnnnnnnnnnnnnnnnnnnnnnnnnnnnnnnnnnnnnnnnnnnnnnnnnnnnnnnnnnnnnnnnnnnnnnnnnnnnnnnnnnnnnnnnnnnnnnnnnnnnnnnnnnnnnnnnnnnnnnnnnnnnnnnnnnnnnnnnnnnnnnnnnnnnnnnnnnnnnnnnnnnnnnnnnnnnnnnnnnnnnnnnnnnnnnnnnnnnnnnnnnnnnnnnnnnnnnnnnnnnnnnnnnnnnnnnnnnnnnnnnnnnnnnnnnnnnnnnnnnnnnnnnnnnnnnnnnnnnnnnnnnnnnnnnnnnnnnnnnnnnnnnnnnnnnnnnnnnnnnnnnnnnnnnnnnnnnnnnnnnnnnnnnnnnnnnnnnnnnnnnnnnnnnnnnnnnnnnnnnnnnnnnnnnnnnnnnnnnnnnnnnnnnnnnnnnnnnnnnnnnnnnnnnnnnnnnnnnnnnnnnnnnnnnnnnnnnnnnnnnnnnnnnnnnnnnnnnnnnnnnnnnnnnnnnnnnnnnnnnnnnnnnnnnnnnnnnnnnnnnnnnnnnnnnnnnnnnnnnnnnnnnnnnnnnnnnnnnnnnnnnnnnnnnnnnnnnnnnnnnnnnnnnnnnnnnnnnnnnnnnnnnnnnnnnnnnnnnnnnnnnnnnnnnnnnnnnnnnnnnnnnnnnnnnnnnnnnnnnnnnnnnnnnnnnnnnnnnnnnnnnnnnnnnnnnnnnnnnnnnnnnnnnnnnnnnnnnnnnnnnnnnnnnnnnnnnnnnnnnnnnnnnnnnnnnnnnnnnnnnnnnnnnnnnnnnnnnnnnnnnnnnnnnnnnnnnnnnnnnnnnnnnnnnnnnnnnnnnnnnnnnnnnnnnnnnnnnnnnnnnnnnnnnnnnnnnnnnnnnnnnnnnnnnnnnnnnnnnnnnnnnnnnnnnnnnnnnnnnnnnnnnnnnnnnnnnnnnnnnnnnnnnnnnnnnnnnnnnnnnnnnnnnnnnnnnnnnnnnnnnnnnnnnnnnnnnnnnnnnnnnnnnnnnnnnnnnnnnnnnnnnnnnnnnnnnnnnnnnnnnnnnnnnnnnnnnnnnnnnnnnnnnnnnnnnnnnnnnnnnnnnnnnnnnnnnnnnnnnnnnnnagtgttttgcttttgtctgatggtctgggctcatttttatgtttattttagaaaacttgcatcaatatattatgtctcagcattgttcagcataggtaatgtgtgcactttttgtgtacacataatcatatttaagttttttgcataaaataaatgcttctagatgtcatggcagtctttttaatctttttatcatatgctttcttgtgaattttttcatgttaaagagctaaagtcataacatgattacagtcaactctcctgtatctgtataaaatagtgactatacctcagtttttaaattttgtgat

SEQ ID NO: 32514 - DNA, 135 bp, Macaca Mulatta
ggctgaagccgatgtagcttctctgaacagacgcatccagctcgttgaggaagagttggatcgtgcccaggagcgtctggcaacagctttgcagaagctggaggaagctgagaaggcagcagatgagagtgagag

SEQ ID NO: 32515 - DNA, 210 bp, Macaca Mulatta
ggcacacctctggcccgagccagtatcaaaagtgcaaaggtagatggggtctcttatttccggcacaaggaaaggcttctgcgcatctccattcgccacatggttaaatcccaggtgttttactggattgtgctgagccttgtagcactcaacactgcctgtgtggccattgtccatcacaaccagccccagtggctcacccacctcctc

SEQ ID NO: 32516 - DNA, 146 bp, Macaca Mulatta
gaggaatgtcttaagtggtctcaatcttgaccctgaagaatgagaggagagtgagatgagttttcctctaatgagagtgaatattggagtgtgaagtagatggtttgagaaggaaaatagttataattattgctgtgtaagtactc

SEQ ID NO: 32517 - DNA, 2167 bp, Macaca Mulatta
  misc_feature (1)...(2167): n = A,T,C or G
cacacgaaccaagaggacgcgggcctcgaggcgttttaagttctacccgctggtgaaggtgcagtgttctccccatttccgcttcttcctatgctccatgtacgcgcccgtgtgcaccgtgctcgatcaggccatcccgccgtgtcgttctctgtgcgagcgcgcccgccagggctgcgaggcgctcatgaacaagttcggcttccagtggcccgagcggctgcgctgcgagaacttcccggtgcacggcgcgggcgagatctgcgtgggccagaatacgtcagacggctccggaggtccaggcggcggccccactgcctaccctactgcgccctacctgccggacctgcccttcaccgcgctgcctccgggggcctcagatggcagggggcgtcccgccttccccttctcatgcccccgtcagctcaaggtgcccccctacctgggctaccgcttcctgggtgagcgcgattgcggcgccccgtgcgaaccgggccgtgccaacggcctgatgtactttaaggaggaggagaggcgcttcgcccgcctctgggtgggcgtgtggtcggtgctgtgctgcgcctcgacgctctttaccgttctcacctacctggtggacatgcggcccttcagctacccagagcggcccatcatcttcttgtcgggctgctacttcatggtggccgtggcgcacgtggccggcttccttctggaggaccgcgccgtgtgcgtggagcgcttctcggacgatgcctaccgcacggtggcgcagggcaccaagaaggagggctgcaccatcctctttatggtgctttacttcttcggcatggccagctccatctggtgggtcattctgtctctcacttggttcctggcggccggcnnnnnnnnnnnnnnnnnnnnnnnnnnnnnnnnnnnnnnnnnnnnnnnnnnnnnnnnnnnnnnnnnnnnnnnnnnnnnnnnnnnnnnnnnnnnnnnnnnnnnnnnnnnnnnnnnnnnnnnnnnnnnnnnnnnnnnnnnnnnnnnnnnnnnnnnnnnnnnnnnnnnnnnnnnnnnnnnnnnnnnnnnnnnnnnnnnnnnnnnnnnnnnnnnnnnnnnnnnnnnnnnnnnnnnnnnnnnnnnnnnnnnnnnnnnnnnnnnnnnnnnnnnnnnnnnnnnnnnnnnnnnnnnnnnnnnnnnnnnnnnnnnnnnnnnnnnnnnnnnnnnnnnnnnnnnnnnnnnnnnnnnnnnnnnnnnnnnnnnnnnnnnnnnnnnnnnnnnnnnnnnnnnnnnnnnnnnnnnnnnnnnnnnnnnnnnnnnnnnnnnnnnnnnnnnnnnnnnnnnnnnnnnnnnnnnnnnnnnnttcccgcccatgagccccgacttcaccgtcttcatgatcaagtacttgatgaccatgatcgtgggcatcaccactggcttctggatctggtcgggcaagaccctgcagtcgtggcgccgcttctaccacagactcagccacagcagcaagggggaaactgcagtatgagccccggccccttcctacgtttcccacccctgccctcttgcaagaggagaggcagggtagggaaagaactgctgggtgggggcctgtttctgtaacctccccctctactgagaagtgacctggaaatgagaagttctttgcagatttggggcgaggggtgatttggaaaaggagatctgggtggaaagcggtttggatgaaaagacttcaggcaaagacttgcagtaagataatgataacgacgatgtgaatcgtgaaaggtacaggccagcttgggcctaagagaagattgagaccagcagagactgctgtgagtttctcccggctctggggctgaatgggggctgtgactgatccccctgctgcagggcgagtggcctgtctagacccctgtgaggccccgggaaaggtacagccctgtctgcggtggctgctttgttggaaagagggagggcctcctgcggtgtccttgtcaagcagtggtcaaaccataatctcttttcactggggccaaactggagcccagatgggttaatttccagggtcagacattacggtctctcctcccctgccccctcctacgggttttttctcgcgtactcctttcaagtcttgtaaaataaggatttagaagtctgggaggcctgtctgctagaa

SEQ ID NO: 32518 - DNA, 2165 bp, Macaca Mulatta
  misc_feature (1)...(2165): n = A,T,C or G
gataagcaacatgaagtggaaattccttctccaactcagaaggaaaaggagaaaaagaaaagaccaatgtctcagatcagtggagtcaagaaattgatgcacagctctagcctgactaattcaagtattccaaggtttggagttaaaactgaacaagaagatgtccttgccaaggnnnnnnnnnnnnnnnnnnnnnnnnnnnnnnnnnnnnnnnnnnnnnnnnnnnnnnnnnnnnnnnnnnnnnnnnnnnnnnnnnnnnnnnnnnnnnnnnnnnnnnnnnnnnnnnnnnnnnnnnnnnnnnnnnnnnnnnnnnnnnnnnnnnnnnnnnnnnnnnnnnnnnnnnnnnnnnnnnnnnnnnnnnnnnnnnnnnnnnnnnnnnnnnnnnnnnnnnnnnnnnnnnnnnnnnnnnnnnnnnnnnnnnnnnnnnnnnnnnnnnnggccgtgtttacagatttggagattcttgcagcaatttttgccagtgcaatacatgatgtagatcatcctggtgtgtccaatcaatttctgatcaatacaannnnnnnnnnnnnnnnnnnnnnnnnnnnnnnnnnnnnnnnnnnnnnnnnnnnnnnnnnnnnnnnnnnnnnnnnnnnnnnnnnnnnnnnnnnnnnnnnnnnnnnnnnnnnnnnnnnnnnnnnnnnnnnnnnnnnnnnnnnnnnnnnnnnnnnnnnnnnnnnnnnnnnnnnnnnnnnnnnnnnnnnnnnnnnnnnnnnnnnnnnnnnnnnnnnnnnnnnnnnnnnnnnnnnnnnnnnnnnnnnnnnnnnnnnnnnnnnnnnnnnnnnnnnnnnnnnnnnnnnnnnnnnnnnnnnnnnnnnnnnnnnnnnnnnnnnnnnnnnnnnnnnnnnnnnnnnnnnnnnnnnnnnnnnnnnnnnnnnnnnnnnnnnnnnnnnnnnnnnnnnnnnnnnnnnnnnnnnnnnnnnnnnnnnnnnnnnnnnnnnnnnnnnnnnnnnnnnnnnnnnnnnnnnnnnnnnnnnnnnnnnnnnnnnnnnnnnnnnnnnnnnnnnnnnnnnnnnnnnnnnnnnnnnnnnnnnnnnnnnnnnnnnnnnnnnnnnnnnnnnnnnnnnnnnnnnnnnnnnnnnnnnnnnnnnnnnnnnnnnnnnnnnnnnnnnnnnnnnnnnnnnnnnnnnnnnnnnnnnnnnnnnnnnnnnnnnnnnnnnnnnnnnnnnnnnnnnnnnnnnnnnnnnnnnnnnnnnnnnnnnnnnnnnnnnnnnnnnnnnnnnnnnnnnnnnnnnnnnnnnnnnnnnnnnnnnnnnnnnnnnnnnnnnnnttgtactcaagactcggagtctactgaacttcccctcgatgaacaggttgaagaggaggcagtaggggaagaagaggaaagccatcctgaagcctgtgtcatagatgatcgttctcctgacacgtaacagtgcaaaaactttcatgccnnnnnnnnnnnnnnnngaaaaattgtttccaaagtgcatgtcacatgccacaaccacggtcacacctcactgtcatctgccaggacgtttattgaacaaaactgaccttgactactcagtccggcgctcaggaatatcgtaaccagttttttcacctccatgtcatcagagcaaggtggacatcttcatgaacagcgtttttaacaagatttcagcttggtagagctgacaaggcagataaaatctactccaaattgttttcaagagagtgtggctcatcaggcggcccaaaagttgattggacttggggtttctattctttttatttgtttccaatattttcagaagaaaggcattgcacagagtgaacttaatggacaaagcaacaaatatgtcaagaacaggacatagcacgcatctgttaccagtaggaggaggatgagccacagaaattgcataattttctaatttcaagtcttcctgatacatgactgaatagtgtggttcagtgagctgcactgacctctacattttgtatgatatgtaaaacagattttttgtagagcttacttttattattaaatgtattgaggtattatatttaaaaaactatgttcagaacttcatctgccactggttatttttttctaaagagtaacttgcaagttttcagtacaaatctgtgctacactggataaaaatctaatttacaaattttacttgcacctt

SEQ ID NO: 32519 - DNA, 1800 bp, Macaca Mulatta
  misc_feature (1)...(1800): n = A,T,C or G
ccagacccgtacctgctgctgcgtcatctcggtaagggggttggctcaagctcagaggcttcttcgcatgtactcgggccgccggtggctggattctcacgggacttggctaccgggtcgctgtctcatccgcagacttcggctacctacggaggcatcaggtnnnnnnnnnnnnnnnnnnnnnnnnnnnnnnnnnnnnnnnnnnnnnnnnnnnnnnnnnnnnnnnnnnnnnnnnnnnnnnnnnnnnnnnnnnnnnnnnnnnnnnnnnnnnnnnnnnnnnnnnnnnnnnnnnnnnnnnnnnnnnnnnnnnnnnnnnnnnnnnnnnnnnnnnnnnnnnnnnnnnnnnnnnnnnnnnnnnnnnnnnnnnnnnnnnnnnnnnnnnnnnnnnnnnnnnnnnnnnnnnnnnnnnnnnnnnnnnnnnnnnnnnnnnnnnnnnnnnnnnnnnnnnnnnnnnnnnnnnnnnnnnnnnnnnnnnnnnnnnnnnnnnnnnnnnnnnnnnnnnnnnnnnnnnnnnnnnnnnnnnnnnnnnnnnnnnnnnnnnnnnnnnnnnnnnnnnnnnnnnnnnnnnnnnnnnnnnnnnnnnnnnnnnnnnnnnnnnnnnnnnnnnnnnnnnnnnnnnnnnnnnnnnnnnnnnnnnnnnnnnnnnnnnnnnnnnnnnnnnnnnnnnnnnnnnnnnnnnnnnnnnnnnnnnnnnnnnnnnnnnnnnnnnnnnnnnnnnnnnnnnnnnnnnnnnnnnnnnnnnnnnnnnnnnnnnnnnnngattttgatgaacagacagccgatgactgggatgtggacatgagcgtgtactatgacagagnnnnnnnnnnnnnnnnnnnnnnnnnnnnnnnnnnnnnnnnnnnnnnnnnnnnnnnnnnnnnnnnnnnnnnnnnnnnnnnnnnnnnnnnnnnnnnnnnnnnnnnnnnnnnnnnnnnnnnnnnnnnnnnnnnnnnnnnnnnnnnnnnnnnnnnnnnnnnnnnnnnnnnnnnnnnnnnnnnnnnnnnnnnnnnnnnnnnnnnnnnnnnnnnnnnnnnnnnnnnnnnnnnnnnnnnnnnnnnnnnnnnnnnnngtaccatggagagaagctgcagccatttgggcaactgaagaggccccgtagaaatggcctggggctcatctccaccatctatgatgagcctctaccccaggaccagacggagtcactgctccgccgccagccacccaccagcatgaagtttcggacagacatggcctttgtgaggggttccagttgtgcttcagacagcccctcattgcctgattgaccaggttgggggcttcnnnnnnnnnnnnnnnnnnnnnnnnnnnnnnnnnnnnnnnnnnnnnnnnnnnnnnnnnnnnnnnnnnnnnnnnnnnnnnnnnnnnnnnnnnnnnnnnnnnnnnnnnnnnnnnnnnnnnnnnnnnnnnnnnnnnnnnnnnnnnnnnnnnnnnnnnnnnnnnnnnnnnnnnnnnnnnnnnnnnnnnnnnnnnnnnnnnnnnnnnnnnnnnnnnnnnnnnnnnnnnnnnnnnnnnnnnnnnnnnnnnnnnnnnnnnnnnnnnnnnnaaaagctggattgagtgaggctatcagcacagccttccttggggactctgaaggtgtcccgacgaaggccagaaagaggggggaagggacctggacgaggagaggatttgtgagcttggaagagccggccttgggcgggcccttcaccgcctcactaggtgggactgcagcagagagtccgcgggaagtggcttgggtgtgcgacgtcacggaagaataaagacgtttactactgg

SEQ ID NO: 32520 - DNA, 575 bp, Macaca Mulatta
  misc_feature (1)...(575): n = A,T,C or G
ggtgactcgacaggccttaaatgagatctcggcccggcacagtgagatccagcagcttgaacgcagtattcgtgagctgcacgatatcttcacttttctggcttctgaagtggagatgcagggggagatgatcaatcggattgagaagaacatcctgagctcagcggactacgtggaacgcgggcaggagcacgtcaagacagccctggagaaccagaagaaggcgaggaagaagaaagtcttgattgccatctgtgtgtccatcaccgtcgtcctcctagcagtcatcattggcgtcacagtggttggataatgtcacacattgttggcactaggagcaccagggacccagggcctggccttctctcccagcagcctgggggacagggcagagcctccagctggaccccttcctcacactggcccctatgcagaagggcagacagttcttctggggttggcagctgctcattcatggtggcctcctccttcaggcctcagtgcctgggggaggcctgcactgtcctgattggtcgggacacacagttttgnnnnnnnnnnnnnnnnnnnnnnnn

SEQ ID NO: 32521 - DNA, 631 bp, Macaca Mulatta
tactacttggaggcttttatgtccttgttgcatttatgtttttgcagtcaatgtgaattcttatgaatgtacaacacaaactgtatgaagccatgaaggaaacagaggggccaaagggtgggacagaaaagacattgcagtatgaaggaaggctttggtttgctcaaagtgccaggtgtagggatgaacctctgacgggctttctgcccaagagatgagagcctcctcaccccagctgatgtccagagctgatttagctgcagagctctctgtgtcttttgctttaaagaaaaattgccagcactcgaacctcaccaaccttcccattacccacatctgtaattggtacacttcgaattttataactatgcacatcttttgatttcttaacaagcaaatgaaagaaagaaggaaaaaagaaaggagtccctttggagacgacatactatcagggaaggataagtgtgtagttttttgactggcatctgcaaagacaagcatttcataaaatttgcaagtgtatggaggactaacctcactgacaggaggggattccacctggaattagctttatgattgttgattgcctattttgccatttatagactgaaagaaggcactaaagatgaga

SEQ ID NO: 32522 - DNA, 445 bp, Macaca Mulatta
gaaaatttgcccatctgctgctcctcccccttggctctccacctgggatttgctattgaatctctacccctctcccaccacgcagtactgattgctcactgaaagactcagcacccccaatggtgtgcggaagccaggcgggcgattacaatccaattacctattgtcgactcagcccacacaagcttttctcctcctcttgcagggcatggggccaggctccactcccaagtgagactggccccttccatggtatagggtaagagaagggcctgtaggccctggtgaatcgaatccagcacaggccttctcccctgtaagacaacaggactgagcagaaccaaacacttctctcaactgactctgctccctgccctcaccatctcaaactctgattcccactccactcttcgaggtttctctcagctttttgatctggctcccg

SEQ ID NO: 32523 - DNA, 142 bp, Macaca Mulatta
aagtcgaccacctcaagcaggagatctccaggctggtgcgcgagagggacgcgtacaaggagaaatacgagaagttggtgtgcagcggcttccgagaaaacggctcgagcagcgacaacccgtcctctcccgagtttttcat

SEQ ID NO: 32524 - DNA, 537 bp, Macaca Mulatta
agctctccagagacgctcatcctacagcctcagttcgggcccaaccttctctctccagctgccaccacagcctggaggcgcctgcctccaccctcccgaatggtgctcctcctagcaggcctcggcccaggatccaagccccctttgccccccgccttggagctgttgctccgggtttctcatagtggactccctgtggcgggaagggaagaacttttgcacagacaaggcttcagctataagaaccccactgacaacttgaatgtcaacctctaacctagtgtgaggttcttcctgtgcccacgttttctgccttttgagaagagaaacccttctcctggccatctagaacccaggaagccccaagctggggccctggtcccagcatgtcagtcctctcttgtgcatagggctctgccctctccctgtcagcatggccgagctcagacaggttccaggagaacgggaaaccccacagggggaactgcggcctgaagtggcagaggatgaagtccccaggagcccagtctcaaaaga

SEQ ID NO: 32525 - DNA, 3989 bp, Macaca Mulatta
  misc_feature (1)...(3989): n = A,T,C or G
aggaaaatcctgttgtgagtaaggattccacaggtcacataccagagaggttttccctcagctgctctcaactttgtaatcttgtgaagaagctgacaagcttggnnnnnnnnnnnnnnnnnnnnnnnnnnnnnnnnnnnnnnnnnnnnnnnnnnnnnnnnnnnnnnnnnnnnnnnnnnnnnnnnnnnnnnnnnnnnnnnnnnnnnnnnnnnnnnnnnnnnnnnnnnnnnnnnnnnnnnnnnnnnnnnnnnnnnnnnnnnnnnnnnnnnnnnnnnnnnnnnnnnnnnnnnnnnnnnnnnnnnnnnnnnnnnnnnnnnnnnnnnnnnnnnnnnnnnnnnnnnnnnnnnnnnnnnnnnnnnnnnnnnnnnnnnnnnnnnnnnnnnnnnnnnnnnnnnnnnnnnnnnnnnnnnnnnnnnnnnnnnnnnnnnnnnnnnnnnnnnnnnnnnnnnnnnnnnnnnnnnnnnnnnnnnnnnnnnnnnnnnnnnnnnnnnnnnnnnnnnnnnnnnnnnnnnnnnnnnnnnnnnnnnnnnnnnnnnnnnnnnnnnnnnnnnnnnnnnnnnnnnnnnnnnnnnnnnnnnnnnnnnnnnnnnnnnnnnnnnnnnnnnnnnnnnnnnnnnnnnnnnnnnnnnnnnnnnnnnnnnnnnnnnnnnnnnnnnnnnnnnnnnnnnnnnnnnnnnnnnnnnnnnnnnnnnnnnnnnnnnnnnnnnnnnnnnnnnnnnnnnnnnnnnnnnnnnnnnnnnnnnnnnnnnnnnnnnnnnnnnnnnnnnnnnnnnnnnnnnnnnnnnnnnnnnnnnnnnnnnnnnnnnnnnnnnnnnnnnnnnnnnnnnnnnnnnnnnnnnnnnnnnnnnnnnnnnnnnnnnnnnnnnnnnnnnnnnnnnnnnnnnnnnnnnnnnnnnnnnnnnnnnnnnnnnnnnnnnnnnnnnnnnnnnnnnnnnnnnnnnnnnnnnnnnnnnnnnnnnnnnnnnnnnnnnnnnnnnnnnnnnnnnnnnnnnnnnnnnnnnnnnnnnnnnnnnnnnnnnnnnnnnnnnnnnnnnnnnnnnnnnnnnnnnnnnnnnnnnnnnnnnnnnnnnnnnnnnnnnnnnnnnnnnnnnnnnnnnnnnnnnnnnnnnnnnnnnnnnnnnnnnnnnnnnnnnnnnnnnnnnnnnnnnnnnnnnnnnnnnnnnnnnnnnnnnnnnnnnnnnnnnnnnnnnnnnnnnnnnnnnnnnnnnnnnnnnnnnnnnnnnnnnnnnnnnnnnnnnnnnnnnnnnnnnnnnnnnnnnnnnnnnnnnnnnnnnnnnnnnnnnnnnnnnnnnnnnnnnnnnnnnnnnnnnnnnnnnnnnnnnnnnnnnnnnnnnnnnnnnnnnnnnnnnnnnnnnnnnnnnnnnnnnnnnnnnnnnnnnnnnnnnnnnnnnnnnnnnnnnnnnnnnnnnnnnnnnnnnnnnnnnnnnnnnnnnnnnnnnnnnnnnnnnnnnnnnnnnnnnnnnnnnnnnnnnnnnnnnnnnnnnnnnnnnnnnnnnnnnnnnnnnnnnnnnnnnnnnnnnnnnnnnnnnnnnnnnnnnnnnnnnnnnnnnnnnnnnnnnnnnnnnnnnnnnnnnnnnnnnnnnnnnnnnnnnnnnnnnnnnnnnnnnnnnnnnnnnnnnnnnnnnnnnnnnnnnnnnnnnnnnnnnnnnnnnnnnnnnnnnnnnnnnnnnnnnnnnnnnnnnnnnnnnnnnnnnnnnnnnnnnnnnnnnnnnnnnnnnnnnnnnnnnnnnnnnnnnnnnnnnnnnnnnnnnnnnnnnnnnnnnnnnnnnnnnnnnnnnnnnnnnnnnnnnnnnnnnnnnnnnnnnnnnnnnnnnnnnnnnnnnnnnnnnnnnnnnnnnnnnnnnnnnnnnnnnnnnnnnnnnnnnnnnnnnnnnnnnnnnnnnnnnnnnnnnnnnnnnnnnnnnnnnnnnnnnnnnnnnnnnnnnnnnnnnnnnnnnnnnnnnnnnnnnnnnnnnnnnnnnnnnnnnnnnnnnnnnnnnnnnnnnnnnnnnnnnnnnnnnnnnnnnnnnnnnnnnnnnnnnnnnnnnnnnnnnnnnnnnnnnnnnnnnnnnnnnnnnnnnnnnnnnnnnnnnnnnnnnnnnnnnnnnnnnnnnnnnnnnnnnnnnnnnnnnnnnnnnnnnnnnnnnnnnnnnnnnnnnnnnnnnnnnnnnnnnnnnnnnnnnnnnnnnnnnnnnnnnnnnnnnnnnnnnnnnnnnnnnnnnnnnnnnnnnnnnnnnnnnnnnnnnnnnnnnnnnnnnnnnnnnnnnnnnnnnnnnnnnnnnnnnnnnnnnnnnnnnnnnnnnnnnnnnnnnnnnnnnnnnnnnnnnnnnnnnnnnnnnnnnnnnnnnnnnnnnnnnnnnnnnnnnnnnnnnnnnnnnnnnnnnnnnnnnnnnnnnnnnnnnnnnnnnnnnnnnnnnnnnnnnnnnnnnnnnnnnnnnnnnnnnnnnnnnnnnnnnnnnnnnnnnnnnnnnnnnnnnnnnnnnnnnnnnnnnnnnnnnnnnnnnnnnnnnnnnnnnnnnnnnnnnnnnnnnnnnnnnnnnnnnnnnnnnnnnnnnnnnnnnnnnnnnnnnnnnnnnnnnnnnnnnnnnnnnnnnnnnnnnnnnnnnnnnnnnnnnnnnnnnnnnnnnnnnnnnnnnnnnnnnnnnnnnnnnnnnnnnnnnnnnnnnnnnnnnnnnnnnnnnnnnnnnnnnnnnnnnnnnnnnnnnnnnnnnnnnnnnnnnnnnnnnnnnnnnnnnnnnnnnnnnnnnnnnnnnnnnnnnnnnnnnnnnnnnnnnnnnnnnnnnnnnnnnnnnnnnnnnnnnnnnnnnnnnnnnnnnnnnnnnnnnnnnnnnnnnnnnnnnnnnnnnnnnnnnnnnnnnnnnnnnnnnnnnnnnnnnnnnnnnnnnnnnnnnnnnnnnnnnnnnnnnnnnnnnnnnnnnnnnnnnnnnnnnnnnnnnnnnnnnnnnnnnnnnnnnnnnnnnnnnnnnnnnnnnnnnnnnnnnnnnnnnnnnnnnnnnnnnnnnnnnnnnnnnnnnnnnnnnnnnnnnnnnnnnnnnnnnnnnnnnnnnnnnnnnnnnnnnnnnnnnnnnnnnnnnnnnnnnnnnnnnnnnnnnnnnnnnnnnnnnnnnnnnnnnnnnnnnnnnnnnnnnnnnnnnnnnnnnnnnnnnnnnnnnnnnnnnnnnnnnnnnnnnnnnnnnnnnnnnnnnnnnnnnnnnnnnnnnnnnnnnnnnnnnnnnnnnnnnnnnnnnnnnnnnnnnnnnnnnnnnnnnnnnnnnnnnnnnnnnnnnnnnnnnnnnnnnnnnnnnnnnnnnnnnnnnnnnnnnnnnnnnnnnnnnnnnnnnnnnnnnnnnnnnnnnnnnnnnnnnnnnnnnnnnnnnnnnnnnnnnnnnnnnnnnnnnnnnnnnnnnnnnnnnnnnnnnnnnnnnnnnnnnnnnnnnnnnnnnnnnnnnnnnnnnnnnnnnnnnnnnnnnnnnnnnnnnnnnnnnnnnnnnnnnnnnnnnnnnnnnnnnnnnnnnnnnnnnnnnnnnnnnnnnnnnnnnnnnnnnnnnnnnnnnnnnnnnnnnnnnnnnnnnnnnnnnnnnnnnnnnnnnnnntgcagaaataactgttcaaccaactgtggaagaggcctccgacaactgcactcaagagtgtctcatctatggccattctgatgcctgctggatgccagcgtctctgaatgattccagctcttcgcaagcacaggcctctgctctatgccacagcccaccactgtcacaggcctctactcaccaccacagcccaccagtgacacagaccattgctctctgccacagccctccagtgacacagaccatcgcattatgccatagccctccaccaatacagatctctgctctccaccatagtcctcctctagcgcaggctactgcacttcgccacagcccaccatcagcacaggcctcagccctctgctacagccctcctttagcacaggctgctgcaatctgccacggctctcctctgccccaggttactgccctccatcg

SEQ ID NO: 32526 - DNA, 829 bp, Macaca Mulatta
atttccaaatggccccacacaagcttttacttccccaaatggtgtggggaaatatctatttaaaataaacagctgaacttctgcatagtcaaggctctaggcagcgcctggcatccgtcacccccacctcccatacccagccttgcttcctggaaatttcatggcagcactgagacattgcatgtagtcttcttacttctttatgtaataatgttcctacaggcagatgtatcctgtctagtgctatgaagagccctaggagtaactggcagtaaatggataatcatcagggagtgtgattacaataaataaagttttcagtacaaacaatattgtttcatacaattgacttttgaaagctgtttgcataggatcggtaatatttctttgtccaagagggtaggaattcggcacgttactcagaagcgttcccagtgaaatttatctcctgctatttcagctgtgctttatcatcgctggggacatctagacttggccaagaaacactatgaaatctccttgcagcttgaccccacggcatcaggaactaaggagaactatggtctgctaagaagaaagctagaactaatgcaaaagaaggacgtctgatcctttttccttcatgttttcagtttgagtgtgtgtgtgcatgaggcatatcattaatagtatgtggttacatttaaccatttaaaagtcttagacatgttattttattgattttttctatgaaaacaaagacatgcaaaaagattatagcaccagcaaaagactcttgaatgcttgatacgatttttcattgaaattaatggttcagacaactcaaatg

SEQ ID NO: 32527 - DNA, 753 bp, Macaca Mulatta
aagggttgtcaaaatgacccattcaagtacttacttcttggttaaaaggcccactgggagagtcatctgatcgtagacaatgtcctttcactgctgaaaaaatcccgctggctcccaagaaaagaaaatggtctgaagcctctgttgtggctctcacaactcatctttccccaagtcatcaagttccacatcactgaggtcaatgtcatcctccacgggaagctcgccatccctgccgtcccaaggctctctctcaacgatggtagggaaagccccgcctcctacaggtgccgtggagccacgcccaaaagagagctccctgagaaactcgttaatgccttgctcactgaaggagcctttcagcagagcaaatttcatcttgcgtgcattgatggcggccatggcggggtacccaaacccgccaatccccagcgcggtctcaagttcagactgggctccggcttctgtccacagccacccccacattttctttttgtatttgtctgccatcttcagaagaacttccagataagaatttcggcctgcagctccagtatcaaggatatgcggtagcacagccacaacacagagctggtgctcctcacacgtcctcttggcaatgtcctcgttgataatctcaagcagctcaggaggtggggcgttatcagaaaacaaatcaagggcccgggacactatgtcggatcttgtccgcccaccgtcgtaatccacaggagactcgcctttctgaaatcc

SEQ ID NO: 32528 - DNA, 971 bp, Macaca Mulatta
  misc_feature (1)...(971): n = A,T,C or G
taagctcaggagagcttgccttgattatactggctttgggagcatgtcgtaaccctgacgaaaacttaatatatgattaccacctgattgacaagctagaaaataaattccannnnnnnnnnnnnnnnnnnnnnnnnnnnnnnnnnnnnnnnnnnnnnnnnnnnnnnnnnnnnnnnnnnnnnnnnnnnnnnnnnnnnnnnnnnnnnnnnnnnnnnnnnnnnnnnnnnnnnnnnnnnnnnnnnnnnnnnnnnnnnnnnnnnnnnnnnnnnnnnnnnnnnnnnnnnnngatactggtgcaatggctgtcctggctctgacctgtgtgaagaggagtctaataaatgggcaggtcaaaacagatgaaagcaatttaaagaacatcagtatttatataaagtcactggtagaaaagattctgtctgagaaaaaagaaaatggtctaattggaaacacatttagcacaggagaagccatgcaggnnnnnnnnnnnnnnnnnnnnnnnnnnnnnnnnnnnnnnnnnnnnnnnnnnnnnnnnnnnnnnnnnnnnnnnnnnnnnnnnnnnnnnnnnnnnnnnnnnnnnnnnnnnnnnnnnnnnnnnnnnnnnnnnnnnnnnnnnnnnnnnnnnnnnnnnnnnnnnnnnnnnnnnnnnnnnnnnnnnnnnnnnncaggtaacttcagcaactccactcacgagcctgtaactgtgacagctcctggctcacaatcatctatctctgtcaattactctgtgacaatcaatgaaacatattccgccaatgtcactgtgccaaacggttctgtcttcctcgatgtgatggagaaagctcagaaaatgaatgatactatatttggtttcacaatggaggagcgctcatgggggccctacatcacctctgttcagggcctatgggccagtaataatgacagaacctactgggaacttctgagtggaggcataccactgagccaag

SEQ ID NO: 32529 - DNA, 761 bp, Macaca Mulatta
  misc_feature (1)...(761): n = A,T,C or G
agaaaagcacaggtcgaccacatattatccagaaaaccttggcgggacagtattctaagcaaatgaagaatctcannnnnnnnnnnnnnnnnnnnnnnnnnnnnnnnnnnnnnnnnnnnnnnnnnnnnnnnnnnnnnnnnnnnnnnnnnnnnnnnnnnnnnnnnnnnnnnnnnnnnnnnnnnnnnnnnnnnnnnnnnnnnnnnnnnnnnnnnnnnnnnnnnnnnnnnnnnnnnnnnnnnnnnnnnnnnnnnnnnnnnnnnnnnnnnnnnnnnnnnnnnnnnnnnnnnnnnnnnnnnnnnnnnnnnnnnnnnnnnnnnnnnnnnnnnnnnnnnnnnnnnnnnnnnnnnnnnnnnnnnnnnnnnnnnnnnnnnnnnnnnnnnnnnnnnnnnnnnnnnnnnnnnnnnnnnnnnnnnnnnnnnnnnnnnnnnnnnnnnnnnnnnnnnnnnnnnnnnnnnnnnnnnnnnnnnnnnnnnnnnnnnnnnnnnnnnnnnnnnnnnnnnnnntgttctcgcacaagaggagttggtgtgaatgagtannnnnnnnnnnnnnnnnnnnnnnnnnnnnnnnnnnnnnnnnnnnnnnnnnnnnnnnnnnnnnnnnnnnnnnnnnnnnnnnnnnnnnnnnnnnnnnnnnnnnnnnnnnnnnnnnnnnnnnnnnnnnnnnnnnnnnnnnnnnnnnnnnnnagctatttgagcccacggaatgtggaaacggatatgtggaagctggggaggagtgtgattgtgggtttcatgtgg

SEQ ID NO: 32530 - DNA, 699 bp, Macaca Mulatta
  misc_feature (1)...(699): n = A,T,C or G
ccgactaaggcccctcaaccctgtcaccaaccatcgcgtgacactggcaggacctccgtctccagcatcccacctctgggtgtgggactttggggcagccgtgtgtgcaggtgccggcgcaggctagctcctcctggcttggtgtggtgtttgccattacagaacatgctgccacgaagagccctgggcatgattttgcttgtacttccggaagtggggttgctgggtcatcgggtagatgtaatttgttttacttgaaatgttccacttcttgttctgggaggtggttccaagggtgtctgcttttggccaggcgtggcggctcacgcttgtaatcccagcattttgggaggccgaggcgggcggatcacaaggtcaggagttcgagttcagcctggccaacatggcaaaaccccgtctctactaaaaatagcaaaaattacccgggcgtggtggtgtgcgcctgtaatcccttctggggaggctgaggcaggagaattgcttgaacccgggaggtgaggttgcagtgaaccgagattgcaccactgcactacagcctgcgtgacagagcgagactcnnnnnnnnnnnnnnnnnnnnnnnggaggggtgtctgcttttgtaactttaaaaactggacatctgtgttatatgtactcatggataaatatttcacaataaaaattttttaaaggataata

SEQ ID NO: 32531 - DNA, 573 bp, Macaca Mulatta
  misc_feature (1)...(573): n = A,T,C or G
ggggtctcacctagacccgtccggtcgcagactgtctccgagacgcttcctgtccgtaacagaatcagcatgattcttcagaggctcttcaggttctcctctatcattcggtcagcagtctcagtccattttcggaggaacattggtgttacagcagtagcatttaataaggaacttgatcctgtacagaaactctttgtggacaagattagagaatacaaatctaagcgacagacatctggaggacctgttgatactggtccagagtatcagcaagagctggagaaggagctttttaagctcaagcaaatgtttggtaaagcagacatgaatacatttcccaccttcaaatttgaagatcccaaatttgaagtcatcgaaaaacccccggcctgaagaaataaagtaaaattaatctggtaatttgtcatgggttagctgtacaactagttagatgtttcagaataaacatgcatttcataactgtcaaatgttcttttaattctgagtccaaataaattatttggtgatgttnnnnnnnnnnnnnnnnnnnnnnnnnanannaaacatgtc

SEQ ID NO: 32532 - DNA, 1097 bp, Macaca Mulatta
  misc_feature (1)...(1097): n = A,T,C or G
agagcttcctcaacaggggccatggtgctcccccaggaggtcctggcccccgccagcagcaggcaggtgccaggctgggtgctgctcagtcccccttcaatgacctcaaccggcagctggtgaacatgggctttccgcagtggcatctcggcaaccatgctgtggagccggtgacctccatcctgctcctcttcctgctcatgatgcttggtgttcgtggcctcctcctggtgggccttgtctacctggtgtcccacctgagtcagcggtgacctctgggggctgatgcgggtgggcctgttgagagggacttgctgggccttggtgtgagagcaggcatattgggaggggatctggtggtgcctcgaaagtgtgatcagagagnnnnnnnnnnnnnnnagctggtgaacatgggctttccgcagtggcatctcggcaaccatgctgtggagccggtgacctccatcctgctcctcttcctgctcatgatgcttggtgttcgtggcctcctcctggtgggccttgtctacctggtgtcccacctgagtcagcggtgacctctgggggctgatgcgggtgggcctgttgagagggacttgctgggccttggtgtgagagcaggcatattgggaggggatctggtggtgcctcgaaagtgtgatcagagaggggaccacaggtgtgtgtaaccccttgtggtaagcatgaggcagagggagacgttagtcccagcatttccaaagtgtgggtagatcccttggctcccctgacatattctgaggtggaatggggcttgcattaagtagcacaaaatcagagcaagaacgtgatgcccttccccagttgtctcaatccctttatgccgagaagatctcagctggatgccaacatgttccgatgcctgtggaagacttgccgacgtctcctctgcctagggagcaggacttaggcttagggcaggtggggaaaattccagacttttatagcactgttttttgttttaatggtatatttttattggctacctattgtttaggacaggtggtactggcattctatttattgtgacattttcaataaatagatttaagtaaaaa

SEQ ID NO: 32533 - DNA, 1458 bp, Macaca Mulatta
  misc_feature (1)...(1458): n = A,T,C or G
agtaaacagctgttgtgtgacgtgatgattgtggcagaagatgtcgagatagaagcccaccgtgtggtcctggcagcctgcagcccttacttctgtgcaatgttcacaggnnnnnnnnnnnnnnnnnnnnnnnnnnnnnnnnnnnnnnnnnnnnnnnnnnnnnnnnnnnnnnnnnnnnnnnnnnnnnnnnnnnnnnnnnnnnnnnnnnnnnnnnnnnnnnnnnnnnnnnnnnnnnnnnnnnnnnnnnnnnnnnnnnnnnnnnnnnnnnnnnnnnnnnnnnnnnnnnnnnnnnnnnnnnnnnnnnnnnnnnnnnnnnnnnnnnnnnnnnnnnnnnnnnnnnnnnnnnnnnnnnnnnnnnnnnnnnnnnnnnnnnnnnnnnnnnnnnnnnnnnnnnnnnnnnnnnnnnnnnnnnnnnnnnnnnnnnnnnnnnnnnnnnnnnnnnnnnnnnnnnnnnnnnnnnnnnnnnnnnnnnnnnnnnnnnnnnnnnnnnnnnnnnnnnnnnnnnnnnnnnnnnnnnnnnnnnnnnnnnnnnnnnnnnnnnnnnnnnnnnnnnnnnnnnnnnnnnnnnnnnnnnnnnnnnnnnnnnnnnnnnnnnnnnnnnnnnnnnnnnnnnnnnnnnnnnnnnnnnnnnnnnnnnnnnnnnnnnnnnnnnnnnnnnnnnnnnnnnnnnnnnnnnnnnnnnnnnnnnnnnnnnnnnnnnnnnnnnnnnnnnnnnnnnnnnnnnnnnnnnnnnnnnnnnnnnnnnnnnnnnnnnnnnnnnnnnnnnnnnnnnnnnnnnnnnnnnnnnnnnnnnnnnnnnnnnnnnnnnnnnnnnnnnnnnnnnnnnnnnnnnnnnnnnnnnnnnnnnnnnnnnnnnnnnnnnnnnnnnnnnnnnnnnnnnnnnnnnnnnnnnnnnnnnnnnnnnnnnnnnnnnnnnnnnnnnnnnnnnnnnnnnnnnnnnnnnnnnnnnnnnnnnnnnnnnnnnnnnnnnnnnnnnnnnnnnnnnnnnnnnnnnnnnnnnnnnnnnnnnnnnnnnnnnnnnnnnnnnnnnnnnnnnnnnnnnnnnnnnnnnnnnnnnnnnnnnnnnnnnnnnnnnnnnnnnnnnnnnnnnnnnnnnnnnnnnnnnnnnnnnnnnnnnnnnnnnnnnnnnnnnnnnnnnnnnnnnnnnnnnnnnnnnnnnnnnnnnnnnnnnnnnnnnnnnnnnnnnnnnnnnnnnnnnnnnnnnnnnnnnnnnnnnnnnnnnnnnnnnnnnnnnnnnnnnnnnnnnnnnnnnnnnnnnnnnnnnnnnnnnnnnnnnnnnnnnnnnnnnnnnnnnnnnnnnnnnnnnnnnnnnnncaggggttggagtgcttagcggacagctgtacgccacaggtgggcatgatgggcctttggtgaggaagagcgttgaggtttacgatcctggaacaaatacctggaagcaagtggcagacatgaacatgtgccggcgcaatgcag

SEQ ID NO: 32534 - DNA, 819 bp, Macaca Mulatta
gggaatgctgcccttgacatttcccattgctgtatgttatttctcgctctgttatcttttgccctcttagaatgtccctctctggggactcgcttagatgatgggatatgaatattattagacagtaattttgctttccatccagtatgctagttcttattcaagaactatggtcagagggtatttggatatgggtatcctttgcttatctttgtagtactgaaaatctgccgaagtaactggctgtgcagaatgtaatagaagcttttcttattcttttattcttaagatcagtatctttttacagtattctttctacaggatccttttttgtacatttaagaatattttgattacattaaacaaggctgctgattttgctactttttttaaggggtcttcaagtaagtaaaacatacatcgtagctagaagaaaaatgtaccttaaatttgcatcttccctctcatacccaagctgtaaacaactgaaatattttgtcttaaatcacttggttcaatacatgcttatttgttttaaagcctgtatcatcaaaatctctctctctaaatttaaaatgctgttgaatatgatacttttgaggagagaatgtgctcagaacttagacgggatttagtaggccgagtatgctaagtgtacaatatatttttttaattttacacctaaaacaaagaactgtggtcactaaaaataaacgtatatatgtaggaaataatgtactcctgctttgtcaagctgttttgctatagtttccagggtatatgttactctaactctgaaaaagtgatgtaacctggtaa

SEQ ID NO: 32535 - DNA, 162 bp, Macaca Mulatta
agggaatgacagaggaagaggaagacaaacttctggcactgaaagacttcatgatgaaatctaataaagcaaaggccaatatagtggaccagagccatcttcatgatagtagtcagaaagggtgtaattgacttggcagctttaggcataactgggagacaa

SEQ ID NO: 32536 - DNA, 2628 bp, Macaca Mulatta
  misc_feature (1)...(2628): n = A,T,C or G
agtgatgcggctgactaagcctactttattcaccaatatcccagtaacatgtgaagagaaagacttacctgnnnnnnnnnnnnnnnnnnnnnnnnnnnnnnnnnnnnnnnnnnnnnnnnnnnnnnnnnnnnnnnnnnnnnnnnnnnnnnnnnnnnnnnnnnnnnnnnnnnnnnnnnnnnnnnnnnnnnnnnnnnnnnnnnnnnnnnnnnnnnnnnnnnnnnnnnnnnnnnnnnnnnnnnnnnnnnnnnnnnnnnnnnnnnnnnnnnnnnnnnnnnnnnnnnnnnnnnnnnnnnnnnnnnnnnnnnnnnnnnnnnnnnnnnnnnnnnnnnnnnnnnnnnnnnnnnnnnnnnnnnnnnnnnnnnnnnnnnnnnnnnnnnnnnnnnnnnnnnnnnnnnnnnnnnnnnnnnnnnnnnnnnnnnnnnnnnnnnnnnnnnnnnnnnnnnnnnnnnnnnnnnnnnnnnnnnnnnnnnnnnnnnnnnnnnnnnnnnnnnnnnnnnnnnnnnnnnnnnnnnnnnnnnnnnnnnnnnnnnnnnnnnnnnnnnnnnnnnnnnnnnnnnnnnnnnnnnnnnnnnnnnnnnnnnnnnnnnnnnnnnnnnnnnnnnnnnnnnnnnnnnnnnnnnnnnnnnnnnnnnnnnnnnnnnnnnnnnnnnnnnnnnnnnnnnnnnnnnnnnnnnnnnnnnnnnnnnnnnnnnnnnnnnnnnnnnnnnnnnnnnnnnnnnnnnnnnnnnnnnnnnnnnnnnnnnnnnnnnnnnnnnnnnnnnnnnnnnnnnnnnnnnnnnnnnnnnnnnnnnnnnnnnnnnnnnnnnnnnnnnnnnnnnnnnnnnnnnnnnnnnnnnnnnnnnnnnnnnnnnnnnnnnnnnnnnnnnnnnnnnnnnnnnnnnnnnnnnnnnnnnnnnnnnnnnnnnnnnnnnnnnnnnnnnnnnnnnnnnnnnnnnnnnnnnnnnnnnnnnnnnnnnnnnnnnnnnnnnnnnnnnnnnnnnnnnnnnnnnnnnnnnnnnnnnnnnnnnnnnnnnnnnnnnnnnnnnnnnnnnnnnnnnnnnnnnnnnnnnnnnnnnnnnnnnnnnnnnnnnnnnnnnnnnnnnnnnnnnnnnnnnnnnnnnnnnnnnnnnnnnnnncttaaagagaacatatgaatatgatgacatcgcacaagtctgtgtggtatcttctgccattaaagtggaaagctgaaggaaatttccaatgttatgcttttcatttagtttcacagaactgctttttgtcacctttgtaaaatgatgacgtcaacaacgaagtaaatatgttacttctttcctgtaaaatagttaaaatattaaatatttgttttgaagagatctgattttatcttgtaagttatgttcgaaatgaacatgtgtagattttctacacctatttaatttcatttcattttagatgaccactggactttgttctccaaaagctgtgtatctgagaccatttgtccctagccagtatctagaacacaagtcagcaaactttttatgtaaggtacaagacactaaatattttaggctttgcaggccataaggtttctgtcacaaatactgaactctgccattgtactgcaagagcagccagtaggcaaaaaaagtacagtggtgtacataaaaagcagcagctggactcaggaagctgaggcaggagaatcacttgaacccaggaggcgcaggtggcagtaagctgagatcatgccactgtactctagcctaagcgacagannnnnnnnnnnnnnnnnnnnnnnnnnnnnnnnnnnnnnnnnnnnnnnnnnnnnnnnnnnnnnnnnnnnnnnnnnnnnnnnnnnnnnnnnnnnnnnnnnnnnnnnnnnnnnnnnnnnnnnnnnnnnnnnnnnnnnnnnnnnnnnnnnnnnnnnnnnnnnnnnnnnnnnnnnnnnnnnnnnnnnnnnnnnnnnnnnnnnnnnnnnnnnnnnnnnnnnnnnnnnnnnnnnnnnnnnnnnnnnnnnnnnnnnnnnnnnnnnnnnnnnnnnnnnnnnnnnnnnnnnnnnnnnnnnnnnnnnnnnnnnnnnnnnnnnnnnnnnnnnnnnnnnnnnnnnnnnnnnnnnnnnnnnnnnnnnnnnnnnnnnnnnnnnnnnnnnnnnnnnnnnnnnnnnnnnnnnnnnnnnnnnnnnnnnnnnnnnnnnnnnnnnnnnnnnnnnnnnnnnnnnnnnnnnnnnnnnnnnnnnnnnnnnnnnnnnnnnnnnnnnnnnnnnnnnnnnnnnnnnnnnnnnnnnnnnnnnnnnnnnnnnnnnnnnnnnnnnnnnnatgtgatcacacttagttatgagcaaagcagtgagaaagttgaggtgataaacaactttgcagcattaatgtaacaaaaagtaagtattttgtcaggaaaacaaaagcttaggctgttaaataaaagctattctattttggtaagttgaaattcaagaatgtatatataatttcttaaatgtaagagtgcattaaatcaaatacaaaaattggtttttcaatgcatcattatttattgccataacaaattgtttggtccaaaatgaaagctatattcagaaggtttgcacctcaaaattgagtaataattaatgaaatgtccgtacaaaataaagtgcaagcagtg

SEQ ID NO: 32537 - DNA, 4670 bp, Macaca Mulatta
  misc_feature (1)...(4670): n = A,T,C or G
aactgtgttctatgtggatccagcattacaactgataagnnnnnnnnnnnnnnnnnnnnnnnnnnnnnnnnnnnnnnnnnnnnnnnnnnnnnnnnnnnnnnnnnnnnnnnnnnnnnnnnnnnnnnnnnnnnnnnnnnnnnnnnnnnnnnnnnnnnnnnnnnnnnnnnnnnnnnnnnnnnnnnnnnnnnnnnnnnnnnnnnnnnnnnnnnnnnnnnnnnnnnnnnnnnnnnnnnnnnnnnnnnnnnnnnnnnnnnnnnnnnnnnnnnnnnnnnnnnnnnnnnnnnnnnnnnnnnnnnnnnnnnnnnnnnnnnnnnnnnnnnnnnnnnnnnnnnnnnnnnnnnnnnnnnnnnnnnnnnnnnnnnnnnnnnnnnnnnnnnnnnnnnnnnnnnnnnnnnnnnnnnnnnnnnnnnnnnnnnnnnnnnnnnnnnnnnnnnnnnnnnnnnnnnnnnnnnnnnnnnnnnnnnnnnnnnnnnnnnnnnnnnnnnnnnnnnnnnnnnnnnnnnnnnnnnnnnnnnnnnnnnnnnnnnnnnnnnnnnnnnnnnnnnnnnnnnnnnnnnnnnnnnnnnnnnnnnnnnnnnnnnnnnnnnnnnnnnnnnnnnnnnnnnnnnnnnnnnnnnnnnnnnnnnnnnnnnnnnnnnnnnnnnnnnnnnnnnnnnnnnnnnnnnnnnnnnnnnnnnnnnnnnnnnnnnnnnnnnnnnnnnnnnnnnnnnnnnnnnnnnnnnnnnnnnnnnnnnnnnnnnnnnnnnnnnnnnnnnnnnnnnnnnnnnnnnnnnnnnnnnnnnnnnnnnnnnnnnnnnnnnnnnnnnnnnnnnnnnnnnnnnnnnnnnnnnnnnnnnnnnnnnnnnnnnnnnnnnnnnnnnnnnnnnnnnnnnnnnnnnnnnnnnnnnnnnnnnnnnnnnnnnnnnnnnnnnnnnnnnnnnnnnnnnnnnnnnnnnnnnnnnnnnnnnnnnnnnnnnnnnnnnnnnnnnnnnnnnnnnnnnnnnnnnnnnnnnnnnnnnnnnnnnnnnnnnnnnnnnnnnnnnnnnnnnnnnnnnnnnnnnnnnnnnnnnnnnnnnnnnnnnnnnnnnnnnnnnnnnnnnnnnnnnnnnnnnnnnnnnnnnnnnnnnnnnnnnnnnnnnnnnnnnnnnnnnnnnnnnnnnnnnnnnnnnnnnnnnnnnnnnnnnnnnnnnnnnnnnnnnnnnnnnnnnnnnnnnnnnnnnnnnnnnnnnnnnnnnnnnnnnnnnnnnnnnnnnnnnnnnnnnnnnnnnnnnnnnnnnnnnnnnnnnnnnnnnnnnnnnnnnnnnnnnnnnnnnnnnnnnnnnnnnnnnnnnnnnnnnnnnnnnnnnnnnnnnnnnnnnnnnnnnnnnnnnnnnnnnnnnnnnnnnnnnnnnnnnnnnnnnnnnnnnnnnnnnnnnnnnnnnnnnnnnnnnnnnnnnnnnnnnnnnnnnnnnnnnnnnnnnnnnnnnnnnnnnnnnnnnnnnnnnnnnnnnnnnnnnnnnnnnnnnnnnnnnnnnnnnnnnnnnnnnnnnnnnnnnnnnnnnnnnnnnnnnnnnnnnnnnnnnnnnnnnnnnnnnnnnnnnnnnnnnnnnnnnnnnnnnnnnnnnnnnnnnnnnnnnnnnnnnnnnnnnnnnnnnnnnnnnnnnnnnnnnnnnnnnnnnnnnnnnnnnnnnnnnnnnnnnnnnnnnnnnnnnnnnnnnnnnnnnnnnnnnnnnnnnnnnnnnnnnnnnnnnnnnnnnnnnnnnnnnnnnnnnnnnnnnnnnnnnnnnnnnnnnnnnnnnnnnnnnnnnnnnnnnnnnnnnnnnnnnnnnnnnnnnnnnnnnnnnnnnnnnnnnnnnnnnnnnnnnnnnnnnnnnnnnnnnnnnnnnnnnnnnnnnnnnnnnnnnnnnnnnnnnnnnnnnnnnnnnnnnnnnnnnnnnnnnnnnnnnnnnnnnnnnnnnnnnnnnnnnnnnnnnnnnnnnnnnnnnnnnnnnnnnnnnnnnnnnnnnnnnnnnnnnnnnnnnnnnnnnnnnnnnnnnnnnnnnnnnnnnnnnnnnnnnnnnnnnnnnnnnnnnnnnnnnnnnnnnnnnnnnnnnnnnnnnnnnnnnnnnnnnnnnnnnnnnnnnnnnnnnnnnnnnnnnnnnnnnnnnnnnnnnnnnnnnnnnnnnnnnnnnnnnnnnnnnnnnnnnnnnnnnnnnnnnnnnnnnnnnnnnnnnnnnnnnnnnnnnnnnnnnnnnnnnnnnnnnnnnnnnnnnnnnnnnnnnnnnnnnnnnnnnnnnnnnnnnnnnnnnnnnnnnnnnnnnnnnnnnnnnnnnnnnnnnnnnnnnnnnnnnnnnnnnnnnnnnnnnnnnnnnnnnnnnnnnnnnnnnnnnnnnnnnnnnnnnnnnnnnnnnnnnnnnnnnnnnnnnnnnnnnnnnnnnnnnnnnnnnnnnnnnnnnnnnnnnnnnnnnnnnnnnnnnnnnnnnnnnnnnnnnnnnnnnnnnnnnnnnnnnnnnnnnnnnnnnnnnnnnnnnnnnnnnnnnnnnnnnnnnnnnnnnnnnnnnnnnnnnnnnnnnnnnnnnnnnnnnnnnnnnnnnnnnnnnnnnnnnnnnnnnacccagggctgcaagctggttgacactaataaaactctaacaacgtgttcatgcagccacctaaccaattttgcaattctcatggcccacagggaaattgcannnnnnnnnnnnnnnnnnnnnnnnnnnnnnnnnnnnnnnnnnnnnnnnnnnnnnnnnnnnnnnnnnnnnnnnnnnnnnnnnnnnnnnnnnnnnnnnnnnnnnnnnnnnnnnnnnnnnnnnnnnnnnnnnnnnnnnnnnnnnnnnnnnnnnnnnnnnnnnnnnnnnnnnnnnnttattttcctaataggcattgataagacaaaatatgcnnnnnnnnnnnnnnnnnnnnnnnnnnnnnnnnnnnnnnnnnnnnnnnnnnnnnnnnnnnnnnnnnnnnnnnnnnnnnnnnnnnnnnnnnnnnnnnnnnnnnnnnnnnnnnnnnnnnnnnnnnnnnnnnnnnnnnnnnnnnnnnnnnnnnnnnnnnnnnnnnnnnnnnnnnnnnnnnnnnnnnnnnnnnnnnnnnnnnnnnnnnnnnnnnnnnnnnnnnnnnnnnnnnnnnnnnnnnnnnnnnnnnnnnnnnnnnnnnnnnnnnnnnnnnnnnnnnnnnnnnnnnnnnnnnnnnnnnnnnnnnnnnnnnnnnnnnnnnnnnnnnnnnnnnnnnnnnnnnnnnnnnnnnnnnnnnnnnnnnnnnnnnnnnnnnnnnnnnnnnnnnnnnnnnnnnnnnnnnnnnnnnnnnnnnnnnnnnnnnnnnnnnnnnnnnnnnnnnnnnnnnnnnnnnnnnnnnnnnnnnnnnnnnnnnnnnnnnnnnnnnnnnnnnnnnnnnnnnnnnnnnnnnnnnnnnnnnnnnnnnnnnnnnnnnnnnnnnnnnnnnnnnnnnnnnnnnnnnnnnnnnnnnnnnnnnnnnnnnnnnnnnnnnnnnnnnnnnnnnnnnnnnnnnnnnnnnnnnnnnnnnnnnnnnnnnnnnnnnnnnnnnnnnnnnnnnnnnnnnnnnnnnnnnnnnnnnnnnnnnnnnnnnnnnnnnnnnnnnnnnnnnnnnnnnnnnnnnnnnnnnnnnnnnnnnnnnnnnnnnnnnnnnnnnnnnnnnnnnnnnnnnnnnnnnnnnnnnnnnnnnnnnnnnnnnnnnnnnnnnnnnnnnnnnnnnnnnnnnnnnnnnnnnnnnnnnnnnnnnnnnnnnnnnnnnnnnnnnnnnnnnnnnnnnnnnnnnnnnnnnnnnnnnnnnnnnnnnnnnnnnnnnnnnnnnnnnnnnnnnnnnnnnnnnnnnnnnnnnnnnnnnnnnnnnnnnnnnnnnnnnnnnnnnnnnnnnnnnnnnnnnnnnnnnnnnnnnnnnnnnnnnnnnnnnnnnnnnnnnnnnnnnnnnnnnnnnnnnnnnnnnnnnnnnnnnnnnnnnnnnnnnnnnnnnnnnnnnnnnnnnnnnnnnnnnnnnnnnnnnnnnnnnnnnnnnnnnnnnnnnnnnnnnnnnnnnnnnnnnnnnnnnnnnnnnnnnnnnnnnnnnnnnnnnnnnnnnnnnnnnnnnnnnnnnnnnnnnnnnnnnnnnnnnnnnnnnnnnnnnnnnnnnnnnnnnnnnnnnnnnnnnnnnnnnnnnnnnnnnnnnnnnnnnnnnnnnnnnnnnnnnnnnnnnnnnnnnnnnnnnnnnnnnnnnnnnnnnnnnnnnnnnnnnnnnnnnnnnnnnnnnnnnnnnnnnnnnnnnnnnnnnnnnnnnnnnnnnnnnnnnnnnnnnnnnnnnnnnnnnnnnnnnnnnnnnnnnnnnnnnnnnnnnnnnnnnnatagtgatggttatattatcccaattaacaaagaagggtgtattccagaaggagatgttagagaaggacaaatgcagctggttacaagtctttaatcgtagagctaaggaattccaagggccacatgcaagtattaataaataaagactccattggcctgatgcagctccctcaaactctgcttgaagagatgactcttgacctgtggttctccagtgtaaaaaagatgactgaaccttgcagttctgtgaatttttataaaacatacaaaaactttgtatatacacagagtatactaaaatgaattatttgttacaaagaaaagagatgccaaccaggtattttaagattctgctgctgtttagagaaattgtga

SEQ ID NO: 32538 - DNA, 149 bp, Macaca Mulatta
gctggaagattctttatgggcgggattaacagatcagcatgtccagctccccatggcaatgactgcagagaatcttgctgtaaaacacaatattttcagagaagaatgtgacaaatatgccctgcggtcacagcagagatggaaagctg

SEQ ID NO: 32539 - DNA, 95 bp, Macaca Mulatta
gacccagcctcctctttaaggatggcaaatactgccctgatctccgttggctgcttggccatatttgtcactgtgatctccctcttggtgtacaa

SEQ ID NO: 32540 - DNA, 611 bp, Macaca Mulatta
atgacagtggtgcatcagtggacagctcaggtcacacagtgatggagaaacttcccagtggcatggaaatttcttttgcccctaccacgtcccatgaggccccagccatgatagatggtcacatcagcagcagtgatgccgccaccgagatgctcagccagcccaaccatgccagcagcgaggtcaagactgaaaataacattgagatggtgggcgagtcccaggcagccaaggtcattgtctcagtcgaagatgctgtgcctaccatattctgtggcaagatcaaaggcctctcaggggtgtccaccaaaaacttctccttcaaaagagaagactccgtgcttcagggctatgacatcaacagccaaggggaagagtccatgggaaatgcagagccccttaggaaacccatcaaaaaccggagcataaagttaaagaaagtgaactcccaggaaatacacatgctcccaatcaaaaaacaacggctggccaccttttttccaagaaagtaaataacggctttttaaaatttgtatgattataatatggggaaaggtgcattggttttataaaaaggcatttaaaacaaattatctttgttaattattttg

SEQ ID NO: 32541 - DNA, 838 bp, Macaca Mulatta
  misc_feature (1)...(838): n = A,T,C or G
gtatggattgatgccgcaactcaaatatttttttccttgggggctggatttggagtgttgattgcatttgccagttacaacaaatttgacaacaactgttacaggnnnnnnnnnnnnnnnnnnnnnnnnnnnnnnnnnnnnnnnnnnnnnnnnnnnnnnnnnnnnnnnnnnnnnnnnnnnnnnnnnnnnnnnnnnnnnnnnnnnnnnnnnnnnnnnnnnnnnnnnnnnnnnnnnnnnnnnnnnnnnnnnnnnnnnnnnnnnnnnnnnnnnnnnnnnnnnnnnnnnnnnnnnnnnnnnnnnnnnnnnnnnnnnnnnnnnnnnnnnnnnnnnnnnnnnnnnnnntgggaggcatggaggctatcatcacgggcctggcagacgacttccaggtcctgaagcgacaccggaaactcttcacatttggcgtcaccttcggcaccttccttcttgccctgttctgcataaccaaggnnnnnnnnnnnnnnnnnnnnnnnnnnnnnnnnnnnnnnnnnnnnnnnnnnnnnnnnnnnnnnnnnnnnnnnnnnnnnnnnnnnnnnnnnnnnnnnnnnnnnnnnnnnnnnnnnnnnnnnnnnnnnnnnnnnnnnnnnnnnnnnnnnnnnnnnnnnnnnnnnnnnnnnnnnnnnnnnnnnnnnnnnnnnnnnnnnnnnnngttcgtggttgtggtcagcatcattaacttcaagccactcacctacgacgactacatcttcccgccctgggccaactgggtggggtggggcattgccctgtcctccatggtcctggtgcccatctacgtcatctacaagttcctcagcacgcagggctctctttggga

SEQ ID NO: 32542 - DNA, 413 bp, Macaca Mulatta
  misc_feature (1)...(413): n = A,T,C or G
ctttatacctgggctgcagttagtcaacccacacactcgttggactattcagaagggcagtttcctaggcgagtcccatccatggggccaccatccaaacctcctgatgaagaacacaggctcggggatgctgaaacagnagaatctcaatctgctgtttcggaaactcccaaaaaacgcttggatgctgtccagaaggnaggaagttgttgacatgaagtctgagggacaggccaatgtaattcagcagctggaacagactattgaggatctgagaaccaaaatagctgaactagagaggcagtctcctgccctggacacagaggtggccagtggtcgtcaagggcttgggaatggagtgacagcctcaggcgatgtctgtctcgaagctctcaggttagaagaaaaggaag

SEQ ID NO: 32543 - DNA, 650 bp, Macaca Mulatta
  misc_feature (1)...(650): n = A,T,C or G
ccaaaccctctgcccccgtggtatcgggccccgcagtgagggccacagctgagcacacagtgagcttcacctgcgagtcccacggcttctctcccaaagacatcaccctgaaatggttcaaaaatgggaacgagctctcagacttccagaccagcgtggaccccgcaggaaagagcgtgtcctacagcatccgcagcacagccagggtggtgctgacccgcagagacgttcactctgaagtcatctgcgaggtggcccacgtcaccttgcagggggaccctcttcgtgggactgccaacttgtctgaggccatccgagnnnnnnnnnnnnnnnnnnnnnnnnnnnnnnnnnnnnnnnnnnnnnnnnnnnnnnnnnnnnnnnnnnnnnnnnnnnnnnnnnnnnnnnnnnnnnnnnnnnnnnnnnnnnnnnnnnnnnnnnnnnnnnnnnnnnnnnnnacagcttcgaccctcacagagaacaaggatggtacctacaactggacgagctggctcctggtgaacacctgtgcccacagggacgatgtggtgctcacctgccaggtggagcatgatggacagccagcggtcagcaaaagccataccctggagatctcagcgcaccagaaggagcaggactcagatgtcacccat

SEQ ID NO: 32544 - DNA, 848 bp, Macaca Mulatta
ggggggttggtggatgaccttgagccgggaggaacgagatggcggttgtctggaggctgagtgccttttgcggtgcccaaggaggccgagctctgttgctgcgaaccccagtggtcagacctgctcatatctcagcatttcttcaggaccgacctatcccagaatggcgtggagtgcagcacattcacttgtcacccaggcaccattctggttccaaggctgcgtctctccactggactagcgagagggttgtcagtgttttgctcctgggtctgcttccggctgcttatttgaatccttgctctgcgatggactattccctggctgcagccctcactcttcatggtcactggggccttggacaagttgttactgactatgttcatggggatgcctcgcagaaagctgccaaggcagggcttttggcactttcagctttaacctttgctgggctttgctatttcaactatcacgacgtgggcatctgcaaagctgttgccatgctgtggaagctctgacctttttgacttcatactttgaagaattgatgtatgcctctttgcctctgctttgtcatgccattcagctcacaataaggaagaaataaccgataagtccatttttgtggacagcctttttttcccttaataatcttaatcttaagattatttttcaagaattttaatcttttgaaggaaaaggtttaagggaattgtggtcctaaaaaattgtgtggacccctgagttccggtattctggtggaagtttaatgggggttgccctcccgcttctctcttaagagctttccacaggtataacttaaacatgtatttatgagcttttgcctt

SEQ ID NO: 32545 - DNA, 1138 bp, Macaca Mulatta
  misc_feature (1)...(1138): n = A,T,C or G
agactggtaataacaacaacaaagatggatctaatcataaagctgaaagtggagctctaatagaagctgcaaaatcaaagatacatcannnnnnnnnnnnnnnnnnnnnnnnnnnnnnnnnnnnnnnnnnnnnnnnnnnnnnnnnnnnnnnnnnnnnnnnnnnnnnnnnnnnnnnnnnnnnnnnnnnnnnnnnnnnnnnnnnnnnnnnnnnnnnnnnnnnnnnnnnnnnnnnnnnnnnnnnnnnnnnnnnnnnnnnnnnnnnnnnnnnnnnnnnnnnnnnnnnnnnnnnnnnnnnnnnnnnnnnnnnnnnnnnnnnnnnnnnnnnnnnnnnnnnnnnnnnnnnnnnnnnnnnnnnnnnnnnnnnnnnnnnnnnnnnnnnnnnnnnnnnnnnnnnnnnnnnnnnnnnnnnnnnnnnnnnnnnnnnnnnnnnnnnnnnnnnnnnnnnnnnnnnnnnnnnnnnnnnnnnnnnnnnnnnnnnnnnnnnnnnnnnnnnnnnnnnnnnnnnnnnnnnnnnnnnnnnnnnnnnnnnnnnnnnnnnnnnnnnnnnnnnnnnnnnnnnnnnnnnnnnnnnnnnnnnnnnnnnnnnnnnnnnnnnnnnnnnnnnnnnnnnnnnnnnnnnnnnnnnnnnnnnnnnnnnnnnnnnnnnnnnnnnnnnnnnnnnnnnnccttcccagcaaaaaaggaattgtacagtctattgttggtcaaggctatcatcgtaaaatagttttggcatcacagtctatacagaatactgtttataantgatgggcagtcttcggccattcctgtagccagtatggagtttgcagccatatgtctcagaaatgccttgttgctgctacctgaagaacagcaagatccaaagcaggaaaatggggctaaaaatagtaatcaattaggtgggaacacagagagcagcgaaagcagtgaaacttgcagnnnnnnnnnnnnnnnnnnnnnnnnnnnnnnnnnnnnnnnnnnnnnnnnnnnnnnnnnnnnnnnnnnnnnnnnnnnnnnnnngtgctccatacttgcttgcagtgcctatgtggctctggctttgggtgataaccttatggctttgaatcatgcagataaacttcttcagcagcccaagctgtcaggatctcttaag

SEQ ID NO: 32546 - DNA, 820 bp, Macaca Mulatta
  misc_feature (1)...(820): n = A,T,C or G
gggacgagtttgtaaagaaaaacaaatggtaactggtgcttaaagctgatcgagaaagttaacaacaacatagaaaccacaggattgttccactgtctggaagcaccatcccctatcgcaggactcctgggccacaagcagtcagtcagtgcaggcttcaagtgtgtgtgtttgatgtggcgtgattgtgctggccttgttgaaaaagatgtgatgcttctcagaacctgttccatctgtatgccattgttcatgccttaagaaatgcaaagatgtacaataaatcattttttaaatgtgtgctcataggtttatgtgaagaacagacttttttgaatcatggcatgattcactttctcaatcagaacaattatgagactaacttaaatgggttttttaaaagtgaacaacacatgctttactttgataagtcagttaccatatcgtatgtctgaagggaaagaaggaaaaggtgtgctaagtagatctctgtatttacgttgctcgttaatttcctgtcctgcgtccagaaaaataaaccatccctcttccacctaaaaaaaaataaaacgagcaaaaaaaaaccctggtcggnnnnnnnnnnnnnnntnnnnnnnnnnnnnnntaaccaatttctttttggccgcggcgggggcccccatatgggttaagttggaaccattggtgccaataaacctgtttttccccaaaaggaagaatcccctgggtcccatggaaaaataagtggggccttgttgggaaaattcctctcacccccacaaataaagaaaaaaaacacgccccccctgggggaggcggc

SEQ ID NO: 32547 - DNA, 811 bp, Macaca Mulatta
cctgggtcccgacttgggacgacccggacctctagatcattgaagtggtgtgatctagggccgggaagactgagtgtgcccctcccttcatcccgcagggcccattcagctgtggcagttcctcctggagctgctgcacgacggggcgcgtagcagctgcatccgttggactggcaacagccgcgagttccagctgtgcgaccccaaagaggtggggcagctcccccgcccagccaagtcctgctctgttttctccagttcaatttagccccgcccaagggctaggttcaatcgcctaggccttggccccgcccctccccggcccacttggggccccgcccaacccttctcaaacccagtctcccgcctggacttctgcctcaaccaacccagtctccacccggctccgcggggcctcgcccaggtctgcactgcacaccgcccccaggcccggcccgcccaactattgccaagccccgccccttcccactccgaccgagcccggcctctgtcctaggtggctcggctgtggggcgagcgcaagagaaagccgggcatgaattacgagaagctgagccgaggcctgcgctactactatcgccgcgacatcgtgcgcaagagcggggggcgcaagtacacgtaccgtttcgggggccgcgtgcccagcctagcctatccgaactgtgcggggggcggaaggggagcagagacacaataaaaattaccggtcagacctcttggcgcgtgctcctctgctgcattcttcccgctgatactgactacacgcgctagggagcctaagtgtgcagct

SEQ ID NO: 32548 - DNA, 1776 bp, Macaca Mulatta
  misc_feature (1)...(1776): n = A,T,C or G
gtcttctatggcaactcggaacgcacctcnnnnnnnnnnnnnnnnnnnnnnnnnnnnnnnnnnnnnnnnnnnnnnnnnnnnnnnnnnnnnnnnnnnnnnnnnnnnnnnnnnnnnnnnnnnnnnnnnnnnnnnnnnnnnnnnnnnnnnnnnnnnnnnnnnnnnnnnnnnnnnnnnnnnnnnnnnnnnnnnnnnnnnnnnnnnnnnnnnnnnnnnnnnnnnnnnnnnnnnnnnnnnnnnnnnnnnnnnnnnnnnnnnnnnnnnnnnnnnnnnnnnnnnnnnnnnnnnnnnnnnnnnnnnnnnnnnnnnnnnnnnnnnnnnnnnnnnnnnnnnnnnnnnnnnnnnnnnnnnnnnnnnnnnnnnnnnnnnnnnnnnnnnnnnnnnnnnnnnnnnnnnnnnnnnnnnnnnnnnnnnnnnnnnnnnnnnnnnnnnnnnnnnnnnnnnnnnnnnnnnnnnnnnnnnnnnnnnnnnnnnnnnnnnnnnnnnnnnnnnnnnnnnnnnnnnnnnnnnnnnnnnnnnnnnnnnnnnnnnnnnnnnnnnnnnnnnnnnnnnnnnnnnnnnnnnnnnnnnnnnnnnnnnnnnnnnnnnnnnnnnnnnnnnnnnnnnnnnnnnnnnnnnnnnnnnnnnnnnnnnnnnnnnnnnnnnnnnnnnnnnnnnnnnnnnnnnnnnnnnnnnnnnnnnnnnnnnnnnnnnnnnnnnnnnnnnnnnnnnnnnnnnnnnnnnnnnnnnnnnnnnnnnnnnnnnnnnnnnnnnnnnnnnnnnnnnnnnnnnnnnnnnnnnnnnnnnnnnnnnnnnnnnnnnnnnnnnnnnnnnnnnnnnnnnnnnnnnnnnnnnnnnnnnnnnnnnnnnnnnnnnnnnnnnnnnnnnnnnnnnnnnnnnnnnnnnnnnnnnnnnnnnnnnnnnnnnnnnnnnnnnnnnnnnnnnnnnnnnnnnnnnnnnnnnnnnnnnnnnnnnnnnnnnnnnnnnnnnnnnnnnnnnnnnnnnnnnnnnnnnnnnnnnnnnnnnnnnnnnnnnnnnnnnnnnnnnnnnnnnnnnnnnnnnnnnnnnnnnnnnnnnnnnnnnnnnnnnnnnnnnnnnnnnnnnnnnnnnnnnnnnnnnnnnnnnnnnnnnnnnnnnnnnnnnnnnnnnnnnnnnnnnnnnnnnnnnnnnnnnnnnnnnnnnnnnnnnnnnnnnnnnnnnnnnnnnnnnnnnnnnnnnnnnnnnnnnnnnnnnnnnnnnnnnnnnnnnnnnnnnnnnnnnnnnnnnnnggaggcggcgccttagattgggaggtctcattggccacttacagcccagcctgagattccaggcccctcccaggaaaaggctgttaaacacgggggaggggcaggagcggtatatggagaggaggtggtggaatcagagaatgaggctgctgtaaagactgtcctggccccagacacagggtagtctccgctagcagctcatttccgagttacttttcgttttcaaatgacaagccaagtgactagactcgcgctaacacagtcctggacaacacattcaccttttctgtgaacaggcaggcttctaaaagccccaaacatcctccttgacgcgttgggggctcaattattttatatccaacccagcatctttctagtccccatgctgtatgcttgaacttcggaaaatgcttttccctgcccaatcttctctcaaatataaacatatcacacagggtgttgggnnnnnnnnnnnnnnnnnnnnnnnnnnnnnntggccttaggacacaggacaaatctattttggatagaa

SEQ ID NO: 32549 - DNA, 733 bp, Macaca Mulatta
  misc_feature (1)...(733): n = A,T,C or G
cagtatcattaatgcctcttcaacaatattatctgtacttactgttgatttcttagatttcctgtgcttcatcagctagagagatgaaatccattaccaggatgaaaagaatatnttatagggtaagaattctaaatctttatattaaaacactttgtttttcaaaatatgaaaaatttcttctcttatatctgtactttatctgcagattggaaacaaaggaatctacaaagccatcagtgaactggatattcttctttcctggattaaaaaattcttggaaagcagtcagtaaaccacagccaagtgcattgattttatagttattttgaaatacaatgagaactgctagaaatatgtttataacagtctgtttcttttaaaaactttttaacatattactgacagcatgttaggtggttcagaatagacaagaaggatttagtgtaataaagttttggagataagttgtcactaatttgcacattttctgtgttttcaaataatgtttccattctgaacatgttttgttattcacaagtacattgtgtcaacttaatttaaagtatataacctgaattaactcatgtaatatttatgtgtgtcggggggtgggtgatgtgggaggtgaaggggagtgacagatttctggaatgcaatataatgttattgagacttaaatagatgttatgtatatgaatgtcgaaataagggtttgaaaattattaattat

SEQ ID NO: 32550 - DNA, 5117 bp, Macaca Mulatta
  misc_feature (1)...(5117): n = A,T,C or G
catttcccttatgaacctttataaccacaggcccctgacagagcccagcttgcaaaagccctgttttaattaacaacatgttgaggcggatccaggaggaactcaaacaggaaggcagcctgaggcccatgttcaccccctcctcccagcccaccaccgagcccagtgacagctaccgagagggcccgccagccttcagccacctggcgcccccatcctcccacccctgcgacctcggaagcactacgcccctggaggcctgcctcaccccagcctcgctgctcgaggacgacgatgacacgttttgcacctcccaggccatgcagcccacggctcccaccaaactgtcacctccaaccctctcgccagaaaaggacagtttctcctctgccttggacgagatcgaggagctctgtcccacatctacctccacagaggcggccgcggctgcgacggacagcgtgaaagggacctccagcgaggctggtgcccagaaacccgacggtcctcaagagagccgcacagatgactcaaaactgatggactctctgcctgggaattttgaaataacgacgtccacgggtttcctcacagacttgaccctggatgacatcctgtttgctgacattgatacgtccatgtatgattttgacccctgcacttcctcatcagggacagcctcaaaaatggcccctgtgtctgccgacgacctcctcaaaactctggctccttacagcagtcagcctgtcgccccaagtcagcctttcaaaatggacctcacagagctggaccacatcatggaggtgcttgtcgggtcctaagacccagggacccagcgactgtgcccacccagacccnnnnnnnnnnnnnnnnnnnnnnnnnnnnnnnnnnnnnnnnnnnnnnnnnnnnnnnnnnnnnnnnnnnnnnnnnnnnnnnnnnnnnnnnnnnnnnnnnnnnnnnnnnnnnnnnnnnnnnnnnnnnnnnnnnnnnnnnnnnnnnnnnnnnnnnnnnnnnnnnnnnnnnnnnnnnnnnnnnnnnnnnnnnnnnnnnnnnnnnnnnnnnnnnnnnnnnnnnnnnnnnnnnnnnnnnnnnnnnnnnnnnnnnnnnnnnnnnnnnnnnnnnnnnnnnnnnnnnnnnnnnnnnnnnnnnnnnnnnnnnnnnnnnnnnnnnnnnnnnnnnnnnnnnnnnnnnnnnnnnnnnnnnnnnnnnnnnnnnnnnnnnnnnnnnnnnnnnnnnnnnnnnnnnnnnnnnnnnnnnnnnnnnnnnnnnnnnnnnnnnnnnnnnnnnnnnnnnnnnnnnnnnnnnnnnnnnnnnnnnnnnnnnnnnnnnnnnnnnnnnnnnnnnnnnnnnnnnnnnnnnnnnnnnnnnnnnnnnnnnnnnnnnnnnnnnnnnnnnnnnnnnnnnnnnnnnnnnnnnnnnnnnnnnnnnnnnnnnnnnnnnnnnnnnnnnnnnnnnnnnnnnnnnnnnnnnnnnnnnnnnnnnnnnnnnnnnnnnnnnnnnnnnnnnnnnnnnnnnnnnnnnnnnnnnnnnnnnnnnnnnnnnnnnnnnnnnnnnnnnnnnnnnnnnnnnnnnnnnnnnnnnnnnnnnnnnnnnnnnnnnnnnnnnnnnnnnnnnnnnnnnnnnnnnnnnnnnnnnnnnnnnnnnnnnnnnnnnnnnnnnnnnnnnnnnnnnnnnnnnnnnnnnnnnnnnnnnnnnnnnnnnnnnnnnnnnnnnnnnnnnnnnnnnnnnnnnnnnnnnnnnnnnnnnnnnnnnnnnnnnnnnnnnnnnnnnnnnnnnnnnnnnnnnnnnnnnnnnnnnnnnnnnnnnnnnnnnnnnnnnnnnnnnnnnnnnnnnnnnnnnnnnnntctttcttaagagtgtatttatgccaagtttgtgcttttaattgtttntattttgttttttaatgaaaacctagatctttcctttttggcataatttntatgatgacctgaaattttacatctgaacaaaattttatgaaaagcaaccaacttcttcatggaactcggccctgttgcaatgtttagggcccttaaagaagaaaatctccccagaaggcatccatcatgttgctaaattgtcttctgcagcttcctttccctagagttttccttctgttgctaagagctgaaagtggcatcttcacgatcaccacagtgagcttggctcacctcggccggcccgggatgcactcttacaacatgtgtgactcttgaacctggatttcatcacattacgtcacagcttcccatctggttgctttcctaaatcagctactttacacttgtcaaggctgttttaccccaaaactcagacaggactttctatgcatgtttnnnnnnnnnnnnnnnnnnnnnnnnnnnnnnnnnnnnnnnnnnggacacacttgagaagtagctttttattcctagtggtgtacatttaatttgaaaaagtttgcaatgtatcatgcttgttgccgaaactgtttatggccttcttgtttcagttttttcttttcttccaatggtactttagctgttgagtgcaagttacaacctatattgttatgcagatggcttctttaggaataacttttatatttatttaaaaatgtttaaagtatgggattttgttttgttgttgttgtnnnnnnnnnnnnnnnnnnnnnnnnnnnnnnnnnnnnnnnnnnnnnnnnnnnnnnnnnnnnnnnnnnnnnnnnnnnnnnnnnnnnnnnnnnnnnnnnnnnnnnnnnnnnnnnnnnnnnnnnnnnnnnnnnnnnnnnnnnnnnnnnnnnnnnnnnnnnnnnnnnnnnnnnnnnnnnnnnnnnnnnnnnnnnnnnnnnnnnnnnnnnnnnnnnnnnnnnnnnnnnnnnnnnnnnnnnnnnnnnnnnnnnnnnnnnnnnnnnnnnnnnnnnnnnnnnnnnnnnnnnnnnnnnnnnnnnnnnnnnnnnnnnnnnnnnnnnnnnnnnnnnnnnnnnnnnnnnnnnnnnnnnnnnnnnnnnnnnnnnnnnnnnnnnnnnnnnnnnnnnnnnnnnnnnnnnnnnnnnnnnnnnnnnnnnnnnnnnnnnnnnnnnnnnnnnnnnnnnnnnnnnnnnnnnnnnnnnnnnnnnnnnnnnnnnnnnnnnnnnnnnnnnnnnnnnnnnnnnnnnnnnnnnnnnnnnnnnnnnnnnnnnnnnnnnnnnnnnnnnnnnnnnnnnnnnnnnnnnnnnnnnnnnnnnnnnnnnnnnnnnnnnnnnnnnnnnnnnnnnnnnnnnnnnnnnnnnnnnnnnnnnnnnnnnnnnnnnnnnnnnnnnnnnnnnnnnnnnnnnnnnnnnnnnnnnnnnnnnnnnnnnnnnnnnnnnnnnnnnnnnnnnnnnnnnnnnnnnnnnnnnnnnnnnnnnnnnnnnnnnnnnnnnnnnnnnnnnnnnnnnnnnnnnnnnnnnnnnnnnnnnnnnnnnnnnnnnnnnnnnnnnnnnnnnnnnnnnnnnnnnnnnnnnnnnnnnnnnnnnnnnnnnnnnnnnnnnnnnnnnnnnnnnnnnnnnnnnnnnnnnnnnnnnnnnnnnnnnnnnnnnnnnnnnnnnnnnnnnnnnnnnnnnnnnnnnnnnnnnnnnnnnnnnnnnnnnnnnnnnnnnnnnnnnnnnnnnnnnnnnnnnnnnnnnnnnnnnnnnnnnnnnnnnnnnnnnnnnnnnnnnnnnnnnnnnnnnnnnnnnnnnnnnnnnnnnnnnnnnnnnnnnnnnnnnnnnnnnnnnnnnnnnnnnnnnnnnnnnnnnnnnnnnnnnnnnnnnnnnnnnnnnnnnnnnnnnnnnnnnnnnnnnnnnnnnnnnnnnnnnnnnnnnnnnnnnnnnnnnnnnnnnnnnnnnnnnnnnnnnnnnnnnnnnnnnnnnnnnnnnnnnnnnnnnnnnnnnnnnnnnnnnnnnnnnnnnnnnnnnnnnnnnnnnnnnnnnnnnnnnnnnnnnnnnnnnnnnnnnnnnnnnnnnnnnnnnnnnnnnnnnnnnnnnnnnnnnnnnnnnnnnnnnnnnnnnnnnnnnnnnnnnnnnnnnnnnnnnnnnnnnnnnnnnnnnnnnnnnnnnnnnnnnnnnnnnnnnnnnnnnnnnnnnnnnnnnnnnnnnnnnnnnnnnnnnnnnnnnnnnnnnnnnnnnnnnnnnnnnnnnnnnnnnnnnnnnnnnnnnnnnnnnnnnnnnnnnnnnnnnnnnnnnnnnnnnnnnnnnnnnnnnnnnnnnnnnnnnnnnnnnnnnnnnnnnnnnnnnnnnnnnnnnnnnnnnnnnnnnnnnnnnnnnnnnnnnnnnnnnnnnnnnnnnnnnnnnnnnnnnnnnnnnnnnnnnnnnnnnnnnnnnnnnnnnnnnnnnnnnnnnnnnnnnnnnnnnnnnnnnnnnnnnnnnnnnnnnnnnnnnnnnnnnnnnnnnnnnnnnnnnnnnnnnnnnnnnnnnnnnnnnnnnnnnnnnnnnnnnnnnnnnnnnnnnnnnnnnnnnnnnnnnnnnnnnnnnnnnnnnnnnnnnnnnnnnnnnnnnnnnnnnnnnnnnnnnnnnnnnnnnnnnnnnnnnnnnnnnnnnnnnnnnnnnnnnnnnnnnnnnnnnnnnnnnatttgaaaaccttgctgttacaaattggacctttatacgttttctaaaaacaatgaaaagagcatatttaaccttttctggctgtaaatggttaccttcctgtagctgccccgcacctggaggcatggagttgtgtgcgtcctgcttatgtacaattgttttcagtgtttctaagaatgagtctgaatggttcttgaaaattagccaggatcaaatgctattgcagacgaagccaataaaaagttggacttcttttggggataacaagtttggaagagaaatgcaggccatatgtgcgcatgaccgagattttgaaaaaagatgtacatagtgacatgtttggtgcatggttttgatgagggctttgtncaaaaaggaggtataacctttcccccacagacctgagagctgtgccttttctatgcaatattacagacattacatcggaacccagatggctgtattcacacgtaggtttgggctgtaatctaaacaattggacagattaaatgtacatggaaatgagcagtcttacttttgtagttttatattatacaataaacagttaaaagat

SEQ ID NO: 32551 - DNA, 373 bp, Macaca Mulatta
  misc_feature (1)...(373): n = A,T,C or G
acagacgttcacactgccacgtatgtctacgtggatttttggtnttcagcgtcccccaccccgctggctcttcttaattagaagtgaccagttcacctctgtgtccttttgaaacatcagcagtagggtccgttccaaggttatcagttaccgtagtgacatcaggccctgtaacctgtgtcctgtctggcgcagttgctcgcattcaccaaagtttgttttcaatgatcctgatggccaagaacaccgtgtgggatttttttttccccccaaggattttcacacatggaaggagaggtatttcttagagagatcatcattttatggtgccttgaaataaaaatacttctacttgaaatgctgattaagcaag

SEQ ID NO: 32552 - DNA, 862 bp, Macaca Mulatta
  misc_feature (1)...(862): n = A,T,C or G
gctctccatctacctggggaaacgggacttcgtggaccatgtggacatggtggaacccattgnnnnnnnnnnnnnnnnnnnnnnnnnnnnnnnnnnnnnnnnnnnnntgtttgtcatgttgacatgtgcctttcgctatggccgtgatgacttggaagtgattggtctgacattccgaaaagatctgtatgtgcagaccctgcaagtggtcccagctgaatccagcagccctaaggggcccctcacagttctacaggagcgactgctgcacaagctaggggacaatgcctacccctttaccctgcannnnnnnnnnnnnnnnnnnnnnnnnnnnnnnnnnnnnnnnnnnnnnnnnnnnnnnnnnnnnnnnnnnnnnnnnnnnnnnnnnnnnnnnnnnnnnnnnnnnnnnnnnnnnnnnnnnnnnnnnnnnnnnnnnnnnnnnnnnnnnnnnnnnnnnnnnnnnnnnnnnnnnnnnnnnnnnnnnnnnnnnnnnnnnnnnnnnnnnnnnnnnnnnnnnnnnnnnnnnnnnnnnnnnnnnnnnnnnnnnnnnnnnnnnnnnnnnnnnnnnnnnnnnnnnnnnnnnnnnnnnnnnnnnnnnnnnnnnnnnnnnnnnnnnnnnnnnnnnnnnnnnnnnnnnnnnnnnnnnnnnnnnnnnnnnnnnnnnnnnnnnnnnnnnnnnnnnnnnnnnnnnnnnnnnnnnnnnnnnnnnnnnnnnnnnnnnnnnnnnnggagactgtagctgccaattccagcttctcccagagctttgcagtaaccccaatcctggctgccagctgccagaaacggggcctggcactggatggcaaacttaagcatgaagataccaacctggcctctagca

SEQ ID NO: 32553 - DNA, 1190 bp, Macaca Mulatta
  misc_feature (1)...(1190): n = A,T,C or G
aggcccggcacctgggcgccgtcctggtgcagcacggctacatctacccgctgcgcgacccccgtagcctcgtgctccggccagacgagacgccctacaggttccagnnnnnnnnnnnnnnnnnnnnnnnnnnnnnnnnnnnnnnnnnnnnnnnnnnnnnnnnnnnnnnnnnnnnnnnnnnnnnnnnnnnnnnnnnnnnnnnnnnnnnnnnnnnnnnnnnnnnnnnnnnnnnnnnnnnnnnnnnnnnnnnnnnnnnnnnnnnnnnnnnnnnnnnnnnnnnnnnnnnnnnnnnnagggcagccaagcagcgcaggaagggggacaggctggtcattgcgtgccaagagcagacctactggctggtgaacaggcccccnnnnnnnnnnnnnnnnnnnnnnnnnnnnnnnnnnnnnnnnnnnnnnnnnnnnnnnnnnnnnnnnnnnnnnnnnnnnnnnnnnnnnnnnnnnnnnnnnnnnnnnnnnnnnnnnnnnnnnnnnnnnnnnnnnnnnnnnnnnnnnnnnnnnnnnnnnnnnnnnnnnnnnnnnnnnnnnnnnnnnnnnnnnnnnnnnnnnnnnnnnnnnnnnnnnnnnnnnnnnnnnnnnnnnnnnnnnnnnnnnnnnnnnnnnnnnnnnnnnnnnnnnnnnnnnnnnnnnnnnnnnnnnnnnnnnnnnnnnnnnnnnnnnnnnnnnnnnnnnnnnnnnnnnnnnnnnnnnnnnnnnnnnnnnnnnnnnnnnnnnnnnnnnnnnnnnnnnnnnnnnnnnnnnnnnnnnnnnnnnnnnnnnnnnnnnnnnnnnnnnnnnnnnnnnnnnnnnnnnnnnnnnnnnnnnnnnnnnnnnnnnnnnnnnnnnnnnnnnnnnnnnnnnnnnnnnnnnnnnnnnnnnnnnnnnnnnnnnnnnnnnnnnnnnnnnnnnnnnnnnnnnnnnnnnnnnnnnnnnnnnnnnnnnnnnnnnnnnnnnnnnnnnnnnnnnnnnnnnnnnnnnnnnnnnnnnnnnggactcctaccccttgtacctgaagtctgacatgtacaagggcctcctggcgccgtctgggatcccgctggagacgaagannncgtgttcccgttctcgcggaggccacggcactcaagccccagccctgcactccttcccacccctgtggagcccacagcggctggtggccctgggggaggagatggggtggcctag

SEQ ID NO: 32554 - DNA, 1940 bp, Macaca Mulatta
  misc_feature (1)...(1940): n = A,T,C or G
gggatgacattttggaagagtctgatcaaccaactcaagtaagcaagatgcaggaggatgaatttgagcaggataaccaagaacaagaagatgataactccaatgcagaaacagaagaggaaaatgtatcaaacatcaataagcacattcaagaaactgaatggccgagtcaagagggtaaaactggcctggaagctatcagcaaccacaaagagatagatgaaaagactgtttctgaggctttgctcatggaacctactgacgatggtaccactatgcccagaaatcatggagctgatgatgatggcggtgatgatggcgatgatggccccagacacagtgcaggtgatgactacttcatcccaagccaggcctttctggaggccgagagagctcaatccattgcctatcacctcaaaattgaggagcaaagggaaaaagcacatgaaaatgaaaatatagataccagtgagcctggagagcaccaagaggccaagaaagcagagaactcatcaaatgatgaggaaacgtcaagtgaaggcaacatgagggtgcatggtgtggattcttgcatgagcttccagtgtaaaagaggccacatctgtaaggtagaccaacagggaaaacctcactgtgtctgccaggatccagtgacttgtcctccaacaaaactccttgaccaagtttgtggcactgacaatcagacctatgccagttcctgtcatctattcgctactaaatgcagactggaggggaccaaaaaggggcatcaactccagctggattattttggagcctgcaaatctattcctacttgtacggactttgaagtgactcagtttcctctacggatgagagactggctcaagaatatcctcatgcagctttatgaagccaactctgaacacgctggctatctaaatgagaagcagagaaataaagtcaagaaaatttacctggatgaaaagaggctcttggctggggaccatcccattgaccttctcttaagggactttaagaaaaactaccacatgtatgtgtatcctgtgcactggcagtttagtgaacttgatcaacaccctatggatagagtcctgacacattccgaacttgctcctctgcgagcatctctggtgcccatgggaacactgcataaccccgtttcttttgaggagtgtgaccccaacaaggaataaacatatcaccctgaaggagtggggccactgctttggaattaaagaagaagacatagatgaaaatctcttgttttgaatgaagattttaaagaactcaactttccagcatcctcctctgttctaaccacttcagaaatatatgcagctgtaatacttgtagatttatatttagcaaaatgtttgcatgtgtgacaagacaatgagaagtaattgcttgataacaacctatgcgccaggtaaagtcaacatatgcaaaatactgtacattgtgaacagaagtttaattcatagtaatttcactctctgcatcgacttatgagataattaatgataaaactattaacgataaaaataatgcatttgtattgttcataatatcatatgcacttcaagaaaatggaatgctactcttttgtggtttacgtgtattattttcaatatcttaataccctaataaacagtccataaaaatccaaagggggaggagaaaggtagtagactgaaatagaggaacattatagtaaaaagataatgagtagaaacaacatcaatagagagagcgcaggataacaaacaccaggaccactgggggcgtgaccgccgcacaggcagacacgcgaaaagcactatctaactgaagataaccaccagtagaagaggagaactcgcagagcgtcttgttttggttgtgtgtgcaggctcaaaggtgacgcgtnnnnnnnnnnnnnnnnnnnatattttggc

SEQ ID NO: 32555 - DNA, 5847 bp, Macaca Mulatta
  misc_feature (1)...(5847): n = A,T,C or G
gctttgtgttattcttggaaaatttcgcaccacttgtgaattccttgaacctgggcattgcaaacccacttctgttgggcccatctcctttgcactttgctcagattaagactcagttggcgcttcagcagctgaatgccgttgcctcacatggttcaacacnnnnnnnnnnnnnnnnnnnnnnnnnnnnnnnnnnnnnnnnnnnnnnnnnnnnnnnnnnnnnnnnnnnnnnnnnnnnnnnnnnnnnnnnnnnnnnnnnnnnnnnnnnnnnnnnnnnnnnnnnnnnnnnnnnnnnnnnnnnnnnnnnnnnnnnnnnnnnnnnnnnnnnnnnnnnnnnnnnnnnnnnnnnnnnnnnnnnnnnnnnnnnnnnnnnnnnnnnnnnnnnnnnnnnnnnnnnnnnnnnnnnnnnnnnnnnnnnnnnnnnnnnnnnnnnnnnnnnnnnnnnnnnnnnnnnnnnnnnnnnnnnnnnnnnnnnnnnnnnnnnnnnnnnnnnnnnnnnnnnnnnnnnnnnnnnnnnnnnnnnnnnnnnnnnnnnnnnnnnnnnnnnnnnnnnnnnnnnnnnnnnnnnnnnnnnnnnnnnnnnnnnnnnnnnnnnnnnnnnnnnnnnnnnnnnnnnnnnnnnnnnnnnnnnnnnnnnnnnnnnnnnnnnnnnnnnnnnnnnnnnnnnnnnnnnnnnnnnnnnnnnnnnnnnnnnnnnnnnnnnnnnnnnnnnnnnnnnnnnnnnnnnnnnnnnnnnnnnnnnnnnnnnnnnnnnnnnnnnnnnnnnnnnnnnntcagagcagaaataaagaaacccttcgtagtgaagcagtttcaagtaatgtgatagattatgggcacgtagcaaatatggctacacagaagatccacttgaagtacgtatttatgatcctgaaattccaactgatgaggtcgagaatgaatttcagtcacagcagaacatctctgcatctgttcccaatccaaatgtgatatgtaattctatgtttcctgttgaagacgtatttcgccaaatggacttccccggtgagtcctccaataatcggtcctttttcccagttgagagtggagccaagatgtcaggcttacgcatttcgggaggacagtcagtccttgaacccataaaatccgtcaaccaatccattaaccaaacagttagccagacgatgagtcaatctctaattcctccatctatgaaccagcaacctttttcatcggaattaatttcagctgtaagccagcaagagcggatcccacatgaacctgtgattaattcatctaacgtacatgttggatcaagaggaagtaaaaagaattaccagtcacaggctgacgttcccattcgatctccctttggtattgtgaaagcatcttggctaccaaagttttcacatgctgatgcccagaagatgaagagacttccctactccttctatgatgaatgattattatgcagcatctccaagaatatttccacatttgtgttctctatgtaacgtagaatgtagtcatttgaaggnnnnnnnnnnnnnnnnnnnnnnnnnnnnnnnnnnnnnnnnnnnnnnnnnnnnnnnnnnnnnnnnnnnnnnnnnnnnnnnnnnnnnnnnnnnnnnnnnnnnnnnnnnnnnnnnnnnnnnnnnnnnnnnnnnnnnnnnnnnnnnnnnnnnnnnnnnnnnnnnnnnnnnnnnnnnnnnnnnnnnnnnnnnnnnnnnnnnnnnnnnnnnnnnnnnnnnnnnnnnnnnnnnnnnnnnnnnnnnnnnnnnnnnnnnnnnnnnnnnnnnnnnnnnnnnnnnnnnnnnnnnnnnnnnnnnnnnnnnnnnnnnnnnnnnnnnnnnnnnnnnnnnnnnnnnnnnnnnnnnnnnnnnnnnnnnnnnnnnnnnnnnnnnnnnnnnnnnnnnnnnnnnnnnnnnnnnnnnnnnnnnnnnnnnnnnnnnnnnnnnnnnnnnnnnnnnnnnnnnnnnnnnnnnnnnnnnnnnnnnnnnnnnnnnnnnnnnnnnnnnnnnnnnnnnnnnnnnnnnnnnnnnnnnnnnnnnnnnnnnnnnnnnnnnnnnnnnnnnnnnnnnnnnnnnnnnnnnnnnnnnnnnnnnnnnnnnnnnnnnnnnnnnnnnnnnnnnnnnnnnnnnnnnnnnnnnnnnnnnnnnnnnnnnnnnnnnnnnnnnnnnnnnnnnnnnnnnnnnnnnnnnnnnnnnnnnnnnnnnnnnnnnnnnnnnnnnnnnnnnnnnnnnnnnnnnnnnnnnnnnnnnnnnnnnnnnnnnnnnnnnnnnnnnnnnnnnnnnnnnnnnnnnnnnnnnnnnnnnnnnnnnnnnnnnnnnnnnnnnnnnnnnnnnnnnnnnnnnnnnnnnnnnnnnnnnnnnnnnnnnnnnnnnnnnnnnnnnnnnnnnnnnnnnnnnnnnnnnnnnnnnnnnnnnnnnnnnnnnnnnnnnnnnnnnnnnnnnnnnnnnnnnnnnnnnnnnnnnnnnnnnnnnnnnnnnnnnnnnnnnnnnnnnnnnnnnnnnnnnnnnnnnnnnnnnnnnnnnnnnnnnnnnnnnnnnnnnnnnnnnnnnnnnnnnnnnnnnnnnnnnnnnnnnnnnnnnnnnngccaaaactggacaagccaaggcatctgtagccaaagtaaacaaatctgcagnnnnnnnnnnnnnnnnnnnnnnnnnnnnnnnnnnnnnnnnnnnnnnnnnnnnnnnnnnnnnnnnnnnnnnnnnnnnnnnnnnnnnnnnnnnnnnnnnnnnnnnnnnnnnnnnnnnnnnnnnnnnnnnnnnnnnnnnnnnnnnnnnnnnnnnnnnnnnnnnnnnnnnnnnnnnnnnnnnnnnnnnnnnnnnnnnnnnnnnnnnnnnnnnnnnnnnnnnnnnnnnnnnnnnnnnnnnnnnnnnnnnnnnnnnnnnnnnnnnnnnnnnnnnnnnnnnnnnnnnnnnnnnnnnnnnnnnnnnnnnnnnnnnnnnnnnnnnnnnnnnnnnnnnnnnnnnnnnnnnnnnnnnnnnnnnnnnnnnnnnnnnnnnnnnnnnnnnnnnnnnnnnnnnnnnnnnnnnnnnnnnnnnnnnnnnnnnnnnnnnnnnnnnnnnnnnnnnnnnnnnnnnnnnnnnnnnnnnnnnnnnnnnnnnnnnnnnnnnnnnnnnnnnnnnnnnnnnnnnnnnnnnnnnnnnnnnnnnnnnnnnnnnnnnnnnnnnnnnnnnnnnnnnnnnnnnnnnnnnnnnnnnnnnnnnnnnnnnnnnnnnnnnnnnnnnnnnnnnnnnnnnnnnnnnnnnnnnnnnnnnnnnnnnnnnnnnnnnnnnnnnnnnnnnnnnnnnnnnnnnnnnnnnnnnnnnnnnnnnnnnnnnnnnnnnnnnnnnnnnnnnnnnnnnnnnnnnnnnnnnnnnnnnnnnnnnnnnnnnnnnnnnnnnnnnnnnnnnnnnnnnnnnnnnnnnnnnnnnnnnnnnnnnnnnnnnnnnnnnnnnnnnnnnnnnnnnnnnnnnnnnnnnnnnnggtgcaaactgagcatgacccagaattagaaaaagaaagnnnnnnnnnnnnnnnnnnnnnnnnnnnnnnnnnnnnnnnnnnnnnnnnnnnnnnnnnnnnnnnnnnnnnnnnnnnnnnnnnnnnnnnnnnnnnnnnnnnnnnnnnnnnnnnnnnnnnnnnnnnnnnnnnnnnnnnnnnnnnnnnnnnnnnnnnnnnnnnnnnnnnnnnnnnnnnnnnnnnnnnnnnnnnnnnnnnnnnnnnnnnnnnnnnnnnnnnnnnnnnnnnnnnnnnnnnnnnnnnnnnnnnnnnnnnnnnnnnnnnnnnnnnnnnnnnnnnnnnnnnnnnnnnnnnnnnnnnnnnnnnnnnnnnnnnnnnnnnnnnnnnnnnnnnnnnnnnnnnnnnnnnnnnnnnnnnnnnnnnnnnnnnnnnnnnnnnnnnnnnnnnnnnnnnnnnnnnnnnnnnnnnnnnnnnnnnnnnnnagaagaatctccatctgaagcacatttcttttctggaattacacagactatggtagaaactgcagttgaagtagaaaaacatgaaactgtttcagaaatatcgccatcaacttgtattgtgacgttagtaccgggaatttcccctggggatgagaagacagtggataaaaagagtatttctgaaaaaaaaagtaacatggatgaaaaggaggagaatgaatttaatactaaggaaaccagaatgggtcttcaaataggaacagagaaggctgaaaagaatgaaggtaggatggatgcagaaaaggtggaaaagattatggcagcagtgaaagaaaagtctgcagaaaacactttattcaaggcatacccaaataaaggagtgggtcaggctaataagcctgatgaaactagtaaaactagtattctggctgtatcagatgtatctagcagtaaaccaagcatcaaggctattatggtctcttctcctaaggcaaaagctacagtttcaaaaactgaaaatcagaaaagtttaacaaaatctgtgcccagagatcaaataaatgctgaaaagaaactttcagccaaagaatttggtctgcttaaacctacaagtgccaggtcaggcttggcagaaagcagcagtaaattcaaacctactccgagtagtcttaccagaggaggcagtggaaagatctcagccctgcaaggcaaactttctaaactggattacagggacataacaaaacaatctcaggagacagaggctagaccttccatcatgaaacgggatgacagcaacaataagnnnnnnnnnnnnnnnnnnnnnnnnnnnnnnnnnnnnnnnnnnnnnnnnnnnnnnnnnnnnnnnnnnnnnnnnnnnnnnnnnnnnnnnnnnnnnnnnnnnnnnnnnnnnnnnnnnnnnnnnnnnnnnnnnnnnnnnnnnnnnnnnnnnnnnnnnnnnnnnnnnnnnnnnnnnnnnnnnnnnnnnnnnnnnnnnnnnnnnnnnnnnnnnnnnnnnnnnnnnnnnnnnnnnnnnnnnnnnnnnnnnnnnnnnnnnnnnnnnnnnnnnnnnnnnnnnnnnnnnnnnnnnnnnnnnnnnnnnnnnnnnnnnnnnnnnnnnnnnnnnnnnnnnnnnnnnnnnnnnnnnnnnnnnnnnnnnnnnnnnnnnnnnnnnnnnnnnnnnnnnnnnnnnnnnnnnnnnnnnnnnnnnnnnnnnnnnnnnnnnnnnnnnnnnnnnnnnnnnnnnnnnnnnnnnnnnnnnnnnnnnnnnnnnnnnnnnnnnnnnnnnnnnnnnnnnnnnnnnnnnnnnnnnnnnnnnnnnnnnnnnnnnnnnnnnnnnnnnnnnnnnnnnnnnnnnnnnnnnnnnnnnnnnnnnnnnnnnnnnnnnnnnnnnnnnnnnnnnnnnnnnnnnnnnnnnnnnnnnnnnnnnnnnnnnnnnnnnnnnnnnnnnnnnnnnnnnnnnnnnnnnnnnnnnnnnnnnnnnnnnnnnnnnnnnnnnnnnnnnnnnnnnnnnnnnnnnnnnnnnnnnnnnnnnnnnnnnnnnnnnnnnnnnnnnnnnnnnnnnnnnnnnnnnnnnnnnnnnnnnnnnnnnnnnnnnnnnnnnnnnnnnnnnnnnnnnnnnnnnnnnnnnnnnnnnnnnnnnnnnnnnnnnnnnnnnnnnnnnnnnnnnnnnnnnnnnnnnnnnnnnnnnnnnnnnnnnnnnnnnnnnnnnnnnnnnnnnnnnnnnnnnnnnnnnnnnnnnnnnnnnnnnnnnnnnnnnnnnnnnnnnnnnnnnnnnnnnnnnnnnnnnnnnnnnnnnnnnnnnnnnnnnnnnnnnnnnnnnnngctaaaactccaaccaagagagttagaattgggaaaactctgccatcagaaaaagctgttgtgacagaaccagcaaaaggtgaagaggccttccagatgagtgaag

SEQ ID NO: 32556 - DNA, 961 bp, Macaca Mulatta
  misc_feature (1)...(961): n = A,T,C or G
tgtgagcttatatcatgtatttatggtggatgttgacttagttcatgaatgttgtcacttctaaatgtggacagttgggctgcaggatgcaactccacctcttttggatcctagagacccctgccaagctcccatcggtcctatttctaaatgaagacatcgccatttctagacctgagattttctcccctctgtggttgtatgtattttaacctcaacattttgaaaaggaaaatgcaattaggggccaagaaatgtcctggggatttgatgccaggaagtacctgtgtaaggattggagattgctccagaatctgttccttgtctgtctcaatttgcagtttgctcactaggcctatatacaaaagctatagccttgaggggtttttttgtttcattttgcttttgatttccttaggacgttagaaggaaaacaagcagtagcagctaataacattctcaagtgtagtgctgcttagaaagattctcaggaacaattagcagcaataagcaagcctttgaaaagagctgaattatttttcctgaaatatttacaatacacaggtgctttttatctgaaatctgttgtgtcctccttttaggcagtttctgtgggcagagagtgggacatgcgatgtgggcagctgtggggatcctgggcaagggagtctcagaaggtgtggctcaggcgctggtagaaacgcccctttgctagaacttgttttttcacaaagaaagccctaggccaggcgcagtggctgacagnnnnnnnnnnnnnnnnnnnnnnnnnnncgcatgtggatcactgacgtcacgattcgagacagctgtgcacgttgttaaccccgtctctctgaacttcaaattaccgcttgtgttttgccttcncacatcagatgtgagaggaatgttaactgaagcgaggggtacttcatcctaacagctgattgaactcttaaaa

SEQ ID NO: 32557 - DNA, 617 bp, Macaca Mulatta
gacctccgcaaggcaccgggagacgcagcacgggctcaaatgagcaccctggcctggctgcaagcaggcagctacacaacactacggagggcaacctccctgcttgcaaccactctgctccctgcttgccaccactcccttctgactttccagaccccaagtccagtctgcagatcccaccagggtgctcctcctttgccttacctcctggagctgccagaggagatgaggtaccttttcaaagtgcagccgaaagtgagaaccaagcgactctctaggcttcagacacaaataggctcctctacacctgaagacaaaggcaaaggtcaaatgggaaccagaataaatcttagaccccacagtccctcccatttccagccctaatctgcagacaggaaatgcccttcaggttacttccctccccatcttgacctaacccagatataagtgtggaagaggaggaatcaccatttacaaggtggacaaatgctaatatcctcatctagaaagaagagtgagtgtaaacttccattactcatacttctgcggagtctgttgactcctttctactgagtgctgcctataactcttggaggaatcatttctcctcctcaaaa

SEQ ID NO: 32558 - DNA, 762 bp, Macaca Mulatta
  misc_feature (1)...(762): n = A,T,C or G
cgccccggccgccgcgatcttttcttaagcgaaattccttaaggcaggtacaccggattcccccaaaaatggtttccgttctggagttcacggagatcccctccagtttcttgatatccgttctcgacttgcatcctagagcctacatgccaaaatcctttctaggcacggtgctagatttctctgtacactttgttaaaatgtaaacttcatactccactgtcagtttttgtcttaataaaactatagatttataatccctgatttctgtcttaagtcttaccaggaactcttcttgccttataggtccagcctgttggaaatggcttcctcacttggatggtcttatttcttgaacactgtaggcttgaaaatctagtgtctggcctgaatctttaagtggtcgcaccatattaatttagtaaatacttaataggcatttatcaggtgctgcagagattgtaaagatggtcgcatcatgctgtcttcagtattgccaaaagtttattgagcactctgacctgacagcacttccaaactatggtacatttggaaacatgggtttttaagttaggtttagatcctgcctctggtatgtaatagattatatgacctaaaatctacttctccaaaattttccaggaattggccccgtgtttgagcactgacttaaaatgtcattttttgcctnnnnnnnnnnnnnnnnnnnntgagacagggtcttgcannnnnnnnnnnnnnnnnnnacagtggtgtgatccc

SEQ ID NO: 32559 - DNA, 733 bp, Macaca Mulatta
ctttcgctcgccgaggcgcgtatcagtcggaattttgaggagccaaccgggccgtctgtctctggcaagccagtggcggtttaaaggacgtggtgggaagcctgtgtgtgctcgacttcgtgaccctcatggtcgctccggtttttcacacctgaaaataacatagcaaaataagccaagatgtctgtgaatccaatgacctatgaggcccagttctttggcttcatgccacaaacgtgcatgcttcgaatttacattgcatttcaagactacctatttgaagtgatgcaggccgttgaacaggttattctgaagaagctggatggcatcccagactgtgacattagcccagtgcagattcgcaaatgcacagagaagtttctttgcttcatgaaaggacattttgataacctttttagcaaaatggagcaactgtttttgcagctgattttacgtattccctctaaacatcttgcttcctgaagataaatgtaaggagataccttatagtgaggaagatttttagcgtctccagaaagattttgaacagttacaggagaagtacaagactgaattatgtattaagcaggcccctcttgcaaaattagaagagcaaaaaattgttcaggccaaactcaaacagacgttgactttctttgatgagcttcaaaatgttgtcagagatcatgggactagtgattttagggagagtttagtgtccctggtcagaact

SEQ ID NO: 32560 - DNA, 1141 bp, Macaca Mulatta
  misc_feature (1)...(1141): n = A,T,C or G
agtttgtacgggtgctgagcggagtggccccgtctgtgctctttgacctgctgcttgctgagtggcacctgccggcccccaacctggtggtgtcccttgtgggcgaggagcagcctttcgccatgaagtcctggctgcgggacgtaatgcgcaaggggctggtgaaggtggctcagagcacagnnnnnnnnnnnnnnnnnnnnnnnnnnnnnnnnnnnnnnnnnnnnnnnnnnnnnnnnnnnnnnnnnnnnnnnnnnnnnnnnnnnnnnnnnnnnnnnnnnnnnnnnnnnnnnnnnnnnnnnnnnnnnnnnnnnnnnnnnnnnnnnnnnnnnnnnnnnnnnnnnnnnnnnnnnnnnnnnnnnnnnnnnnnnnnnnnnnnnnnnnnnnnnnnnnnnnnnnnnnnnnnnnnnnnnnnnnnnnnnnnnnnnnnnnnnnnnnnnnnnnnnnnnnnnnnnnnnnnnnnnnnnnnnnnnnnnnnnnnnnnnnnnnnnnnnnnnnnnnnnnnnnnnnnnnnnnnnnnnnnnnnnnnnnnnnnnnnnnnnnnnnnnnnnnnnnnnnnnnnnnnnnnnnnnnnnnnnnnnnnnnnnnnnnnnnnnnnnnnnnnnnnnnnnnnnnnnnnnnnnnnnnnnnnnnnnnnnnnnnnnnnnnnnnnnnnnnnnnnnnnnnnnnnnnnnnnnnnnnnnnnnnnnnnnnnnnnnnnnnnnnnnnnnnnnnnnnnnnnnnnnnnnnnnnnnnnnnnnnnnnnnnnnnnnnnnnnnnnnnnnnnnnnnnnnnnnnnnnnnnnnnnnnnnnnnnnnnnnnnnnnnnnnnnnnnnnnnnnnnnnnnnnnnnnnnnnnnnnnnnnnnnnnnnnnnnnnnnnnnnnnnnnnnnnnnnnnnnnnnnnnnnnnnnnnnnnnnnnnnnnnnnnnnnnnnnnnnnnnnnnnnnnnnnnnnnnnnnnnnnnnnnnnnnnnnnnnnnnnnnnnnnnnnnnnnnnnnnnnnnnnnnnnnnnnnnnnnnnnnnnnnnnnaagtcctgtgacctggaggaggtgatggtggacgccctggtcagcaacaagcccgagtttgtgcacctctttgtggacaccggcgcagacgtggctgacttcctgacgtatgggcggctgcagcagctttac

SEQ ID NO: 32561 - DNA, 420 bp, Macaca Mulatta
ccttcctgtgggcagggtgagcagagcctcctgtgctccagagccagaagtgcccccatgaaatgccaggcagggatgcaaatgaaacagaagcatttaatagatgtgtggacgagaaagggcagagaaggtgccagggcggggcgggaaggagtacagtggcagtctggagaggcacatttgcaaggcaggggagtcccgcttctgcttccaggagtggtctgggccactcagcctgccaactctctcccaacagctgggaggagaggctggcccagccctacctttctcgcctgtagcctccggaggaagtaattccttccaccaagtcgcaggctggagcaacccggagtggtagcagctgcggacacaggctcacgggtggtgagagcctttacacctgctcaaggcccttcagtg

SEQ ID NO: 32562 - DNA, 548 bp, Macaca Mulatta
  misc_feature (1)...(548): n = A,T,C or G
cgggaagtaggcggggtgacgtgtggtggacgagctcggcggcgggtttgctgagatctgtggctggcggcagctggtgcggggggcggccgagagcgagaggtggatcggggcggtgtgtggccggggccatgacgggcaatgccggggagtggtgcctcatggaaagcgaccccggggtcttcaccgagctcattaaaggattcggnnnnnnnnnnnnnnnnnnnnnnnnnnnnnnnnnnnnnnnnnnnnnnnnnnnnnnnnnnnnnnnnnnnnnnnnnnnnnnnnnnnnnnnnnnnnnnnnnnnnnnnnnnnnnnnnnnnnnnnnnnnnnnnnnnnnnnnnnnnnnnnnnnnnnnnnnnnnnnnnnnnnnnaggtaattaataatgcttgtgctactcaagccatagtgagtgtgttactgaactgtacccaccaggatgtccatttaggcgagacattatcagagtttaaagaattttcacaaagttttgatgcagcnnnnnnnnnnnnnnnntgagcaattcagatgtgattcgacaagtaca

SEQ ID NO: 32563 - DNA, 758 bp, Macaca Mulatta
gatttctcctggtcccatagtggactgttacagtgttcagtctagcgtgcacatcctgggcactgaatctctcttcagtgttgacccccttggcgttagcattcagtccttgtatatttagagaatatcagtgttttcccagacatgataataatggtagttgtcagcagtatcctagccctttctctatttattctcccacttctggaatgattctcgggtataacctaacccaaagaaaaatgccatgtgctcaaactgagggctgtgaggttgggtctttggggttagctccatcttccagggtttgccctttgcccttcaaccaaaggacaaagtcatgttaacagctgctactaagtctacatgcctattcgttcataccacaaaacaggcatctgtcaccatggaatcaaggcacttgatgggggtgggggctccacaggcacagggggcttcactctggaacaggattactgggtgcagcagacgcaatcctcacttcatcaacccacaccccagcaccctgagctttctcttaatctcattctagcccatcgtgactcttcggttaggaagggttctcactggagatttgtctctgggattaatgggtgtatgcctagctactttctccagtttacttttagaccatattattgtttgttttgaatatcattccttaggctttgtggagagtagattgacttcccacgaggagaactaatttagggcatgtcttttgctgaatcccgtca

SEQ ID NO: 32564 - DNA, 1677 bp, Macaca Mulatta
  misc_feature (1)...(1677): n = A,T,C or G
ttcgaggggaagacatcatttggaatgtcagtgttcaacctcagcaatgccatcatgggcagcggcatcctggggctggcctatgacatggcccacacaggagtcatcttcttcctnnnnnnnnnnnnnnnnnnnnnnnnnnnnnnnnnnnnnnnnnnnnnnnnnnnnnnnnnnnnnnnnnnnnnnnnnnnnnnnnnnnnnnnnnnnnnnnnnnnnnnnnnnnnnnnnnnnnnnnnnnnnnnnnnnnnnnnnnnnnnnnnnnnnnnnnnnnnnnnnnnnnnnnnnnnnnnnnnnnnnnnnnnnnnnnnnnnnnnnnnnnnnnnnnnnnnnnnnnnnnnnnnnnnnnnnnnnnnnnnnnnnnnnnnnnnnnnnnnnnnnnnnnnnnnnnnnnnnnnnnnnnnnnnnnnnnnnnnnnnnnnnnnnnnnnnnnnnnnnnnnnnnnnnnnnnnnnnnnnnnnnnnnnnnnnnnnnnnnnnnnnnnnnnnnnnnnnnnnnnnnnnnnnnnnnnnnnnnnnnnnnnnnnnnnnnnnnnnnnnnnnnnnnnnnnnnnnnnnnnnnnnnnnnnnnnnnnnnnnnnnnnnnnnnnnnnnnnnnnnnnnnnnnnnnnnnnnnnnnnnnnnnnnnnnnnnnnnnnnnnnngatgtcctacacagtgcccattatggcttttgcttttgtctgccaccctgaggtgctgcccatctatacggagctctgccggnnnnnnnnnnnnnnnnnnnnnnnnnnnnnnnnnnnnnnnnnnnnnnnnnnnnnnnnnnnnnnnnnnnnnnnnnnnnnnnnnnnnnnnnnnnnnnnnnnnnnnnnnnnnnaggcagagatgctgcacatgtacagccagaaggaccctctcatcctctgtgtgcgcctggccgtgctgctcgcggtgaccctcactgtgccagtcgtgctgttccnnnnnnnnnnnnnnnnnnnnnnnnnnnnnnnnnnnnnnnnnnnnnnnnnnnnnnnnnnnnnnnnnnnnnnnnnnnnnnnnnnnnnnnnnnnnnnnnnnnnnnnnnnnnnnnnnnnnnnnnnnnnnnnnnnnnnnnnnnnnnnnnnnnnnnnnnnnnnnnnnnnnnnnnnnnnnnnnnnnnnnnnnnnnnnnnnnnnnnnnnnnnnnnnnnnnnnnnnnnnnnnnnnnnnnnnnnnnnnnnnnnnnnnnnnnnnnnnnnnnnnnnnnnnnnnnnnnnnnnnnnnnnnnnnnnnnnnnnnnnnnnnnnnnnnnnnnntgggccacaggccagagccgcctgtctggacactgatcaggccctgctggcccaggtccctgtgcgaatgcacatggaggggtcggggccgctccctagggtccctcctgcccagcatgtggaggcggctggttcccatgaacgtggttgtcagaggcgggggacagcagaggctgcagactggcccacttccctcctccccagggatgccaaacttggatcatggccctaatcccatccccaaccccatgnnnnnnnnnnnnnnnnnnnnnnnnnnnnnnnnnnnnnnnnnnnnnnnnggaggaggaggagggcaggtcctggcggagcctttgcccagcccagtcctctctgcctcctcctggctgaagctgtttgtcaggattaccctcgggctaaagaggaaaaataaagatgttgaggtacc

SEQ ID NO: 32565 - DNA, 367 bp, Macaca Mulatta
  misc_feature (1)...(367): n = A,T,C or G
gatccactctctgtgctacaacgattgcatcttctcacgcaacactccgaccaggactttcaactacaacttctccgctttggcaaacactgtcactcttgctggagggccaagcttcacttccaaagggctgaaatacttccatcactttaccctcagtctctgtggaaaccaggnnnnnaccagggtcggaaaatgtctgtgtgcaccgacaatgtcactgacctccggattcctgagggtgagtcagggttctccaaatctatcacagcctacgtctgccaggcagtcatcatccccccagaggtgacaggctacaaggccggggtttcctcacagcctgtcagccttgctgaccgacttattg

SEQ ID NO: 32566 - DNA, 387 bp, Macaca Mulatta
  misc_feature (1)...(387): n = A,T,C or G
ggcacatgaacacacttcaactgcagatggaagtgaccaggttctnnnnnnnnnnnnnnnnnnnnnnnnnnnnnnnnnnnnnnnnnnnnnnnnnnnnnnnnnnnnnnnnnnnnnnnnnnnnnnnnnnnnnnnnnnnnnnnnnnnnnnnnnnnnnnnnnnnnnnnnnnnnnnnnnnnnnnnnnnnnnnnnnnnnnnnncctgnaggacttccagctagatgctgccatgacctactgcagagctgcccgccagttggtggagaaggagaaatacagtgagatccggcaactgctcaagtgtgtcagtgagtcaggcgtggcagccaaaagtgacggggacaccatcctcctcaactgcctggaagcgttcaagagaattccaccccag

SEQ ID NO: 32567 - DNA, 4238 bp, Macaca Mulatta
  misc_feature (1)...(4238): n = A,T,C or G
agatttaagtaagtcttccccaacaccgaatgggattccatcttcagacccagccagcgatgccatggaccccttccatgcttgcagtattcttaagcaactcaaaacaatgtacgatgaaggacagttgacagacattgtagtggaagtggatcacgggaaaacattttcctgtcatagaaacgttcttgctgcaatcagcccttacttcagnnnnnnnnnnnnnnnnnnnnnnnnnnnnnnnnnnnnnnnnnnnnnnnnnnnnnnnnnnnnnnnnnnnnnnnnnnnnnnnnnnnnnnnnnnnnnnnnnnnnnnnnnnnnnnnnnnnnnnnnnnnnnnnnnnnnnnnnnnnnnnnnnnnnnnnnnnnnnnnnnnnnnnnnnnnnnnnnnnnnnnnnnnnnnnnnnnnnnnnnnnnnnnnnnnnnnnnnnnnnnnnnnnnnnnnnnnnnnnnnnnnnnnnnnnnnnnnnnnnnnnnnnnnnnnnnnnnnnnnnnnnnnnnnnnnnnnnnnnnnnnnnnnnnnnnnnnnnnnnnnnnnnnnnnnnnnnnnnnnnnnnnnnnnnnnnnnnnnnnnnnnnnnnnnnnnnnnnnnnnnnnnnnnnnnnnnnnnnnnnnnnnnnnnnnnnnnnnnnnnnnnnnnnnnnnnnnnnnnnnnnnnnnnnnnnnnnnnnnnnnnnnnnnnnnnnnnnnnnnnnnnnnnnnnnnnnnnnnnnnnnnnnnnnnnnnnnnnnnnnnnnnnnnnnnnnnnnnnnnnnnnnnnnnnnnnnnnnnnnnnnnnnnnnnnnnnnnnnnnnnnnnnnnnnnnnnnnnnnnnnnnnnnnnnnnnnnnnnnnnnnnnnnnnnnnnnnnnnnnnnnnnnnnnnnnnnnnnnnnnnnnnnnnnnnnnnnnnnnaacagtgccttgtctagatatagtcacaggaaaggtgtttaaactatgcaaaccaccaaatgacctgagagaagttgggattcttgtatcaccagataatgacatttacattgcaggagggtacaggccaagcagcagtgaggtctccatcgaccataaggcagaaaatgatttctggatgtatgatcattccaccaatagatggctatccaaaccatccttgcttcgagctagaataggctgcaaacttgtctactgctgtggtaaaatgtatgcaatcggaggtcgtgtttatgaaggtgatgggagaaactcactaaaatctgttgagtgctacgacagtagagagaattgctggacgactgtttgcgcaatgccagttgcaatggaatttcataatgctgtggagtacaaagagaagatctatgttttacagggnggagaatttttcctcttctatgagcctcaaaaagactactggggtttcctgacccccatgactgtgcctagaatccagggcttagcagctgtatacaaggactctatctactacatagctggaacctgtggaaatcatcaacgtatgtttactgtagaagcctatgatattgagctaaataaatggactcgtaagaaagactttccatgtgatcagtccataaatccataccttaaactggtacttttccagaacaaactccatttatttgttcgagctactcaagtgactgtcgaagaacacgtctcagaaccagcagaaaaatttcctttacagtatgatgacatgctgacagtggatgaaatgtatgaaacccagatcggctctgggacctggccgggattttgannnnnnnnnnnnnnnnnnnnnnnnnnnnnnnnnnnnnnnnnnnnnnnnnnnnnnnnnnnnnnnnnnnnnnnnnnnnnnnnnnnnnnnnnnnnnnnnnnnnnnnnnnnnnnnnnnnnnnnnnnnnnnnnnnnnnnnnnnnnnnnnnnnnnnnnnnnnnnnnnnnnnnnnnnnnnnnnnnnnnnnnnnnnnnnnnnnnnnnnnnnnnnnnnnnnnnnnnnnnnnnnnnnnnnnnnnnnnnnnnnnnnnnnnnnnnnnnnnnnnnnnnnnnnnnnnnnnnnnnnnnnnnnnnnnnnnnnnnnnnnnnnnnnnnnnnnnnnnnnnnnnnnnnnnnnnnnnnnnnnnnnnnnnnnnnnnnnnnnnnnnnnnnnnnnnnnnnnnnnnnnnnnnnnnnnnnnnnnnnnnnnnnnnnnnnnnnnnnnnnnnnnnatacgggtaacaatttgaggcaatatcactaggactttagctgtgacttctctaacacagagaagcactaacttagatcctcaatctgaatatttatgtgtatctatttttgtgtactgttttcaagtgtactgagatttaaatatgttctgttattagagtagatgaaaggaaaaattagtctcagaaagagcttttagtctgattgtttccattggccatgtaactttaagttaagctaaagttttaaagtggcagttttctgtcgataactttcaagtgctaacactgtctcatttgtgaaaatctggaaaagtgctcatattcacaggtggctggtgctagtctaacttaattcatgtgtataactagatagatttaaatggtctgagcctatgcctatctttcaaattggtgtgcatttcatggccacagttctttacctgttgaactcttgtgatttcacaagattgtctacttatgtgataggaagatatgaccagttattcatctaactggactcaatcttagaatagtaggaacattatacccagtttgcactaacatgggccatttgtagcccaaccgtctcttccatctacctgtccattcattattggtacaaggaaaggtaacttatttctcttctgtgcagagcataatgtgaagttttatacctacttttaaaattctgctttccagaaacataaaattcctgcagtggtctaatttaatttcttttaagtttcatattacaattaaaacctcannnnnnnnnnnnatttttgcacttaacagtgatgaatacttttacattggaatcctctttctagctgaaggtgatgaaaaaggaaaagagtgagtgaacagtaccatagctttctagatactaaagcattttttgtatttaactgatgaatttctaacaatcagttaggaatattaacatgaaggacaaaccaacttatgtgtgtacctaaggcaggcatttggatcagtaacatattttactaagcctagcataattcataaagggtataagcataggacagattctgccctcaatcacaatatttttattcacttgaaagcaaactggcatggttcgtattttaaaaattttgcacaacttgtaatgtgatactgtgaaacaaatggaaaacatcgcctctttgcatcacatacctcgtttttcagaaactttccaaactgctttacatagacctctacaagtagggaatgttttctgaagcagaagttaaaacggacagcatttctagaattaacattttaaaatctagtcttagctagatacatggtttcttctcatcggcgttgatagtatgtctgtaatctctgtataaactttgtcaatatttttacctccccagttttatcttcnnnnnnnnnnnnnnnnnnnnnnnnnnnnnnnnnnnnnnnnnnnnnnnnnnnnnnnnnnnnnnnnnnnnnnnnnnnnnnnnnnnnnnnnnnnnnnnnnnnnnnnnnnnnnnnnnnnnnnnnnnnnnnnnnnnnnnnnnnnnnnnnnnnnnnnnnnnnnnnnnnnnnnnnnnnnnnnnnnnnnnnnnnnnnnnnnnnnnnnnnnnnnnnnnnnnnnnnnnnnnnnnnnnnnnnnnnnnnnnnnnnnnnnnnnnnnnnnnnnnnnnnnnnnnnnnnnnnnnnnnnnnnnnnnnnnnnnnnnnnnnnnnnnnnnnnnnnnnnnnnnnnnnnnnnnnnnnnnnnnnnnnnnntcatgctgttttggagttattactgtgcattttaaaaatcattctttacagttttgcattgctgagnnnnnnnnnnnnnnnnnnnnnnngcaagagatgttcatgtaatttatttttgaaagctttgttgaataagatttcctgccactttttgacaatcttgtgtatttagaaaaatgcattacttgaaaacatgacatagaacgttgagttagcaatttacatgtgctgtatgttatataagagaatgacatactgtggctaattcaacagtagatttattctctttgtcggcacaaccagttgatcttttggctataacaatt

SEQ ID NO: 32568 - DNA, 417 bp, Macaca Mulatta
aggggccggcccagatccccagatgctctcggaagaggtgcgccagcgactccaggctttccgccaggacacgtacctgcagatcgctgccttcactcaggccatcgaccaggagactgaggaagtccagcagcagctggcgccacctccaccaggccacagcgccttcaccccagagtttcaacaaacggacagtgtctaggttctgagcaagctgcaggcccgtctggatgacctgtgggaagacatcactcacagccttcatgaccaaggccacagccacctgggggagccctgagggtctacctgcccagggccattcccagctccttgtctggggagccctggctctgagcctctagcatggttcagtccttgaaagcggcctgttgggtggagggcggaaggtcctgtgca

SEQ ID NO: 32569 - DNA, 546 bp, Macaca Mulatta
cttaaggatgttttctatagggcctttagaatttctaaacagcgattgggaaaacatatattgaatgtctgtaatttaataatttacatgaaattgattactcctgatgtgcccaggggaatttttcatgtcgtattaagggtttaatgttagaaatctgaagctgggcactagtttgaggccctggaacacttggaaccaagtttaatgtaaaagaggtgctgaatttgctgatttgtaatacaaaatactggagcagcttagggaaccttttatcaaactggtaattttaggcaataccttttattttgtttaatatagcagcttttcatcatgatgggatgctgatgccaactttatcaattgattttatgagtttaggttttctctttttaatatagtgggggtttttttcccttcacaaacaaagagaagtccatgtgaccgatatgcttatatgcagttttgcactcaagttccttgaaattttcccacaagcttatattcacagagtttgatagatggaggttgtcaaatcttactgca

SEQ ID NO: 32570 - DNA, 604 bp, Macaca Mulatta
  misc_feature (1)...(604): n = A,T,C or G
tgaatggagatgacgcctttgcaaggagacccagggttgcttctaaaatgccagaaaagatnnnnnggccttcgatgatattgccaagtacttctctaagaaagagtgggaaaagatgaaatactcggagaaaatcagctatgtgtacatgaagagaaactatgaggccatgactaaactaggtnnnnnnnnnnnnnnnnnnnnnnnnnnnnnnnnnnnnnnnnnnnnnnnnnnnnnnnnnnnnnnnnnnnnnnnnnnnnnnnnnnnnnnnnnnnnngttgaacgtcctcagatgactttcggcaggctccagggaatcnnnnnnnnnnnnnnnnnnnnnnnnnnnnnnnnnnnnnnnnnnnnnnnnnnnnnnnnnnnnnnnnnnnnnnnnnnnnnnnnnnnnnnnnnnnnnnnnnnnnnnnnnnnnnnnnnnnnnnnnnnnnnnnnnnnnnnnnnnnnnnnnnnnnnnnnnnnnnnnnnnnnnnnnnngagagacagggaacagctcattggtggagcagtcagaacacacacaacattggtcgattaagtttgtcatcgtctatgggtgcagttcctggtacccccaaaataattactcaca

SEQ ID NO: 32571 - DNA, 399 bp, Macaca Mulatta
cctacaaatttcctcggcttagcacaccctgtggccgtcgtccccatcgtccgtggcttcatccctcatttgatgctttcctatgtggacttcctggccagtgctgtgggacctcccccgtagagctggccagcctcatgggctgggctacccgtcccactcagcagtggctgcctggcctcccctctgactctcttgcccagctcctaatgggcctcccgtaaaagctgatgcgtgggggccaagccacacctcgctgacctggggaagctgacagagtgacagggggtctcagggaccctccacccacaaggtgggaagggggattgctggcaaatctggcataaaggttgagaccccgaggagaggcaggcctgggggatcttgcagcagctgtgt

SEQ ID NO: 32572 - DNA, 3137 bp, Macaca Mulatta
  misc_feature (1)...(3137): n = A,T,C or G
aggtttcctttggatcctaaaagaagaaaagaatgggttcgcctggttaggcgcaaaaattttgtgccaggaaaacatacatttctttgttcaaagcactttgaagcctcctgttttgacctaacaggacaaactcgaagacttaaaatggatgctgttccaaccatttttgatttttgtacccatataaagtctatgngaaactcaagtcaaggaatcttctgaagaaaaacaacagttgttccccagctggaccatctaatttaaaatcaaacatgagtagtcagcaagtactacttgaacacagctatgcctttaggattctatggaggcaaaannnnnnnnnnnnnnnnnnnnnnnnnnnnnnnnnnnnnnnnnnnnnnnnnnnnnnnnnnnnnnnnnnnnnnnnnnnnnnnnnnnnnnnnnnnnnnnnnnnnnnnnnnnnnnnnnnnnnnnnnnnnnnnnnnnnnnnnnnnnnnnnnnnnnnnnnnnnnnnnnnnnnnnnnnnnnnnnnnnnnnnnnnnnnnnnnnnnnnnnnnnnnnnnnnnnnnnnnnnnnnnnnnnnnnnnnnnnnnnnnnnnnnnnnnnnnnnnnnnnnnnnnnnnnnnnnnnnnnnnnnnnnnnnnnnnnnnnnnnnnnnnnnnnnnnnnnnnnnnnnnnnnnnnnnnnnnnnnnnnnnnnnnnnnnnnnnnnnnnnnnnnnnnnnnnnnnnnnnnnnnnnnnnnnnnnnnnnnnnnnnnnnnnnnnnnnnnnnnnnnnnnnnnnnnnnnnnnnnnnnnnnnnnnnnnnnnnnnnnnnnnnnnnnnnnnnnnnnnnnnnnnnnnnnnnnnnnnnnnnnnnnnnnnnnnnnnnnnnnnnnnnnnnnnnnnnnnnnnnnnnnnnnnnnnnnnnnnnnnnnnnnnnnnnnnnnnnnnnnnnnnnnnnnnnnnnnnnnnnnnnnnnnnnnnnnnnnnnnnnnnnnnnnnnnnnnnnnnnnnnnnnnnnnnnnnnnnnnnnnnnnnnnnnnnnnnnnnnnnnnnnnnnnnnnnnnnnnnnnnnnnnnnnnnnnnnnnnnnnnnnnnnnnnnnnnnnnnnnnnnnnnnnnnnnnnnnnnnnnnnnnnnnnnnnnnnnnnnnnnnnnnnnnnnnnnnnnnnnnnnnnnnnnnnnnnnnnnnnnnnnnnnnnnnnnnnnnnnnnnnnnnnnnnnnnnnnnnnnnnnnnnnnnnnnnnnnnnnnnnnnnnnnnnnnnnnnnnnnnnnnnnnnnnnnnnnnnnnnnnnnnnnnnnnnnnnnnnnnnnnnnnnnnnnnnnnnnnnnnnnnnnnnnnnnnnnnnnnnnnnnnnnnnnnnnnnnnnnnnnnnnnnnnnnnnnnnnnnnnnnnnnnnnnnnnnnnnnnnnnnnnnnnnnnnnnnnnnnnnnnnnnnnnnnnnnnnnnnnnnnnnnnnnnnnnnnnnnnnnnnnnnnnnnnnnnnnnnnnnnnnnnnnnnnnnnnnnnnnnnnnnnnnnnnnnnnnnnnnnnnnnnnnnnnnnnnnnnnnnnnnnnnnnnnnnnnnnnnnnnnnnnnnnnnnnnnnnnnnnnnnnnnnnnnnnnnnnnnnnnnnnnnnnnnnnnnnnnnnnnnnnnnnnnnnnnnnnnnnnnnnnnnnnnnnnnnnnnnnnnnnnnnnnnnnnnnnnnnnnnnnnnnnnnnnnnnnnnnnnnnnnnnnnnnnnnnnnnnnnnnnnnnnnnnnnnnnnnnnnnnnnnnnnnnnnnnnnnnnnnnnnnnnnnnnnnnnnnnnnnnnnnnnnnnnnnnnnnnnnnnnnnnnnnnnnnnnnnnnnnnnnnnnnnnnnnnnnnnnnnnnnnnnnnnnnnnnnnnnnnnnnnnnnnnnnnnnnnnnnnnnnnnnnnnnnnnnnnnnnnnnnnnnnnnnnnnnnnnnnnnnnnnnnnnnnnnnnnnnnnnnnnnnnnnnnnnnnnnnnnnnnnnnnnnnnnnnnnnnnnnnnnnnnnnnnnnnnnnnnnnnnnnnnnnnnnnnnnnnnnnnnnnnnnnnnnnnnnnnnnnnnnnnnnnnnnnnnnnnnnnnnnnnnnnnnnnnnnnnnnnnnnnnnnnnnnnnnnnnnnnnnnnnnnnnnnnnnnnnnnnnnnnnnnnnnnnnnnnnnnnnnnnnnnnnnnnnnnnnnnnnnnnnnnnnnnnnnnnnnnnnnnnnnnnnnnnnnnnnnnnnnnnnnnnnnnnnnnnnnnnnnntttaggattgcatttgcttggatcctagtaagaattcttttacagttttagcactctctttactaaggaatgcctcccaaggaaatgcaaaggtaggaaaagtctcttagaatgcccatgaggtatttaaaacagatatttatgaaaatctttttgtggatgttataaatcttgctagttattttatctttatcttaagtattagatgtagttccttggaattgtcattacatatttatttttttctagtatggtttcaaataacttttcaccagcatataatcatcatcaaacatttactgaccacatctaccttataactcaaaataagttggacaaataatcatttgaataaaagctattttttccaagtataaccactctcatgtagttcacccttcaccccagatacaaaacactacgtagcccagttcccatctacaataataccttgaaannnnnnnnnnnnnnnnnnnnnnnnnnnnnnnnnnnnnnnnnnnnncaacaactttttgacaaggttacttcatcttcattcattgttacttgacagtattaaataaactactactcaataattttagagtaaacttttctgtgttttctctatcattttcgttttactgtcctgacaacatgctccaaactgtttgcatcaaattgttttattagtatacatttgtctacctttgaactagctttattcacagagaaaaacctaaaaggagtctattaaaatcctgctttcagttcaataggtttttttttaatcaccctgaccataaaactaactgaaattataatagctttttttcctctgctggtcacaacacagatcttctgtttatttgtcctctgtctattgggtaccacctctacaagaaccagccaaggctaggtacttgatatacaaaggatatgacatattttctgccc

SEQ ID NO: 32573 - DNA, 772 bp, Macaca Mulatta
  misc_feature (1)...(772): n = A,T,C or G
ggggcccccgcgcctgccagcccgccctgcggtccggtcccggcgcccgcgcagaaccagctgtctgagctgtccgggcggcgggggagcagcgagcgggcttctgcgaaccggaggaggcacaggcctgtcccggtcccggcaggtctgcgcgtctgttcccaggactctgcgaggcccgaaaaggagcagcaacctgtccagaatccccgcaggacaggaagaggaggggaaatctcgacgtggaaaaaccctacaataaaaatgaaggaaacctggaaaacgagggaaagccagaagatgaagtagagccggatgatgaaggaaagtcagacgaggaagaaaagccagacgtggaggggaagacagaatgcgagggaaagagagaggatgagggagagccaggtgatgagggacaactggaagatgaggggagccaggaaaagcagggcaagtccggaagtgagggcaagccacaaggcgagggcaggccagcctcgcaagcaaagccagaaaaccagctgcgggccgcccaaaagcgcccggctgaaaattatgtgcccccggnnnnnnnnnnnnnnnnnngacaggggggaaagacgaatccccccaaggaactctcaggaaggactttacaaggaaaaggccttcctaaaccccgtggagggaagaataggatgaaaaaaaaggtgggaaaaaatgtggtttaaaaggggcctctcagnggagaggaagcctcatnnnnnnnnnnnnnnnnnnnggaaaaaaagtt

SEQ ID NO: 32574 - DNA, 1690 bp, Macaca Mulatta
  misc_feature (1)...(1690): n = A,T,C or G
agattctcgagtcagagggtggttcatattggactcttaccttcctaccttttttcttactgtcatatatctgctctcaatatggctgggtaacaagtatatgaagaacagacctgctctttctctcaggggtatcctcaccttgtataaactcggaatctcacttctctccgcatacatgctggcanagctcattctctccacttgggaaggaggctacaacttacagtgtcaagatcttaccagcgcaggggaagctgacatccgggnnnnnnnnnnnnnnnnnnnnnnnnnnnnnnnnnnnnnnnnnnnnnnnnnnnnnnnnnnnnnnnnnnnnnnnnnnnnnnnnnnnnnnnnnnnnnnnnnnnnnnnnnnnnnnnnnnnnnnnnnnnnnnnnnnnnnnnnnnnnnnnnnnnnnnnnnnnnnnnnnnnnnnnnnnnntcttcggaccaacactgaacagttttatccacattcttatgtactcctactatggactttctgtgttcccatctatgcacaagtatctttggtggaagaaatatctcacacaggcccagctggtnnnnnnnnnnnnnnnnnnnnnnnnnnnnnnnnnnnnnnnnnnnnnnnnnnnnnnnnnnnnnnnnnnnnnnnnnnnnnnnnnnnnnnnnnnnnnnnnnnnnnnnnnnnnnnnnnnnnnnnnnnnnnnnnnnnnnnnnnnnnnnnnnnnnnnnnnnnnnnnnnnnnnnnnnnnnnnnnnnnnnnnnnnnnnnnnnnnnnnnnnnnnnnnnnnnnnnnnnnnnnnnnnnnnnnnnnnnnnnnnnnnnnnnnnnnnnnnnnnnnnnnnnnnnnnnnnnnnnnnnnnnnnnnnnnnnnnnnnnnnnnnnnnnnnnnnnnnnnnnnnnnnnnnnnnnnnnnnnnnnnnnnnnnnnnnnnnnnnnnnnnnnnnnnnnnnnnnnnnnnnnnnnnnnnnnnnnnnnnnnnnnnnnnnnnnnnnnnnnnnnnnnnactgaatgctttgatcagcattgaggtgatgctgacctctgaggacctcagaactggtgcagcttctcccgccctccctcccaccaggctgaaaaccttcgccggaagccgtccttacaacgccttatacgcatacacagccaggaaacgtggagcatggtttctcacagaaagtctccaaagaaaaagagttttgttcagattaaaatgtttacaacaaaatgttaattatattctaaatacagggtatgttctaatctatattaagcaataattgccagtgcataatcattccatttgttctttagcaatcaaccccggaaaatattaaaatgggatcatacacagaagacagaaaaatccagcaaaacttctctaagccagagtcttgtctatcaaattcccacaaccactcctgattctaaatttagtgatatggtaatgaaattggtatttcttttattttaaatattagttattttaaggagaaaaaaatgcttctgcaagattttcataattcaggggctttggataggattgttcatctgtttccctcatcattcatctgttcacgtctccctcctgtaccagtcagcctcggttactaggttactaaagatgccatgctccacatcacgagcagtgtacaaatctggctgcccatttccattctgagcaaggactggagtccactccgacc

SEQ ID NO: 32575 - DNA, 520 bp, Macaca Mulatta
  misc_feature (1)...(520): n = A,T,C or G
agatccaacctcatggggaccaagtttaccgtttacgaccgtggtatctgccccatcaagggccggggtctggtaggagcggcccacgcccggcaggagctggccgccatctcctatnnnnnnnnnnnnnnnnnnnnnnnnnnnnnnnnnnnnnnnnnnnnnnnnnnnnnnnnnnnnnnnnnnnnnnnnnnnnnnnnnnnnnnnnnnnnnnnnnnnnnnnnnnnnnnnnnnnnnnnnnnnnnnnnnnnnnnnnnnnnnnnnnnnnnnnnnnnnnnnnnnnnnnnnnnnnnnnnnnnnnnnnnnnnnnnnnnnnnnnnnnnnnnnnnnnnnnnnnnnnnnnnnnnnnnnnnnnnnnnnnnnnnnnnnnnnnnnnnnnnnnnnnnnnnnctgactatatagtcatgcagtttggacgtgtagcagatgacgtgttcacactggactacaactacccactttgcgcagttcaggcctttggcatcggtctttctagctttgacagtaagctggcatgtgaatg

SEQ ID NO: 32576 - DNA, 987 bp, Macaca Mulatta
  misc_feature (1)...(987): n = A,T,C or G
ggactaccgtgacccgactcattcactggtgccctattcgctacacacatgcatgtttaaggcatagtccctacgctgcctcgaattacgcttttatcacttgctctttgagacaccatcgatggttttgtataaagcacctcatttcatatctgatcccagacctcccaaaagacctaagggatcgaatgagaagagagaagtacttgattcaggagatgatgtatgaagcagaactggaacgtctccagaaggaacgaaaggagaggaagaagaatggaaaagcacaccacaacgagtggccgtgaccataaaatagtccctttccaggccaaggacctgaattctgtttacttctcctggctgtgcaaaagcacactcaagtgaatgactgaaaatgcaaccgcagtgcatgttacagatatcggcggccgcaggagggtcagcatccagtagaggactggcgttggagtcacactgctgtgaaatcacgttgcagtccagcacacaactgctatctatccatagaccattcttgaccaagcaagcatgcacatgtgggcagttacattctcaagtttttaaaatcaaggggaacttgtatactgggcctgtttttcagcctgtttgctaccttttttgcattctatcctatgtgaattttacagacacagctaanaagggtatttagacacatggacacacattcctagaatgtcatcatatggtcctaattccatgtcaccaacaacacagacnagaccctgtttacnannnnnnnnnnnnnnnnnnnnnnnnnnnngacctttctgagaagttattctatatgacatatctatagctatgtgtatgggcataaatgtaattccgtgtgtacataggaatagtcatgtattccctgccttttgtcccttccaaattcggagatttttttaaggttccttggaaaacctcctttacttggtaaataggccaaaaaagtacctg

SEQ ID NO: 32577 - DNA, 2507 bp, Macaca Mulatta
  misc_feature (1)...(2507): n = A,T,C or G
tgcagaggtgacggacccgtctcatgcccccgccgtcctgcgccagctcaatgaacagcggctccgtggcctcttctgtgacgtcaccctcatagccggagacaccaagttccctgctcaccgcagcgtcctggctgcttcgagtcccttcttcagagaggccctgctcacttcagctccactgcccctcccaccagctacagggggctccgcacccaaccctgccaccaccacagctgnnnnnnnnnnnnnnnnnnnnnnnnnnnnnnnnnnnnnnnnnnnnnnnnnnnnnnnnnnnnnnnnnnnnnnnnnnnnnnnnnnnnnnnnnnnnnnnnnnnnnnnncttcttccccgccccgggtcctggagttgccaggggtcccagcagctgcgttttctgatgtcctcaacttcatctatagcgcccggctcgcactgcctggtggtggaggggacagtgcagctgtagcagannnnnnnnnnnnnnnnnnnnnnnnnnnnnnnnnnnnnnnnnnnnnnnnnnnnnnnnnnnnnnnnnnnnnnnnnnnnnnnnnnnnnnnnnnnnnnnnnnnnnnnnnnnnnnnnnnnnnnnnnnnnnnnnnnnnnnnnnnnnnnnnnnnnnnnnnnnnnnnnnnnnnnnnnnnnnnnnnnnnnnnnnnnnnnnnnnnnnnnnnnnnnnnnnnnnnnnnnnnnnnnnnnnnnnnnnnnnnnnnnnnnnnnnnnnnnnnnnnnnnnnnnnnnnnnnnnnnnnnnnnnnnnnnnnnnnnnnnnnnnnnnnnnnnnnnnnnnnnnnnnnnnnnnnnnnnnnnnnnnnnnnnnnnnnnnnnnnnnnnnnnnnnnnnnnnnnnnnnnnnnnnnnnnnnnnnnnnnnnnnnnnnnnnnnnnnnnnnnnnnnnnnnnnnnnnnnnnnnnnnnnnnnnnnnnnnnnnnnnnnnnnnnnnnnnnnnnnnnnnnnnnnnnnnnnnnnnnnnnnnnnnnnnnnnnnnnnnnnnnnnnnnnnnnnnnnnnnnnnnnnnnnnnnnnnnnnnnnnnnnnnnnnnnnnnnnnnnnnnnnnnnnnnnnnnnnnnnnnnnnnnnnnnnnnnnnnnnnnnnnnnnnnnnnnnnnnnnnnnnnnnnnnnnnnnnnnnnnnnnnnnnnnnnnnnnnnnnnnnnnnnnnnnnnnnnnnnnnnnnnnnnnnnnnnnnnnnnnnnnnnnnnnnnnnnnnnnnnnnnnnnnnnnnnnnnnnnnnnnnnnnnnnnnnnnnnnnnnnnnnnnnnnnnnnnnnnnnnnnnnnnnnnnnnnnnnnnnnnnnnnnnnnnnnnnnnnnnnnnnnnnnnnnnnnnnnnnnnnnnnnnnnnnnnnnnnnnnnnnnnnnnnnnnnnnnnnnnnnnnnnnnnnnnnnnnnnnnnnnnnnnnnnnnnnnnnnnnnnnnnnnnnnnnnnnnnnnnnnnnnnnnnnnnnnnnnnnnnnnnnnnnnnnnnnnnnnnnnnnnnnnnnnnnnnnnnnnnnnnnnnnnnnnnnnnnnnnnnnnnnnnnnnnnnnnnnnnnnnnnnnnnnnnnnnnnnnnnnnnnnnnnnnnnnnnnnnnnnnnnnnnnnnnnnnnnnnnnnnnnnnnnnnnnnnnnnnnnnnnnnnnnnnnnnnnnnnnnnnnnnnnnnnnnnnnnnnnnnnnnnnnnnnnnnnnnnnnnnnnnnnnnnnnnnnnnnnnnnnnnnnnnnnnnnnnnnnnnnnnnnnnnnnnnnnnnnnnnnnnnnnnnnnnnnnnnnnnnnnnnnnnnnnnnnnnnnnnnnnnnnnnnnnnnnnnnnnnnnnnnnnnnnnnnnnnnnnnnnnnnnnnnnnnnnnnnnnnnnnnnnnnnnnnnnnnnnnnnnnnnnnnnnnnnnnnnnnnnnnnnnnnnnnnnnnnnnnnnnnnnnnnnnnnnnnnnnnnnnnnnnnnnnnnnnnnnnnnnnnnnnnnnnnnnnnnnnnnnnnnnnnnnnnnnnnnnnnnnnnnnnnnnnnnnnnnnnnnnnnnnnnnnnnnnnnnngcgcaaggctggagctgttggaggtgccagtgtggggggtagtgggccgccccgaggccgccggccaccacgctggaggcagaagctagaacggaggagctgggaggaaaccccagcagccgagagcccagcgggacgtgcccgcacagagcggaggcaccgctgtggggactgtgcccagacctttgccaccctgagaaagctgcgaaagcaccaagaggcccacggtgggggctcccacagctcccgggccggacggaggccctccacccgctttacctgcccccactgcgccaaggtgtgcaagaccgcagctgccctgagccgccacgggcagaggcatgctgctgagcggcccgggggcaccccaacacctgtcattgcctattccaagggcagcgctggcacccggcccggggatgtcaaggaggaagccccccaagagatgcaagtctcctcatccagcggtgaggcaggtggcgggagcactgctgctgaggaa

SEQ ID NO: 32578 - DNA, 206 bp, Macaca Mulatta
aagatctctccgcaagagtagatgcagttaaggaagaaaatctgaagctaaaatcagaaaaccaagttcttggacaatatatagaaaacctcatgtcagcttctagtgtttttcaaacaactgacacaaaaagcaaaagaaagtaagggattgacacccttctgttttatggaattgctgctgatcattttttctttaaaacttgg

SEQ ID NO: 32579 - DNA, 160 bp, Macaca Mulatta
tcaaggtcttcaatgtgggcacatgctacgtggtaaccaagggcaggatcacatcccgagccacatagtctactacctcatgaacatcccatcacgccccactccatctacctataccagcatggtgagagcaaactcaacctcagaggctgcattggag

SEQ ID NO: 32580 - DNA, 139 bp, Macaca Mulatta
ggcctgtgatacctgggctgtgatcctctagagccagcgtggactcacatcattctacgggttgaagaccactcactccctgaggagccttgtacatacaagccttttatttataacatattttgtatcgaaactttta

SEQ ID NO: 32581 - DNA, 3655 bp, Macaca Mulatta
  misc_feature (1)...(3655): n = A,T,C or G
cccatggccgggtctcccagccgcgccgcgggccggcgactgcagcttcccctgctctgcctcttcctccagggcgccactgccgttctctttgctgtctttgtccgctacaaccacaaaaccgacgctgccctctggcaccggggcaaccacagtaacgcggacaatgaattttactttcgctacccaagtgagtgtggggtgagggcgcgcgggaagcaaagaacccaagctttgcaaagatcctccggcgttttgggagggagcatttgggtgcccccatgtagctgggcagccatctcgctctgaggtggagaggctctgggtttaaaatctcaggtggggccactggcagggtagctgactgaattatgggctacggctagagcagcccccaagtgccccacctgtccctgtccactgcaggcttccaggatgtgcatgccatggtcttcgtgggctttggcttcctcatggtcttcctgcagcgttacggcttcagcagcgtgggcttcaccttcctcctggctgcctttgccctgcagtggtccacactggtccagggttttctccactccttccacagtggacacatccatgttggcgtggagaggtgggcagccaccgcctacccagctcccccaggttcactcggggggcccctgcccatgggccccagatctagccctgcccttcaagtctgcttcctgactcatgattctgggtgtcacttggtttctctaggtgtcctgcctgtccttattgcctgatttcctctcccatccttgaccctcacactcagccccacctcctcattctttagggcccttgttccccaagagctgtgagaagggtagacagctctggttcctccacctagtgtggcttttgtcagccgagtcacagaacctccttgagactcgatttcctcatctacaaacagggccaggtgatcccttccaactccagggaggagcttgacctccttgtcttttctccagaactcccaaaccccacccacccaccaagtcatgctgccctggcttcatgccaggcaggagcccagaggccagtctccctcacccctcttgtgctccctcttctgccccatccccagcatgatcaacgctgacttttgtgcgggggccgtgctcatctcctttggtgccgtcctgggcaagactgggcctgcacagctgctgctcatggccctgctggaagtggtgctgtttggcatcaatgagtttgtgctccttcatctcctgggggtgagagtcggggggagggatggagtgggggttgggaggtggtcaaggtcagcctctgagccaggagcgtgggggcgggggcagggtgctgcctctccacctcaccacacctccccaggtgagagatgccggaggctccatgactatccacaccttcggtgcctactttgggctggtcctttcgcgggttctgtacaggccccagctggagaagagcaagcaccgccagggctccgtctaccattcagacctcttcgccatgattggtgaggcctttatacaacttgtaccttgcgtgggagccacttccttcttctcactgcctgtccaccatctagggaccatcttcctgtggatcttctggcctagcttcaactctgcactcacagcgctgggggctgggcagcatcggacggccctcaacacatactactccctggctgccagcaccctcggcacctttgccttgtcagcccttgtgggggaagacgggaggcttgacatggtatggggaagaggacttcagagaggcagagggggtggcctgggtgggggaggagaggtctgagaccctcaggaaagattctcccggggaacagataagggcacaggcataggggctccatctgtgctggtggctgtggggtcagaatgggaggagatatgatagcaggagactgagaggctagatggcagagggacttccagaagcagtaggtgtcactgtagtgggtagggttgggttgctgtgggtgtggtnatctgaaagggcgtccgacaccttgcccttcccttaggttcacatccaaaatgcagcgctggccggaggggttgtggtggggacctcgagtgagatgatgctgacnccctttggggctctggcagctggcttcttggctgggactgtctccacgctggggtacaagttctttacggtacagatgcctcttggggcctgggcagaacatggagtctttggtgcctttcctcccncctctccaacaggatgaggtggtggggagtgggcacaggagactcatgatctgtcctgccctccagcccatccttgaatcaaaattcaaagtccaagacacatgtggagtccacaacctccatgggatgccgggggtcctgggggccctcctgggggtccttgtggctgggcttgctacccatgaagcttatggagatgggtgagtttcctcccagcccncactgcagtcaccatccctctggaacgacgtctgccattctctttctttgtgtgtgaccaagaaaaaaattaattcattcattcctccatattctgggagcaaacgaaattggagttaacaaaaccaatctagaaactgcccttctggtcctcaatcaagtgcagcagaaggtcatggacaaatgacttcaagagtgttacttgttactgaagggtcaataagagttaataactcttaggatctatttttgcacatcaagggtgggcaagagcaatccacaaatggagtcttgaaaggtgcctaagtgtctgctggcttacgagggtgggaaagtgttccaggctgtgggcctggcttaatcagtggcctggaggtgagactcagcctggcatgcaccctcgagaccctcttggccacttcgcatcctccagtgcgagtttcagtgccatgagtagccctggctccgtgctgcatccctctctccccctaccactgcctttccaccgtctggtctccctgcagcctggagagtgtgtttccactcatagctgagggccagcgcagtgccacgtcacaggccatgctccagctcttcgggctgtttgtcacactgatgtttgcctctgtgggtgggggcctcggaggtgagtaaccttggattttccagaggaaggggcatgggatcctaacacctgacatgaattcattcaatcatagatattttctatgcctcctagacccctgtgccctatggcactgggtggcaccctcctccatggtgggggcagagaagcctcacagatccttccctaccaccaccagggctcctgctgaagctaccctttctggactcccccccagactcccagtgctacgaggaccaagttcactggcaggtgagacatcactgggcncttacaccctctgagtctcccttccctgccttgtctcccatggcccaagctgccttcttccttccttgccgctgcttctctctggggtacactcctgagctgtggctcccaggctcctggagctaccctttcacctctacccactcctgccttccaggtgcctggcgagcatgaagatgaagcccagagacctctgagggtggaggaggcagatactcaggcctaacccactgctggcccctgagaggacacgctcctt

SEQ ID NO: 32582 - DNA, 797 bp, Macaca Mulatta
  misc_feature (1)...(797): n = A,T,C or G
agggcaccaaagcccagttcagctgcttcaaccccaagtgcctcctgcctgccagccggcactactggacctacccgggctctctgacgactcccccactcagcgagagtgtcacctggattgtgctccgggagcccatctgcatctctgaaaggcannnnnnnnnnnnnnnnnnnnnnnnnnnnnnnnnnnnnnnnnnnnnnnnnnnnnnnnnnnnnnnnnnnnnnnnnnnnnnnnnnnnnnnnnnnnnnnnnnnnnnnnnnnnnnnnnnnnnnnnnnnnnnnnnnnnnnnnnnnnnnnnnnnnnnnnnnnnnnnnnnnnnnnnnnnnnnnnnnnnnnnnnnnnnnnnnnnnnnnnnnnnnnnnnnnnnnnnnnnnnnnnnnnnnnnnnnnnnnnnnnnnnnnnnnnnnnnnnnnnnnnnnnnnnnnnnnnnnnnnnnnnnnnnnnnnnnnnnnnnnnnnnnnnnnnnnnnnnnnnnnnnnnnnnnnnnnnnnnnnnnnnnnnnnnnnnnnnnnnnnnnnnnnnnnnnnnnnnnnnnnnnnnnnnnnnnnnnnnnnnnnnnnnncactggcagtggcggcagccccacgtggagcgcacactgtgatggaggagactgagctccctggggcaggtagctgacactaccagagagactcaagcaataattagaggtgggcagagctgccctctcggcattacctcttctgcaggctctgccatgcacgcacctcactgccaggccattaaaatcagcacccagcatgctggaggtgatgtggccttctccctccagc

SEQ ID NO: 32583 - DNA, 714 bp, Macaca Mulatta
  misc_feature (1)...(714): n = A,T,C or G
gtccgcgcaccaggaagctgaagaagaagaagaacgagaaggaggacaagcggccgcggacggcgttcaccgccgagcagctgcagagactcaaggcggagttccaggcaaaccgctacatcacggagcagcggcggcagaccctggcccaggagctcagcctcaacgagtcccagatcaagatctggttccagaacaagcgcgccaagatcaagaaagccacaggcattaagaacggcttggcgctgcacctcatggcccagggactgtacaaccactccaccaccacggtccaggacaaagacgagagcgagtagacgccaccggccggggccgnnnnnnnnnnnnnnnnnnnnnnnnnnnnnnnnnnctcccggcccctcgctgggggagaaagcatctgctcaaaggagggagggagcgaagggaaaagagcgagcgagacagaaagagagcctcagaatggacaatgacgttgaaacgcagcatttttgaaaagggagaaagactcggacaaaaaaatcgaaaaataaggtctgttctctattcacagtataagggacgaaactgcgaactccttaaagctctatctagccaaaccgcttacgaccttgtatatatttaatttcaggtaaggaaaacacatacgtgtagcgatctctatttgctggacatttttattaatctcctttattattattgttataattatta

SEQ ID NO: 32584 - DNA, 2545 bp, Macaca Mulatta
  misc_feature (1)...(2545): n = A,T,C or G
agtatatccggaactgtgtaatgaacaggaccctgccccattttatacttgtggaatgctgcaagatcaagaaaatgtatgaacaggaaatgattgccatagaggctgccataaatcggaattcatctaaccttcctcttccattaccaccaaagaaaacgcgaattatttcnnnnnnnnnnnnnnnnnnnnnnnnnnnnnnnnnnnnnnnnnnnnnnnnnnnnnnnnnnnnnnnnnnnnnnnnnnnnnnnnnnnnnnnnnnnnnnnnnnnnnnnnnnnnnnnnnnnnnnnnnnnnnnnnnnnnnnnnnnnnnnnnnnnnnnnnnnnnnnnnnnnnnnnnnnnnnnnnnnnnnnnnnnnnnnnnnnnnnnnnnnnnnnnnnnnnnnnnnnnnnnnnnnnnnnnnnnnnnnnnnnnnnnnnnnnnnnnnnnnnnnnnnnnnnnnnnnnnnnnnnnnnnnnnnnnnnnnnnnnnnnnnnnnnnnnnnnnnnnnnnnnnnnnnnnnnnnnnnnnnnnnnnnnnnnnnnnnnnnnnnnnnnnnnnnnnnnnnnnnnnnnnnnnnnnnnnnnnnnnnnnnnnnnnnnnnnnnnnnnnnnnnnnnnnnnnnnnnnnnnnnnnnnnnnnnnnnnnnnnnnnnnnnnnnnnnnnnnnnnnnnnnnnnnnnnnnnnnnnnnnnnnnnnnnnnnnnnnnnnnnnnnnnnnnnnnnnnnnnnnnnnnnnnnnnnnnnnnnnnnnnnnnnnnnnnnnnnnnnnnnnnnnnnnnnnnnnnnnnnnnnnnnnnnnnnnnnnnnnnnnnnnnnnnnnnnnnnnnnnnnnnnnnnnnnnnnnnnnnnnnnnnnnnnnnnnnnnnnnnnnnnnnnnnnnnnnnnnnnnnnnnnnnnnnnnnnnnnnnnnnnnnnnnnnnnnnnnnnnnnnnnnnnnnnnnnnnnnnnnnnnnnnnnnnnnnnnnnnnnnnnnnnnnnnnnnnnnnnnnnnnnnnnnnnnnnnnnnnnnnnnnnnnnnnnnnnnnnnnnnnnnnnnnnnnnnnnnnnnnnnnnnnnnnnnnnnnnnnnnnnnnnnnnnnnnnnnnnnnnnnnnnnnnnnnnnnnnnnnnnnnnnnnnnnnnnnnnnnnnnnnnnnnnnnnnnnnnnnnnnnnnnnnnnnnnnnnnnnnnnnnnnnnnnnnnnnnnnnnnnnnnnnnnnnnnnnnnnnnnnnnnnnnnnnnnnnnnnnnnnnnnnnnnnnnnnnnnnnnnnnnnnnnnnnnnnnnnnnnnnnnnnnnnnnnnnnnnnnnnnnnnnnnnnnnnnnnnnnnnnnnnnnnnnnnnnnnnnnnnnnnnnnnnnnnnnnnnnnnnnnnnnnnnnnnnnnnnnnnnnnnnnnnnnnnnnnnnnnnnnnnnnnnnnnnnnnnnnnnnnnnnnnnnnnnnnnnnnnnnnnnnnnnnnnnnnnnnnnnnnnnnnnnnnnnnnnnnnnnnnnnnnnnnnnnnnnnnnnnnnnnnnnnnnnnnnnnnnnnnnnnnnnnnnnnnnnnnnnnnnnnnnnnnnnnnnnnnnnnnnnnnnnnnnnnnnnnnnnnnnnnnnnnnnnnnnnnnnnnnnnnnnnnnnnnnnnnnnnnnnnnnnnnnnnnnnnnnnnnnnnnnnnnnnnnnnnnnnnnnnnnnnnnnnnnnnnnnnnnnnnnnnnnnnnnnnnnnnnnnnnnnnnnnnnnnnnnnnnnnnnnnnnnnnnnnggatgttgccttatggctgtttagcaacaggagatcgctctggcctcataggagttgtgagcacctctgaaacaattgctgacattcagatggacagtagcaatgtggctnnnnnnnnnnnnnnnnnnnnnnnnnnnnnnnnnnnnnnnnnnnnnnnnnnnnnnnnnnnnnnnnnnnnnnnnnnnnnnnnnnnnnnnnnnnnnnnnnnnnnnnnnnnnnnnnnnnnnnnnnnnnnnnnnnnnnnnnnnnnnnnnnnnnnnnnnnnnnnnnnnnnnnnnnnnnnnnnnnnnnnnnnnnnnnnnnnnnnnnnnnnnnnnnnnnnnnnnnnnnnnnnnnnnnnnnnnnnnnnnnnnnnnnnnnnnnnnnnnnnnnnnnnnnnnnnnnnnnnnnnnnnnnnnnnnnnnnnnnnnnnnnnnnnnnnnnnnnnnnnnnnnnnnggttccgccagtgttgtgaggatgcatatctgattttacgacggcatgggaatcttttcatcactctctttgcgctgatgttgactgcagggcttcctgagctcacatcagtcaaggatatacagtatcttaagnnaggactctcttgcattagggaagagtgaagaagaagcactcaaacagtttaagcaaaaattttgatgaggcgctcagggaaagctggactactaaagtgaactggatggcccacacagttcggaaagactacagatcttaacgatcagccttcgctcctaatgtatttgttggtttcatttcgttttcattttgcacttgcactaaattgaacatgaccctgtcagagatgtaataaagggaatgaaatcctgaaagtcagagttaaat

SEQ ID NO: 32585 - DNA, 385 bp, Macaca Mulatta
caaagatacaagagataatcacctttgcatttgaaagtcgaggcccgaggtttactacaaccagcatttttgccaacagttggtgatggatttccatcatcgtgtgtggggtgggaagaagttggctaggaaccaaaaaggctgtgctcatgattaaacacaaacctgaaggtatttcctttatgtccttggaaacaggaaacgagttatggttttcgccagcattcttgtaggagagaattggggaaggcccccaactgcccccgggcagggagagcacctcgggcctgttggtttacagagagacagatgttacatacccagctccattgatgcgtggtcaccagtgactagagaagctactcgatgcaatgcatctgtttca

SEQ ID NO: 32586 - DNA, 442 bp, Macaca Mulatta
tgaaggaggcctcccctgcccccacccgagaaggcagagcagtctctgctgcccggtcctggtgaagcccaaggttgtgggtgaagggggtggcttcctggggccagcacccccacctcctggtcctggcctctccccgacccctcagacggccacgcatgacccgcactcaccacgccctgccctcttcagtgacattcttctacctggtaggagttaggaccctgtagtgcccaacctagccaggccgccgccactgggcccaggtgccgaataaaccctggttgggaagggctgtgtgctctgtgtctgttcctggttgacaacagcaggggcctgggcaccctgcaagtgcccccagcctccgttttctgaaccataaaatggaggtgttcactctatgcggtattttgacacataggctcatgcctattcaggagcc

SEQ ID NO: 32587 - DNA, 725 bp, Macaca Mulatta
  misc_feature (1)...(725): n = A,T,C or G
gggtacaaccaacctgattccaagcgtcgtcagaccaacaaccaacagaactggggttcccaacccatcgctcagcagccgcttcagcaaggtggtgactattctggtaactatggttacaataatgacaaccaggaattttatcaggatacttatgggcaacagtggaagtagacaagtaagggcttgaaaatgatactggcaagatacgattggctctagatctacattcnnnnnnnnnnnnnnnnnncttaactgtttcatctttaagtagcattttgctgccatttgtattgggctgaagaaatcactattgtgtatatactcaagtctttttatttttcctcttttcataaatgctcttggacattattgggcttgcagagttcccttattctggggattacaatgcttttatggtttcaggcttcattttagcttcaaacaagctgggcacactgttaaatcatgattttgcaaaacttttggttttggacagtttcatttttttggatttgggatagattacataggaattatggaatatgcctgtaattaaaaattccaggcaagggcctttgtcctaaaaannnnnnnnnnnnnnnnnnnccaaacaaattttaagtttttcctgggaattggaaaaaaaaccctagggggttggaaaggtttttgcaattccccaaaaaaaaaggtgtaaaccggggggttttttaaaaattggg

SEQ ID NO: 32588 - DNA, 192 bp, Macaca Mulatta
ggtttgcatcgccaccttctatatattacggccttttattttgttggatattatcttgtaaaacgtgaagactacacgtatgctgtgagggaccgtgaaatgtttggatatatgaaattacatccagaggattttcctgaaaaaggtatttcaagttaattttagagaatctgtgtttacggtattattatt

SEQ ID NO: 32589 - DNA, 636 bp, Macaca Mulatta
  misc_feature (1)...(636): n = A,T,C or G
cattacacttgtatagttgagtacttccaccattactgctgtgtaatagaacatgattagtcatcaccgagaagaaagcatatcagccgaggaggtacttacgtggcacgctccggtgattgccacgatgtgatggcaatactcttagaagcatcatattatcccagacatgttctttcaagcccttggagccctcctttctaaattcactgtcataatttagtatctgtttaatttttcagtccaaagagaggaaatcagtcgctgagtattatttgactgcggtctccttggtgcaaaaacaaaatgggaaaaataaataagaataactcagaacttcagaaggaaatcacaaattcagctaacaatagcatttcgaatatatttcgtaaactaagtaaatacacaaaaggctattttttccgaccgtaagagagattttatgtccttttgccgaggtggatgtgttagtctcaggccctcctgggccacattgcccaagtcacacaggcttctgtattatgtatttagataagatgtgtgaaaatatatttgaataaaagaagttcataagtaacacattatcacaacgagnnnnnnnnnnnnnnnnnnnnnnnnnnnnnnttcgcctatagt

SEQ ID NO: 32590 - DNA, 358 bp, Macaca Mulatta
  misc_feature (1)...(358): n = A,T,C or G
gagaagagaacagacagcaatggcagagtatatttcgtcaaccacaacactcgaattacacaatgggaagaccccagaagtcaagnnnnnnnnnnnnnnnnnnnnnnnnnnnnnnnnnnnnnnnnnnnnnnnnnnnnnnnnnnnnnnnnnnnnnnnnnnnnnnnnnnnnnnnnnnnnnnnnnnnnnnnnnnnnnnnnnnnnnnnnnnnnnnnnnnnnnnnnnnnnnnnnnnnnnnnnnnnnnnnnnnnnnnnnnnnnnnnnnnnnnnnnnnnnnnnnnnnnnnnnnnnnctggccatgccacagcacataaagattacagggacgaggaaaacattgtttgaggattcctttcaacag

SEQ ID NO: 32591 - DNA, 1349 bp, Macaca Mulatta
  misc_feature (1)...(1349): n = A,T,C or G
tcagagaggggaatggggctggtcaaaggacccagggatcaccctttcacttttttcccccacccccatgtcaggctcaggtgagaagccgaggccaggctgtccaaagctcttttcatgtgtaacagtcctgagtcccttgacctccccttggcccaactctggccttggttccactaaggcagagtcctcttgtctcttcctaccatcccccactggactgtgtctctcagaaaccccaggcagccttgcctcctgacctaattcctggagatgctggtgttcctgggaggaatttcccctgcatcttacgtgctagaagcccctggggcaagaggtagggggaggaattgagaggaggaaaaacgtgaactggatacctagagaagaaggatgtgacttgtagnnnnnnnnnnnnnnnnnnnnnnnnnnnnnnnnnnnnnnnnnnnnnnnnnnnnnnnnnnnnnnnnnnnnnnnnnnnnnnnnnnnnnnnnnnnnnnnnnnnnnnnnnnnnnnnnnnnnnnnnnnnnnnnnnnnnnnnnnnnnnnnnnnnnnnnnnnnnnnnnnnnnnnnnnnnnnnnnnnnnnnnnnnnnnnnnnnnnnnnnnnnnnnnnnnnnnnnnnnnnnnnnnnnnnnnnnnnnnnnnnnnnnnnnnnnnnnnnnnnnnnnnnnnnnnnnnnnnnnnnnnnnnnnnnnnnntcacacgcctcaccctgaaacctggccctcccgcagccccagcaccatttgtcccatcagtgaccagattcatattctggtgtagcctctgttgccggagccagtgctgaaccagtccgcctcttccccgggaagtgcccacccttccctcctgttagggttggctctcgagcttgtgtaccagttcctgggttggccgtttgagagttctacagacaagggggaagtgcgctcggtgtatttcctgtggtgggtgtacatgcagctagacacagctaacttgagtcttggagctcctagaggggagcttctggaaaggaagcttcttcaggacctctcggaagccaggtaggagtctggaactactagtgaacctagacctgtagctctggccagaggggctaggatgagagatggagggtgtgatggtgggtgctgggagttgcagccgaccttggggctggtggctgggggagtggggagcctgggaaaggccaggatgtggatgggctggtatggcattgagcctgaaatggtccaacttggggtccccagtgcctaggaaagttgtccccttgaatattagtgtgaaggtgaaggaggaagcagatgcctgttcatatggaaacaaagacctggctgtgaagagg

SEQ ID NO: 32592 - DNA, 146 bp, Macaca Mulatta
gcctccaactgaacattttcctgagtccaatgaccttcccaaaatggttcttagatctgcaacagaacttgcgatcatcaagtaaaaaacattctaaaagactattgagccattgatagaaaaacaaataaaactggatatacatt

SEQ ID NO: 32593 - DNA, 3534 bp, Macaca Mulatta
  misc_feature (1)...(3534): n = A,T,C or G
gaggcttctgcagaatccccaggtcaggccacctcattgaggctgcaggatctctcttcatagcccagcacgcctctccgcagtgtccctggttggagaatccaaacacctatccagcttctggctcctgggaaaagtggagttgtcagcaagagcgaccgagagtagaagtccagagcagagatgcctgctgacgtgaatttatcccagaagcctcaggtcctgggtccagaggagcaggatggatcttgcgaggnnnnnnnnnnnnnnnnnnnnnnnnnnnnnnnnnnnnnnnnnnnnnnnnnnnnnnnnnnnnnnnnnnnnnnnnnnnnnnnnnnnnnnnnnnnnnnnnnnnnnnnnnnnnnnnnnnnnnnnnnnnnnnnnnnnnnnnnnnnnnnnnnnnnnnnnnnnnnnnnnnnnnnnnnnnnnnnnnnnnnnnnnnnnnnnnnnnnnnnnnnnnnnnnnnnnnnnnnnnnnnnnnnnnnnnnnnnnnnnnnnnnnnnnnnnnnnnnnnnnnnnnnnnnnnnnnnnnnnnnnnnnnnnnnnnnnnnnnnnnnnnnnnnnnnnnnnnnnnnnnnnnnnnnnnnnnnnnnnnnnnnnnnnnnnnnnnnnnnnnnnnnnnnnnnnnnnnnnnnnnnnnnnnnnnnnnnnnnnnnnnnnnnnnnnnnnnnnnnnnnnnnnnnnnnnnnnnnnnnnnnnnnnnnnnnnnnnnnnnnnnnnnnnnnnnnnnnnnnnnnnnnnnnnnnnnnnnnnnnnnnnnnnnnnnnnnnnnnnnnnnnnnnnnnnnnnnnnnnnnnnnnnnnnnnnnnnnnnnnnnnnnnnnnnnnnnnnnnnnnnnnnnnnnnnnnnnnnnnnnnnnnnnnnnnnnnnnnnnnnnnnnnnnnnnnnnnnnnnnnnnnnnnnnnnnnnnnnnnnnnnnnnnnnnnnnnnnnnnnnnnnnnnnnnnnnnnnnnnnnnnnnnnnnnnnnnnnnnnnnnnnnnnnnnnnnnnnnnnnnnnnnnnnnnnnnnnnnnnnnnnnnnnnnnnnnnnnnnnnnnnnnnnnnnnnnnnnnnnnnnnnnnnnnnnnnnnnnnnnnnnnnnnnnnnnnnnnnnnnnnnnnnnnnnnnnnnnnnnnnnnnnnnnnnnnnnnnnnnnnnnnnnnnnnnnnnnnnnnnnnnnnnnnnnnnnnnnnnnnnnnnnnnnnnnnnnnnnnnnnnnnnnnnnnnnnnnnnnnnnnnnnnnnnnnnnnnnnnnnnnnnnnnnnnnnnnnnnnnnnnnnnnnnnnnnnnnnnnnnnnnnnnnnnnnnnnnnnnnnnnnnnnnnnnnnnnnnnnnnnnnnnnnnnnnnnnnnnnnnnnnnnnnnnnnnnnnnnnnnnnnnnnnnnnnnnnnnnnnnnnnnnnnnnnnnnnnnnnnnnnnnnnnnnnnnnnnnnnnnnnnnnnnnnnnnnnnnnnnnnnnnnnnnnnnnnnnnnnnnnnnnnnnnnnnnnnnnnnnnnnnnnnnnnnnnnnnnnnnnnnnnnnnnnnnnnnnnnnnnnnnnnnnnnnnnnnnnnnnnnnnnnnnnnnnnnnnnnnnnnnnnnnnnnnnnnnnnnnnnnnnnnnnnnnnnnnnnnnnnnnnnnnnnnnnnnnnnnnnnnnnnnnnnnnnnnnnnnnnnnnnnnnnnnnnnnnnnnnnnnnnnnnnnnnnnnnnnnnnnnnnnnnnnnnnnnnnnnnnnnnnnnnnnnnnnnnnnnnnnnnnnnnnnnnnnnnnnnnnnnnnnnnnnnnnnnnnnnnnnnnnnnnnnnnnnnnnnnnnnnnnnnnnnnnnnnnnnnnnnnnnnnnnnnnnnnnnnnnnnnnnnnnnnnnnnnnnnnnnnnnnnnnnnnnnnnnnnnnnnnnnnnnnnnnnnnnnnnnnnnnnnnnnnnnnnnnnnnnnnnnnnnnnnnnnnnnnnnnnnnnnnnnnnnnnnnnnnnnnnnnnnnnnnnnnnnnnnnnnnnnnnnnnnnnnnnnnnnnnnnnnnnnnnnnnnnnnnnnnnnnnnnnnnnnnnnnnnnnnnnnnnnnnnnnnnnnnnnnnnnnnnnnnnnnnnnnnnnnnnnnnnnnnnnnnnnnnnnnnnnnnnnnnnnnnnnnnnnnnnnnnnnnnnnnnnnnnnnnnnnnnnnnnnnnnnnnnnnnnnnnnnnnnnnnnnnnnnnnnnnnnnnnnnnnnnnnnnnnnnnnnnnnnnnnnnnnnnnnnnnnnnnnnnnnnnnnnnnnnnnnnnnnnnnnnnnnnnnnnnnnnnnnnnnnnnnnnnnnnnnnnnnnnnnnnnnnnnnnnnnnnnnnnnnnnnnnnnnnnnnnnnnnnnnnnnnnnnnnnnnnnnnnnnnnnnnnnnnnnnnnnnnnnnnnnnnnnnnnnnnnnnnnnnnnnnnnnnnnnnnnnnnnnnnnnnnnnnnnnnnnnnnnnnnnnnnnnnnnnnnnnnnnnnnnnnnnnnnnnnnnnnnnnnnnnnnnnnnnnnnnnnnnnnnnnnnnnnnnnnnnnnnnnnnnnnnnnnnnnnnnnnnnnnnnnnnnnnnnnnnnnnnnnnnnnnnnnnnnnnnnnnnnnnnnnnnnnnnnnnnnnnnnnnnnnnnnnnnnnnnnnnnnnnnnnnnnnnnnnnnnnnnnnnnnnnnnnnnnnnnnnnnnnnnnnnnnnnnnnnnnnnnnnnnnnnnnnnnnnnnnnnnnnnnnnnnnnnnnnnnnnnnnnnnnnnnnnnnnnnnnnnnnnnnnnnnnnnnnnnnnnnnnnnnnnnnnnnnnnnnnnnnnnnnnnnnnnnnnnnnnnnnnnnnnnnnnnnnnnnnnnnnnnnnnnnnnnnnnnnnnnnnnnnnnnnnnnnnnnnnnnnnnnnnnnnnnnnnnnnnnnnnnnnnnnnnnnnnnnnnnnnnnnnnnnnnnnnnnnnnnnnnnnnnnnnnnnnnnnnnnnnnnnnnnnnnnnntgagcatccctaatctgaaaatccaagatgaaatgctccaattagcatttcctttgagcgtcatgttagagttcaaaaagtttcagattttgggttttcagactagggatacccaacctgtatgtacatatatttnnnnnnnnnnnnnnnnnnnnnnnnnnnnnnnnnnnnnnnnnnnnnnnnnnnnnnnnnnnnnnnnnnnnnnnnnnnnnnnnnnnnnnnnnnnnnnnnnnnnnnnnnnnnnnnnnnnnnnnnnnnnnnnnnnnnnnnnnnnnnnnnnnnnnnnnnnnnnnnnnnnnnnnnnnnnnnnnnnnnnnnnnnnnnnnnnnnnnnnnnnnnnnnnnnnnnnnnnnnnnnnnnnnnnnnnnnnnnnnnnnnnnnnnnnnnnnnnnnnnnnnnnnnnnnnnnnnnnnnnnnnnnnnnnnnnnnnnnnnnnnnnnnnnnnnnnnnnnnnnnnnnnnnnnnnnnnnnnnnnnnnnnnnnnnnnnnnnnnnnnnnnnnnnnnnnnnnnnnnnnnnnnnnnnnnnnnnnnnnnnnnnnnnnnnnnnnnnnnnnnnnnnnnnnnnnnnnnnnnnnnnncaccaggagtcaacaaactgtggctattggccaaatatggcctc

SEQ ID NO: 32594 - DNA, 466 bp, Macaca Mulatta
ctccactttgcaatgctggccctcacgctggggctgttgtccctgtccccttggtcctgcccctagatacagcattttatccccacacacctgtccacaatgacattcaataaagtgcacatgcttgtgatgatgctgtgacttcacctggcatgggggccctgctgcagggtcccagcctagtcctgaaacagcccagtgttagcccctgcacagtcgcatccctcctctgtgaagctctcacgttaagcagggatgtgctcagaatttgctggtttcggcctcctgccatgggcagcagctggaccaggactgtggggtgggtgtttctctgacaccaaggtaaggacacaatgtgtccagaatacctttgggccaggacaaccctgcctgcctctgagctggctggagcagctcctcctgcagatgtgtgcggcttaggccctgtgggaggggcaggggcttg

SEQ ID NO: 32595 - DNA, 511 bp, Macaca Mulatta
actaacaagaatgttaactccctatagagaaatagtgacaagtgaagaacactactgctaaatccttatgttactcagcgttagagaaatcctttcccagcccaatgacttccctgctccaacacccgagacctcagggcatgtaggaccagtgtgattcacgaactgcactgatcacgcaatgcatcatggactccactgggccagttccgcagcccaaaacccagggcaacaagccctttagccccagggatctctggctggcctgagcaatggctcaggagtcctctagcaggcctaagacacgtgaggaggaaatttttttagcagaaaacaagggagaaaagagaaaccgggagaaggcatgagaaagaatttgagacgcaccatgtgggcggggagggggacagggcaatgccatttcagagacttcccagctctgacccttctacatttgagggcccagccaggagcagacaggacagagaataggggacattttctggattct

SEQ ID NO: 32596 - DNA, 201 bp, Macaca Mulatta
atggcagaggcgcggtcccagccctggagggggctgcagctcaacgcgctacaggaccatctcgccgttgtcgcagccgggcctggcggagctgcggcgccggtcccgggaagctggcgtcccgctcgagctgctgccgctcaccgactcgttcctgatgcggttcctgcgcgcccgggatttcgatctggacctgtcctg

SEQ ID NO: 32597 - DNA, 269 bp, Macaca Mulatta
gaaggagctggaggaccttgtccttaaggagcacgccagcatagatgcccagtcgggggcggaggcccctaaccccagcacttcagcttcccccatttagtccccgccacctgccaaggacgaggccgggacaacagagagggagaaaccacagtgacagctgcatctcccacacgcgacaccaagctcctcaaggacagctgagccccaaccaggcctggacccggcttaaccggcagttcttatctggggagcttagaacatcccca

SEQ ID NO: 32598 - DNA, 4888 bp, Macaca Mulatta
  misc_feature (1)...(4888): n = A,T,C or G
cccacatcacaaccacgacgggttgtccgcagctcgcagccaccccaaagggaagaagaaagaacaggagcagagggaagccgggcgcagaaagaagggaaaaggaagagctcagggttggacatttttggagacagaggtggggaggagaaagggagcgtgcctccttgattttcccctccccacccctctttgcttttctctccccttccctgtatagcatattccagaaacggcagcagaaggggacagaaacctctagtgtagaaaagggttttggaggggtggccagcgctcccgccagccgctacctaacagctggagcttgagtgtgagtgtaagagtgtgaatgcgnnnnnnnnnnnnnnnnnnnnnnnnnnnnnnnnnnnnnnnnnnnnnnnnnnnnnnnnnnnnnnnnnnnnnnnnnnacactacagtgtcagctacccctgtcagtttccccgtgtcagtttcttccctagctcttattgtgtgtggctggctgcgtgaagggagtgggtgcgcttgaaggggctnnnnnnnnnnnnnnnnnnnnnnnnnnnnnnnnnnnnnnnnnnnnnnnnnnnnnnnnnnnnnnnnnnnnnnnnnnnnnnnnnnnnnnnnnnnnnnnnnnnnnnnnnnnnnnnnnnnnnnnnnnnnnnnnnnnnnnnnnnnnnnnnnnnnnnnnnnnnnnnnnnnnnnnnnnnnnnnnnnnnnnnnnnnnnnnnnnnnnnnnnnnnnnnnnnnnnnnnnnnnnnnnnnnnnnnnnnnntcccggtcggctgctgtttgcgcgccgcaaaagaggagtccggcaagacgccgcaccacgcatcctggcccgcggacacccagacgacacagatctgatccgaagaaaccactgggctcaggnnnnnnnnnnnnnnnnnnnnnnnnnnnnnnnnnnnnnnnnnnnnnnnnnnnnnnnnnnnnnnnnnnnnnnnnnnnnnnnnnnnnnnnnnnnnnnnnnnnnnnnnnnnnnnnnnnnnnnnnnnnnnnnnnnnnnnnnnnnnnnnnnnnnnnnnnnnnnnnnnnnnnnnnnnnnnnnnnnnnnnnnnnnnnnnnnnnnnnnnnnnnnnnnnnnnnnnnnnnnnnnnnnnnnnnnnnnnnnnnnnnnnnnnnnnnnnnnnnnnnnnnnnnnnnnnnnnnnnnnnnnnnnnnnnnnnnnnnnnnnnnnnnnnnnnnnnnnnnnnnnnnnnnnnnnnnnnnnnnnnnnnnnnnnnnnnnnnnnnnnnnnnnnnnnnnnnnnnnnnnnnnnnnnnnnnnnnnnnnnnnnnnnnnnnnnnnnnnnnnnnnnnnnnnnnnnnnnnnnnnnnnnnnnnnnnnnnnnnnnnnnnnnnnnnnnnnnnnnnnnnnnnnnnnnnnnnnnnnnnnnnnnnnnnnnnnnnnnnnnnnnnnnnnnnnnnnnnnnnnnnnnnnnnnnnnnnnnnnnnnnnnnnnnnnnnnnnnnnnnnnnnnnnnnnnnnnnnnnnnnnnnnnnnnnnnnnnnnnnnnnnnnnnnnnnnnnnnnnnnnnnnnnnnnnnnnnnnnnnnnnnnnnnnnnnnnnnnnnnnnnnnnnnnnnnnnnnnnnnnnnnnnnnnnnnnnnnnnnnnnnnnnnnnnnnnnnnnnnnnnnnnnnnnnnnnnnnnnnnnnnnnnnnnnnnnnnnnnnnnnnnnnnnnnnnnnnnnnnnnnnnnnnnnnnnnnnnnnnnnnnnnnnnnnnnnnnnnnnnnnnnnnnnnnnnnnnnnnnnnnnnnnnnnnnnnnnnnnnnnnnnnnnnnnnnnnnnnnnnnnnnnnnnnnnnnnnnnnnnnnnnnnnnnnnnnnnnnnnnnnnnnnnnnnnnnnnnnnnnnnnnnnnnnnnnnnnnnnnnnnnnnnnnnnnnnnnnnnnnnnnnnnnnnnnnnnnnnnnnnnnnnnnnnnnnnnnnnnnnnnnnnnnnnnnnnnnnnnnnnnnnnnnnnnnnnnnnnnnnnnnnnnnnnnnnnnnnnnnnnnnnnnnnnnnnnnnnnnnnnnnnnnnnnnnnnnnnnnnnnnnnnnnnnnnnnnnnnnnnnnnnnnnnnnnnnnnnnnnnnnnnnnnnnnnnnnnnnnnnnnnnnnnnnnnnnnnnnnnnnnnnnnnnnnnnnnnnnnnnnnnnnnnnnnnnnnnnnnnnnnnnnnnnnnnnnnnnnnnnnnnnnnnnnnnnnnnnnnnnnnnnnnnnnnnnnnnnnnnnnnnnnnnnnnnnnnnnnnnnnnnnnnnnnnnnnnnnnnnnnnnnnnnnnnnnnnnnnnnnnnnnnnnnnnnnnnnnnnnnnnnnnnnnnnnnnnnnnnnnnnnnnnnnnnnnnnnnnnnnnnnnnnnnnnnnnnnnnnnnnnnnnnnnnnnnnnnnnnnnnnnnnnnnnnnnnnnnnnnnnnnnnnnnnnnnnnnnnnnnnnnnnnnnnnnnnnnnnnnnnnnnnnnnnnnnnnnnnnnnnnnnnnnnnnnnnnnnnnnnnnnnnnnnnnnnnnnnnnnnnnnnnnnnnnnnnnnnnnnnnnnnnnnnnnnnnnnnnnnnnnnnnnnnnnnnnnnnnnnnnnnnnnnnnnnnnnnnnnnnnnnnnnnnnnnnnnnnnnnnnnnnnnnnnnnnnnnnnnnnnnnnnnnnnnnnnnnnnnnnnnnnnnnnnnnnnnnnnnnnnnnnnnnnnnnnnnnnnnnnnnnnnnnnnnnnnnnnnnnnnnnnnnnnnnnnnnnnnnnnnnnnnnnnnnnnnnnnnnnnnnnnnnnnnnnnnnnnnnnnnnnnnnnnnnnnnnnnnnnnnnnnnnnnnnnnnnnnnnnnnnnnnnnnnnnnnnnnnnnnnnnnnnnnnnnnnnnnnnnnnnnnnnnnnnnnnnnnnnnnnnnnnnnnnnnnnnnnnnnnnnnnnnnnnnnnnnnnnnnnnnnnnnnnnnnnnnnnnnnnnnnnnnnnnnnnnnnnnnnnnnnnnnnnnnnnnnnnnnnnnnnnnnnnnnnnnnnnnnnnnnnnnnnnnnnnnnnnnnnnnnnnnnnnnnnnnnnnnnnnnnaacgcaatgctgacagcctgatacaaaatcaacattatcaggnnnnnnnnnnnnnnnnnnnnnnnnnnnnnnnnnnnnnnnnnnnnnnnnnnnnnnnnnnnnnnnnnnnnnnnnnnnnnnnnnnnnnnnggaattaaagcaagacatctccagctttcggtatgaagtgcttgacctcttgngaaatagaaaacacccaaggagaagcttttccactagcagcactgaactctctcagagagatgatactaatgatggcagtggtggggctcgnnnnnnnnnnnnnnnnnnnnnnnnnnnnnnnnnnnnnnnnnnnnnnnnnnnnnnnnnnnnnnnnnnnnnnnnnnnnnnnnnnnnnnnnnnnnnnnnnnnnnnnnnnnnnnnnnnnnnnnnnnnnnnnnnnnnnnnnnnnnnnnnnnnnnnnnnnnnnnnnnnnnnnnnnnnnnnnnnnnnnnnnnnnnnnnnnnnnnnnnnnnnnngttcagagccaatgtacacaatttctgatggaattgttcagcagcactgtatgtggcaggacatcagatattctcagatggagaaagggaaagcagaggcctgttctcaaagtgaaattaacctcagtgaggtagaattaggtgaagtccagggcgctgctcagagcagtgaatgccctctagcctgttccagctctcttcactgtgcatccagcatctgctcctcaaattctaaacttttagactcctcagaggatgtatttgaaacttggggagaggcttgtgacttgctcatgcacaaatggggtgatggacaggaagaacaagttacaactcgcctctaagtcaagccctaatcatctgttttggaactcaacagaaatttgtaatttccttgctctcagaggtgacacagaatatgattccctcactgcccctgcccccaagaaaggagagtgaaactcctattatttgcatcatcttttatagccacattctccatttttgttcttgttttattattactttcattattatttgcctttttaatacctgtacacactaagtccatcttacaaccaactgaaggggtgttgcacctaatcagcagaggtgcagttgggtgcttaacccttttgctttgcttttctcacccatgcttccttgaagccccaggtgccactttgctactcttgctgctacacagattcctgaccatcctcaggatctcatgccatcttcccacagagctgagggatgtggtcagcagtccccaccagctatcagataaggcaaactaccctgcccatctttgttgccattcagtgctacacgctgcccatgctgggtcaatgaacagcatcaaagggaggctgaagagattccaaagaattgtcagcttgtggtttctaggtataagtggcttgtttcgttcttaaatactacaacttcttattgtgagggctgttgaattttcttgtttcttaaagatgtgttagtttcctaatgtgtgccaatgaaatatttaccccatagtatatgtcatatctaataagttaggtgaattatttttctgtgtttgtgtttcagtcaacttactacattttaaaatttgatagtatcaaaattagtatttagaatttgtgctgttttttaaaaacgtctactacactctaaccaatagtcaccacatctcatacattggcaagataaatagttgtcatatttgttgggtcctactctactgttgatagttttaattatcatagctatcaaagaatttctaagataaaagcctgaatttgaaatatttttatcagaaaaaaatggcatattgctgaagtgtcaaaatatgagaaaagagcatcttcattttaattaattgctttataaaa

SEQ ID NO: 32599 - DNA, 126 bp, Macaca Mulatta
  misc_feature (1)...(126): n = A,T,C or G
tatgaaaaatgtgaatttgatttttattgagtaaatctttctgttcaataatacataatnngcttgagtggtggtttcagtaaagttatttgagataggcacgtcaatgttcacaaacatctattt

SEQ ID NO: 32600 - DNA, 865 bp, Macaca Mulatta
gggggcttgctaagcggaggggggaagcggtggtttttagcggctctctgggtagtagggtggtgtagtagcggcagcgaggggctcgcagaggtactcggattctcgtagctgtgccgggacttaaccaccaccatgtcaagcaaaagagcaaagaccaagaccaagaagcgccctcagcgcgcaacatccaatgtgtttgccatgtttgaccagtcacagattcaggagttcaaagaggccttcaacatgattgatcagaacagagatggtttcatcgacaaggaagatttgcatgatatgcttgcttcattggggaagaatccaactgatgattatctggatgccatgatgaatgaagctccaggccccatcaatttcaccatgttccttaccatgtttggtgagaagttaaatggcacggatcctgaagatgtcatcagaaatgcttttgcttgctttgatgaagaagcaactggcaccattcaggaagattacctgagagagctgctgacaaccatgggggatcggtttacggatgaggaagtggatgagctgtacagagaagcacctattgacaaaaaggggaatttcaattacatcgagttcacgcgcatcctgaaacatggagcaaaagacaaagatgactgaaagaatttcaaattccagccaaacgttccttgttgccacttttgggtatttttgagatttttctcttgcatgccccttagctttacagctttttgcattttcccggttggaatttatttccttagcccattttgggggcataatggtaattctttttaaccccccaaactggggaaaaaagggaactttttctaaatttgaatatctcaatttt

SEQ ID NO: 32601 - DNA, 2656 bp, Macaca Mulatta
  misc_feature (1)...(2656): n = A,T,C or G
cgacccgaccgcgccgaggctccaggacagcccgccatggctgcaggaggtcccggcactgagcctgcggccccggtctcctccacatcctcccttcccctggctgctctcaacatgcgagtgcggcgccgcctatctctgttcttgaacgtgcggacacaggtggcggccgactggaccgcgctggcggaggagatggactttgagtacttggagatccggcaactggagacgcacgccgaccccactggcaggctgctggacgcctggcagggacgccctggcgcctcggtaggccgactgctggagctgcttaccaagctgggccgcgacgacgtgctgctggagctgggacccagcattnnnnnnnnnnnnnnnnnnnnnnnnnnnnnnnnnnnnnnnnnnnnnnnnnnnnnnnnnnnnnnnnnnnnnnnnnnnnnnnnnnnnnnnnnnnnnnnnnnnnnnnnnnnnnnnnnnnnnnnnnnnnnnnnnnnnnnnnnnnnnnnnnnnnnnnnnnnnnnnnnnnnnnnnnnnnnnnnnnnnnnnnnnnnnnnnnnnnnnnnnnnnnnnnnnnnnnnnnnnnnnnnnnnnnnnnnnnnnnnnnnnnnnnnnnnnnnnnnnnnnnnnnnnnnnnnnnnnnnnnnnnnnnnnnnnnnnnnnnnnnnnnnnnnnnnnnnnnnnnnnnnnnnnnnnnnnnnnnnnnnnnnnnnnnnnnnnnnnnnnnnnnnnnnnnnnnnnnnnnnnnnnnnnnnnnnnnnnnnnnnnnnnaggtgcccatcagaagcgactgatccccatcaagtacaaggcaatgaagaaagagttccccagcatcctgaggttcatcactgtctgcgattacaccaacccctgcaccaaatcttggttctggactcgccttgccaaggccttgtccctgccctgaagactgttctgaggccctgggtgtgcgtgtatctgtctgcctgtccatgtacttctgccctgcctcctcctttggttattaggaggaatctgtgctctacttgcctctcaattcctggagaggccaacttcacagacacatctgcagcagctggacatcacatttcatgttctgcatggaaccagtggctgtgagtggcatgtcnnnnnnnnnnnnnnnnnnnnnnnnnnnnnnnnnnnnnnnnnnnnnnnnnnnnnnnnnnnnnnnnnnnnnnnnnnnnnnnnnnnnnnnnnnnnnnnnnnnnnnnnnnnnnnnnnnnnnnnnnnnnnnnnnnnnnnnnnnnnnnnnnnnnnnnnnnnnnnnnnnnnnnnnnnnnnnnnnnnnnnnnnnnnnnnnnnnnnnnnnnnnnnnnnnnnnnnnnnnnnnnnnnnnnnnnnnnnnnnnnnnnnnnnnnnnnnnnnnnnnnnnnnnnnnnnnnnnnnnnnnnnnnnnnnnnnnnnnnnnnnnnnnnnnnnnnnnnnnnnnnnnnnnnnnnnnnnnnnnnnnnnnnnnnnnnnnnnnnnnnnnnnnnnnnnnnnnnnnnnnnnnnnnnnnnnnnnnnnnnnnnnnnnnnnnnnnnnnnnnnnnnnnnnnnnnnnnnnnnnnnnnnnnnnnnnnnnnnnnnnnnnnnnnnnnnnnnnnnnnnnnnnnnnnnnnnnnnnnnnnnnnnnnnnnnnnnnnnnnnnnnnnnnnnnnnnnnnnnnnnnnnnnnnnnnnnnnnnnnnnnnnnnnnnnnnnnnnnnnnnnnnnnnnnnnnnnnnnnnnnnnnnnnnnnnnnnnnnnnnnnnnnnnnnnnnnnnnnnnnnnnnnnnnnnnnnnnnnnnnnnnnnnnnnnnnnnnnnnnnnnnnnnnnnnnnnnnnnnnnnnnnnnnnnnnnnnnnnnnnnnnnnnnnnnnnnnnnnnnnnnnnnnnnnnnnnnnnnnnnnnnnnnnnnnnnnnnnnnnnnnnnnnnnnnnnnnnnnnnnnnnnnnnnnnnnnnnnnnnnnnnnnnnnnnnnnnnnnnnnnnnnnnnnnnnnnnnnnnnnnnnnnnnnnnnnnnnnnnnnnnnnnnnnnnnnnnnnnnnnnnnnnnnnnnnnnnnnnnnnnnnnnnnnnnnnnnnnnnnnnnnnnnnnnnnnnnnnnnnnnnnnnnnnnnnnnnnnnnnnnnnnnnnnnnnnnnnnnnnnnnnnnnnnnnnnnnnnnnnnnnnnnnnnnnnnnnnnnnnaatgaagcacagagagaggagagctgcgtaaactcacacaacaatgaactacagacatagctgttctctccctccttcccagagtgatttgtacgttactctcaagctgtcctttggggacaaggtgtcatggtcttaagtgtctgtgccccagggcagaccttaggaccctagatccaatagaaaatgcatctctttgctccactttcagccaggctggagcaaggtgtcttttctcaggatcttgggagggaatggaggcccctctatgtatgatcttgttgaggtgtttagctgccatgcacctgtccccctttaatattgggaattttagagcaatctcaagaagcatcttctacatattttgtatgcattataataatttcaaagatatctgagaaaagcctatatttgccattcttctgtatcctggaatacatcctgcatcctgagtttatcataataaagaatattctaccttggaaact

SEQ ID NO: 32602 - DNA, 496 bp, Macaca Mulatta
  misc_feature (1)...(496): n = A,T,C or G
cttgaaactattacaagatggctctccttggactcttctctttgctggttctgcaaagtatgactgtaggggccactttccctgaggaagccattgctgacttgtcagtgaatatgtataatcgtcttagagccactggtgaagatgaaaatattatcttctctccattgagtattgctcttgcaatgggaatgatggaacttggggcccaagggtctacccagaaagaaatccgccactcaatgggatatgacagcctgaaaaatggnnnnnnnnnnnnnnnnnnnnggagttttctaatgtggtaactgctaaagagagccagtatgtgatgaaaattgccaattccttgtttgtgcaaaatggatttcatatcaatgaggagtttttgcaaatgatgaaaaaatattttaatgcggaagtaaatcatgtggacttcagtcaaaatgtagccgtggccaactacatcaataagtgggtggagaataacacaaac

SEQ ID NO: 32603 - DNA, 625 bp, Macaca Mulatta
ggtgtcgggaataacaggaccaataaatgatactttactattaaaaaagaaaatccatgtaaatacatgttggtaattgttgcctttattgcgcttattactcttaattctgttatcaacggagttccttctgggatagaggggatgggtttggaattaatgagaaaaagcttcttgcttttctgactacattggaatatctgcgggtcccccaaaccctggcagcacttccctcgatagacagccttgtgctgactcgcgtggtccacccggacctggtggttgactggggccctcgtctccccccagaaaggcggcgcgctgaagaagggcgccatcgccaggacgctgcaggccgtgaagatggtgctgtcctaccagcccgaagagctcgagtgggactcgccccaccgcaccaaccagcagcaatgctattgctactgcggcgggcccggagagtaaggccagggggtcggggacccccgggcggcagggcaggtctgcgagaatcggcggcggggaccgcccatagggagcgagcctggagtgtcagccaaggcggggaccttgagggcgggtccagcgtgctgtgctgtgggggcagggcctcgaggggcgggcctgg

SEQ ID NO: 32604 - DNA, 294 bp, Macaca Mulatta
  misc_feature (1)...(294): n = A,T,C or G
ataaatgtcaccctgggcgcccacaatatccggagacgggaaaacacccagcaacatatcactgcacgcagagccatccgccaccctcgatataatcagcagaccatccgtaatgacatcatgttattgcagncagctgagccgaagagtcagacggaatcgaaatgtgagaccagtggctctgcctagcacccaggagagactgagacccgggacgcagtgcactgtggctggctggggcttggtcagccagacgaggagaacagacacactccgagaggtgcagctgagagt

SEQ ID NO: 32605 - DNA, 1770 bp, Macaca Mulatta
  misc_feature (1)...(1770): n = A,T,C or G
gtggcattaggatgcacctctctgcggtgttcaacgccctcctggtgtctttgctggcggcggtcctgtggaagcatgtgcgactgcgtgagcatgcagctacactggaggaggagctggccctcggccgacaggccacagagccagccccagcactgaggatcgactacccgaaggcactgcagatcctgatggagggtggcacacacatggtgtgcacaggccgcacacacacagaccgcatctgccgcttcaagtggctctgcttttttttcgaggccgaggagttcatcttcttccatggcaacacctctgtcatgctacccaacctgggttcccggcgcttccagccagccctgctcgacctgtccaccgtggaggaccacaacacccagtacttcaacttcgtggagctgcctgctgctgccctgcgcttcatgcccaagccggtgttcgtgccagatgtggccctcatcgccaaccgcttcaaccccgacaacctcatgcatgtctttcacgacgacctgctgccactcttctacaccctgcggcagtttcccggcctggcccacgaggcacggctcttcttcatggagggctggggcgagggtgcacacttcgacctctacaagctgctcagccccaagcagcctctcctgcgggcacagctgaagacgctgggccggctgctgtgcttctcccatgcttttgtgggcctctccaagatcactacctggtaccagtatggctttgtccagccccagggcccgaaagccaacatcctggtctcnnnnnnnnnnnnnnnnnnnnnnnnnnnnnnnnnnnnnnnnnnnnnnnnnnnnnnnnnnnnnnnnnnnnnnnnnnnnnnnnnnnnnnnnnnnnnnnnnnnnnnnnnnnnnnnnnnnnnnnnnnnnnnnnnnnnnnnnnnnnnnnnnnnnnnnnnnnnnnnnnnnnnnnnnnnnnnnnnnnnnnnnnnnnnnnnnnnnnnnnnnnnnnnnnnnnnnnnnnnnnnnnnnnnnnnnnnnnnnnnnnnnnnnnnnnnnnnnnnnnnnnnnnnnnnnnnnnnnnnnnnnnnnnnnnnnnnnnnnnnnnnnnnnnnnnnnnnnnnnnnnnnnnnnnnnnnnnnnnnnnnnnnnnnnnnnnnnnnnnnnnnnnnnnnnnnnnncatggaccttcagtatgtagcctggaggaacatgatgccagagaacacagtcacacaccttgagcggccctgggaccaggggggcatcacccatctggaccgggctgagcaagcccgtatcctgcaaagccgtgaggtcccacggcatctctgttgccggaaccctgagtggctcttccgaatctaccaggacaccaaggtggacatcccatccctcattcaaaccatacggcgcgtggtgaagggccggccaggaccacggaagcagaagtggacagtcggcctatatccaggcaaggtgcgggaagcacagtaaaaaaagacagtgcatggcgcctccgaggcccgcctcactgtctcctggcagatcccatggaaccttaagtacctgaaggtgagggaggtgaagtatgaggtgtggctgcaggagcagggggagaacacctatgtgccttacatcctggccctgcagaaccacaccttcactgagaacatcaagcccttcaccacctacctggtgtgggtccgctgcatcttcaacaagatcctcctgggaccctttgcagatgtgctggtgtgcagcacgtagcgagcgggccacagcc

SEQ ID NO: 32606 - DNA, 97 bp, Macaca Mulatta
ggtttgcctgccttagtggtgtcaattgttctagcgagcagaaacaaaaatgaagtctatggaaaagaaagttacgggaaagaaaaaggtgatgaat

SEQ ID NO: 32607 - DNA, 622 bp, Macaca Mulatta
  misc_feature (1)...(622): n = A,T,C or G
gggagctgggcacagtgactcacnnnnnnnnnnnnnnnnnnnnnnnntnnnnnnnnnnnnnnnnnnnnnnnncnnnnnnnnnnnnnnnnnnnttgggcaacatggtgaaacctcatctctacaaagggtacagaaatttgccagatgtggtggtgcacacctgcagttccagctgcttgggaggctgaagcaggaggatcacttgagctcaagaggtcgaggctgcagtaagccgtgatannnnnnnnnnnnnnnnnnnnnaatgacagagcaagacccagnnnnnnnnnnnnnnnnnnatatttatatatacctatataaaaatatatatacacatatatatatggagaacatatatatatacacatatatatgtagaacacttcatgaatttatatgtcatctgtgcacggggcccatgctgacctctgtgttgtgccagttatagtatgtgtgctgctgacatgagtaccgcattgcctttacaacatcataggtgccaaagagggtcagcaggattgtgagcagttggcctagtctgagaggctgtctaagccgaaagctgtcaatagacaggtgctcagctttgtgtctccataagaagggaaggggatgtgaggan

SEQ ID NO: 32608 - DNA, 1436 bp, Macaca Mulatta
  misc_feature (1)...(1436): n = A,T,C or G
gttttcagcattgcaaataacaatctcagctactgggatgcccccctgggaagttcttatatgtgcaacaaagagcagactgtttcagtgtctggagcatttcagataaatacctttgatctaagggttcagcctttcaatgtgacacaaggaaagtattctacagnnnnnnnnnnnnnnnnnnnnnnnnnnnnnnnnnnnnnnnnnnnnnnnnnnnnnnnnnnnnnnnnnnnnnnnnnnnnnnnnnnnnnnnnnnnnnnnnnnnnnnnnnnnnnnnnnnnnnnnnnnnnnnnnnnnnnnnnnnnnnnnnnnnnnnnnnnnnnnnnnnnnnnnnnnnnnnnnnnnnnnnnnnnnnnnnnnnnnnnnnnnnnnnnnnnnnnnnnnnnnnnnnnnnnnnnnnnnnnnnnnnnnnnnnnnnnnnnnnnnnnnnnnnnnnnnnnnnnnnnnnnnnnnnnnnnnnnnnnnnnnnnnnnnnnnnnnnnnnnnnnnnnnnnnnnnnnnnnnnnnnnnnnnnnnnnnnnnnnnnnnnnnnnnnnnnnnnnnnnnnnnnnnnnnnnnnnnnnnnnnnnnnnnnnnnnnnnnnnnnnnnnnnnnnnnnnnnnnnnnnnnnnnnnnnnnnnnnnnnnnnnnnnnnnnnnnnnnnnnnnnnnnnnnnnnnnnnnnnnnnnnnnnnnnnnnnnnnnnnnnnnnnnnnnnnnnnnnnnnnnnnnnnnnnnnnnnnnnnnnnnnnnnnnnnnnnnnnnnnnnnnnnnnnnnnnnnnnnnnnnnnnnnnnnnnnnnnnnnnnnnnnnnnnnnnnnnnnnnnnnnnnnnnnnnnnnnnnnnnnnnnnnnnnnnnnnnnnnnnnnnnnnnnnnnnnnnnnnnnnnnnnnnnnnnnnnnnnnnnnnnnnnnnnnnnnnnnnnnnnnnnnnnnnnnnnnnnnnnnnnnnnnnnnnnnnnnnnnnnnnnnnnnnnnnnnnnnnnnnnnnnnnnnnnnnnnnnnnnnnnnnnnnnnnnnnnnnnnnnnnnnnnnnnnnnnnnnnnnnnnnnnnnnnnnnnnnnnnnnnnnnnnnnnnnnnnnnnnnnnnnnnnnnnnnnnnnnnnnnnnnnnnnnnnnnnnnnnnnnnnnnnnnnnnnnnnnnnnnnnnnnnnnnnnnnnnnnnnnnnnnnnnnnnnnnnnnnnnnnnnnnnnnnnnnnnnnnnnnnnnnnnnnnnnnnnnnnnnnnnnnnnnnnnnnnnnnnnnnnnnnnnnnnnnnnnnnnnnnnnnnnnnnnnnnnnnnnnnnnnnnnnnnnnnnnnnnnnnnnnnnnnnnnnnnnnnnnnnnnnnnnnnnnnnnggctcacgcctgtaattccagcactttgggaagccaaggtggcagatcacgtgagtccaggagatcaagaccagcctgggaaacatggcgaaaccctgtctctacaaaaaatacaaaaaa

SEQ ID NO: 32609 - DNA, 1033 bp, Macaca Mulatta
  misc_feature (1)...(1033): n = A,T,C or G
agactacagttgatcgcctacctctgagacactatgttgagttcctcctgggccctggacatgttttggcagcatgacgaagtcctaatgtggctgaaggcaagtccacaggagatggggtttccctctttttcaggtctggagatggaatcactgttgagtacagtccctggacatcacacactggcagagaatggataaccaagggagtaatctactcagacttgaatctgccccaggacccaaagaggcagcagaggaaacctaagggtaataaaagctccattttagtaactgaacaggaaatattctatgtggaattaaaccttcaaaatacttcgtcaggattttcaagggaatgacaaaacatatcactgcaaaggtttactgtcagctccagagaagctcattgctggggtactgggaatcatttgtattgtcttgatggcctctgtgttaaaaacaatagttgttattccctctattttaatactggagcagaacaattctttccctgaatacaagaacccagaaagcacgtcactgtggccattgtcctgaggagtggattacatattccaacagttgttattacattggcaaggaaaaaagaacttgggcagagagtttgctggcctgtacttcaaagaactctagtctgctttctatagataatgaagaagaaatgaaatttctgactgccatttcaccatccacatggactggtgtgtttcgtgacagcagtcatcatccatgggtgacaatcaacggtctgactttcaaacatgagatcaaagactcagatcatgctgaatataactgtgcaatgctacatctagatagacttaaatcagtccagtgtggatcttcaaaaagatattattagatgggatttcatcatgttgagnnnnnnnnnnnnnnnnnnnnnnagctcaagaaatctacacatcttgctctcccaagttgctgggattactgacataagccaccgcacctgagtgctcatgtaccatttagcttgtgtttttaaaat

SEQ ID NO: 32610 - DNA, 2590 bp, Macaca Mulatta
  misc_feature (1)...(2590): n = A,T,C or G
aaaattctagagcaacctcatgcagttctctttgttgatgaaaaggatgttgcagagataaatgaaaagttcacagagttacttttggcaattaccaattgtgaggagaggttcagcctgtttaaaaacagaaacagactaagtaaaggcctccaaatagacgtgggctgccctgtgaaagtacagttgagatctggggaagaaaaatttcctggagttgtgcgcttcagaggaccactgttagcagagaggacagtctctggaatattctttggagttgaattgctggnnnnnnnnnnnnnnnnnnnnnnnnnnnnnnnnnnnnnnnnnnnnnnnnnnnnnnnnnnnnnnnnnnnnnnnnnnnnnnnnnnnnnnnnnnnnnnnnnnnnnnnnnnnnnnnnnnnnnnnnnnnnnnnnnnnnnnnnnnnnnnnnnnnnnnnnnnnnnnnnnnnnnnnnnnnnnnnnnnnnnnnnnnnnnnnnnnnnnnnnnnnnnnnnnnnnnnnnnnnnnnnnnnnnnnnnnnnnnnnnnnnnnnnnnnnnnnnnnnnnnnnnnnnnnnnnnnnnnnnnnnnnnnnnnnnnnnnnnnnnnnnnnnnnnnnnnnnnnnnnnnnnnnnnnnnnnnnnnnnnnnnnnnnnnnnnnnnnnnnnnnnnnnnnnnnnnnnnnnnnnnnnnnnnnnnnnnnnnnnnnnnnnnnnnnnnnnnnnnnnnnnnnnnnnnnnnnnnnnnnnnnnnnnnnnnnnnnnnnnnnnnnnnnnnnnnnnnnnnnnnnnnnnnnnnnnnnnnnnnnnnnnnnnnnnnnnnnnnnnnnnnnnnnnnnnnnnnnnnnnnnnnnnnnnnnnnnnnnnnnnnnnnnnnnnnnnnnnnnnnnnnnnnnnnnnnnnnnnnnnnnnnnnnnnnnnnnnnnnnnnnnnnnnnnnnnnnnnnnnnnnnnnnnnnnnnnnnnnnnnnnnnnnnnnnnnnnnnnnnnnnnnnnnnnnnnnnnnnnnnnnnnnnnnnnnnnnnnnnnnnnnnnnnnnnnnnnnnnnnnnnnnnnnnnnnnnnnnnnnnnnnnnnnnnnnnnnnnnnnnnnnnnnnnnnnnnnnnnnnnnnnnnnnnnnnnnnnnnnnnnnnnnnnnnnnnnnnnnnnnnnnnnnnnnnnnnnnnnnnnnnnnnnnnnnnnnnnnnnnnnnnnnnnnnnnnnnnnnnnnnnnnnnnnnnnnnnnnnnnnnnnnnnnnnnnnnnnnnnnnnnnnnnnnnnnnnnnnnnnnnnnnnnnnnnnnnnnnnnnnnnnnnnnnnnnnnnnnnnnnnnnnnnnnnnnnnnnnnnnnnnnnnnnnnnnnnnnnnnnnnnnnnnnnnnnnnnnnnnnnnnnnnnnnnnnnnnnnnnnnnnnnnnnnnnnnnnnnnnnnnnnnnnnnnnnnnnnnnnnnnnnnnnnnnnnnnnnnnnnnnnnnnnnnnnnnnnnnnnnnnnnnnnnnnnnnnnnnnnnnnnnnnnnnnnnnnnnnnnnnnnnnnnnnnnnnnnnnnnnnnnnnnnnnnnnnnnnnnnnnnnnnnnnnnnnnnnnnnnnnnnnnnnnnnnnnnnnnnnnnnnnnnnnnnnnnnnnnnnnnnnnnnnnnnnnnnnnnnnnnnnnnnnnnnnnnnnnnnnnnnnnnnnnnnnnnnnnnnnnnnnnnnnnnnnnnnnnnnnnnnnnnnnnnnnnnnnnnnnnnnnnnnnnnnnnnnnnnnnnnnnnnnnnnnnnnnnnnnnnnnnnnnnnnnnnnnnnnnnnnnnnnnnnnnnnnnnnnnnnnnnnnnnnnnnnnnnnnnnnnnnnnnnnnnnnnnnnnnnnnnnnnnnnnnnnnnnnnnnnnnnnnnnnnnnnnnnnnnnnnnnnnnnnnnnnnnnnnnnnnnnnnnnnnnnnnnnnnnnnnnnnnnnnnnnnnnnnnnnnnnnnnnnnnnnnnnnnnnnnnnnnnnnnnnnnnnnnnnnnnnnnnnnnnnnnnnnnnnnnnnnnnnnnnnnnnnnnnnnnnnnnnnnnnnnnnnnnnnnnnnnnnnaggcaccatcatgtctgattattcagatgcctcgatttggaaaagactttaaactatttaaaaaaatttttccttctctggaattaaatataaccgatttacttgaagacnnnnnnnnnnnnnnnnnnnnnnnnnnnnnnnnnnnnnnnnnnnnnnnnnnnnnnnnnnnnnnnnnnnnnnnnnnnnnnnnnnnnnnnnnnnnnnnnnnnnnnnnnnnnnnnnnnnnnnnnnnnnnnnnnnnnnnnnnnnnnnnnnnnnnnnnnnnnnnnnnnnnnnnnnnnnnnnnnnnnnnnnnnnnnnnnnnnnnnnnnnnnnnnnnnnnnnnnnnnnnnnnnnnnnnnnnnnnnnnnnnnnnnnnnnnnnnnnnnnnnnnnnnnnnnnnnnnnnnnnnnnnnnnnnnnnnnnnnnnnnnnnnnnnnnnnnnnnnnnnnnnnnnnnnnnnnggtggtcagaacggcttcaacattcctcaagtcaccccatgcccagaagtaggagagtacttgaagatgtctctggaagacctgcattccttggactccagaagaatccaaggctgtgcgcgaagactgcttt

SEQ ID NO: 32611 - DNA, 314 bp, Macaca Mulatta
  misc_feature (1)...(314): n = A,T,C or G
gagaggcaggaggacactgagttccctgtgttggcctccaggtcctgtgcttgcggagnnnnnnnnnnnnnnnnnnnnnnnnnnacaatgggcaacgcgcaggagcggccgtcggagactatagaccgcgaaaggaaacacctggtcgagacattgcaggcggactcggggctgctgttggacgcgctgttggcgcgaggcgtgctcaccgggccagagtacgaggcattggatgcactgcctgatgccgagcgcagggtgcgccgcctactgctgctggtgcagggcaagggcgaggccgcctgccaggagct

SEQ ID NO: 32612 - DNA, 894 bp, Macaca Mulatta
tgggggagaatttccagaaggtctttaacgagctgctggtcctactgcccgacacagccaagcagcaggagctcctgtctgcacacacggacttctgcaaccgcgagaagcctctcggcaccaagtccaagaagaacaagaagagcgcgtggcaggtcaccacccagcaggcgggcctggactgccgtgtgtgccccacctgccagcaggtgctcgcacacggcgacgccagcagccaccaggcgctgcatgctgcccgggacgacgacttcccctccctgcaagccatcgccaggatcatcacgtagctcccgccagcatggccagagccatcgcaccatgagcgcccttcctccttccttcctctccgggctgccgggcagccaggtaaggcccagtgaggccacctggcctcttggttggccaggcccaccaggaagtcaccaggatggtccacccgccctgctggcacactcaggtgggagtccagccctgcctcagtggtgggccagtctcggtttgcattcttgtgcttttgggaggcgccaggggagggaagggctgggatgctgggacctgttgttgctggcaaagccagaggtcacagtggcctgatctgggccctcccgaagctgagggctgccgcccctgcggcctcagagctgaaagctgcggctccacaggtgccagagtcagatgtcacaggtgtgtgttgtgtaaacagttggctgtttcgtgcttcaagaatattcaggattaaaagcagacaagaaattgtgctacttgaagttgaatctttttatgagacaagctaaagctgaatctgggatcttaaattgcctctgaccttttataagacagtttatcttcaaataaatttattttgcaatacca

SEQ ID NO: 32613 - DNA, 136 bp, Macaca Mulatta
caggacatcgggaagaacatttacaccatccgggaggtggtcactgagattcgggacaaggccacacgcaggcggctcgctgtgctgccctacgagctgcggttcaaggagcccttaccggaatacgtgcggctgg

SEQ ID NO: 32614 - DNA, 2643 bp, Macaca Mulatta
  misc_feature (1)...(2643): n = A,T,C or G
cggtgggagccgcctgggagaggcggcctcgcgggactcccggaccctggccactctgcggccacggtcgggcccagcgcccgcaccaagtgacagcagtgccggaagcggagcgttttcccggtccggccgccgggaatggcgctcctcccgggtgaagaatgcaccactgccagtcaggncgctctctagaacttagcacatatttacgctcgcctgccgcgtccgcgctccgtgctgggcctgggaagagagtcacccatacggaggacagtcccgggggccggggtaacctagtggacgaaggggcaggagagcccgtcggtgcgnnnnnnnnnnnnnnnnggtgcaggagaactccccagcccagcaggcgggcctggagccctattttgacttcatcatcaccattgggcactcgaggctnnnnnnnnnnnnnnnnnnnnnnnnnnnnnnnnnnnnnnnnnnnnnnnnnnnnnnnnnnnnnnnnnnnnnnnnnnnnnnnnnnnnnnnnnnnnnnnnnnnnnnnnnnnnnnnnnnnnnnnnnnnnnnnnnnnnnnnnnnnnnnnnnnnnnnnnnnnnnnnnnnnnnnnnnnnnnnnnnnnnnnnnnnnnnnnnnnnnnnnnnnnnatgtgtaaccatcttcacctgctgcccttgccggtctgcgcccctacacagactatgcggttggttcggaccacatcctccaggagnnnnnnnnnnnnnnnnnnnnnnnnnnnnnnnnnnnnnnnnnnnnnnnnnnnnnnnnnnnnnnnnnnnnnnnnnnnnnnnnnnnnnnnnnnnnnnnnnnnnnnnnnnnnnnnnnnnnnnnnnnnnnnnnnnnnnnnnnnnnnnnnnnnnnnnnnnnnnnnnnnnnnnnnnnnnnnnnnnnnnnnnnnnnnnnnnnnnnnnnnnnnnnnnnnnnnnnnnnnnnnnnnnnnnnnnnnnnnnnnnnnnnnnnnnnnnnnnnnnnnnnnnnnnnnnnnnnnnnnnnnnnnnnnnnnnnnnnnnnnnnnnnnnnnnnnnnnnnnnnnnnnnnnnaggccctgctgcaggcacctgactcctccatggaggatccccttcctgggcctgggagtcccagccagagtgctccagaccctgatggacttccccatttcatggagactcctcttcagcccccacctccagtgcagcgagtcatggacccannnnnnnnnnnnnnnnnnnnnnnnnnnnnnnnnnnnnnnnnnnnnnnnnnnnnnnnnnnnnnnnnnnnnnnnnnnnnnnnnnnnnnnnnnnnnnnnnnnnnnnnnnnnnnnnnnnnnnnnnnnnnnnnnnnnnnnnnnnnnnnnnnnnnnnnnnnnnnnnnnnnnnnnnnnnnnnnnnnnnnnnnnnnnnnnnnnnnnnnnnnnnnnnnnnnnnnnnnnnnnnnnnnnnnnnnnnnnnnnnnnnnnnnnnnnnnnnnnnnnnnnnnnnnnnnnnnnnnnnnnnnnnnnnnnnnnnnnnnnnnnnnnnnnnnnnnnnnnnnnnnnnnnnnnnnnnnnnnnnnnnnnnnnnnnnnnnnnnnnnnnnnnnnnnnnnnnnnnnnnnnnnnnnnnnnnnnnnnnnnnnnnnnnnnnnnnnnnnnnnnnnnnnnnnnnnnnnnnnnnnnnnnnnnnnnnnnnnnnnnnnnnnnnnnnnnnnnnnnnnnnnnnnnnnnnnnnnnnnnnnnnnnnnnnnnnnnnnnnnnnnnnnnnnnnnnnnnnnnnnnnnnnnnnnnnnnnnnnnnnnnnnnnnnnnnnnnnnnnnnnnnnnnnnnnnnnnnnnnnnnnnnnnnnnnnnnnnnnnnnnnnnnnnnnnnnnnnnnnnnnnnnnnnnnnnnnnnnnnnnnnnnnnnnnnnnnnnnnnnnnnnnnnnnnnnnnnnnnnnnnnnnnnnnnnnnnnnnnnnnnnnnnnnnnnnnnnnnnnnnnnnnnnnnnnnnnnnnnnnnnnnnnnnnnnnnnnnnnnnnnnnnnnnnnnnnnnnnnnnnnnnnnnnnnnnnnnnnnnnnnnnnnnnnnnnnnnnnnnnnnnnnnnnnnnnnnnnnnnnnnnnnnnnnnnnnnnnnnnnnnnnnnnnnnnnnnnnnnnnnnnnnnnnnnnnnnnnnnnnnnnnnnnnnnnnnnnnnnnnnnnnnnnnnnnnnnnnnnnnnnnnnnnnnnnnnnnnnnnnnnnnnnnnnnnnnnnnnnnnnnnnnnnnnnnnnnnnnnnnnnnnnnnnnnnnnnnnnnnnnnnnnnnnnnnnnnnnnnnnnnnnnnnnnnnnnnnnnnnnnnnnnnnnnnnnnnnnnnnnnnnnnnnnnnnnnnnnnnnnnnnnnnnnnnnnnnnnnnnnnnncccaatgtcaagtctgcaggaatgcaggaagtagaacagaatcgccacaggactgttctggggccagcttcccttaactctgtagcctggcagtctgacccaaagttgccctcacccgaatgttctggctcttccctccctcacttttactttcccttcccccataagttggaggataaaatgggtatcaatgctaatatttccagggagaacatgaaaccagaggtttctttctttctctgtaatctgctatgaaagaaaatgacaaatgaaaagaaaataaatgtgtactacacttcgaaat

SEQ ID NO: 32615 - DNA, 196 bp, Macaca Mulatta
gaaggagatactgtctctgaacaaaaatagctggagaaacatgtaactgttaactaagggttgcctctagtgaaaagggttggaagacaatttatgtgatgctacactattcttcctgtcgtgattgctttactgtgaacgtagcaaggttgtactggggaggagagcaggggttgattgctgtcaatgttgattg

SEQ ID NO: 32616 - DNA, 78 bp, Macaca Mulatta
gcgttcttgagtcgggaaatggccgctgtgtggttgcaacggagataaatccccggaaccgcgattcggcgtgtcagg

SEQ ID NO: 32617 - DNA, 258 bp, Macaca Mulatta
aattacaaacccccacagaacataccagaaggctctggcatcctgctgtatatcttccatggaaactttttgggtaaagaagttattgctcggatctgtggaccatgtagtgtacaagctgtagttctgaatgataaatttcaacttccctgtttttctggacagtcattttgtttactcattcagggcctattgcagggtccaataaactcttcataaggttgaccaaaggcacctctggcaaggttaagttgctaa

SEQ ID NO: 32618 - DNA, 1934 bp, Macaca Mulatta
  misc_feature (1)...(1934): n = A,T,C or G
gagctgccctagtgagatcatcctactcgtgtggcgcatggtcccccaggtcaagccaggaccagatggtggggtcctgcggcgggcctcctgcaagtcaacacatgacctccagtcaccccccaacaaaagggagaagaactgtacccatggggcccaggcacggccagagcagcgccacagctgccacctggtatgtgacagctctgatgggctgctgcttggcggctgggagcgctataccgaggtggccaagcgtggaggccagcacaccctgcctgcactgtcccgtgccactgcccccaccgaccccaactacatcatcctggccccgctgaatcctgggagccagnnnnnnnnnnnnnnnnnnnnnnnnnnnnnnnnnnnnnnnnnnnnnnnnnnnnnnnnnnnnnnnnnnnnnnnnnnnnnnnnnnnnnnnnnnnnnnnnnnnnnnnnnnnnnnnnnnnnnnnnnnnnnnnnnnnnnnnnnnnnnnnnnnnnnnnnnnnnnnnnnnnnnnnnnnnnnnnnnnnnnnnnnnnnnnnnnnnnnnnnnnnnnnnnnnnnnnnnnnnnnnnnnnnnnnnnnnnnnnnnnnnnnnnnnnnnnnnnnnnnnnnnnnnnnnnnnnnnnnnnnnnnnnnnnnnnnnnnnnnnnnnnnnnnnnnnnnnnnnnnnnnnnnnnnnnnnnnnnnnnnnnnnnnnnnnnnnnnnnnnnnnnnnnnnnnnnnnnnnnnnnnnnnnnnnnnnnnnnnnnnnnnnnnnnnnnnnnnnnnnnnnnnnnnnnnaaggttcttcagaagacctgaaattctgcgtgctctatctagcagannnnnnnnnnnnnnnnnnnnnnnnnnnnnnnnnnnnnnnnnnnnnnnnnnnnnnnnnnnnnnnnnnnnnnnnnnnnnnnnnnnnnnnnnnnnnnnnnnnnnnnnnnnnnnnnnnnnnnnnnnnnnnnnnnnnnnnnnnnnnnnnnnnnnnnnnnnnnnnnnnnnnnnnnnnnnnnnnnnnnnnnnnnnnnnnnnnnnnnnnnnnnnnnnnnnnnnnnnnnnnnnnnnnnnnnnnnnnnnnnnnnnnnnnnnnnnnnnnnnnnnnnnnnnnnnnnnnnnnnnnnnnnnnnnnnnnnnnnnnnnnnnnnnnnnnnnnnnnnnnnnnnnnnnnnnnnnnnnnnnnnnnnnnnnnnnnnnnnnnnnnnnnnnnnnnnnnnnnnnnnnnnnnnnnnnnnnnnnnnnnnnnnnnnnnnnnnnnnnnnnnnnnnnnnnnnnnnnnnnnnnnnnnnnnnnnnnnnnnnnnnnnnnnnnnnnnnnnnnnnnnnnnnnnnnnnnnnnnnnnnnnnnnnnnnnnnnnnnnnnnnnnnnnnnnnnnnnnnnnnnnnnnnnnnnnnnnnnnnnnnnnnnnnnnnnnnnnnnnnnnnnnnnnnnnnnnnnnnnnnnnnnnnnnnnnnnnnnnnnnnnnnnnnnnnnnnnnnnnnnnnnnnnnnnnnnnnnnnnnnnnnnnnnnnnnnnnnnnnnnnnnnnnnnnnnnnnnnnnnnnnnnnnnnnnnnnnnnnnnnnnnnnnnnnnnnnnnnnnnnnnnnnnnnnnnnnnnnnnnnnnnnnnnnnnnnnnnnnnnnnnnnnnnnnnnnnnnnnnnnnnnnnnnnnnnnnnnnnnnnnnnnnnnnnnnnnnnnnnnnnnnnnnnnnnnnnnnnnnnnnnnnnnnnnnnnnnnnnnnnnnnnnnnnnnnnnnnnnnnnnnnnnnnnnnnnnnnnnnnnnnnnnnnnnnaggaaccccgagggccctgcttcgcctccgacaccaccttgcactgctcagatggtgagggcgccgcctccacctggggcatgccttcgcccagcaccctcaagaaagagctgggccgcaatggtggctccatgcaccacctttccctcttcttcacgggacataggaaggtga

SEQ ID NO: 32619 - DNA, 1047 bp, Macaca Mulatta
  misc_feature (1)...(1047): n = A,T,C or G
ttactagcttttgaagtttgtttcttcccaaacctttctctcattaaccctcatccaaggttttcaggacaacaggttctgacttttccttattcatttagcgaacattttaaagtggctaattcagttatgtctgggatattttaatcctccaacgggttgaactgggagagtccccaagccaagattagtaacaccaatggataggcgagtgcatggccctttctgtcttatgccagataaaagtgactctccctttgtctttgttttattttaaatccagcctcatgatgatcctgagacttgtcttgttgctgctctgagcatctggaggaacagaaaactaagttcatgtcatcctgctgtaatgggcagagcatatttttttgtatttaaaagataaacttcaatatggaatgctagaaacacaaatagcactgtcacctctaatatgaacattagtttgaggtagttttttcctaaagcaaaagttttaactgttttctaattgtcaagcgctgttttcattaaaagtgtctaatgaatcatgatacgctcttccatttgctgtgtctattttctatatatttggcattttttgaaaattccaaatactcatgtctcaagtaagcttaaactacaacttgtcacataaagcagttcttaagtggagttcacagaatgctaatgtatctatttgtcatttgtgttatatttgatattattagaaattatactttttccattttaattgtattgctgccagtgctattttttcctttaaaacattttattcttagcacactcttacgtcctaacagaatgtattcagtattcaaataaaagacattttggttcaaacctgtttctttcatgttagtttttcctctgaatacttaaatcatctttgacatttaaatggtcaattattaacgaanagggttgagaaggagggttnattnnagcaacactctactccctcaggagtagatattttttctctcttaaagagtaccattctgaaacaaaacaattttgtttcaaata

SEQ ID NO: 32620 - DNA, 363 bp, Macaca Mulatta
ccggcatccacctctggtgagggttggtgaaaagttggccagtggggtccccgtggggatgagctactgtcctgagtcataagtagtataggtggggcgaaggtcttatttctgtagaaatagtgtgactttaaggatttagattttgtatcttatgttttgttacatttaataatactgttaaaatgctgtttgtaaatgagattgttctactttttcctgtaggattttgttgtagagttttgctggttttgtaaaatggcttgaagaactttgtatttatactgtgattttgaacagatcatggagcattggaaggaaggctgtactttaatggtttgaaggaacgcaacagtatgatga

SEQ ID NO: 32621 - DNA, 297 bp, Macaca Mulatta
tagccttgatctgccctcaacctgggtcccagcgcatcaatgaccctaggcttccatcccccgtataggctttcagaagtcagtggaaagattattcatcgtacctaagaaatgcctgtttccaatatttgaccttgtggatctcaggctttggagagcctaataccaacccaccagcctgcagattttgtctttcccaaactgtgttccaggaatgggctcaagacttaagggctgacgctgtcctcgccccagactattagagtcctgtgtgctcacagagaacatgaagaagag

SEQ ID NO: 32622 - DNA, 666 bp, Macaca Mulatta
  misc_feature (1)...(666): n = A,T,C or G
gcctcccatggcgtgagggcgggctggtgctcacggcacttcctccttgctcccacccctggcagcagggaagggctttgcctgacaacacccagctttatgtaaatattctgcagttgttacttaggaagcatggggagggcaggggtgctccatggctcccagactgtctgtgctgaatgtattataaagccttgggggagatacccagccctgggatgctgtttggagacagaataaatgttttctcagnnnnnnnnnnnnnnnnnnnnnnnnnnnnnnnnnnnnnnnnnnnnnnnnnnnnnnnnnnnnnnnnnnnnnnnnnnnnnnnnnnnnnnnnnnnnnnnnnnnnnnnnnnnnnnnnnnnnnnnnnnnnnnnnnnnnnnnnnnnnnnnnnnnnnnnnnnnnnnnnnnnnnnnnnnnnnnnnnnnnnnnnnnnnnnnnnnnnnnnnnnnnnnnnnnnnnnnnnnnnnnnnnnnnnnnnnnnnnnnnnnnnnnnnnnnnnnnnnnnnnnnnnnnnnnnnnnnnnnnnnnnnnnnnnnnnnnnnnnnnnnnnnnnnnnnnnnnnnnnnnnnnnnnnnnnnnnnnnnnnnnnnnnnnnnnnnnnnnnnnnnnnnnnnnnnnnnnnnnnnnnnnnnnnnnnnnnnnnnnnnnnnnnnnnnnnnc

SEQ ID NO: 32623 - DNA, 487 bp, Macaca Mulatta
ctcaccccgaaagcacctggtctcagccaagagcaatgggcggctcacagtcttccctgatggcactctggaggtgcgctacgcccaggtacaggacaatggcacgtacctgtgcatcgcggccaatgcaggcggcaacgactccatgcccgcccacctgcatgtgcgcagctactcacccgactggccccatcagcccaacaagaccttcgccttcatctccaaccagccgggcgagggagaggccaacagcacccgagccactgtgcctttccccttcgacatcaatattttcatcatcgccaccaccatgggcttcatctctttcctgggcgtcgtcctcttctgcctggtgctgctgtttctctggagccggggcaagggcaacacgaagcacaacatcgagatcgagtatgtcccccgaaagtcggacgcaggcatcagctccgccgacgcgccccgcaagttcaacatgaagatgatatga

SEQ ID NO: 32624 - DNA, 737 bp, Macaca Mulatta
aatcccacaaggagcgcagaaaacacaagaaacacccaatggaggactgggagaaggatgaaggaaatttctgctgaagaaccagaaaaaaagaaagcacaacacctttcccacgcctcctctggagccttcccctggggagacagaacccagagaaacaagagagtccagaagtccccgaaccccaaaccacatccccccacacataatcctttgtacaaagctcctcttccctttttttacatacgcaagatcctcttggcaggtggagccaggtgtctgaaaagtccattctcgtctggctgaactctgggagcgtctcccagctgagggaagcacaagtagcaaagctcattggtctggtctcttgtttgccaggctgattgaagcaggccttgatgagggtgcatgagtgtatgtttgcattcacatgaaggaattgcttttcacaccagaaattcagacttagtcaatgtaggctgaattcctaaatccaggaagaagcctggacgtagggtcattagctttgggaacagaaggctacacagaagcacactgtttttgaacctgacaacagctctccctttaccctgggcttcagcccaagttccgtctttggtcttggtggataaacacatacagtgtggaaatccgatgtactgcattttagggatgtttttaggacaacctccctccatgccatcagagttaggagtgagaataatcaaagcaatatg

SEQ ID NO: 32625 - DNA, 647 bp, Macaca Mulatta
gcctgcccagtctttggagcgctcagtacagggcaggagctgctgcggtgttcccttggcaaatgagttttattttcatttgggacttggtgttttgtgcttgtctctgtgccccttatgggcttggtgaacatagctctgcctcttccctttgtatcagggccaccccttagcattggagccaaacaaacctgaattcaaacccccacacacactgaagtccccatcttcctccttggagccataatgaagagccaccacagtcaaatttctgttggtggcctgtcccctcccttcactatggctgattggaaccagaatggacatctgacctgtggtggcccatgctttccctgagaaatcagcagatccagctttagtttcttcctatggttggacccataacctgggaatatgggaagttttggtggccctcttctccctgccttattgactgagcaccagaaaaagccagtcagctaggaaggaagaatgaagcagggagaacctaagagttgctggagaatcccagtcactctggagtcccctctctgagcctttcctgaggccagctgcctcctgcctgggattgaacagatgctcctgaatcctcctaatgcatccccctgttaagataatctggcttg

SEQ ID NO: 32626 - DNA, 727 bp, Macaca Mulatta
cactttttctgtaacgtcgtcttctccatgaatgtcatatgctgcacggcctggatcttgaccctgtacgtgatcagcatcgacaggtaccttgggatcaggaggccactcacgtaccctatgaggcagaatgggaaatgcatggcgaagatgattcttctgccttctctccgcctctgtgactttacctcccactctttggttgggctcagaatgtaaatgatgataaggtgtgcttggtcagtcaagactttggctacacgatttactccaccgcagtggcatcctaatcttcatgtccgccatgcttttcatgtacaaccagatttacaaggcctccaggaaaagcgcggcctaacacaggttccccggcttccctcgagtgaagccagacagcagcagtcaccccgaatggcacagtgaagttccagaaggaggtggaagggtgtgtaaacccgtcgagactcctcaggcatgaaagggaaaatatctccatctttaagccggaacagaaagcggcgcctaccctggggatcatcgtctggcccttcaccgtctgctggctcccctttttcctcctcttgacagccagacccttcctctgtgacactgcctgcagctgcatcccaccgttaacggagaggatatttccatggctgggttatgcaaactctctctttaacccttttatgtatgacctgttcaaccgggacctgaggaccaccta

SEQ ID NO: 32627 - DNA, 452 bp, Macaca Mulatta
  misc_feature (1)...(452): n = A,T,C or G
agcggcggggggcggtgtcgtctctgtctagggacggcgacggagttggtggtccctgcgcgatggccacctcggtgttgtgctgcctgcggtgctgcagagacggcgggactggccacatccctctgaaggagatgccggccgtgcagctggatacgcagcacatgggnnnnnnnnnnnnnnnnnnnnnnnnnnnnnnnnnnnnnnnnnnnnnnnnnnnnnnnnnnnnnnnnnnnnnnnnnnnnnnnnnnnnnnnnnnnnnnnnnnnnnnnnnnnnnnnnnnggaatctggggtattggtgttgcaactcagaaggttaacttgaatcagattcctcttggccgagatgtgcacagtctggtgatgagaaatgatggagccctttaccacaacaatgaagagaaaaataggctgccagcaaacagtcttccacaggaaggagacgtggtgg

SEQ ID NO: 32628 - DNA, 827 bp, Macaca Mulatta
  misc_feature (1)...(827): n = A,T,C or G
acttcccactcccaaaccctgaaatgaacagtcttgctatctgtgactagttttatttttgtgcgtttaatagtctgagcagtctcaccttgtttacagatgtattgacaccatttgcttcaggccatgaagcactgtttctccctttttactatttataagattcctttttttcacaaaacttttaataaaaacaaattgtagaaataaacacattaaaatttgcccagctgtcgtctaagccctcttgattgacttgcccaagtggcaatagagttctaatatctataataaagggagatttgctattgttggtggaatgttgacccggtatgtagagaaagagtatgtgcctttgcctctttatacacacagagacccagggtgagggagtatttgttcccagtttttaagatagtannnnnnnnnnnnnnnnnnnnnnnnnnnnnnnnnnnnnnnnnnnnnnnnnnnnnnnnnnatattccacaggacatgccgctttattataaaacctgacacaggcatagtaccaagtatttcctccagggttgttaaaattgttttattgtagctccacattctgatgtcgtttaaaatgcctttgggggcagttcgaagcagttcttcatgccacttagtttgaaaataaaattctagatatgcaaatgattttcttagaaaacttcacaaaataaaannnnnnnnnnnnnnnccatagcacggtaatgaatgtggttatcaatcatatacttttttggattatattgtagcaaaaagttgattagcttacaaagattattaatagcaatgtatgtgttataatacaa

SEQ ID NO: 32629 - DNA, 2162 bp, Macaca Mulatta
  misc_feature (1)...(2162): n = A,T,C or G
aggtctcctcctacctggatctcattacttgggccgttttcaggatcgtttaatatggataatgattctggaatgtggctatacttactgctgtattaacattaaggnnnnnnnnnnnnnnnnnnnnnnnnnnnnnnnnnnnnnnnnnnnnnnnnnnnnnnnnnnnnnnnnnnnnnnnnnnnnnnnnnnnnnnnnnnnnnnnnnnnnnnnnnnnnnnnnnnnnnnnnnnnnnnnnnnnnnnnnnnnnnnnnnnnnnnnnnnnnnnnnnnnnnnnnnnnnnnnnnnnnnnnnnnnnnnnnnnnnnnnnnnnnnnnnnnnnnnnnnnnnnnnnnnnnnnnnnnnnnnnnnnnnnnnnnnnnnnnnnnnnnnnnnnnnnnnnnnnnnnnnnnnnnnnnnnnnnnnnnnnnnnnnnnnnnnnnnnnnnnnnnnnnnnnnnnnnnnnnnnnnnnnnnnnnnnnnnnnnnnnnnnnnnnnnnnnnnnnnnnnnnnnnnnnnnnnnnnnnnnnnnnnnnnnnnnnnnnnnnnnnnnnnnnnnnnnnnnnnnnnnnnnnnnnnnnnnnnnnnnnnnnnnnnnnnnnnnnnnnnnnnnnnnnnnnnnnnnnnnnnnnnnnnnnnnnnnnnnnnnnnnnnnnnnnnnnnnnnnnnnnnnnnnnnnnnnnnnnnnnnnnnnnnnnnnnnnnnnnnnnnnnnnnnnnnnnnnnnnnnnnnnnnnnnnnnnnnnnnnnnnnnnnnnnnnnnnnnnnnnnnnnnnnnnnnnnnnnnnnnnnnnnnnnnnnnnnnnnnnnnnnnnnnnnnnnnnnnnnnnnnnnnnnnnnnnnnnnnnnnnnnnnnnnnnnnnnnnnnnnnnnnnnnnnnnnnnnnnnnnnnnnnnnnnnnnnnnnnnnnnnnnnnnnnnnnnnnnnnnnnnnnnnnnnnnnnnnnnnnnnnnnnnnnnnnnnnnnnnnnnnnnnnnnnnnnnnnnnnnnnnnnnnnnnnnnnnnnnnnnnnnnnnnnnnnnnnnnnnnnnnnnnnnnnnnnnnnnnnnnnnnnnnnnnnnnnnnnnnnnnnnnnnnnnnnnnnnnnnnnnnnnnnnnnnnnnnnnnnnnnnnnnnnnnnnnnnnnnnnnnnnnnnnnnnnnnnnnnnnnnnnnnnnnnnnnnnnnnnnnnnnnnnnnnnnnnnnnnnnnnnnnnnnnnnnnnnnnnnnnnnnnnnnnnnnnnnnnnnnnnnnnnnnnnnnnnnnnnnnnnnnnnnnnnnnnnnnnnnnnnnnnnnnnnnnnnnnnnnnnnnnnnnnnnnnnnnnnnnnnnnnnnnnnnnnnnnnnnnnnnnnnnnnnnnnnnnnnnnnnnnnnnnnnnnnnnnnnnnnnnnnnnnnnnnnnnnnnnnnnnnnnnnnnnnnnnnnnnnnnnnnnnnnnnnnnnnnnnnnnnnnnnnnnnnnnnnnnnnnnnnnnnnnnnnnnnnnnnnnnnnnnnnnnnnnnnnnnnnnnnnnnnnnnnnnnnnnnnnnnnnnnnnnnnnnnnnnnnnnnnnnnnnnnnnnnnnnnnnnnnnnnnnnnnnnnnnnnnnnnnnnnnnnnnnnnnnnnnnnnnnnnnnnnnnnnnnnnnnnnnnnnnnnnnnnnnnnnnnnnnnnnnnnnnnnnnnnnnnnnnnnnnnnnnnnnnnnnnnnnnnnnnnnnnnnnnnnnnnnnnnnnnnnnnnnnnnnnnnnnnnnnnnnnnnnnnnnnnnnnnnnnnnnnnnnnnnnnnnnnnnnnnnnnnnnnnnnnnnnnnnnnnnnnnnnnnnnnnnnnnnnnnnnnnnnnnnnagaactatttggccaatacttgtgccctctggactttagtagactttggtaaatatgagaaaacatttgtgtaattattatataatgaattttgtaatgctttcttaaatgtgtaataggtgaattgccatataaagttaacagctatgtaatttttacatacttaagatagacatatcagtgttctaagtagtgataatggatcctgttgaaggttaatataannnnnnnnnnnnnnnnnnaatataatttatagtattttcagatgtgctgttttnnnnnnnnnnnnnnnnnnnnnnnnnnnnnnnnnnnntagtttgttttcatagacttcaattcacaaactttaaaaaacttttaataaaatattttctttcctttt

SEQ ID NO: 32630 - DNA, 279 bp, Macaca Mulatta
  misc_feature (1)...(279): n = A,T,C or G
tgacgtgccctcccacaggcctgtatggccccgagggcatcctacttgcaaggaagacgctgcgncngcagggcaaggcccgctggcagcaactgtgggagacccccacgctgctgtgggaagcgccaagactggggctggacacggcccagggcctggagctgctgagcctgctgggcgcactactggccctgggggccctgctgctgagcccactgcgtcaccccgtcgtctacctgctgctgtgggctgcctacctttcggcctgccaggcaagtg

SEQ ID NO: 32631 - DNA, 661 bp, Macaca Mulatta
accgcggctggcgtttggcggttgtgcatcggtgccctgtcggtgctggccgacttcctgggggccattgggtccggcactggaatccgtactggcagtcactattatttatcagtattttgaaatctttgtgaaagaacaggccgaagttggtggcatgggtgctttgtttttctgaatgttcagagacttcattctgtgcgtgtgaaagggagaacatctggacggatcgcttttgtcagatgacactggtgattccccttttctcccctcagtttcttgtttcaagtgctggctgacccgtctctgaaatgggcaccgagctaagtgtgtgtgcagcattagtacccgctgccttaaaactcaagtttacattattcatttaaaaaaagtacatctagtgttgcctgtaatgctggaaaccaatgtatctaccttgctgtgttaaatcatgacagtgagatggtgacatggattcgttttgcacataacattcaaaacacttaatattgcccccacttgtttaaaaataaatgtagttcaaattgccactttccagtatttttgagcttatttaatgagttctggaacatttatatctaatctatattttagataattactttttatacttttttaactcatggtatccctactcccc

SEQ ID NO: 32632 - DNA, 519 bp, Macaca Mulatta
ttccggagattccaggcagtgaccttgacgcatctgcagagcgtcgccagcaactacaacgtgtcctacaacgtcgatgtccggttccgcagcctggcggaagagagccaggccgtggctcaggcggtcaaccagtcacaggccgtggtgcagggggagctggtgcagctcaaggcctgggtgaggaagctgcagcgccgaagccggaagatagacatgcggctgcgggccttggacctcgccctgggcgagaggagccagcagcaggcccgggagaggaaggcgcacgaggctcagggggacgccctgcaggactcactggcacgcctggagggcctcgtccacagtcagggcgccaggctggctgctctggaggggtggctgcccgtggcccaccctggcatcacagccttggggccggccctggtcccagccccaacccagcctggtctgctgggcccgagctccctgaagcttcagagggacaggcaggagctccaagctgcatgcgagcacagg

SEQ ID NO: 32633 - DNA, 118 bp, Macaca Mulatta
ttagagttggaaaggctcctgggtaaatttggacaggatgcacaaagaatagaagattctgtgttgattggatgctctgagcagcaggaggcatggtatgctctggatctaggtctgg

SEQ ID NO: 32634 - DNA, 685 bp, Macaca Mulatta
  misc_feature (1)...(685): n = A,T,C or G
gggatttatcatccaaatattaacagtaatggcagcatttgtctcgatattctaagatcacagtggtcgcctgctttaacaatttctaaagttcttttatccatttgttcactgctatgtgatccaaacccagatgaccccctagtgccagagattgcacggatctataaaacagacagagataagtacaacagaatatctcgggaatggactcagaagtatgccatgtgatgctaccttaaagtcagaataacctgcattatagctggaataaactttaaattactgttccttttttgattttcttatccggctgctcccctgtcagacctcatcnnnnnnnnnnnnnnnnnnnnnttacctccctccattcattcacatgctcatctgagaagacttaagttcttccagctttggacaataactgcttttagaaactgtaaagtagttacaagagaacagttgcccaagactcagnnnnnnnnnnnnnnnnnnnnnnnngcatgtgtataatgtgggccatgtcttcactctnacatgctgaaaaaatcatctgagggggaggagatgatgctcattgtacatcaaaggaacggctttatttaccacatcattcctgtttagcttccccgttaaaattgaggtccggaaactttagccaaacgatggctggaatggttgaatt

SEQ ID NO: 32635 - DNA, 836 bp, Macaca Mulatta
  misc_feature (1)...(836): n = A,T,C or G
acacactcactgcatgctatatgtcacctgaagagtacgtattagctgccatcagcctctacttggatatcatcaatctattcctgcacctgttacggtttctggaagcagttaataaaaagtaattaaaagtatctcagctcaactgaagnnnnnnnnnnnnnnnnnnnttaatgagaaaaaaaggattaaaaaagtaatcagaagcagtatatagaaactgtttcattaagtaataaagtttgaaacaatgtttaaatactgttacaatctttatttgtatcatatgtaattttgagagttttaaaatcttactgttctttatgatacctcatttctaaatccttgatttaggatctcagttaagagctatcaaaaattctattaaaaatgcttttctggctgtgcacagtggctcacgcctttaatcccaccactttgtgagacgaaggcaggtggatcacgaggtcaagaggttnnnnnnnnnnnnnnnnnnnnnnnnnnnnnnnnnnnnnnnnnnnnnnnnnnnnnnnnnnnnnntgtggtggcacgtnnnnnnnnnnnnnnnnnnnnnagacgctgaggccagagaatcgcttgaacctcggagatggggatggaggttgcgttgagcccaagatcacgcgactgaactcagcttgggacaagtgagatcannnnnnnnnnnnnnnnnnnnnnnnctccaattacagcaagctgtgtggatcaaaaatatagaaaaatctgcngtacattcgataaatgtcgacgaaactctaagaactctgatccatagaataaatccaatcnttatgtagtgcttatgaaagccaaaa

SEQ ID NO: 32636 - DNA, 183 bp, Macaca Mulatta
tgggccctctggggaggcccaagcagcttgttttgcaaaggcccaagtcctcctgctaggaaaagcttttgcatgtgccctgaatgtgtctctgtaaacatagctgttatttattattgtgatgttgggaccgttagcccatagcggatgcctcctcaggaatattctcgatttaataagcta

SEQ ID NO: 32637 - DNA, 489 bp, Macaca Mulatta
cgccacccttgaacaagctgaagctggtgcactcgaacctggaagatgaccctgaggagatccggatggaattcataaagtatttaaaaagcatcatcaactccatgtctgagagcagagacagggaggagatgtcaattatgacctagccagccttcacctgggactgccacctccccagtgaaatcagcatgtttcttggtgcagatgtgaaatcacatccagctcctgatgttttcttctccctgtgactgcagaggaagtgttcctacctgcaggaaggcacctgtcacacagggcattcactcagaccatctatgctctgtcctgagttcagtttagaaagtcctatcatcgaattcagatttcctggccccagaacttcccaaagacctataaaatggagggatttaccaccttcacatatgtccagttacatagtttgtggaattgtaaccgttgcagcccaatgatacaacagtagtttaa

SEQ ID NO: 32638 - DNA, 435 bp, Macaca Mulatta
agagggtggtaggggctggagggcagagtcgggcctgaccagggtgggacctcgcgacccaccctgtctggcccccagctcggaggagcttctacgtgtatgcgggcatcctggcactgctcaacttactgcaggggctggggagtgtgctgctctgcttggacatcatcgaggggctctggtgcgtgggggctgcagggtgtctacctcgtgggggcatgggaagtgggcggcagggtgtccacccactgggggcatggggaggtgtggagtcagcatagggctgggaggccctgcgctgacctgtcttctccgcagctgtgtagatgccacaaccttcctgtacttcagcttctttgctccgctcatctacgtggctttcctccggggcttctttgggtgagtctgtggccgccgtgcggcaccgcgtggctg

SEQ ID NO: 32639 - DNA, 631 bp, Macaca Mulatta
  misc_feature (1)...(631): n = A,T,C or G
ntatggaagtgggacccaaaaagacagccaaggtgttagagagaggtgggcttcttgtggcagttaggagagactggaaatattccatttcatcaatggaggctctgattggaagcttccgtctggcgcttggaggtgacacagaacttggattctggagcagtttgggaggtgctgagaggttcccttaggaaggggtgggaggatgcagacaggcagcggatttgcgtgtgggatgaggaggtgggagctcctgatgtctgaagatcctgtctctccccagctcttccccagggtgaagcctcaaaggagtaaagtctagcaggatagaaggaggtttctgaggccgacagaaacaagcaatcctgccttccctgcagaccaccccctgttttttgctgcctttatctgcacccctcaccctgctggtggtggttctcgccaccggttctctgttctcccggaagttcaggggagaaggaggaccccagccttaagtttaggaatctgccttagccttgggaggtccgggaggggctggaaatcactggggagaggaaaccacttccttctgccaaatcagatcccgtccaaagtgcctcccatgcctactgccaccgtcacatccccc

SEQ ID NO: 32640 - DNA, 945 bp, Macaca Mulatta
ggggaccctacctgtcccgcagccggctcctctcgggtgcgccagaacttccaccccgactctgaggctgccatcaaccgccagatcaacctcgagctctatgcgtcctacgtgtacttgtccatggcctattacttctcccgggatgacgtggccttgaacaacttcgccaggtatttccttcaccagtcccgagaggagacagagcacgcggagaagctgatgaggctgcagaaccagcgaggaggccggatctgcctgcaggacatcaagaagccggaccaggacgactggaaaagcgggctgcatgccatggagtgtgctctactcttggaaaagaatgtgaaccagtcgttgctggaattgcacactctagcctctgacaaaggtgacccccatttgtgcgacttcctggaaacctactacctgaatgagcaggtgaagtctatcaaagaactaggtgaccacgtgcacaacttagtgaagctgggggccccggatgctggcctggcggagtacctttttgacatacattcccttggaaatgaaaacaagcagaactaagcaacgggctgccttcctcccacgtcattgggttcaaagaccagagtcagctgtctcctgctttcttgcccttaaaatcacctccatctttatatttttctgttatactattcttgcaataaagtgatttgtagaaaaaaaaagttttgcccatgtttaacaaggactttttattaaccatcaagacacttattttcccagctcgaagaatagcccagataactatggtatgaaaaggactccaaaaagctactgaaagagggtgcaaactaacgttctccagttgccaagtattatcagaatatgaacctacacttaaattctgtgatttttaattcaacaagtgcctgctatattcaatgccttatgcaaaacgctaaa

SEQ ID NO: 32641 - DNA, 1256 bp, Macaca Mulatta
  misc_feature (1)...(1256): n = A,T,C or G
ggcccggcgagccgccaaggaggccaaggaggcccctgcccagcccgcacctgagaaggtcaaggtggaggtgaagaagtttgtgaagatcggccgcccaggctacaaannnnnnnnnnnnnnnnnnnnnnnnnnnnnnnnnnnnnnnnnnnnnnnnnnnnnnnnnnnnnnnnnnnnnnnnnnnnnnnnnnnnnnnnnnnnnnnnnnnnnnnnnnnnnnnnnnnnnnnnnnnnnnnnnnnnnnnnnnnnnnnnnnnnnnnnnnnnnnnnnnnnnnnnnnnnnnnnnnnnnnnnnnnnnnnnnnnnnnnnnnnnnnnnnnnnnnnnnnnnnnnnnnnnnnnnnnnnnnnnnnnnnnnnnnnnnnnnnnnnnnnnnnnnnnnnnnnnnnnnnnnnnnnnnnnnnnnnnnnnnnnnnnnnnnnnnnnnnnnnnnnnnnnnnnnnnnnnnnnnnnnnnnnnnnnnnnnnnnnnnnnnnnnnnnnnnnnnnnnnnnnnnnnnnnnnnnnnnnnnnnnnnnnnnnnnnnnnnnnnnnnnnnnnnnnnnnnnnnnnnnnnnnnnnnnnnnnnnnnnnnnnnnnnnnnnnnnnnnnnnnnnnnnnnnnnnnnnnnnnnnnnnnnnnnnnnnnnnnnnnnnnnnnnnnnnnnnnnnnnnnnnnnnnnnnnnnnnnnnnnnnnnnnnnnnnnnnnnnnnnnnnnnnnnnnnnnnnnnnnnnnnnnnnnnnnnnnnnnnnnnnnnnnnnnnnnnnnnnnnnnnnnnnnnnnnnnnnnnnnnnnnnnnnnnnnnnnnnnnnnnnnnnnnnnnnnnnnnnnnnnnnnnnnnnnnnnnnnnnnnnncagccccgggggtccatcctcccccatcagcgggggttcacccccaggccccaggggtacacccagcagcccctgctgttcaccctcaggccccgggggtgcacccaccagccccagggatgcaccctcaggccccgggagtccacccccaacctcccggggtccatccatcagctcctggggtccaccctcagcctcctggagttcacccctcaaatcctggggnnnnnnnnnnnnnnnnnnnnnnnnnnnnnnnnnnnnnnnnnnnnnnnnnnnnnnnnnnnnnnnnnnnnnnnnnnnnnnnnnaaccaactgagaagctgctccctcccccagcaagctcagcgccaggtgctcctgccttttgccatcgagagaaggctgctcttttgtaccgccccctgctcattaaacagccttcccc

SEQ ID NO: 32642 - DNA, 4202 bp, Macaca Mulatta
  misc_feature (1)...(4202): n = A,T,C or G
atgaatccagaagaacaaatcgtgacatggcttatatctttgggagttttagattcccctaaaaagaccatctgtgatccggaggagtttttaaagtcctcgctgaaaaatggggtagttctgtgcaaactgatcaacagactcatgcccggctctgtggaaaagnnnnnnnnnnnnnnnnnnnnnnnnnnnnnnnnnnnnnnnnnnnnnnnnnnnnnnnnnnnnnnnnnnnnnnnnnnnnnnnnnnnnnnnnnnnnnnnnnnnnnnnnnnnnnnnnnnnnnnnnnnnnnnnnnnnnnnnnnnnnnnnnnnnnnnnnnnnnnnnnnnnnnnnagatcagctatcagaaagaccatgtggacgttcctcttctcttagtactgctaataattctcagacaaacccacagggagcagtttctagcacagtttcagggctgcaaaggcagtcaaagacagtggnnnnnnnnnnnnnnnnnnnnnnnnnnnnnnnnnnnnnnnnnnnnnnnnnnnnnnnnnnnnnnnnnnnnnnnnnnnnnnnnnnnnnnnnnnnnnnnnnnnnnnnnnnnnnnnnnnnnnnnnnnnnnnnnnnnnnnnnnnnnnnnnnnnnnnnnnnnnnnnnnnnnnnnnnnnnnnnnnnnnnnnnnnnnnnnnnnnnnnnnnnnnnnnnnnnnnnnnnnnnnnnnnnnnnnnnnnnnnnnnnnnnnnnnnnnnnnnnnnnnnnnnnnnnnnnnnnnnnnnnnnnnnnnnnnnnnnnnnnnnnnnnnnnnnnnnnnnnnnnnnnnnnnnnnnnnnnnnnnnnnnnnnnnnnnnnnnnnnnnnnnnnnnntctgagtactgtggaggttacgtctttactgggaaacttcgaggaagtatgcacatttcaacagacactctgccaagccttggaagaatgttcaaagtngtttccagaaaaccagcaaaaagtaggaggttgtctactgagtctcatgcctcattttaaatctatgtatctggcttactgtgcaaaccatccttcagctgtaaatgtactcactcagcacagnnnnnnnnnnnnnnnnnnnnnnnnnnnnnnnnnnnnnnnnnnnnnnnnnnnnnnnnnnnnnnnnnnnnnnnnnnnnnnnnnnnnnnnnnnnnnnnnnnnnnnnnnnnnnnnnnnnnnnnnnnnnnnnnnnnnnnnnnnnnnnnnnnnnnnnnnnnnnnnnnnnnnnnnnnnnnnnnnnnnnnnnnnnnnnnnnnnnnnggggcaatgtcaagatctgaggaagagaaaacagctggagttacagatactgtccgaacctattcaggcatgggaaggagaagatattaaaaacttgggaagtgtgatttttatgtcacaagtaatggtgcagtatggagcatgtgaggnnnnnnnnnnnnnnnnnnnnnnnnnnnnnnnnnnnnnnnnnnnnnnnnnnnnnnnnnnnnnnnnnnnnnnnnnnnnnnnnnnnnnnnnnnnnnnnnnnnnnnnnnnnnnnnnnnnnnnnnnnnnnnnnnnnnnnnnnnnnnnnnnnagggaaaaataccaatagcaggaacggtggtgactagattagatgaaattgaagggaatgactgcacatttgaaatcactggtannnnngtggagagaattgtggtccattgcaacaacaaccaggacttccaggaatggttagagcagctgaacagactgatcagaggacctgcttcttgcagttcattatccaaaacctcatcgtcatcatgcagtgctcattcntcttttagctctactggacagccccgaggacccttggagcctcctcaaattataaaaccgtggagtttaagttgtctacgacctgcacctccacttagaccatcagcagcactaggttataaagaggtaattttgctacctatggnnnnnnnnnnnnnnnnnnnnnnnnnnnnnnnnnnnnnnnnnnnnnnnnnnnnnnnnnnnnnnnnnnnnnnnnnnnnnnnnnnnnnnnnnnnnngtacagctgctctggaagaggatgctcagatccttaaagtgattgaagcctactgcaccagtgcaaactttcaacaaggccatggctcaagtangtactcgaaaagattccattccgcaagtcctactccctgaggaagagaaactcatcattgaagaaaccagaagcaacggccagaccatcatggaagaaaagnnnnnnnnnnnnnnnnnnnnnnnnnnnnnnnnnnnnnnnnnnnnnnnnnnnnaggaaaataaaagaatgaagcaatgcctggaagaagaattgaagtcaagaagggacctagaaaagctggtgcggaggcttttgaagcaaacagatgagtgtattcgagccgagtccagtagcaagacctcaattcttccataaccatcactgtgccaccgggtggagtgtgccttcagggcatcttgaaatgtcccgctgaatgatttgactcagtttgctcacttctttggcttttgttttgtgtttgagnnnnnnnnnnnnnnnnnnnnnnnnnnnnnnnnnnnnnnnnnnnnnnnnnnnnnnnnnnnnnnnnnnngtgcgcgcctgggcatttgctgttgtttggttattggttggctgttcatttctttttcaacaggggaaaaagcaggaggtggtggtagaaatggccccagagtcttttccattcagtgagaaagagaaagggaacacaggccagttacttcaaaggtcttcagattgccttcagttcacagtgcctctgcaacagccattgccctcaggtcacattctttgggctggctgcccttgcaaagcagctgggccaggcttattaaatgtgaacccaacttttcccccagtgctttcctgtacctgcaagccctctagtacttaatttactgaaggcagatattccagactatggctagagtaggatgaaggacaacacatctgcccagtgatccagctgccccttccttagaccatcacatgccctcccctcaaccacagggttttaaaattnnnnnnnnnnnnnnnnnnnnnnnnnnnnaaaactgtagttcccttattctttttatgtcatgtaaactgtactcacgggggcagaagctctggtcacccacaccaacatcaaatccatcagcaaattctactggacaatcccccctttcagtagcagagttgaccgccttttcccattgcatgataggttttctttccctcatctttctgccctagtgtgtaaatttttttatttcccccagtgcttttagcccagccgtaccaaagtggtgtgtaaactagtatgtatgtgctttgcttacttttaaaaaaatgtagttagactgtgagcagttactttatgtatgttgcatattcaaactgtgaccttttatccttcaaaacaatctgtattaaggagatattgtgccctagtagacagctttcattcactttattactctctcatatatgctgtgagaagttgtaatattcattggcctctttgggtgggactctaagcagtgtttacagaaatatgcttctggtccaatttgtacatccagaacaaaagggcccctctaatagctgtgtgctggattatttggactgattaactcaagttgctcattgaatcgcaccatccactttatcccagaaactagaaccgtgagaaaccgggtttagaagacagtcacagaacagcacacatccaaattcagcaccgttgaaagttggcctaaggctcagtgccactcacccctctcttccccaaagacaagagaaatttggccagatggggaaggtcactggaaagtgaggccaaagggctgatcaaaattgcctttataataaatttgatggatgcctataagtgagggttttgcaaatgtttaaaaaccaaacttgaagccaggcatggtggcctacacctgtggtcccagctactcaggaggctgaggtgggaggatcatttgagcccaggaggtcaaggctgcagtgagctgtgatgacaccactgcattccaacctgggtaacagagagacacccctgtctctgaaaaagcaaaacttgaagtttgaaacccccagcttgcgaggagccctttttatttttggtactgagactctcaaggtcccatagctatgtggtacagggctattgtctgcttgctgcacagcagaaattataccatccacag

SEQ ID NO: 32643 - DNA, 103 bp, Macaca Mulatta
gttttattaatgtccacttaagaaaggattttgtatcagaacaattgaccagtctcctagttaatggagttcaactacctgctgtgggagagaataaaaaggt

SEQ ID NO: 32644 - DNA, 601 bp, Macaca Mulatta
ctctgtgttccctcttctacagctggacagaaagaagtcaatgtcacgaaatgattttctattgtagataccttatcccttgcacttctctgaatctgtcctttagtggattcttgtgattttccttccaagtgtttcagttgtatgacagtcagtattgacaataaaatggcttttaattatttgttgtttgtttacgccctgttcctcagttattattactgtggttctgattaactactggaaattatatttgattatatcaccaattagttaaatcagtgctttgactcacccttatctgttctgttcaaaactattctttcaaagaacccgttagtattgtttacagggttacagtttttcttatatgctttcatcaccctcatacccccttttttaaaagcgtttattttgttcggagtaccttcgtaaaacatttgaaaataaaagatcattcttcacccatatgttctttggattctggcaacacgtttttctctatcctaggtatttctgaagggtgtgtggatattttgcatgtgagctttgagcgtattgcgtattgtgtttaatatgaattcaaccattcacgcatttt

SEQ ID NO: 32645 - DNA, 190 bp, Macaca Mulatta
tgaacgcgcagctgaccatggaagcgatcggcgagctgcacggggtgagccatgagccggtgcccgcccctgccgacctgctgggcggcagcccccacgcgcgcagctccgtggcgcaccgcggcagccacctgcccccggcgcacccgcgctccatgggcatggcgtccctgctggacggcggcagcgg

SEQ ID NO: 32646 - DNA, 741 bp, Macaca Mulatta
  misc_feature (1)...(741): n = A,T,C or G
gtatatactaagaaatatgaccaactcttagtcatccataacagtgtagtgtagagagtgagttcaggacaaactagaaaaatataaaaaactgaagtcagatcttcatgtntgagatagggaaaatgtaacaatgctttatgaataaggggagtgggaattattccctggatccctgaaaacctgaagcatgggctgcatcaccccttcatctcctccaggctctgacggcaacatctcagggtctactcaactgtggagtatatggctggacgcagcacaaattccaccaactaaagcaggaggctcggcgtgatgcagatacccagacaccattattatgctcacagaagagattctatagcaggggcttaaattcactggaatccgcccttacttttcctaccagtacttctaccattctttgaaactacaatactggaacatccaggaactggagttattctgcgctaatggattggaaagaatgttgggaaaggacatcttaaatcttttctaactatgccctaaactgcagaactcaaaggaaatatagtgccattggttggtagtcattctaggtgaactggcagtatctctgcggttattcccagatttactagtgatccttaaagtctaggggttcagggagaggaagacactttccatctcagagatagactcatgttaccttgatggatgttagatttgtccaagtcttttctagaaaaaataaattct

SEQ ID NO: 32647 - DNA, 285 bp, Macaca Mulatta
  misc_feature (1)...(285): n = A,T,C or G
atggaggtggtactgatctttgtatgcagcctgctggtccctgtggtcctggccagtgcagctaagaaggagaaggaaatagatccttttcatgataactaccagaccctgaggattgggggactggtgtatgatatggtcctcttcctgcnnnnnnnccatcatctaagtcacagatgcaagtgcagtttcaatcagaagccccaggatccaggagatgaggaagctcaggtggagaacttcatcattgcaaatgcaaaagagccccagatagcaaaaatctga

SEQ ID NO: 32648 - DNA, 2530 bp, Macaca Mulatta
  misc_feature (1)...(2530): n = A,T,C or G
gggcttgcagtttccaaaccagacatgatatctcatttggagaatgggaaaggaccatgggtgacaatgagagaaatttcaagaattccctatcctggngggttatggaaatggaatgataggatattgagattacaaaataatcaggagaatcatttgagtcaaagaataattccactcaagaagactcccactagtcaaagaggctttagatttgaatctgttcttattccagaaccaggcattgccaccgaagagcttcacagcagatgccaaacacaagaggaaaatttcacagagaatttaaatttggttacagatacccgtttggggaagataatttgcaaggagatgaaaggcagcaaagccataaggcagacttcagaacttactttggggaaaaaatccaataatagggaaaaaccctacaaatgtggtacatgcgaaaaggcctttcgttataggtcattgctcattcaacatcaaagaactcatactaaagaaaaaccttatgaatgtaatgaatgtgggaaaacattcagccagccttcatatctcagtcagcacaaaaaaatccacactggagaaaaaccctataaatgtaatgaatgtggaaaggccttcattgcttcctcgtcacttatggtacatcagagaattcacactaaagagaaaccttatcagtgtaatgtgtgtgggaaatcttttagccagtgtgcccgtcttaatcagcaccagagaattcaaactggagagaaaccctataaatgtaatgaatgcgggaaagcttttagtgataaatcaaanattcagccagccttctatctcagtcagcacaaaaaaatccacactgggagaaaaaccctataaatgtaatgaatgtggaaaggccttcattgcttcctcatcacttatggtacatcagagaattcacactaaagagaaaccttatcagtgtaatgtgtgtgggaaatcttttagccagtgtgcccgtcttaatcagcaccagagaattcaaactggagagaaaccctataaatgtaatgaatgcgggaaagcttttagtgataaatcaaaacttgcaagacatcaggaaactcacaatgnnnnnnnnnnnnnnnnnnnnnnnnnnnnnnnnnnnnnnnnnnnnnnnnnnnnnnnnnnnnnnnnnnnnnnnnnnnnnnnnnnnnnnnnnnnnnnnnnnnnnnnnnnnnnnnnnnnnnnnnnnnnnnnnnnnnnnnnnnnnnnnnnnnnnnnnnnnnnnnnnnnnnnnnnnnnnnnnnnnnnnnnnnnnnnnnnnnnnnnnnnnnnnngagtttaggcatatttcatccctcattgcacatcagagaatgcacactggagaaaaaccatatgaatgccaccagtgtggtaaagccttcagccagcgtgcacaccttactatacatcagagaattcatactggagagaaaccctataagtgtgatgactgtgggaaagactttagtcagcgtgcacaccttaccatccatcaaaggacacatactggagagaaaccatataaatgcttggaatgtggtaaaaccttcagtcacagttcatcactgattaatcatcagagagttcatactggagaaaaaccttatatatgcaatgaatgtgggaagactttcagtcagagtacacaccttcttcagcatcaaaaaatacatactggaagaaaccnnnnnnnnnnnnnnnnnnnnnnnnnnnnnnnnnnnnnnnnnnnnnnnnnnnnnnnnnnnnnnnnnnnnnnnnnnnnnnnnnnnnnnnnnnnnnnnnnnnnnnnnnnnnnnnnnnnnnnnnnnnnnnnnnnnnnnnnnnnnnnnnnnnnnnnnnnnnnnnnnnnnnnnnnnnnnnnnnnnnnnnnnnnnnnnnnnnnnnnnnnnnnnnnnnnnnnnnnnnnnnnnnnnnnnnnnnnnnnnnnnnnnnnnnnnnnnnnnnnnnnnnnnnnnnnnnnnnnnnnncatcagaggattcatactggagagaaaccttttagatgtaatgaatgtggaaaagcctnnnnnnnnnnnnnnnnnnnnnnnnnnnnnnnnnnnnnnnnnactggagagaaaccctataagtgtgatgactgtgggaaagactttagtcagcgtgcacaccttaccatccatcaaaggacacatactggagagaaaccatataaatgcnnnnnnnnnnnnnnnnnnnnnnnnnnnnnnnnnnnnnnnnnnnnnnnnnnnnnnnnnnnnnnnnnnnnnnnnnnnnnnnnnnnnnnnnnnnnnnnnnnnnnnnnnnnnnnnnnnnnnnnnnnnactggagaaaaaccctataaatgtaatgaatgtggaaaggccttcattgcttcctcgtcacttatggtacatcagagaattcacactaaagagaaaccttatcagtgtaatgtgtgtgggaaatcttttagccagtgtgcccgtcttaatcagcaccagagaattcaaactggagagaaaccctataaatgtaatgaatgcgggaaagcttt

SEQ ID NO: 32649 - DNA, 2662 bp, Macaca Mulatta
  misc_feature (1)...(2662): n = A,T,C or G
tggtgggtgaaggaccctaccttatctcagatctggaccagcgaggccggcggagatcctttgcagacagatatgaccccagcctgaagaccatgatcccagtgcgaccctgtgcaaggtnnnnnnnnnnnnnnnnnnnnnnnnnnnnnnnnnnnnnnnnnnnnnnnnnnnnnnnnnnnnnnnnnnnnnnnnnnnnnnnnnnnnnnnnnnnnnnnnnnnnnnnnnnnnnnnnnnnnnnnnnnnnnnnnnnnnnnnnnnnnnnnnnnnnnnnnnnnnnnnnnnnnnnnnnnnnnnnnnnnnnnnnnnnnnnnnnnnnnnnnnnnnnnnnnnnnnnnnnnnnnnnnnnnnnnnnnnnnnnnnnnnnnnnnnnnnnnnnnnnnnnnnnnnnnnnnnnnnnnnnnnnnnnnnnnnnnnnnnnnnnnnnnnnnnnnnnnnnnnnnnnnnnnnnnnnnnnnnnnnnnnnnnnnnnnnnnnnnnnnnnnnnnnnnnnnnnnnnnnnnnnnnnnnnnnnnnnnnnnnnnnnnnnnnnnnnnnnnnnnnnnnnnnnnnnnnnnnnnnnnnnnnnnnnnnnnnnnnnnnnnnnnnnnnnnnnnnnnnnnnnnnnnnnnnnnnnnnnnnnnnnnnnnnnnnnnnnnnnnnnnnnnnnnnnnnnnnnnnnnnnnnnnnnnnnnnnnnnnnnnnnnnnnnnnnnnnnnnnnnnnnnnnnnnnnnnnnnnnnnnnnnnnnnnnnnnnnnnnnnnnnnnnnnnnnnnnnnnnnnnnnnnnnnnnnnnnnnnnnnnnnnnnnnnnnnnnnnnnnnnnnnnnnnnnnnnnnnnnnnnnnnnnnnnnnnnnnnnnnnnnnnnnnnnnnnnnnnnnnnnnnnnnnnnnnnnnnnnnnnnnnnnnnnnnnnnnnnnnnnnnnnnnnnnnnnnnnnnnnnnnnnnnnnnnnnnnnnnnnnnnnnnnnnnnnnnnnnnnnnnnnnnnnnnnnnnnnnnnnnnnnnnnnnnnnnnnnnnnnnnnnnnnnnnnnnnnnnnnnnnnnnnnnnnnnnnnnnnnnnnnnnnnnnnnnnnnnnnnnnnnnnnnnnnnnnnnnnnnnnnnnnnnnnnnnnnnnnnnnnnnnnnnnnnnnnnnnnnnnnnnnnnnnnnnnnnnnnnnnnnnnnnnnnnnnnnnnnnnnnnnnnnnnnnnnnnnnnnnnnnnnnnnnnnnnnnnnnnnnnnnnnnnnnnnnnnnnnnnnnnnnnnnnnnnnnnnnnnnnnnnnnnnnnnnnnnnnnnnnnnnnnnnnnnnnnnnnnnnnnnnnnnnnnnnnnnnnnnnnnnnnnnnnnnnnnnnnnnnnnnnnnnnnnnnnnnnnnnnnnnnnnnnnnnnnnnnnnnnnnnnnnnnnnnnnnnnnnnnnnnnnnnnnnnnnnnnnnnnnnnnnnnnnnnnnnnnnnnnnnnnnnnnnnnnnnnnnnnnnnnnnnnnnnnnnnnnnnnnnnnnnnnnnnnnnnnnnnnnnnnnnnnnnnnnnnnnnnnnnnnnnnnnnnnnnnnnnnnnnnnnnnnnnnnnnnnnnnnnnnnnnnnnnnnnnnnnnnnnnnnnnnnnnnnnnnnnnnnnnnnnnnnnnnnnnnnnnnnnnnnnnnnnnnnnnnnnnnnnnnnnnnnnnnnnnnnnnnnnnnnnnnnnnnnnnnnnnnnnnnnnnnnnnnnnnnnnnnnnnnnnnnnnnnnnnnnnnnnnnnnnnnnnnnnnnnnnnnnnnnnnnnnnnnnnnnnnnnnnnnnnnnnnnnnnnnnnnnnnnnnnnnnnnnnnnnnnnnnnnnnnnagattggggagcggggcctcaacctctccggggggcagaggcagaggatcagcctggcccgcgccgtctactctgaccgtcaactctacctgctggacgaccccctgtcggccgtggacgcccatgtggggaagcacgtctttgaggagtgcattaagaagacgctcagggggaagacagtcgtcctggtgacccaccagctacannnnnnnnnnnnnnnnnnnnnnnnnnnnnnnnnnnnnnnnnnnnnnnnnnnnnnnnnnnnnnnnnnnnnnnnnnnnnnnnnnnnnnnnnnnnnnnnnnnnnnnnnnnnnnnnnnnnnnnnnnnnnnnnnnnnnnnnnnnnnnnnnnnnnnnnnnnnnnnnnnnnnnnnnnnnnnnnnnnnnnnnnnnnnnnnnnnnnnnnnnnnnnnnnnnnnnnnnnnnnnnnnnnnnnnnnnnnnnnnnnnnnnnnnnnnnnnnnnnnnnnnnnnnnnnnnnnnnnnnnnnnnnnnnnnnnnnnnnnnnnnnnnnnnnnnnnnnnnnnnnnnnnnnnnnnnnnnnnnnnnnnnnnnnnnnnnnnnnnnnnnnnnnnnnngggtacctcctttctctcttcactgtgttcctcttcctcctgatgattggcagctctgccttcagcaactggtggctgggtctctggttggacaagggctcacggngatgacttgtgtcccccagggcaacacgaccacgtgtgaggacggcgcggtgctggaacacatcagacatcatgtgtaccaatgagtgtacgctgcaaccatggtgtccgtgctggtgtttggagtcaccaaaggcttcgtcttcaacaagaccacactgatggcatcctcctgtctgcatgacatggtgtttaataa

SEQ ID NO: 32650 - DNA, 1718 bp, Macaca Mulatta
  misc_feature (1)...(1718): n = A,T,C or G
agagctgctaaagaaaatgaggaggaggcatcagtggacacctctcagnnnnnnnnnnnnnnnnnnnnnnnnnnnnnnnnnnnnnnnnnnnnnnnnnnnnnnnnnnnnnnnnnnnnnnnnnnnnnnnnnnnnnnnnnnnnnnnnnnnnnnnnnnnnnnnnnnnnnnnnnnnnnnnnnnnnnnnnnnnnnnnnnnnnnnnnnnnnnnnnnngtgatgaagatgcttaccgtctttataacctggatgtctatggataccaaatatatgataaaatgggcatttatggttcagtaccttatctcctggcccacaaactgggcagaactataggcattttctggctgaatgcctcagaaacactagtggagatcaatacagagcctgcagtagannnnnnnnnnnnnnnnnnnnnnnnnnnnnnnnnnnnnnnnnnnnnnnnnnnnnnnnnnnnnnnnnnnnnnnnnnnnnnnnnnnnnnnnnnnnnnnnnnnnnnnnnnnnnnnnnnnnnnnnnnnnnnnnnnnnnnnnnnnnnnnnnnnnnnnnnnnnnnnnnnnnnnnnnnnnnnnnnnnnnnnnnnnnnnnnnnnnnnnnnnnnnnnnnnnnnnnnnnnnnnnnnnnnnnnnnnnnnnnnnnnnnnnnnnnnnnnnnnnnnnnnnnnnnnnnnnnnnnnnnnnnnnnnnnnnnnnnnnnnnnnnnnnnnnnnnnnnnnnnnnnnnnnnnnnnnnnnnnnnnnnnnnnnnnnnnnnnnnnnnnnnnnnnnnnnnnnnnnnnnnnnnnnnnnnnnnnnnnnnnnnnnnnnnnnnnnnnnnnnnnnnnnnnnnnnnnnnnnnnnnnnnnnnnnnnnnnnnnnnnnnnnnnnnnnnnnnnnnnnnnnnnnnnnnnnnnnnnnnnnnnnnnnnnnnnnnnnnnnnnnnnnnnnnnnnnnnnnnnnnnnnnnnnnnnnnnnnnnnnnnnnnnnnnnnnnnnnnnnnnnnnnnnnnnnnnnnnnnnnnnnnnnnnnnnnnnnnnnnnnnnnnnnnnnnnnnnnnnnnnnnnnnnnnnnnnnnnnnnnnnnnnnnnnnnnnnnnnnnnnnnnnnnnnnnnnnnnnnnnnnnnnnnnnnnnnnnnnnnnnnnnnnnnnnnnnnnnnnnnnnnnnnnnnnnnnnnnnnnnnnnnnnnnnnnnnnnnnnnnnnnnnnnnnnnnnnnnnnnnnnnnnnnnnnnnnnnnnnnnnnnnnnnnnnnnnnnnnnnnnnnnnnnnnnnnnnnnnnnnnnnnnnnnnnnnnnnnnnnnnnnnnnnnnnnnnnnnnnnnnnnnnnnnnnnnnnnnnnnnnnnnnnnnnnnnnnnnnnnnnnnnnnnnnnnnnnnnnnnnnnnnnnnnnnnnnnnnnnnnnnnnnnnnnnnnnnnnnnnnnnnnnnnnnnnnnnnnnnnnnnnnnnnnnnnnnnnnnnnnnnnnnnnnnnnnnnnnnnnnnnnnnnnnnnnnnnnnnnnnnnnnnnnnnnnnnnnnnnnnnnnnnnnnnnnnnnnnnnnnnnnnnnnnnnnnnnnnnnnnnnnnnnnnnnnnnnnnnnnnnnnnnnnnnnnnnnnnnnnnnnnnnnnnnnnnnnnnnnnnnnnnnnnnnnnnnnnnnnnnnnnnnnnnnnnnnnnnnnnnnnnnnnnnggagtgcattattggttcatccagtcacagaaccaaaagccaccacagttgatgtgtttcttccgggatcaaatgaggt

SEQ ID NO: 32651 - DNA, 265 bp, Macaca Mulatta
  misc_feature (1)...(265): n = A,T,C or G
aagtctccgggctcctttcacatctgcaggagcagccagcctgggaccgcgcggcgcggggcgcgctctcgcctctcctgcaccctcggccggcgcgcttctcttatgggcgtctgctgcaggcgggctgcggtggaactgaaggcggcggcgggagaccaaacttagaccccgctnnnnnnnnnnnnnnnnnnnnnnnnnnnnnnnnnnnnnnnnnnnnnnnnnnnnnggacccgaggaggaggcttccgtcacgtcattgcag

SEQ ID NO: 32652 - DNA, 789 bp, Macaca Mulatta
  misc_feature (1)...(789): n = A,T,C or G
gggggaacaaacgcggaaccatggcggctatggttgctgtttgcggtggtctagggaggaagaagttgacacgcctggtaacggctgctgtcagccttacacatctcgggactcaaacggtgctttggagaagaggttgttcacaatataaacaggtatccagcaacgaggacctgcccattacaatggaaaatccttataaagaacctcttaagaaatgtatcttgtgtggaaagcgtgtagattataagaatgtacagcttttgtcccagtttgtttctccatttactggatgcatttatggaaggcacattacaggtctttgtgggaagaaacagaaagaaatcacaaaagcaattaagagagctcaaatactggggtttatgccagttacatacaaggatcctgcatatctcaaggaccctaaagtttgtaacatcagatatcgagaataaattatatcacgtttccaccaataaacttattttacagtaagtggttgtatgatgccaatattgactcaaaccaaactttggatagaaaagtgtttgaggagtgaggtaaagaatgacacttccagctgnnnnnnnnnnnnnnnnnnnnnnnnnnnnnnnnnnnnnnnnnnnnnnacgggtggatcacanggtcaggagatcgagaccatcctggctaacacggtgannnnnnnnnnnnnnnnnnnnnnnnnnnnnnnctagcccgggcgaaggtggcaagcgccctgtggtccccaagctactcccggaaggctgaanggcaggaaaatggcga

SEQ ID NO: 32653 - DNA, 1561 bp, Macaca Mulatta
  misc_feature (1)...(1561): n = A,T,C or G
naggtcaaagctcagattcacagttgcataagccgtcacctggaatgtcttagaagccgtgaggtgtggctgtatgaacaggtggaccttatttatcagcttaaagaggagacacttcaacagcaggctcagcagctctacnnnnnnnnnnnnnnnnnnnnnnnnnnnnnnnnnnnnnnnnnnnnnnnnnnnnnnnnnnnnnnnnnnnnnnnnnnnnnnnnnnnnnnnnngactgggcagtttgacccttaagcctgaagattcaaccgtcctgctctttgaagctgacacagctgctctgcgccagaccatcaccacatttgggtctctcaaaaccattnnnnnnnnnnnnnnnnnnnnnnnnnnnnnnnnnnnnnnnnnnnnnnnnnnnnnnnnnnnnnnnnnnnnnnnnnnnnnnnnnnnnnnnnnnnnnnnnnnnnnnnnnnnnnnnnnnnnnnnnnnnnnnnnnnnnnnnnnnnnnnnnnnnnnnnnnnnnnnnnnnnnnnnnnnnnnnnnnnnnnnnnnnnnnnnnnnnnnnnnnnnnnnnnnnnnnnnnnnnnnnnnnnnnnnnnnnnnnnnnnnnnnnnnnnnnnnnnnnnnnnnnnnnnnnnnnnnnnnnnnnnnnnnnnnnnnnnnnnnnnnnnnnnnnnnnnnnnnnnnnnnnnnnnnnnnnnnnnnnnnnnnnnnnnnnnnnnnnnnnnnnnnnnnnnnnnnnnnnnnnnnnnnnnnnnnnnnnnnnnnnnnnnnnnnnnnnnnnnnnnnnnnnnnnnnnnnnnnnnnnnnnnnnnnnnnnnnnnnnnnnnnnnnnnnnnnnnnnnnnnnnnnnnnnnnnnnnnnnnnnnnnnnnnnnnnnnnnnnnnnnnnnnnnnnnnnnnnnnnnnnnnnnnnnnnnnnnnnnnnnnnnnnnnnnnnnnnnnnnnnnnnnnnnnnnnnnnnnnnnnnaaacctgggcaatctgaagtgcctgaatgaccacttggagaccaagaaacagttgtccacccccagcgtggttacagaggattggcttgtccagaaccatcaggacccgtgtaaggtagaagaagtgtgcagagccaatgagccctgcacaagctttgcagagtgtgtgtgtgatgagaattgtgagaaggaggctctgtataaatggcttctgaagaaagaaggaaaggataaaaatgggatgcctgtggaacccaaacctgagcctgagaagcataaagattccctgaatatgtggctctgtccttctagaaaagaagtaatagaacaaactaaagcaccaaaggcaatgattccttctagaattgctgattccttccaagtcataaagaacagccccttgtcggagtggcttatcaggaccccatacaaagaaagaagtcccaaggaagtgcctagtactgaagacagagatggcaaacaaaagtttaaaagccccatgaacacttcctggtgttcctttaacacagctgactgggtcctgccaggaaagaagatgggcaacctcagccagttatcctctgaagaagacaagtggctgcttcgaaagaaggcccag

SEQ ID NO: 32654 - DNA, 165 bp, Macaca Mulatta
tgtcggaggtgctgccctacggcgacgagaagctgagcccctacggcgacggcggcgacgtgggccagatcttctcctgccgcctgcaggacaccaacaacttcttcggcgccgggcagaacaagcggccgcccaagctgggccagatcggccggagcaagcggg

SEQ ID NO: 32655 - DNA, 1301 bp, Macaca Mulatta
  misc_feature (1)...(1301): n = A,T,C or G
tattgaaggaggtgcagcacataaggatggcaaactccagattggagataagcttctagcagnnnnnnnnnnnnnnnnnnnnnnnnnnnnnnnnnnnnnnnnnnnnnnnnnnnnnnnnnnnnnnnnnnnnnnnnnnnnnnnnnnnnnnnnnnnnnnnnnnnnnnnnnnnnnnnnnnnnnnnnnnnnnnnnnnnnnnnnnnnnnnnnnnnnnnnnnnnnnnnnnnnnnnnnnnnnnnnnnnnnnnnnnnnnnnnnnnnnnnnnnnnnnnnnnnnnnnnnnnnnnnnnnnnnnnnnnnnnnnnnnnnnnnnnnnnnnnnnnnnnnnnnnnnnnnnnnnnnnnnnnnnnnnnnnnnnnnnnnnnnnnnnnnnnnnnnnnnnnnnnnnnnnnnnnnnnnnnnnnnnnnnnnnnnnnnnnnnnnnnnnnnnnnnnnnnnnnnnnnnnnnnnnnnnnnnnnnnnnnnnnnnnnnnnnnnnnnnnnnnnnnnnnnnnnnnnnnnnnnnnnnnnnnnnnnnnnnnnnnnnnnnnnnnnnnnnnnnnnnnnnnnnnnnnnnnnnnnnnnnnnnnnnnnnnnnnnnnnnnnnnnnnnnnnnnnnnnnnnnnnnnnnnnnnnnnnnnnnnnnnnnnnnnnnnnnnnnnnnnnnnnnnnnnnnnnnnnnnnnnnnnnnnnnnnnnnnnnnnnnnnnnnnnnnnnnnnnnnnnnnnnnnnnnnnnnnnnnnnnnnnnnnnnnnnnnnnnnnnnnnnnnnnnnnnnnnnnnnnnnnnnnnnnnnnnnnnnnnnnnnnnnnnnnnnnnnnnnnnnnnnnnnnnnnnnnnnnnnnnnnnnnnnnnnnnnnnnnnnnnnnnnnnnnnnnnnnnnnnnnnnnnnnnnnnnnnnnnnnnnnnnnnnnnnnnnnnnnnnnnnnnnnnnnnnnnnnnnnnnnnnnnnnnnnnnnnnnnnnnnnnnnnnnnnnnnnnnnnnnnnnnnnnnnnnnnnnnnnnnnnnnnnnnnnnnnnnnnnnnnnnnnnnnnnnnnnnnnnnnnnnnnnnnnnnnnnnnnnnnnnnnnnnnnnnnnnnnnnnnnnnnnnnnnnnnnnnnnnnnnnnnnnnnnnnnnnnnnnnnnnnnnnnnnnnnnnnnnnnnnnnnnnnnnnnnnnnnctgctagaagcttatctccaatctggagtttgccatccttatgtgctgcacctccttcaatagttaattacactcggccagtgatcatactgggacccatgaaagaccggatcaatgacgacttgatctcagaatttcccgacaaatttggatcctgtgtccctc

SEQ ID NO: 32656 - DNA, 805 bp, Macaca Mulatta
gggataccgcggtaggctcctcgggctgctcctcggttaaaaatggtctccaggatggtctctaccatgctatctggcttactgttttggctggcatcgggatggactccagcatttgcctacagcccccggacccctgacagggtctcagaaacagatatccagaggctgcttcacggcgttatggagcaattgggcattgccaggccccgagtggaatatccagctcaccaggccatgaatcttgtgggcccccagagcatcgaaggtggagctcatgagggacttcagcatttgggtccttttggcaacatccccaacatcgtggcagagttgactggagacaacattcccaaggacttcagtgaggatcaggggtacccagaccctccaaatccctgtcctgttggaaaaacagtagatgatggatgtctagagaacacccccgacaccgcagagttcagtcgagagttccagttgcatcagcatctgtttgatccggaacatgactatccaggcttgggcaagtggaacaagaaactcctttatgagaagatgaaagggaggagagagacgaaagcggaggagtgtcaatccatatctacaaggacagagactggataatgttgtggcaaagaagtctgtcccccattttttagatgaggataagggaccccgagtaaaagagaagatgcttggattgaaaacccccattaccctatttaggccctccgcatgggcttatgttgccacgtgtttaatgggaaccccttttgaattgacagccatggtttccttaaaataa

SEQ ID NO: 32657 - DNA, 631 bp, Macaca Mulatta
tgcgttcctggcggctgcgaaagtcctgcagggcgcggcggttctggaaatcgatgagcgccagcgcgatggccgcgttcccctcgtgccgaattcggcacgaggtttctgttgaatctcttgcaaatttttgatgcagtgattgtgcacagagagttctatttgttttacaattttgaatattggtttttacctatgaaattcccttttatcaaaataacatatgaagaaatccctttacctaacaaaaacaaaacactctctggtttataaaacaccttaattctactgctctttttttcgccaatcaccagcatctgtttttcaggggctgattttacttttgtgaatttcttagcttttcttccttggtgcaggaagttaaaatgcacatcagcagaactgctgcatattaacatctcaggacttttctcttggaaagaaactgaaattcatactatattggccaaagtgagcaagttaagtgatcttggtttcaatttccgagcctttgttaatacagagaattatggttcatatcagttatgtaggacctttggacccaaggtcccacagatagatatgatgtgccaagatttttaaaataccttcaagaaataaaaaaaatacc

SEQ ID NO: 32658 - DNA, 2019 bp, Macaca Mulatta
  misc_feature (1)...(2019): n = A,T,C or G
atccacaagacagccagcaacctgtcctatgacatccactactggattggccaggactcatccctggatgagcagggggcagctgccatctacaccacacaaatggatgacttcctgaagggccgggctgtgcagcaccgcgaggtccagggcaacgagagcgaggccttccgaggctacttcaagcaaggccttgtgngatccggaaaggaggcgtggcttctggcatgaatcacgtggagaccaactcctatgatgtccagaggctgctgcatgtcaagggcaagaggaacgtggtagctggagaggtannnnnnnnnnnnnnnnnnnnnnnnnnnnnnnnnnnnnnnnnnnnnnnnnnnnnnnnnnnnnnnnnnnnnnnnnnnnnnnnnnnnnnnnnnnnnnnnnnnnnnnnnnnnnnnnnnnnnnnnnnnnnnnnnnnnnnnnnnnnnnnnnnnnnnnnnnnnnnnnnnnnnnnnnnnnnnnnnnnnnnnnnnnnnnnnnnnnnnnnnnnnnnnnnnnnnnnnnnnnnnnnnnnnnnnnnnnnnnnnnnnnnnnnnnnnnnnnnnnnnnnnnnnnnnnnnnnnnnnnnnnnnnnnnnnnnnnnnnnnnnnnnnnnnnnnnnnnnnnnnnnnnnnnnnnnnnnnnnnnnnnnnnnnnnnnnnnnnnnnnnnnnnnnnnnnnnnnnnnnnnnnnnnggactgttacatcctggacttggggcgcctgaaagatctacgtatggaaggggaagaaagccaatgagcaagagaagaagggagccatgagccatgcgctgnnnnnnnnnnnnnnnnnnnnnnnnnnnnnnnnnnnnnnnnnnnnnnnnnnnnnnnnnnnnnnnnnnnnnnnnnnnnnnnnnnnnnnnnnnnnnnnnnnnnnnnnnnnnnnnnnnnnnnnnnnnnnnnnnnnnnnnnnnnnnnnnnnnnnnnnnnccaaagtggaacaggtgaagtttgatgccacatccatgcatgtcaagcctcaggtggctgcccagcagaagatggtagatgatgggagtggggaagtgcaggtnaggtgtggcgcattgagaacctagagctggtacctgtggattccaagtggctaggccacttctatgggggtgactgctacctgctgctctacacctacctcatcggaaacaagcagcactacctgctctacnnnnnnnnnnnnnnnnnnnnnnnnnnnnnnnnnnnnnnnnnnnnnnnnnnnnnnnnnnnnnnnnnnnnnnnnnnnnnnnnnnnnnnnnnnnnnnnnnnnnnnnnnnnnnnnnnnnnnnnnnnnnnnnnnnnnnnnnnnnnnnnnnnnnnnnnnnnnnnnnnnnnnnnnnnnnnnnnnnnnnnnnnnnnnnnnnnnnnnnnnnnnnnnnnnnnnnnnnnnnnnnnnnnnnnnnnnnnnnnnnnnnnnnnnnnnnnnnnnnnnnnnnnnnnnnnnnnnnnnnnnnnnnnnnnnnnnnnnnnnnnnnnnnnnnnnnnnnnnnnnnnnnnnnnnnnnnnnnnnnnnnnnnnnnnnnnnnnnnnnnnnnnnnnnnnnnnnnnnnnnnnnnnnnnnnnnnnnnnnnnnnnnnnnnnnnnnnnnnnnnnnnnnnnnnnnnnnnnnnnnnnnnnnnnnnnnnnnnnnnnnnnnnnnnnnnnnnnnnnnnnnnnnnnnnnnnnnnnnnnnnnnnnnnnnnnnnnnnnnnnnnnnnnnnnnnnnnnnnnnnnnnnnnnnnnnnnnnnnnnnnngccacagagatccctgacttcctctggatgacttggaagaggatgacgtgttcctactagatctttgggaccaggtnaggtcttcttctggattgggaaacatgccaatgaggaggagaagaaggctgcagccatcaccgcgcaggaatacctcaagacccatcccagcgggcgtgaccccgagacccccatcattgtggtgaagcagggatacgagccccccaccttcacaggctggttcctggcttgggatccctttaagtggagt

SEQ ID NO: 32659 - DNA, 653 bp, Macaca Mulatta
ttgatggaagccatttccacaatgacaacattctttacctacaggagcaggagaaggaggcccggagcagggcggcctacatctctgcactccccacatctccgcactgggggaggggctttgatgaagacaaggatgaggatgaaggctctccagggggctgcaatcctgcaggtggtaatggtggtgacttccacagactggtcttctgatgtgaacctgctgccaacccaaccccttccctccaggagccaggtggggcctgaaggaggctgtggaggcaggctcagtcctgtagtaggcctgatggtacagctcatgggaccttagtcctcagcctgatgaaggatacacagagactctcagatacggaagtgagacctaagtccctctcacaggggatcggtcccattaagattttacacccaagtgtcctgggtaacttgaagcagctgagatgggcacacgcgggtctttgcctccccctccctccccagcaggctccccatgctggaagagctgatgttcaggaaacagggctgaacctcagtacttgatgtcaaaacattagagctattttccttctgactgctctacagtctaaagcacagccggatccaagccttgcgcagagaaccgggccgtggtaactc

SEQ ID NO: 32660 - DNA, 927 bp, Macaca Mulatta
tgctgttctcggaagcgtacgaggaagttgaagcacatggaggagactgccacgcccagtgtccagacagcagaggactccatgcctctactgccctgttaacctgctgtcgtcaatgcaaggtaaagataccctcccctgaccagcatacaaatcacctgttcaaatctcttttgctttaggctgcccaaagaaaccagactttaacacgcttgaacttagaaaagaaagctcgtctgagagaggaagcagctatgaacgccaaaacagaatagcagaggtatctgtgttggctggattttgaaaatccaggaattatgttgcaacgagcctgtattaaaaaggatgtggtatgaggatccatttcataaagcatggtgtgcccaaacctgtaccatttccgtatttctgctgtagaagtagaagtaaattttcttaaatgatgactgtgttttattgttttgatccaagtaaagtgtagcctgtcagccttttggacaaaaatgaaacaatttatttcaacttgaataccaactctttagagaagcaggtaccatatcttacttctcttcccattaccaaagtaacctctccacaggcgaactcattttgtagagataaggaaggccagttgagtatatggcccaggtgcagcttggagggccagccttctcaaatgccttggtgtatttgggtggggaggctgctccctaatagagcaagccctgagaagcagccagaccacattctataatctttgaacatgctgccaaatggaggcttttaggagaacagttttttaaacatcctgacaaggtccagccaggaatttctaaggacttagaaatcccagcatcatggagttgcttggggtcaacacaagtcaccctcttagcttcatgccttagaattctcaactggctgttt

SEQ ID NO: 32661 - DNA, 150 bp, Macaca Mulatta
ggtaagcccccgggagcatccacaactggggacctgctcagtggcccccctgccttacagctacataacagtgctgttttatttgaacaacgtcaccggtgggggtgagactgttttccctgtagcagataacagaacctacgatgaaat

SEQ ID NO: 32662 - DNA, 718 bp, Macaca Mulatta
  misc_feature (1)...(718): n = A,T,C or G
cagttacgcagctatccacaaggtatcgattgcagtcagagcctgaaagtatccgtaaatggagagaagagcaaatggaacgcttggaagcccttgatgccaattctcggaagcaagaagcagagtggaaagagaaggcaataaaggagctagaagagtggtatgcaagacaggacgagcagctacagaagacaaaagcaaacaacagggcagcagaagaagcctttgtaaatgacattgacgagtcatccccaggcactgagtgggaacgggtggcccggctgtgtgactttaaccccaagtctagcaagcaggccaaagacgtctcccgcatgcgttcagtcctcatctccctcaagcaggccccgctggtgcactgaagagccaccctgtggaaacactacatctgcaatataatcctactcagtgaagctcttcacagtcattggattaattatgttgagttcttttggaccaaacctttttgtctttagagttgatcattgtttgtgattgcatgtttccttcaactgtgttctccctggcattcagagaggagggggaggagcaagaggaaggggagcgaagcctcccaacagtagcctcaacctgtgcttttgtgcattattctgagaataaatttctgtttcaaacnnnnnnnnnnnnnnnnnnnnnnnnnnnnnnnnnnnnnnnnnnnnnnnttcggcctatagtgagt

SEQ ID NO: 32663 - DNA, 513 bp, Macaca Mulatta
ctgtcaagttcggccgcatgtccaagaagcagagggacagcctgcatgcagaagtgcagaaacagctgcagcagcggcaacagcagcaacaggaaccagtggtcaagacccccccagcaggggctcaaggagcagataccctcacctacacattggggctcccagatgggcagctgcccctgggctcctcgcctgacctgcctgaggcttctgcctgtccccctggcctcctgagagcctcgggctctgggccctcctattccaacaacttggccaaggcagggctcaatggggcctcatgccaccttgaatacagccctgagcggggcaaggctgagggcagagagagcttctatagcacaggcagccagctgacccctgaccgatgtggacttcgttttgaggaacacaggcatcctgggcttggggaactgggacagggcccagacagctacggcagccccagttttcgcagcacaccggaggcaccctatgcctccctgacggagatag

SEQ ID NO: 32664 - DNA, 362 bp, Macaca Mulatta
tgcctcttgagcagaggagtcagcactgcaagcctgaagaaggccttcaagcccaaggagagtccctgggcttagtgggtgcgcaggctcctgctcctgaggagcaggagactgcctcctcctcttctactgtagtggaagtcaccctggggagaggtgcctgctgctgagtcaccaggtcctccccagagtcctcagggagcctccaccctccgcactacaatcaggtacactctctggagccaatctgatgaggactccagcagccaagaagaggaggggccaagcacctttcctgacctggagtccggcttcaggcagcactcagtaggaaggtggctgagttggttcgttttctgctc

SEQ ID NO: 32665 - DNA, 2060 bp, Macaca Mulatta
  misc_feature (1)...(2060): n = A,T,C or G
accccgggccgcattatatttctgggggggaaattctcggggaggtaacatagttaaggggatttttttttgaagaaacacttggggggagccggttctcaataaaaaatgttgtggggaaaaccttccccaaaagataaatgttggagaaaaccccctcaaagggggagaggttcgaacaaacattctgaatggcttcaggtaggcaggacaggcaatgagctagatgattgtttggggaatatagaaaataaaatcttatcaagacttcatattttttcctcatttaaactttttaaatgggtctcaaaatttctgagaccaacattttggttcaaagttgtttcccatttaaaaagtactgattttaaaaacctaataacttaaaactgccacacgcaaaaaagaaaacccaaagtggtccacaaaacattctcctttccttctgaaggttttacgatgcattgttatcattaaaccagtctttttactactaaaacttaaaatggccaaattgaaacaaaacagttcttgagaccgttttcttcccaccactgattaagagtggggtggcaggtattagggataatattcatttagccttctgagctttctgggcagacttggtgaccttgccagcttccagcagcctttcttgtccactgctttgatgaccacccaccgcaactgtctgcctcatatcacgaacagcaaagcgacccaaaggtggatagtctgagaaagctctcaacacacataggcttgccaggaaccatatcaacaatgggcagcatcaaccagactttcaaggaatttagggcccatcttccagttttttaccagaaacggcgatcaatcttttccttcagctcagcaaacttgcatgcaatgtgagctgtgtggcaatccaacacaggggcatagccagcacttatttggcctggatggttcaggataatcacctgagcagtgaagccagctgcttccattggtgggtcgtttttgctgtcaccagcaacgttgccacgacgaacatccttgacagacacattcttgacattgaagcccacattgtccccaggaagagcttcactcaaagcttcatggtgcatttcgacagattttacttcagttgtaacgttgactggagcaaaggtgaccaccataccgggtttgagaacaccagtctccactcggccaacaggaacagtaccaataccaccaattttgtagacatcctggagaggcaggcgcaagggcttgtcagttggacgagttggtggtaggatgcagtccagagcctcaagcagcgtggttccactggcattgccatccttacgggtgaccttccatcccttgaaccaaggcatgttagcacttggctccagcatgttgtcaccattccaaccagaaattggcacaaatgctactgtgtcggggttgtagccaattttcttaatgtaagtgctgacttccttaacaatttcctcgtatctcttctggctgtagggtggctcagtggaatccattttgttaacaccaacaattagttgtttcacacccagtgtgtaagccagaagagcatgctctcgggtctgcccattcttggagataccagcttcaaattcaccaacaccagcagcaacaatcaggacagcatctgcaaagcgattaagtttgggtaacgcnnnnnnnnnnnnnnnnnnnnnnnnnnnnnnnnnnnnnnnnnnnnnnnnnnnnnnnnnnnnnnnnnnnnnnnnnnnnnnnnnnnnnnnnnnnnnnnnnnnnnnnnnnnnnnnnnnnnnnnnnnnngatgtcaccaattaaccagaaatccagttattttctgccctcaaaatgacagccatggccagccaggtgcttcgaggggctcatcaggggggacagccctgctttgacctgcccgggtctttgcatggagacgtgagaagggagggcttgaggttgctgaggtgaggagtgtgtctcctgtgcaagtcaggacagtctggttaaaggtggtgcctattgattaacgatttaatgaatgggatgtcatt

SEQ ID NO: 32666 - DNA, 1864 bp, Macaca Mulatta
  misc_feature (1)...(1864): n = A,T,C or G
aatgtctgaaaaccttgacaagtccaatgtaaatgaagcaggaaaatcaaaatccaatgattctgagcaaggcctcgaagatgctgtggaaggtgctgatgaagccttacagaaagcaataaagtcagactcctccagcccccaaagagtgcaaagacctcacnnnnnnnnnnnnnnnnnnnnnnnnnnnnnnnnnnnnnnnnnnnnnnnnnnnnnnnnnnnnnnnnnnnnnnnnnnnnnnnnnnnnnnnnnnnnnnnnnnnnnnnnnnnnnnnnnnnnnnnnnnnnnnnnnnnnnnnnnnnnnnnnnnnnnnnnnnnnnnnnnnnnnnnnnnnnnnnnnnnnnnnnnnnnnnnnnnnnnnnnnnnnnnnnnnnnnnnnnnnnnnnnnnnnnnnnnnnnnnnnnnnnnnnnnnnnnnnnnnnnnnnnnnnnnnnnnnnnnnnnnnnnnnnnnnnnnnnnnnnnnnnnnnnnnnnnnnnnnnnnnnnnnnnnnnnnnnnnnnnnnnnnnnnnnnnnnnnnnnnnnnnnnnnnnnnnnnnnnnnnnnnnnnnnnnnnnnnnnnnnnnnnnnnnnnnnnnnnnnnnnnnnnnnnnnnnnnnnnnnnnnnnnnnnnnnnnnnnnnnnnnnnnnnnntttcagagaaattttttctgtgttggacctaatgaaagtggacatggccaactttgctatcagtagcatcaggcctcatctcatgcagcagtcagnnnnnnnnnnnnnnnnnnnnnnnnnnnnnnnnnnnnnnnnnnnnnnnnnnnnnnnnnnnnnnnnnnnnnnnnnnnnnnnnnnnnnnnnnnnnnnnnnnnnnnnnnnnnnnnnnnnnnnnnnnnnnnnnnnnnnnnnnnnnnnnnnnnnnnnnnnnnnnnnnnnnnnnnnnnnnnnnnnnnnnnnnnnnnnnnnnnnnnnnnnnnnnnnnnnnnnnnnnnnnnnnnnnnnnnnnnnnnnnnnnnnnnagttttaatggaccagtctcgcttccacgagctccagttgcagctggaacaactgaccgtcctgggggctgtgttgctgatcaccttcagcatggcagccccaggaatttccagccaggccgactttgctgagaaactcaagatgattgtgaagattttgctaacagatatgcaccnnntccttccatctgaaggacgtcctcactaccatcggggagaaggtgtgcctggaggtgagcagctgcctctccctttgtgggtcctcccccttcaccacggacaaggagaccgtgctcaagggccagatccaggccgtggccagccccgatgaccccattcgcaggatcatgggaatctcgaatcctgaccttcttagaaacctaccttgcctcgggtcatcagaagccattgcccacagtccctgggggactcagtccagttcagagagagctggaggaagttgctattaaatttgctcgcctggtcaactataacaagatggtcttctgtccctactatgatgcaatcctnnnnnnnnnnnnnnnnnnnnnnnnnnnnnnnnnnnnnnnnnnnnnnnnnnnnnnnnnnnnnnnnnnnnnnnnnnnnnnnnnnnnnnnnnnnnnnnnnnnnnnnnnnnnnagaaccatatgatagaggcaccaatgacaatacaactttgtttccaagaaccttgtaacaaagcgttgtctcttttaaacatacgacttgaggcaaaaggaatcctggacaggagttttctgcagaggcgtttaagccctaccgaatccgcttctgctgccgtgctctgtaaatgtcatgaacaggggggacaacggctcccttttcttcatcttcatctgaatcctcgttgggccttttgacggccttggt

SEQ ID NO: 32667 - DNA, 111 bp, Macaca Mulatta
gaagtagctccagcttgtctggatggaaaaagcttgagagcaggcattacagaagtgaaggagcctagtgtcacctcacctacaccatcagacatacagcagaacgaaggt

SEQ ID NO: 32668 - DNA, 606 bp, Macaca Mulatta
tagaaaaatgtgtacactgttattataaacagacacatcacttcttaccacatccatgtagctattggtgatagagtcattaaaataccttttttttttggtatcttttttcaaggttaatgagaactttgagaaaagtgagtaatgctgccctaatactttgtatgtttttaatggattttttttaagtattagaaaatgacacataacatgggcagttggttgctcatagggtccttctgtagggagaaaccattgttaattcaaataagctgattttaatgaagttttcaactggtttttaaatattcaatattgatctgtgtttaaggttgttatttgaatgtagtttacatagaggaatataataatggagagacttcaaatggaaagagagaacattacaagccaaatttatccataattttataaaatgaaatcttagtgtctaaatcattgtactgattactaaaattaacccactcctccccaatgaggtcttataaaccacagcactttgttccaagttcagagttctaaattgagagcattaaacatcaaagttctaatatctaaaacaatttatttttcatcaaatagctgtca

SEQ ID NO: 32669 - DNA, 1090 bp, Macaca Mulatta
  misc_feature (1)...(1090): n = A,T,C or G
aggtgatcctaaacttaaaattttgtccctttggaaataataatgtcaaatactgcttgtgctgtggggaattccaccaagttgttcactctgatcacagaaaatttcaagnnnnnnnnnnnnnnnnnnnnnnnnnnnnnnnnnnnnnnnnnnnnnnnnnnnnnnnnnnnnnnnnnnnnnnnnnnnnnnnnnnnnnnnnnnnnnnnnnnnnnnnnnnnnnnnnnnnnnnnnnnnnnnnnnnnnnnnnnnnnnnnnnnnnnnnnnnnnnnnnnnnnnnnnnnnnnnnnnnnnnnnnnnnnnnnnnnnnnnnnnnnnnnnnnnnnnnnnnnnnnnnnnnnnnnnnnnnnnnnnnnnnnnnnnnnnnnnnnnnnnnnnnnnnnnnnnnnnnnnnnnnnnnnnnnnnnnnnnnnnnnnnnnnnnnnnnnnnnnnnnnnnnnnnnnnnnnnnnnnnnnnnnnnnnnnnnnnnnnnnnnnnnnnnnnnnnnnnnnnnnnnnnnnnnnnnnnnnnnnnnnnnnnnnnnnnnnnnnnnnnnnnnnnnnnnnnnnnnnnnnnnnnnnnnnnnnnnnnnntcagttatatcaagatttcttgatacagagcagcttctttctgttnnnnnnnnnnnnnnnnnnnnnnnnnnggtcaatgctgctgaatcaaagataacaaatttaatatacttgaaacataccttggaacttgtggatcctttaaagnnnnnnnnnnnnnnnnnnnnnnnnnnnnnnnnnnnnnnnnnnnnnnnnnnnnnnnnnnnnnnnnnnnnnnnnnnnnnnnnnnnnnnnnnnnnnnnnnnnnnnnnnnnnnnnnnnnnnnnnnnnnnnnnnnnnnnnnnnnnnnnnnnnnnnnnnnnnnnnnnnnnnnnnnnnnnnnnnnnnnnnnnnnnnnnnnnnnnnnnnnnnnnnnnnnnnnnnnnnnnnnnnnnnnnnncaggaatgatatcacaacttggagaaaaatatagtcttcctttaaggacaagttttagctctgctcgaggatttttcatccagatgactacagactgtttagccctacctaatgatcaacttccttcagaatttattaagn

SEQ ID NO: 32670 - DNA, 3313 bp, Macaca Mulatta
  misc_feature (1)...(3313): n = A,T,C or G
ccgcgggtgccgggtccgtgcgcaccccaacacccccacccgctgggcctcggggnggcacatctccagacttcaatttggctgaagtaactcatgccacagacctgtgcacatgcctggaattgagacacagtttaaaagacttcagattgctttctgccttttgaaaactcctgaaaaccatccttttggactctggaattctacacagctcaaccaagactttgcttgaatgtttacattttctgctcgctgtcctacatatcacaatatcgtgttcacgttttgttaaaacttaagggtgtcaggagttgagcttgctcagcaagccagcatggctagaatgagctttgttgtagcagcttgccaattggtgctgggcctactaatgacttcattaactgagtcttccatacagaatagtgagtgtccacaactttgcgtatgtgaaattcgtccctggtttaccccacagtcaacttacagagaagccacgactgttgattgcaatgacctccgcttaacaaggattcccagtaacctctctagtgacacacaagtgcttctcttacagagcaataacatcgcaaagactgtggatgagctgcagcagcttttcaacttgactgaactagatttctcccaaaacaactttactaacattaaggaggttgggctggcaaacctaacccagctcacgacactgcatttggaggaaaatcagattacggagatgactgactactgtctacaagacctcagcaaccttcaagaactctacatcaaccacaaccaaattagcactatttctgctaatgcttttgcaggcttaaaaaatctattaaggctccacctgaactccaacaaattgaaagttattgatagtcgctggtttgattctacacccaacctggaaattctcatgattggagaaaaccctgtgattggaattctggatatgaacttcaaaccccttgtaaatttgagaagcttagttttggcaggaatgtatctcactgatattcctggaaatgctttggtgggtctggatagccttgagagcctgtctttttatgataacaaactggtcaaagtccctcaacttgccctgcaaaaagttccaaatttgaaattcttagacctcaacaaaaaccccattcacaaaatccaagaaggggacttcaaaaatatgcttcggttaaaagaactgggaatcaacaatatgggagaactcgtttctgtcgaccgctatgccctggataacttgcctgaactcacaaagctggaagccaccaataaccctaaactctcttatatccaccgcttggctttccgaagtgtccctgctctggaaagcctgatgttgaacaacaatgccttgaatgccatttaccaaaagacagtcgaatccctccccaatctgcgtgagatcagtatccatagcaatcccctgaggtgtgactgtgtgatccactggnnnnnnnnnnnnnnnnnnnnnnnnnnnnnnnnnnnnnnnnnnnnnnnnnnnnnnnnnnnnnnnnnnnnnnnnnnnnnnnnnnnnnnnnnnnnnnnnnnnnnnnnnnnnnnnnnnnnnnnnnnnnnnnnnnnnnnnnnnnnnnnnnnnnnnnnnnnnnnnnnnnnnnnnnnnnnnnnnnnnnnnnnnnnnnnnnnnnnnnnnnnnnnnnnnnnnnnnnnnnnnnnnnnnnnnnnnnnnnnnnnnnnnnnnnnnnnnnnnnnnnnnnnnnnnnnnnnnnnnnnnnnnnnnnnnnnnnnnnnnnnnnnnnnnnnnnnnnnnnnnnnnnnnnnnnnnnnnnnnnnnnnnnnnnnnnnnnnnnnnnnnnnnnnnnnnnnnnnnnnnnnnnnnnnnnnnnnnnnnnnnnnnnnnnnnnnnnnnnnnnnnnnnnnnnnnnnnnnnnnnntatacgtcaagcagacagaatcccattccatcttagtgtcctggaaagttaattccaacgtcatgacgtcaaacttaaaatggtcgtccgccaccatgaagattgataacccccacataacatatactgccagggtcccagtagatgtccatgaatacaacctaacacatctgcagccttccacagattatgaagtgtgtctcacggtgtccaatattcatcagcagactcaaaagtcatgcgtaaatgtcacaaccaaaaatgccgccttcgcgctggacatctctgatcaagaaaccagtacagcgcttgctgcagtaatggggtctatgtttgccgtcattagccttgcgtccattgctgtgtactttgccaaaagatttaagagaaaaaactaccaccactcactaaaaaagtatatgcaaaaaacctcttcaatcccactaaatgagctgtacccaccactcattaacctctgggaaggcgacagtgagaaagacaaagatggttctgcagacaccaagccaacccaggttgacacatccagaagctattacatgtggtaactcagaggatattttgcttctggtagtaaggagcacaaagacgtttttgctttattctgcaaaagtaaaccagttgaagacttttgtatttttgactttgctagtttgtggcagagtggagaggacgggtggatatttcaannnnnnnnnnnnnnnnnnnnnnnnnnnnnnnnnnnnnnnnnnnnnnnnnnnnnnnnnnnnnnnnnnnnnnnnnnnnnnnnnnnnnnnnnnnnnnnnnnnnnnnnnnnnnnnnnnnnnnnnnnnnnnnnnnnnnnnnnnnnnnnnnnnnnnnnnnnnnnnnnnnnnnnnnnnnnnnnnnnnnnnnnnnnnnnnnnnnnnnnnnnnnnnnnnnnnnnnnnnnnnnnnnnnnnnnnnnnnnnnnnnnnnnnnnnnnnnnnnnnnnnnnnnnnnnnnnnnnnnnnnnnnnnnnnnnnnnnnnnnnnnnnnnnnnnnnnnnnnnnnnnnnnnnnnnnnnnnnnnnnnnnnnnnnnnnnnnnnnnnnnnnnnnnnnnnnnnnnnnnnnnnnnnnnnnnnnnnnnnnnnnnnnnnnnnnnnnnnnnnnnnnnnnnnnnnnnnnnnnnnnnnnnnnnnnnnnnnnnnnnnnnnnnnnnnnnnaaagaggcttagaacaagctaacatgcaatagaaatatgtatatcaaattttttaatgtaacaaactacatgttaattgttatcttattctttttatctttagtagacacttttaaaagaaaagacaattttgttgtgtttcactcaccaacacgtggtgtataatgaagacagaactataataaattagttttgttctgattttttagaaca

SEQ ID NO: 32671 - DNA, 364 bp, Macaca Mulatta
  misc_feature (1)...(364): n = A,T,C or G
gagacctggagacctgattgagatttctcgctttggctatgagcactgggccatctacgtgggacatggctatgtggtccatctggctcnnnnnnnnnnntgctggagctggtgtggccagtgtcctgtctgccctgaccaacaaagccatagtgaataaggaactgctgtctgacgtggctgggagagacaactacagggtcaataacaaacacgatggcaaatacaggccactgccttgcaacaaaatcgtcaagcgggcagaggagttggtggggcaggagttgccttatttttttttctgtgacaactgcgagcacttcgcgaaccatcttcgctatggggtctcccgcagtgaccaggt

SEQ ID NO: 32672 - DNA, 2931 bp, Macaca Mulatta
  misc_feature (1)...(2931): n = A,T,C or G
tgagtagaagttcaccaagtgggaaaggatactctaggannnnnnnnnnnnnnnnnnnnnnnnnnnnnnnnnnnnnnnnnnnnnnnnnnnnnnnnnnnnnnnnnnnnnnnnnnnnnnnnnnnnnnnnnnnnnnnnnnnnnnnnnnnnnnnnnnnnnnnnnnnnnnnnnnnnnnnnnnnnnnnnnnnnnnnnnnnnnnnnnnnnnnnnnnnnnnnnnnnnnnnnnnnnnnnnnnnnnnnnnnnnnnnnnnnnnnnnnnnnnnnnnnnnnnnnnnnnnnnnnnnnnnnnnnnnnnnnnnnnnnnnnnnnnnnnnnnnnnnnnnnnnnnnnnnnnnnnnnnnnnnnnnnnnnnnnnnnnnnnnnnnnnnnnnnnnnnnnnnnnnnnnnnnnnnnnnnnnnnnnnnnnnnnnnnnnnnnnnnnnnnnnnnnnnnnnnnnnnnnnnnnnnnnnnnnnnnnnnnnnnnnnnnnnnnnnnnnnnnnnnnnnnnnnnnnnnnnnnnnnnnnnnnnnnnnnnnnnnnnnnnnnnnnnnnnnnnnnnnnnnnnnnnnnnnnnnnnnnnnnnnnnnnnnnnnnnnnnnnnnnnnnnnnnnnnnnnnnnnnnnnnnnnnnnnnnnnnnnnnnnnnnnnnnnnnnnnnnnnnnnnnnnnnnnnnnnnnnnnnnnnnnnnnnnnnnnnnnnnnnnnnnnnnnnnnnnnnnnnnnnnnnnnnnnnnnnnnnnnnnnnnnnnnnnnnnnnnnnnnnnnnnnnnnnnnnnnnnnnnnnnnnnnnnnnnnnnnnnnnnnnnnnnnnnnnnnnnnnnnnnnnnnnnnnnnnnnnnnnnnnnnnnnnnnnnnnnnnnnnnnnnnnnnnnnnnnnnnnnnnnnnnnnnnnnnnnnnnnnnnnnnnnnnnnnnnnnnnnnnnnnnnnnnnnnnnnnnnnnnnnnnnnnnnnnnnnnnnnnnnnnnnnnnnnnnnnnnnnnnnnnnnnnnnnnnnnnnnnnnnnnnnnnnnnnnnnnnnnnnnnnnnnnnnnnnnnnnnnnnnnnnnnnnnnnnnnnnnnnnnnnnnnnnnnnnnnnnnnnnnnnnnnnnnnnnnnnnnnnnnnnnnnnnnnnnnnnnnnnnnnnnnnnnnnnnnnnnnnnnnnnnnnnnnnnnnnnnnnnnnnnnnnnnnnnnnnnnnatgaagcacatgtccaacaccgttggtggagcacctggtgagccatcactcaccccagaggcatgagtcccccggcatcccggtgcgaatctctctcatctgagcccactggaggcgccgccccacccggcccactggcagacacagacccaggcagcaccaggccccaactccctccaggggccctccaggaaccaccaggctctctcaccaccttcccaaccttccagaaagcttggtccgcagaagccctgcctggtccagtccaggggcggccaggccaactgcaagattctggactgttttggtggcatccaaagacgatctcagagcactttgaacctctctgttgagttttctttttgttccccacccttcacttgcttcactgnnnnnnnnnnnnnnnnnnnnnnnnnnnnnnnnnnnnnnnnnnnnnnnnnnnnnnnnnnnnnnnnnnnnnnnnnnnnnnnnnnnnnnnnnnnnnnnnnnnnnnnnnnnnnnnnnnnnnnnnnnnnnnnnnnnnnnnnnnnnnnnnnnnnnnnnnnnnnnnnnnnnnnnnnnnnnnnnnnnnnnnnnnnnnnnnnnnnnnnnnnnnnnnnnnnnnnnnnnnnnnnnnnnnnnnnnnnnnnnnnnnnnnnnnnnnnnnnnnnnnnnnnnnnnnnnnnnnnnnnnnnnnnnnnnnnnnnnnnnnnnnnnnnnnnnnnnnnnnnnnnnnnnnnnnnnnnnnnnnnnnnnnnnnnnnnnnnnnnnnnnnnnnnnnnnnnnnnnnnnnnnnnnnnnnnnnnnnnnnnnnnnnnnnnnnnnnnnnnnnnnnnnnnnnnnnnnnnnnnnnnnnnnnnnnnnnnnnnnnnnnnnnnnnnnnnnnnnnnnnnnnnnnnnnnnnnnnnnnnnnnnnnnnnnnnnnnnnnnnnnnnnnnnnnnnnnnnnnnnnnnnnnnnnnnnnnnnnnnnnnnnnnnnnnnnnnnnnnnnnnnnnnnnnnnnnnnnnnnnnnnnnnnnnnnnnnnnnnnnnnnnnnnnnnnnnnnnnnnnnnnnnnnnnnnnnnnnnnnnnnnnnnnnnnnnnnnnnnnnnnnnnnnnnnnnnnnnnnnnnnnnnnnnnnnnnnnnnnnnnnnnnnnnnnnnnnnnnnnnnnnnnnnnnnnnnnnnnnnnnnnnnnnnnnnnnnnnnnnnnnnnnnnnnnnnnnnnnnnnnnnnnnnnnnnnnnnnnnnnnnnnnnnnnnnnnnnnnnnnnnnnnnnnnnnnnnnnnnnnnnnnnnnnnnnnnnnnnnnnnnnnnnnnnnnnnnnnnnnnnnnnnnnnnnnnnnnnnnnnnnnnnnnnnnnnnnnnnnnnnnnnnnnnnnnnnnnnnnnnnnnnnnnnnnnnnnnnnnnncccacccccagccctttgtttgacttgcgtcgtctgatactcagtattgtagctttttgtccgcatgttactccctgtaaatacgctgttatacatactgttaacacccctttgctttttctatgggacctccaggccaccatatttagaactagttaccttattnnnnnnnnnnnnncagtctgttggcttctcagtctgcatcttggaggcagggaggtgagggcaggtgcccctcagacacttcaggaaggtagtttgcattctatttaaaaaaggggggtggggagcaaatgaaaatcaaatgtagggggaaaacactaaagggggcaagaaacaaaggaattacaaaccctctgctctttgtatttctctgttgtgaagaataaactgtacctgcacccg

SEQ ID NO: 32673 - DNA, 487 bp, Macaca Mulatta
  misc_feature (1)...(487): n = A,T,C or G
ttgcgttctgaggctgcagtgtcggcaccttgagctgccggttcacgggttcgaggccagtttccgcgtgtcgtgggttcgcaccccggacgcgatgctattcgacaaggtgaaagcgttctcggtgcaattggacggtgcgaccgcgggcgccgagcccgtgttcagcggcggccaggccgtggcgggccgggtgctgctggagctggcaagcgccgtacgcgtgggtgccctgaggctgcgcgcgcggggccgcgcgcatgtgcactggaccgagtcgcgcagcgcgggctcgagcacggcttacacgcagagctacagtgagcgcgtggaggtcgtgagccaccgtgccacgctcctggcgccagncagatactggggagaccaccacgctgcctcctgggcgccatgagttcctgttcagcttccagctgcccccgnncctggtgacatccttcgagggcaaacatggtagtgtccgctactg

SEQ ID NO: 32674 - DNA, 890 bp, Macaca Mulatta
  misc_feature (1)...(890): n = A,T,C or G
tcttagatcagagtgcgaagtaaattatgatacattttatgtaacattttaatgtttatgctcataaaacttagtgaacacactgtgttatgccagctcaaatctacaatagccaccaaaaccatgacttaatattntgagccctagaagaaagggatgggctgagggcaagagtggggaaataggaacactgaccagtataactgtgcaattctggaacatattaattaaaatatgccttaacatatagtgaatttctaattctaatgttcagtgcaatggaagacatttatttggacagtaatactagctaagttggtagatatttgattcttcattgtttgatttttttcattagttgaagtgggttttagttttgttaaaattataaccaacctattttcacatcattctgtaagttaaatgatatcaaacatgaaagacatgtcttcatttttctttttctgattaaatgtctgatgcatatcgtttttcaattagcaatcagttgcttttaaaatcagaaggctatattattctaatgaccctattgcatctaaatgggtttgagaatccatatcaacaacatatgctacgtgttttttgacagaaagtgaaaacaaattcagtaaaactgttagtatcaaaaagaatgggaatacagttttcttgtccacattatgatcaaataaaaatcctgtgagagtgcgtgtatgttttgaagcaggaggatttcttgaaactttgttggaagtgggagttgggagggattcaccatacttgtgttctcctccctttataaattttattcttaggacttttaaaagggcttgtgctatctttccaatgaaaactgaaagtgcataattgtggaagaatgtatttgcagg

SEQ ID NO: 32675 - DNA, 3276 bp, Macaca Mulatta
  misc_feature (1)...(3276): n = A,T,C or G
agccggatcgagctgggagatgtgacaccacacaatattaaacagttgaaaagactgaatcaggtcatctttccagtcagctacaatgacaagttctacaaggatgtgctggannnnnnnnnnnnnnnnnnnnnnnnnnnnnnnnnnnnnnnnnnnnnnnnnnnnnnnnnnnnnnnnnnnnnnnnnnnnnnnnnnnnnnnnnnnnnnnnnnnnnnnnnnnnnnnnnnnnnnnnnnnnnnnnnnnnnnnnnnnnnnnnnnnnnnnnnnnnnnnnnnnnnnnnnnnnnnnnnnnnnnnnnnnnnnnnnnnnnnnnnnnnnnnnnnnnnnnnnnnnnnnnnnnnnnnnnnnnnnnnnnnnnnnnnnnnnnnnnnnnnnnnnnnnnnnnnnnnnnnnnnnnnnnnnnnnnnnnnnnnnnnnnnnnnnnnnnnnnnnnnnnnnnnnnnnnnnnnnnnnnnnnnnnnnnnnnnnnnnnnnnnnnnnnnnnnnnnnnnnnnnnnnnnnnnnnnnnnnnnnnnnnnnnnnnnnnnnnnnnnnnnnnnnnnnnnnnnnnnnnnnnnnnnnnnnnnnnnnnnnnnnnnnnnnnnnnnnnnnnnnnnnnnnnnnnnnnnnnnnnnnnnnnnnnnnnnnnnnnnnnnnnnnnnnnnnnnnnnnnnnnnnnnnnnnnnnnnnnnnnnnnnnnnnnnnnnnnnnnnnnnnnnnnnnnnnnnnnnnnnnnnnnnnnnnnnnnnnnnnnnnnnnnnnnnnnnnnnnnnnnnnnnnnnnnnnnnnnnnnnnnnnnnnnnnnnnnnnnnnnnnnnnnnnnnnnnnnnnnnnnnnnnnnnnnnnnnnnnnnnnnnnnnnnnnnnnnnnnnnnnnnnnnnnnnnnnnnnnnnnnnnnnnnnnnnnnnnnnnnnnnnnnnnnnnnnnnnnnnnnnnnnnnnnnnnnnnnnnnnnnnnnnnnnnnnnnnnnnnnnnnnnnnnnnnnnnnnnnnnnnnnnnnnnnnnnnnnnnnnnnnnnnnnnnnnnnnnnnnnnnnnnnnnnnnnnnnnnnnnnnnnnnnnnnnnnnnnnnnnnnnnnnnnnnnnnnnnnnnnnnnnnnnnnnnnnnnnnnnnnnnnnnnnnnnnnnnnnnnnnnnnnnnnnnnnnnnnnnnnnnnnnnnnnnnnnnnnnnnnnnnnnnnnnnnnnnnnnnnnnnnnnnnnnnnnnnnnnnnnnnnnnnnnnnnnnnnnnnnnnnnnnnnnnnnnnnnnnnnnnnnnnnnnnnnnnnnnnnnnnnnnnnnnnnnnnnnnnnnnnnnnnnnnnnnnnnnnnnnnnnnnnnnnnnnnnnnnnnnnnnnnnnnnnnnnnnnnnnnnnnnnnnnnnnnnnnnnnnnnnnnnnnnnnnnnnnnnnnnnnnnnnnnnnnnnnnnnnnnnnnnnnnnnnnnnnnnnnnnnnnnnnnnnnnnnnnnnnnnnnnnnnnnnnnnnnnnnnnnnnnnnnnnnnnnnnnnnnnnnnnnnnnnnnnnnnnnnnnnnnnnnnnnnnnnnnnnnnnnnnnnnnnnnnnnnnnnnnnnnnnnnnnnnnnnnnnnnnnnnnnnnnnnnnnnnnnnnnnnnnnnnnnnnnnnnnnnnnnnnnnnnnnnnnnnnnnnnnnnnnnnnnnnnnnnnnnnnnnnnnnnnnnnnnnnnnnnnnnnnnnnnnnnnnnnnnnnnnnnnnnnnnnnnnnnnnnnnnnnnnnnnnnnnnnnnnnnnnnnnnnnnnnnnnnnnnnnnnnnnnnnnnnnnnnnnnnnnnnnnnnnnnnnnnnnnnnnnnnnnnnnnnnnnnnnnnnnnnnnnnnnnnnnnnnnnnnnnnnnnnnnnnnnnnnnnnnnnnnnnnnnnnnnnnnnnnnnnnnnnnnnnnnnnnnnnnnnnnnnnnnnnnnnnnnnnnnnnnnnnnnnnnnnnnnnnnnnnnnnnnnnnnnnnnnnnnnnnnnnnnnnnnnnnnnnnnnnnnnnnnnnnnnnnnnnnnnnnnnnnnnnnnnnnnnnnnnnnnnnnnnnnnnnnnnnnnnnnnnnnnnnnnnnnnnnnnnnnnnnnnnnnnnnnnnnnnnnnnnnnnnnnnnnnnnnnnnnnnnnnnnnnnnnnnnnnnnnnnnnnnnnnnnnnnnnnnnnnnnnnnnnnnnnnnnnnnnnnnnnnnnnnnnnnnnnnnnnnnnnnnnnnnnnnnnnnnnnnnnnnnnnnnnnnnnnnnnnnnnnnnnnnnnnnnnnnnnnnnnnnnnnnnnnnnnnnnnnnnnnnnnnnnnnnnnnnnnnnnnnnnnnnnnnnnnnnnnnnnnnnnnnnnnnnnnnnnnnnnnnnnnnnnnnnnnnnnnnnnnnnnnnnnnnnnnnnnnnnnnnnnnnnnnnnnnnnnnnnnnnnnnnnnnnnnnnnnnnnnnnnnnnnnnnnnnnnnnnnnnnnnnnnnnnnnnnnnnnnnnnnnnnnnnnnnnnnnnnnnnnnnnnnnnnnnnnnnnnnnnnnnnnnnnnnnnnnnnnnnnnnnnnnnnnnnnnnnnnnnnnnnnnnnnnnnnnnnnnnnnnnnnnnnnnnnnnnnnnnnnnnnnnnnnnnnnnnnnnnnnnnnnnnnnnnnnnnnnnnnnnnnnnnnnnnnnnnnnnnnnnnnnnnnnnnnnnnnnnnnnnnnnnnnnnnnnnnnnnnnnnnnnnnnnnnnnnnnnnnnnnnnnnnnnnnnnnnnnnnnnnnnnnnnnnnnnnnnnnnnnnnnnnnnnnnnnnnnnnnnnnnnnnnnnnnnnnnnnnnnnnnnnnnnnnnnnnnnnnnnnnnnnnnnnnnnnnnnnnnnnnnnnnnnnnnnnnnnnnnnnnnnnnnnnnnnnnnnnnnnnnnnnnnnnnnnnnnnnnnnnnnnnnnnnnnnnnnnnnnnnnnnnnnnnnnnaactggaaaattcacagggatatatccattcatatttttcaggacaggatagtttttactgtggggcaaataggttaaaattacactgtatggtagttgcatttaggttttaaagcaaagaatctgtagagaaatctatgcaatatatagtttgtccagattagctttcgtttggggaatgaagttctgaaatatctaaagcagtttactcatcagttgaaaagtcctccaaaaagagaactattgggaaaccatggtgtgtggtggtggaaaagaaaagctccctcagttttttggagggaataacttnnnnnnntacttaaatggctaagttttcttggtgcagttaagaattaaacttgtcaattttaacattgctgttacatctgaaataaacttatgtgatgttctggta

SEQ ID NO: 32676 - DNA, 1219 bp, Macaca Mulatta
  misc_feature (1)...(1219): n = A,T,C or G
gagtcatccttttctccccatcattccaaacacccagagaagtcagctagaagacagactgaataaccaggagcgtaccatagctttcctccttgaacaagcattccgcatcaaggaggatatctctgcttgtctgcaggggacccatggctttcgaaaagaggaatcacttgccaggaagttactggaaagccacatccagaccatcaccagcatcgtcaaaaaactcagccaaaacattgannnnnnnnnnnnnnnnnnnnnnnnnnnnnnnnnnnnnnnnnnnnnnnnnnnnnnnnnnnnnnnnnnnnnnnnnnnnnnnnnnnnnnnnnnnnnnnnnnnnnnnnnnnnnnnnnnnnnnnnnnnnnnnnnnnnnnnnnnnnnnnnnnnnnnnnnnnnnnnnnnnnnnnnnnnnnnnnnnnnnnnnnnnnnnnnnnnnnnnnnnnnnnnnnnnnnnnnnnnnnnnnnnnnnnnnnnnnnnnnnnnnnnnnnnnnnnnnnnnnnnnnnnnnnnnnnnnnnnnnnnnnnnnnnnnnnnnnnnnnnnnnnnnnnnnnnnnnnnnnnnnnnnnnnnnnnnnnnnnnnnnnnnnnnnnnnnnnnnnnnnnnnnnnnnnnnnnnnnnnnnnnnnnnnnnnnnnnnnnnnnnnnnnnnnnnnnnnnnnnnnnnnnnnnnnnnnnnnnnnnnnnnnnnnnnnnnnnnnnnnnnnnnnnnnnnnnnnnnnnnnnnnnnnnnnnnnnnnnnnnnnnnnnnnnnnnnnnnnnnnnnnnnnnnnnnnnnnnnnnnnnnnnnnnnnnnnnnnnnnnnnnnnnnnnnnnnnnnnnnnnnnnnnnnnnnnnnnnnnnnnnnnnnnnnnnnnnnnnnnnnnnnnnnnnnnnnnnnnnnnnnnnnnnnnnnnnnnnnnnnnnnnnnnnnnnnnnnnnnnnnnnncaggatttaaatcaattcatgactctctcagctctctccagcaaatacagaaaacaaagatggatttagagaaatgtaaagtacagaaagacctgaagaaattacagcgtaagatagtggaactccaggaagtataaaccttttcagtcatcttctttttcaccagccaatggagtgatttgttgggaaaagttctgaagaagaaagttactatctctgggatgtttactgcttctaatgtctccttttaaggagatgaatgtaccagaaaaataataaagcacagaagct

SEQ ID NO: 32677 - DNA, 872 bp, Macaca Mulatta
  misc_feature (1)...(872): n = A,T,C or G
cccggaagggaaactacgcagcgaaggtgaccggggaccnagcatttcagatctgcttggtagacctggtgcaccaccaccatgttggctgcaaggcttgtgtgtctccggacactaccttctagggttttccacccagctttcaccaaggcctcccctgttgtgaagaattccatcacgaagaatcaatggctgttaacacccagcagggnggaatatgccaccaaaacaagaattgggatgcggcgtgggagaactggtcaagaactcaaagaggcagcatttgaaccatcgatggaaaaaatatttaaaanttgatcagatgggaagatggtttgttgctggaggggctgctgttggtcttggagcattgtgctactatgggttgggactgtctaatgagattggagctattgaaaaggctgtnnnnnnnnnnnnnnnnnnnnnnnnnnnnnnnnnnnnnnnnnnnnnnnnnnnnnnnnnnnnnnnnnnnnnnnnnnnnnnnnnnnnnnnnnnnnnnnnnnnnnnnnnnnnnnnnnnnnnnnnnnnnnnnnnnnnnnnnnnnnnnnnnnnnnnnnnnnnnnnnnnnnnnnnnnnnggagctggaatgctggtacaatcaataccatatctttagagcccaggcccaaaacatcttgcctggttgctacattctggtnggtgtgatgggtgcagtggtggctcctctgacaatattagggggtcctcttctcatcagagctgcatggtacacagctggcattgtgggaggcctctccactgtggccatgtgtgcccccagtgaaaagtttctgaacatgggtgcacccctgggagtgggcctgggtctcgtctttgtgtcctcactgggn

SEQ ID NO: 32678 - DNA, 413 bp, Macaca Mulatta
tgtgttcagcaaacattcagcctgccccgactgcagagtagcagcaaaggagcccctcttttcctttgtggggctcttcgaggagtcgctgggtctcttcctttgcccccagcttgactgcatttcctatctggtgcaaggaggaagtgcccctcatagatgttcactgcccacctgctctactacattgttacaagttctttcttgctttaacccctcctgctttgatatctccacaacccagagcagagggtcaggtagtcttcgtcaattctaggtcacatgacaactgattggaccagactcaggtggggtttccgtcctgtaccctttgcgggtactctgccttttattgggaggagactaatttaacccccaaatccttttgtcagcctgggtacagctgttgctcc

SEQ ID NO: 32679 - DNA, 752 bp, Macaca Mulatta
taatttacaggtctggggagtaaaatacaatggaaatggttcaaaaattgtgtctgttggagatgaccaggaaattcacatctatgattgtccaatttaaacatcaaagtctccaggcttatgctgcaaagagaatgtacggattgatcatgacattccttacctttttaggcttgtttaaaagaaatatagcatttattgtagcaaagacttaaattttgtagatacaatataaatcttttcatgttttattgggaatgctgttcatactttaacataaagctttcttaatgcaaacaccagtgtccttgaacatgcttcttttttcagttaccctattaccagtgaaacagtaagagggattggcattaagagcaaatctctgccttagccatcaagagatccaggcacttctttaactttccggcttagaaatacaggctcttccagggaattgactcatgcagtgagatacagcagcgagctccccagagctgtgataaagaagctaatctattatagaatggagtcctgaaggaaagagtatatttgactgcataggaacattatgtactcccgtctatctgggcatccttctacttgatgtattaaagatgtcccctgccaagccctccttccccttattaatttcagagaggtctctaactcactaggtgggtattggaaggcaggctgctattcttgctgccttaataatgcctaggctcaagcctgtggctcattccgtagaa

SEQ ID NO: 32680 - DNA, 187 bp, Macaca Mulatta
gcccacaggtgacgttcccatggatggcatgtctgtgtccgacctgggtcccgtggtgctcagcctgctgaagatgccagaaaaatacatcggccagaacattgggctgagtacttgtaggcacacggctgaggagtacgctgccctgctcaccaagcacacccacaaagtcgtgcacgatgccaag

SEQ ID NO: 32681 - DNA, 213 bp, Macaca Mulatta
aggcggtgagtcccgaggagaagttctggaatgcgtctggggcagcctttgtgactgtccaggagcacgggcacgtggcaggggcgttgggggcagagatcatcctgacgacgctgctggccctggccgtgtgcatgggtgccatcaatgagaagacaaagggccctctggccccattctccatcggctttgctgtcatcgtggatatcctgg

SEQ ID NO: 32682 - DNA, 953 bp, Macaca Mulatta
  misc_feature (1)...(953): n = A,T,C or G
taaagagaaaatcacagcatggtactctgaacttggagtagccaatcccaggggacgctttaggcgggaaaatcagagtntcagactgctcccggtgccatgaatcgagacaacgcctttgcaaagagacccagggatgatgctaaaacatcagagaagagaagcaaggnaggccttcaatgatattgcccaatacttctctaagaaagaatgggaaaagatgaaattctcggagaaaatcagctatgtgtatatgaagataaactatgaggccatgactaaactaggtnctaggtttcaatgtcaccctcccacctttcatgcgtaataaacaggccacagacttccaggggaatgattctgataatgaccgtaactgcgggaatnnnnnnnnnnnnnnnnnnnnnnnnnnnnnnnnnnnnnnnnnnnnnnnnnnnaagatcatgctcaagaagccagcagaggaaggcaacaattcgaagggagtgccagaagcatctggcccacagaacgatgggaaacagccgtgccccccgggaaaaccaagtacctctaagaagattaacaagagatctggnggacccaaaagggggaaacatgcctggacccacagactgcgtgagagaaagcagctggtgatttatgaagagatcagcgaccctgaggaagacgacgagtaactcnnnnctcagggatgtgacacatgcccatgatgagaagcataacgtggtgacctttcacgaacatgggcatggctgcagacccctcgtcatcaggtgcatagcaagcgaaagcgagtgttcactacagtgcaaagttgagcgtcatttttcttagagtgccaagagttcgatgttagcgtttccgttgaattggcatacagagagccattctgttagatattatccttttcattgatgagcaagacatgcttaacgcgtatttcggattgt

SEQ ID NO: 32683 - DNA, 586 bp, Macaca Mulatta
  misc_feature (1)...(586): n = A,T,C or G
aaagcactggagacagacaagaaagactgggtcaaagatacagaaccggaagccgaccaggatgggtactaccagaccacactccctgccatcgtcttccannnnnnnnnnnnnnnnnnnnnnnnnnnnnnnnnnnnnnnnnnnnnnnnnnnnnnnnnnnnnnnnnnnnnnnnnnnnnnnnnnnnnnnnnnnnnnnnnnnnnnnnnnnnnnnnnnnnnnnnnnnnnnnnnnnnnnnnnnnnnnnnnnnnnnnnnnnnnnnnnnnnnnnnnnnnnnnnnnnnnnnnnnnnnnnnnnnnnnnnnnnnnnnnnnnnnnnnnnnnnnnnnnnnnnnnnnnnnnnnnnnnnnnnnnnnnnnnnnnnnnnnnnnnnnnnnnnnnnnnnnnnnnnnnnnnnnnnnnnnnnnnnnnnnnnnnnnnnnnnnnnnnnnnnnnnnnnnnnnnnnnnnnnnnnnnnnnnnnnnngcaacatctgaatgaattgatgacgaagaagtggctgttaggatcaaacgctgtagacattatctgtgtcactgtggaagactatttcaacgattttgccaaaattaaaaagccatataagaag

SEQ ID NO: 32684 - DNA, 372 bp, Macaca Mulatta
aggaccctccggtatgttccagaggaatccaaagacaaagttatctcagatgaagatgtcctaggaacgttactgaaagttttccaggctctattcttaaatgatttcaataaacaatcagaaatcttgactatgcttccagaatctgttaaatcaaaatatcaagacctactggcagttgaacatcaaggggtgaaactgcttgaaaacagacatcaacagcaaagtacctttaagccagaagaaattctttacaagactctgggtttcagtgttgcccaagcaactagctcattgatttctgctggaaaaggtgtcttcgttacgaaaggattggtaccaaaaggcgcagtcgtatctatgtatcctggt

SEQ ID NO: 32685 - DNA, 1034 bp, Macaca Mulatta
  misc_feature (1)...(1034): n = A,T,C or G
tcggcacgagggacacacncagcacagtctggtaggctacagtatcaagtctctagagaaaggctgaaacacccagaacaagagagaccaggtccaggatgcccagtctgttctggtcccatctgccagcaatctggctgctgctgagccaactccttagagaaagtctagcagcagagttgaagggatgtggtccccaatttggaaaaaggatgctgtcatattgccccatgcctgaaaagacattcaccaccaccccaggagggtggctgctggaatctggacgacccacagaaacggtgtcaacctccaacaacaaagatggaaaaaccttaggtacaacatcagaattcattcctaacttgtcaccggagctgaagaaaccactgtctgacgggcagccatcattgaagaaaataatactttcccgaaaaaagagaaatggacatcacagatttgatccattctgttgtgaagtgatttgtgatgatggaacttcagttaaattatgtacatagtagagtaatcgtggactggacatctcatccattctcatatgtattctcaatgacaaattcactgatgcccagttaaatgattgctgtttattagaacatgagaatcattattggtattcacaggtttcacttgctctgtactaatatattctctccaaagggaggaagttagatagatggaataagttctagtagttgatagtacaatggggaaattatacttaacattaactcactgtatattccaaaatagctagaagagaattgtaatgattccaacacaaaaaagatgaatgttagtttggatggatatcccaattaccctgattttatcattaaaccttatatacatgtatcaaaatatcacatgtactacaaaaatgtgtacaactataatatgtgaattaaaaacttactggaacacaccataagnnnnnnnnnnnnnnnnnnnggtaccattcgcctatagtgagtcgtatacatcatggacggtttcaattctgatggaaacctggg

SEQ ID NO: 32686 - DNA, 743 bp, Macaca Mulatta
cgtcctgggggtcattagctcccagccagggcatataaagggcccagaggggcacgaggacattcacacccgagaacacccagctcctctcaacagcccaccccacaccagcctcagacaccaccatgactggctcctgctgcggctccaccttctcctccctgagctacgggggaggctgctgccagccctgctgctaccgcgacccctgctgctgccgccccgtgacctaccagaccaccgtgtgccgccccgtgacctgcgtgccccgctgcacgcgccccatctgcgagccctgccgccgcccggtgtgctgcgacccctgctccctgcaggaaggctgctgccgccccatcacctgctgccccacgtcgtgcacggctgtggtctgcaggccctgctgctgggccaccacctgctgccagcctgtgtctgtgcagtccccctgctgccggcccccctgcggccagccgacgccttgcagcaccacctgcaggaccttctcctgctgagaccccacctctcccctcaacgcacaaaacattcccaggtgcacagaatcatgtgcagactcttccaccccttctggatcagatgagagactccacctttgcagcctagctgatccacaagcacgaattcaacaataacatcctgtttccccacataattatgtagctaatcctggccctctctgacaatcttgagaaaaattccagctttcatcatttgatttcttggct

SEQ ID NO: 32687 - DNA, 308 bp, Macaca Mulatta
atgggcgttgctgtgagtgctggtgaagacaatgatgagctgatagataatttgaaagaagcacagtatatccggactgagctggtagagcaggctttccgagctatcgatcgtgcagactattatcttgaagaatttaaagaaaatgcttataaagacttggcatggaagcatggaaacattcacctctcagccccatgcatctattcagaggtgatggaagccttagatctgcagcctggactctcatttctgaacctgggcagtggcactgggtacctgagctccatggtgggcctcattctagg

SEQ ID NO: 32688 - DNA, 348 bp, Macaca Mulatta
ttggaggccttggtgatgggttggtgagagggatgggaaggaaggggatattgaggagaagcccacctggggtgactgagtgaggcccctggggtcaggccttgccatgtgaggggtggagtccccagtggatggggttcctatgatcctaactcttctcccctcccctcccctagggagtgcctgcagggcaccatccgcaacagccaggaggcggaggtctcctgccccttcattgacaacacctactcgtgctcgggcaagctgctggagagggagatcaaggcggtaaggcctcggggtgggagacataccccagtcctaaggaactgggcccggagcaggcag

SEQ ID NO: 32689 - DNA, 893 bp, Macaca Mulatta
  misc_feature (1)...(893): n = A,T,C or G
cttttgcgcgaaagaaaatatggtttaatagaaaatttttcacaacaacttctttttctcgatattaaattggcacaggggcggggagcgggtaatatttttaatatttgaggtgtttctccttatgaggatcttcctttttgatatgagtttcccggaaatgtgcgcctttgggaacactccttttggggatatttttttggaaaaggtttttggtttcccccnnnnnnnnnnnnnnnnnnnnnnnnnnnnnttccaaacccttttttttgtacgcaggattttttttagggaaaaaagcttttgaccctgtttccttttcttaaggggggcccggggggccaaannnnnnnnnnnnnnnnnngattttttgaggggccggggtgggccgagaaatatttatattttatttattttagtgggggtgttgggttttttttgtctgccaaatgnnnnnnnnnnnnnnnnnnnnnnnngtatttatttntnntctgtgttaagagtcctgttgagagcaccaggtaaacattctgcatcccttcccttagtaagtagtcttttcactccttggcctgagctgtcctcacagggcagtgagggcagatcagagaacacattagaaacacttaaaagcaaatcgtacaaactggacaggttccctgccccccgccaaaactcgcatcccaacagagggaacaagtactaaatcatttttgacaatgtaaataagactgaaaacaggttaaacagctgctgaacttaagggcacgacaaaaaggattcctctctctgacccaggtcagcaaaatgctttgggtgtgaggtgaaaaaatgggtgggtaagagcagctgtacagagtggggtgaaatgttaaacaaggtacagtgccccc

SEQ ID NO: 32690 - DNA, 585 bp, Macaca Mulatta
  misc_feature (1)...(585): n = A,T,C or G
ggtgaaatctattcttgaaagaagtaaagaggagctgtcccgaacagtgaagtgtcgtaatgcggccctgaaagagagtcagaagttgaaagaggacctcgaggccgtggaggacagggaaaacaagaaggcaaggaatcagtcccttctgaccgnnnnnnnnnnnnnnnnnnnnnnnnnnnnnnnnnnnnnnnnnnnnnnnnnnnnnnnnnnnnnnnnnnnnnnnnnnnnnnnnnnnnnnnnnnnnnnnnnnnnnnnnnnnnnnnnnnnnnnnnnnnnnnnnnnnnnnnnnnnnnnnnnnnnnnnnnnnnnnnnnnnnnngggatctcaatcaacagagggtgcagaagctagaagctgaagtggaccagtggcaggccaggatgcttgtcatggaggaccagcacaacagtgagnnnnnnnnnnnnnnnnnnnnnnnnnnnnnnnnnnnnnnnnnnnnnnnnnnnnnnnnnnnnnnnnnnnnnnnnnnnnnnnnnnnnnnnnnnnnnnnnnnnnnnnnnnnnnnnnnnnnnnnnnnnnnnnnnnnnnnnnaagaacttgagcgacagaatttggaaaccttca

SEQ ID NO: 32691 - DNA, 142 bp, Macaca Mulatta
gcattggagaccctactgctgaatggagtgctaaccctggtgctagaggaggatggaactgcagtggacagtgaggacttcttccagctgctggaggatgacacgtgcctgatggtgttggagtctggtcagagctggagcc

SEQ ID NO: 32692 - DNA, 609 bp, Macaca Mulatta
tctaagaacctgtgaaacgttcactcctataatgtgattatttttcacttcttttctactcctctcaggcgccaaatggtctcccagctgtgggcagttttgtgtcagcatccagcatggctccttaccctaccccggcccaagtgtcgccttacatgacctacagcgctgctccttctggttatgttgctggacatgggtggcaacatgctggcagcaccccattgtcaccccacaactgtgacattcccgcatcgctggcgttcaagggaatgcaggcagccagagaaggtagtcattctgtcacggcttccgcactatgatgggaaattccgtctccagcagcttcacccgggtctccccgtatcagcacctcctcccccaattcgcaggtctcacattccacccctcctgccctccaactctcctgccttgaaagctggctgtacggactcacatcctttgtgctgatgatacttacatatttcttgccataacttttctcttgcagaaaaactgacatgactttatgatttaaaaacaagagcaacaataagcattgaatgagacattgtgttgcccacatactgtcttaatatagcaaagaaa

SEQ ID NO: 32693 - DNA, 409 bp, Macaca Mulatta
ctttaggggaagaagctgggaggaacgagacaactcagagaccctagctccagccggaggtgagacctgaggcatcttccctctgggagagcacacactctggccctgagtaggtccccaagaaaaggggcaagatgaagccttccctaccctgtgttccatcccctctgttgagacccccgactgagggttttttttttgacccagctctgaccttttccccagtaggaccacatatcttgtgtcctctgccatgggagcaccatgctgaaacctctcttcccttttagggtgacggacagtacttgttgtctctgcgagcagctggggcccagctttctgctcttctgagtgagcaagaaaaatcctgtttcctttcgactcagcccatgcagtctggaggcatcca

SEQ ID NO: 32694 - DNA, 177 bp, Macaca Mulatta
  misc_feature (1)...(177): n = A,T,C or G
gatgagagtctggataacacatggctaaacaggactgacaccatgattcagacccctggccccctgccagcaccacaactcacgtccactgtactgcgggagaacagccggcccatgggagaccagattcaagaacctgagtctgaacatggttctgaaccagactttttacacaan

SEQ ID NO: 32695 - DNA, 787 bp, Macaca Mulatta
  misc_feature (1)...(787): n = A,T,C or G
gggtgttttgttcctgtcttcattgtttcaggtatttctttccccctctggattccccacgggctggatcgagatggtccagttatgcccagctcnnnnnnnnnnnnnnnnnnnnnntggtagagcactcttgcgatgctgacactgccaacctccagtatcctcaccctcgcagacgatatctctctcggcctcttaatcccttacctgagaatgaaggggtttaaaacactgatttaacattgaaaggccttattcaagtgcttgtaaatgctttcatttctggctgctttttgtttttcttcactttctttcagaagatttttctaacttagggtctgtcttgcatgtattacaactggaatacggtgtttcgaacctaaatctgtttgtgcgtctccatcaaaggaacgttggcttcactgggtgataacctttgatgaaatgagatatgtccaagtaacgttaactgtgaagttaaacacagtagctgacttccaagtgcctgttttgtaaattttattttgaactgttaccatagtcttaagttgtttatgctttatcagactggctaatgtgaaagcatattcctaccaagctgattctgtcttttgagaccttagaaaatggatttccattttacagggctaatggttgcaactgactaagtatgtaaaataaaatcattcccggtggtataaagccaccaaaaccccaatgtggaactttttggggcctttttttacttcttcacccccncaaaaagggaaaaatgccctttcacaaa

SEQ ID NO: 32696 - DNA, 131 bp, Macaca Mulatta
cctgcaaaccattttaggtgtgccattcctagaagaagtcataaatccaaaacaagtaattccccaatatataatgtacaacatggctaatacaagtaaacatggagtagttatactacaaaacaaatcag

SEQ ID NO: 32697 - DNA, 8672 bp, Macaca Mulatta
  misc_feature (1)...(8672): n = A,T,C or G
tgccgccgctcctggcgcccctgctctgcctggcgctgctgcccgcgctcgccgcacgaggnnnnnnnnnnnnnnnnnnnnnnnnnnnnnnnnnnnnnnnnnnnnnnnnnnnnnnnnnnnnnnnnnnnnnnnnnnnnnnnnnnnnnnnnnnnnnnnnnnnnnnnnnnnnnnnnnnnnnnnnnnnnnnnnnnnnnnnnnnnnnnnnnnnnnnnnnnnnnnnnnnnnnnnnnnnnnnnnnnnnnnnnnnnnnnnnnnnnnnnnnnnnnnnnnnnnnnnnnnnnnnnnnnnnnnnnnnnnnnnnnnnnnnnnnnnnnnnnnnnnnnnnnnnnnnnnnnnnnnnnnnnnnnnnnnnnnnnnnnnnnnnnnnnnnnnnnnnnnnnnnnnnnnnnnnnnnnnnnnnnnnnnnnnnnnnnnnnnnnnnnnnnnnnnnnnnnnnnnnnnnnnnnnnnnnnnnnnnnnnnnnnnnnnnnnnnnnnnnnnnnnnnnnnnnnnnnnnnnnnnnnnnnnnnnnnnnnnnnnnnnnnnnnnnnnnnnnnnnnnnnnnnnnnnnnnnnnnnnnnnnnnnnnnnnnnnnnnnnnnnnnnnnnnnnnnnnnnnnnnnnnnnnnnnnnnnnnnnnnnnnnnnnnnnnnnnnnnnnnnnnnnnnnnnnnnnnnnnnnnnnnnnnnnnnnnnnnnnnnnnnnnnnnnnnnnnnnnnnnnnnnnnnnnnnnnnnnnnnnnnnnnnnnnnnnnnnnnnnnnnnnnnnnnnnnnnnnnnnnnnnnnnnnnnnnnnnnnnnnnnnnnnnnnnnnnnnnnnnnnnnnnnnnnnnnnnnnnnnnnnnnnnnnnnnnnnnnnnnnnnnnnnnnnnnnnnnnnnnnnnnnnnnnnnnnnnnnnnnnnnnnnnnnnnnnnnnnnnnnnnnnnnnnnnnnnnnnnnnnnnnnnnnnnnnnnnnnnnnnnnnnnnnnnnnnnnnnnnnnnnnnnnnnnnnnnnnnnnnnnnnnnnnnnnnnnnnnnnnnnnnnnnnnnnnnnnnnnnnnnnnnnnnnnnnnnnnnnnnnnnnnnnnnnnnnnnnnnnnnnnnnnnnnnnnnnnnnnnnnnnnnnnnnnnnnnnnnnnnnnnnnnnnnnnnnnnnnnnnnnnnnnnnnnnnnnnnnnnnnnnnnnnnnnnnnnnnnnnnnnnnnnnnnnnnnnnnnnnnnnnnnnnnnnnnnnnnnnnnnnnnnnnnnnnnnnnnnnnnnnnnnnnnnnnnnnnnnnnnnnnnnnnnnnnnnnnnnnnnnnnnnnnnnnnnnnnnnnnnnnnnnnnnnnnnnnnnnnnnnnnnnnnnnnnnnnnnnnnnnnnnnnnnnnnnnnnnnnnnnnnnnnnnnnnnnnnnnnnnnnnnnnnnnnnnnnnnnnnnnnnnnnnnnnnnnnnnnnnnnnnnnnnnnnnnnnnnnnnnnnnnnnnnnnnnnnnnnnnnnnnnnnnnnnnnnnnnnnnnnnnnnnnnnnnnnnnnnnnnnnnnnnnnnnnnnnnnnnnnnnnnnnnnnnnnnnnnnnnnnnnnnnnnnnnnnnnnnnnnnnnnnnnnnnnnnnnnnnnnnnnnnnnnnnnnnnnnnnnnnnnnnnnnnnnnnnnnnnnnnnnnnnnnnnnnnnnnnnnnnnnnnnnnnnnnnnnnnnnnnnnnnnnnnnnnnnnnnnnnnnnnnnnnnnnnnnnnnnnngggtacacggggatgcactgcgaggtggacattgatgagtgcgaccccgacccctgccactacggctcctgcaaggacggcgtcgccaccttcacctgcctctgccgcccgggttacacgggccaccactgcgagaccaacatcaacgagtgctccagccagccctgccgccacgggggcacctgccaggaccgcgacaacgcctacctctgcttctgtctgaaggggaccacaggncaggacccaactgcgagatcaacctggacgactgtgccagcagcccctgcgactcgggcacctgtctggacaagattgacggctacgagtgtgcctgtgagccgggctacacaggnnnnnnnnnnnnnnnnnnnnnnnnnnnnnnnnnnnnnnnnnnnnnnnnnnnnnnnnnnnnnnnnnnnnnnnnnnnnnnnnnnnnnnnnnnnnnnnnnnnnnnnnnnnnnnnnnnnnnnnnnnnnnnnnnnnnnnnnnnnnnnnnnnnnnnnnnnnnnnnnnnnnnnnnnnnnnnnnnnnnnnnnnnnnnnnnnnnnnnnnnnnnnnnnnnnnnnnnnnnnnnnnnnnnnnnnnnnnnnnnnnnnnnnnnnnnnnnnnnnnnnnnnnnnnnnnnnnnnnnnnnnnnnnnnnnnnnnnnnnnnnnnnnnnnnnnnnnnnnnnnnnnnnnnnnnnnnnnnnnnnnnnnnnnnnnnnnnnnnnnnnnnnnnnnnnnnnnnnnnnnnnnnnnnnnnnnnnnnnnnnnnnnnnnnnnnnnnnnnnnnnnnnnnnnnnnnnnnnnnnnnnnnnnnnaggcgccacgtgtgaggtggtgctggccccgtgtgcccccagcccctgcagaaacggtggggagtgcagggaatccgaggactatgagagcttctcctgcgtctgccccacgggctggcaaggnnnnnnnnnnnnnnnnnnnnnnnnnnnnnnnnnnnnnnnnnnnnnnnnnnnnnnnnnnnnnnnnnnnnnnnnnnnnnnnnnnnnnnnnnnnnnnnnnnnnnnnnnnnnnnnnnnnnnnnnnnnnnnnnnnnnnnnnnnnnnnnnnnnnnnnnnnnnnnnnnnnnnnnnnnnnnnnnnnnnnnnnnnnnnnnnnnnnnnnnnnnnnnnnnnnnnnnnnnnnnnnnnnnnnnnnnnnnnnnnnnnnnnnnnnnnnnnnnnnnnnnnnnnnnnnnnnnnnnnnnnnnnnnnnnnnnnnnnnnnnnnnnnnnnnnnnnnnnnnnnnnnnnnnnnnnnnnnnnnnnnnnnnnnnnnnnnnnnnnnnnnnnnnnnnnnnnnnnnnnnnnnnnnnnnnnnnnnnnnnnnnnnnnnnnnnnnnnnnnnnnnnnnnnnnnnnnnnnnnnnnnnnnnnnnnnnnnnnnnnnnnnnnnnnnnnnnnnnnnnnnnnnnnnnnnnnnnnnnnnnnnnnnnnnnnnnnnnnnnnnnnnnnnnnnnnnnnnnnnnnnnnnnnnnnnnnnnnnnnnnnnnnnnnnnnnnnnnnnnnnnnnnnnnnnnnnnnnnnnnnnnnnnnnnnnnnnnnnnnnnnnnnnnnnnnnnnnnnnnnnnnnnnnnnnnnnnnnnnnnnnnnnnnnnnnnnnnnnnnnnnnnnnnnnnnnnnnnnnnnnnnnnnnnnnnnnnnnnnnnnnnnnnnnnnnnnnnnnnnnnnnnnnnnnnnnnnnnnnnnnnnnnnnnnnnnnnnnnnnnnnnnnnnnnnnnnnnnnnnnnnnnnnnnnnnnnnnnnnnnnnnnnnnnnnnnnnnnnnnnnnnnnnnnnnnnnnnnnnnnnnnnnnnnnnnnnnnnnnnnnnnnnnnnnnnnnnnnnnnnnnnnnnnnnnnnnnnnnnnnnagtgcgtggccggctaccacggggtgaactgctctgaggagattgatgagtgcctgtcccacccttgccagaacgggggcacctgccttgacctccccaacacctacaagtgctcctgcccacggggcacacagggnnnnnnnnnnnnnnnnnnnnnnnnnnnnnnnnnnnnnnnnnnnnnnnnnnnnnnnnnnnnnnnnnnnnnnnnnnnnnnnnnnnnnnnnnnnnnnnnnnnnnnnnnnnnnnnnnnnnnnnnnnnnnnnnnnnnnnnnnnnnnnnnnnnnnnnnnnnnnnnnnnnnnnnnnnnnnnnnnnnnnnnnnnnnnnnnnnnnnnnnnnnnnnnnnnnnnnnnnnnnnnnnnnnnnnnnnnnnnnnnnnnnnnnnnnnnnnnnnnnnnnnnnnnnnnnnnnnnnnnnnnnnnnnnnnnnnnnnnnnnnnnnnnnnnnnnnnnnnnnnnnnnnnnnnnnnnnnnnnnnnnnnnnnnnnnnnnnnnnnnnnnnnnnnnggcttcgagggcgccacgtgtgagaatgacgctcgcacctgcggcagcctgcgctgcctcaacggtggcacgtgcatctctggcccgcgcagccccacctgcctgtgcctgggccccttcacgggccctgagtgccagttcccggccagcagcccctgcctgggcggcaacccctgctacaaccaggggacctgtgagcccacgtcggagagccccttctaccgttgcctgtgccccgccaaattcaacgggctcttgtgccacatcctggactacagcttcgggggcggggccgggcgcgacatccccccgccgcagatcgaggaggcgtgcgagctgcccgagtgccaggaggacgcgggcaacaaggtctgcagcctgcagtgcaacaaccacgcgtgcggctgggacggcggcgactgctccctcaacttcaatgacccctggaagaattgcacgcagtctctgcagtgctggaagtacttcagcgacggccactgtgacagccagtgcaactcggccggctgcctcttcgacggcttcgattgccagcgcgccgaaggccagtgcaanccccctgtacgaccagtactgcaaggaccacttcagcgacgggcactgcgaccagggctgcaacagcgcggagtgcgagtgggacgggctggactgcgcggagcatgtgccggagaggctggcggcgggcacgctggtggtggtggtgctgatgcccccggagcagctgcgcaacagctccttccacttcctgcgggagctcagccgggtgctgcacaccaacgtggtcttcaagcgcgacgcgcacggccagcagatgatcttcccgtactacggccgcgaggaggagctgcgcaagcaccccatcaagcgtgccgccgagggctgggccgcccccgaggccttgctgggccaggtgaaggcctcgctgctccctggtggcggtggcggtgggcggcggcggagggagctggaccccatggacgtccgcggnnnnnnnnnnnnnnnnnnnnnnnnnnnnnnnnnnnnnnnnnnnnnnnnnnnnnnnnnnnnnnnnnnnnnnnnnnnnnnnnnnnnnnnnnnnnnnnnnnnnnnnnnnnnnnnnnnnnnnnnnnnnnnnnnnnnnnnnnnnnnnnnnnnnngtgagaccgtggagccgcccccgccggcgcagctgcacttcatgtacgtggcggcggccgcctttgtgctcctgttcttcgtgggctgcggggtgctgctgtcccgcaagcgccggcggcagcatggccaactctggttccctgagggctttaaggtgtctgaggccagcaagaagaagcggcgggagcccctcggcgaggactctgtgggccnnngcccctgaagaacgcctcagatggtgccctcatggacgacaaccagaatgagtggnnnnnnnnnnnnnnnnnnnnnnnnnnnnnnnnnnnnnnnnnnnnnnnnnnnnnnnnnnnnnnnnnnnnnnnnnnnnnnnnnnnnnnnnnnnnnnnnnnnnnnnnnnnnnnnnnnnnnnnnnnnnnnnnnnnnnnnnnnnnnnnnnnnnnnnnnnnnnnnnnnnnnnnnnnnnnnnnnnnnnnnnnnnnnnnnnnnnnnnnnnnnnnnnnnnnnnnnnnnnnnnnnnnnnnnnnnnnnnnnnnnnnnnnnnnnnnnnnnnnnnnnnnnnnnnnnnnnnnnnnnnnnnnnnnnnnnnnnnnnnnnnnnnnnnnnnnnnnnnnnnnnnnnnnnnnnnnnnnnnnnnnnnnnnnnnnnnnnnnnnnnnnnnnnnnnnnnnnnnnnnnnnnnnnnnnnnnnnnnnnnnnnnnnnnnnnnnnnnnnnnnnnnnnnnnnnnnnnnnnnnnnnnnnnnnnnnnnnnnnnnnnnnnnnnnnnnnnnnnnnnnnnnnnnnnnnnnnnnnnnnnnnnnnnnnnnnnnnnnnnnnnnnnnnnnnnnnnnnnnnnnnnnnnnnnnnnnnnnnnnnnnnnnnnnnnnnnnnnnnnnnnnnnnnnnnnnnnnnnnnnnnnnnnnnnnnnnnnnnnnnnnnnnnnnnnnnnnnnnnnnnnnnnnnnnnnnnnnnnnnnnnnnnnnnnnnnnnnnnnnnnnnnnnnnnnnnnnnnnnnnnnnnnnnnnnnnnnnnnnnnnnnnnnnnnnnnnnnnnnnnnnnnnnnnnnnnnnnnnnnnnnnnnnnnnnnnnnnnnnnnnnnnnnnnnnnnnnnnnnnnnnnnnnnnnnnnnnnnnnnnnnnnnnnnnnnnnnnnnnnnnnnnnnnnnnnnnnnnnnnnnnnnnnnnnnnnnnnnnnnnnnnnnnnnnnnnnnnnnnnnnnnnnnnnnnnnnnnnnnnnnnnnnnnnnnnnnnnnnnnnnnnnnnnnnnnnnnnnnnnnnnnnnnnnnnnnnnnnnnnnnnnnnnnnnnnnnnnnnnnnnnnnnnnnnnnnnnnnnnnnnnnnnnnnnnnnnnnnnnnnnnnnnnnnnnnnnnnnnnnnnnnnnnnnnnnnnnnnnnnnnnnnnnnnnnnnnnnnnnnnnnnnnnnnnnnnnnnnnnnnnnnnnnnnnnnnnnnnnnnnnnnnnnnnnnnnnnnnnnnnnnnnnnnnnnnnnnnnnnnnnnnnnnnnnnnnnnnnnnnnnnnnnnnnnnnnnnnnnnnnnnnnnnnnnnnnnnnnnnnnnnnnnnnnnnnnnnnnnnnnnnnnnnnnnnnnnnnnnnnnnnnnnnnnnnnnnnnnnnnnnnnnnnnnnnnnnnnnnnnnnnnnnnnnnnnnnnnnnnnnnnnnnnnnnnnnnnnnnnnnnnnnnnnnnnnnnnnnnnnnnnnnnnnnnnnnnnnnnnnnnnnnnnnnnnnnnnnnnnnnnnnnnnnnnnnnnnnnnnnnnnnnnnnnnnnnnnnnnnnnnnnnnnnnnnnnnnnnnnnnnnnnnnnnnnnnnnnnnnnnnnnnnnnnnnnnnnnnnnnnnnnnnnnnnnnnnnnnnnnnnnnnnnnnnnnnnnnnnnnnnnnnnnnnnnnnnnnnnnnnnnnnnnnnnnnnnnnnnnnnnnnnnnnnnnnnnnnnnnnnnnnnnnnnnnnnnnnnnnnnnnnnnnnnnnnnnnnnnnnnnnnnnnnnnnnnnnnnnnnnnnnnnnnnnnnnnnnnnnnnnnnnnnnnnnnnnnnnnnnnnnnnnnnnnnnnnnnnnnnnnnnnnnnnnnnnnnnnnnnnnnnnnnnnnnnnnnnnnnnnnnnnnnnnnnnnnnnnnnnnnnnnnnnnnnnnnnnnnnnnnnnnnnnnnnnnnnnnnnnnnnnnnnnnnnnnnnnnnnnnnnnnnnnnnnnnnnnnnnnnnnnnnnnnnnnnnnnnnnnnnnnnnnnnnnnnnnnnnnnnnnnnnnnnnnnnnnnnnnnnnnnnnnnnnnnnnnnnnnnnnnnnnnnnnnnnnnnnnnnnnnnnnnnnnnnnnnnnnnnnnnnnnnnnnnnnnnnnnnnnnnnnnnnnnnnnnnnnnnnnnnnnnnnnnnnnnnnnnnnnnnnnnnnnnnnnnnnnnnnnnnnnnnnnnnnnnnnnnnnnnnnnnnnnnnnnnnnnnnnnnnnnnnnnnnnnnnnnnnnnnnnnnnnnnnnnnnnnnnnnnnnnnnnnnnnnnnnnnnnnnnnnnnnnnnnnnnnnnnnnnnnnnnnnnnnnnnnnnnnnnnnnnnnnnnnnnnnnnnnnnnnnnnnnnnnnnnnnnnnnnnnnnnnnnnnnnnnnnnnnnnnnnnnngtggacgccggggccgaccaaaggagccttttttaaaaacacgtgtttttatacaaaataagaacaaggattttaattttttttttagtatttatttatgtacttttattttacacaaaacactgcctttttatttatatgtactgtttcatctggctccaggtagaaacttttatctgttacaagaaaacaagcaaattctgagaaccagggttttcctacccaggatgaaannnnnnnnnnnnnnnnnnnnnnnnnnnnaaagattcatgatttataaatgccatttatttattgattccttttttcaaaatccaaaaagaagtgatgttggagaagggaagttgaacgagcatagtccaaaaagctcctggggcgcccaggccgcgccctttcctcgccgcccacccaaccccaagccagcccggccactccgccagcatcacctgcgtgttaggagaagctgcatccagaggcaaacggaggcaaagccggcacacctttggcatggattaatttgcatcggaaataggaaactgaagtaaaaggatatgggttagatattgcgatgtgtttnnnnnnnnnnnnnnnnnnnnnnnnnnnnnnnnnnnnnnnnnnnnnnnnnnnnnnnnnnnnnnnnnnnnnnnnnnnnnnnnnnnnnnnnnnnnnnnnnnnnnnnnnnnnnnnnnnnnnnnnnnnnnnnnnnnnnnnnnnnnnnnnnnnnnnnnnnnnnnnnnnnnnnnnnnnnnnnnnnnnnnnnnnnnnnnnnnnnnnnnnnnnnnnnnnnnnnnnnnnnnnnnnnnnnnnnnnnnnnnnnnnnnnnnnnnnnnnnnnnnnnnnnnnnnnncactgcctgggctgaccctggtggcagccccagcatctcaacctgcacaacgtcccccaggctccgaggaagatgcgccagc

SEQ ID NO: 32698 - DNA, 893 bp, Macaca Mulatta
gattcctgaccagaacattgatgtagaagccctttaggttgcgtttggttcactgtatcgagatgacgtgctcttaaagcccagtcgagttgttgccattttggcagctgcttgtatgctgcagttggatggtttaatacagcagtgtggggagacgatgaaggagacaattactgtgaaaactgtatgtggctattacacatcagtagggacctatggattagattccgtaaagaaaaagtgccttgaatggcttctaaacaatttgatgactcaccagaatgttaaactttttaaagaactcagtataaatgtcatgaaacagctcattggttcatctaacttatttgtgatgcaagtggagatggatgtatacaccgctctaaaaaagtggatgtttcttcaacttgtgccttcttggaatggatctttaaaacagcttttgacagaaacagatgtctggttttccaaacagagaaaagattttgaagatatggcctttcttgaaactgaacaaggaaaaccatttgtatcagtattcagacatttaaggttacaatatattatcagtgacctggcttctgcaagaattattgaacaagatgctatagtacctgcagaatggctgtcttctgtgtataaacagcagtggtttgctatgctgcgggccgaacaagacagtgaggtagggcctcaagaaatcgataaagaagaactggagggaaatagcatgaggtgtggtagaaagcttgccaaagacggtgaatactgctggtgttggacgggttttaacttcggctttgacctacttgtaacttacaccaatcgatgcgtcattttcaaacgcaatacactgaatcagccatgtagcgggtctgtcagtttacagcctc

SEQ ID NO: 32699 - DNA, 900 bp, Macaca Mulatta
  misc_feature (1)...(900): n = A,T,C or G
tttttgtcttctgccactgttgctccttggtttcccatgcataattgataagcccagttattcagtaatgtttacaaattaattaactttgaatgatagctaaaagattatgaggtaacccaagtgcaaattatgtatgggataagcatcctttagtgcatcctaaggaatgctttgtcagctaaacccagtattgataactttagtaatnnnnnnnnnnnnnnnnnnnnnnnnnnnnnnnnnnnnnnnnnnnnnnnnnnnnnnnnnnnnnnnnnnnnnnnnnnnnnnnnnnnnnnnnnnnnnnnnnnnnnnnnnnnnnnnnnnnnnnnnnnnnnnnnnnnnnnnnnnnnnnnnnnnnnnnnnnnnnnnnnnnnnnnnnnnnnnnnnnnnnnnnnnnnnnnnnnnnnnnnnnnnnnnnnnnnnnnnnnnnnnnnnnnnnnnnnnnnnnnnnnnnnnnnnnnnnnnnnnnnnnnnnnnnnnnnnagcaagttgttttaaaatgttaatttagagaacagtgaaattgacaatgtaggagcaaatgacattgaggtttactgacatagacaatttcactggtgcttagactattgtgcagtaggcctaaatagtagtggacaatgcttcctgctagcagaaagccttcatcttattgagtacctaagccaggttccaggtgtcctttgaggatagccaagtttgaaatttttagtttctcaggcagagctcttctgtgtggtagggactcacagggcaaagtaaaattacaattcctttactgctacagaatattaactataggttactaaatgagtgctatggtataatactggccctcccttcacacaacaggacaccaccccagttttgttttgtttcctgggtttcttccccctttgt

SEQ ID NO: 32700 - DNA, 110 bp, Macaca Mulatta
gagttctcccgtttccacgaagagatcctgcccatgttcgaccgactgcagaacaacaggaaggagtggaaggcactggctgatgagtacgaggccaaagtgaaggctct

SEQ ID NO: 32701 - DNA, 509 bp, Macaca Mulatta
  misc_feature (1)...(509): n = A,T,C or G
gggggtgctgcggaggaacgatcagaatcatctgagaaacatataattgatgagaaccaacttactcttattgagaaggttgaaaagaagaggtgtgaaatactcagtaagtgggatgagattcaagctctggaaaaagaaattaaaacaactttggttcacactggaatttcagatatcactgagaataggattaaaagcatagagcatgaagccatacaattggaaacagaaaatatgattttaaagaagaaaataaaagttactgaaaaccatgtgaagcagatcataggaaagatcagtgaagaggggcaggagggcctttggaaatttattaaggaatttgtaaaatcagaggacacagaagataacgctcaagcaactgaacaaatggccaatgaaaattctttacttccatgtatgtagcatggatatttgcagatgtatatacattcataaagatacatttcgtgaannnnnnnnnnnnnnnnnnnnnnnnnnnnnnnnnn

SEQ ID NO: 32702 - DNA, 374 bp, Macaca Mulatta
  misc_feature (1)...(374): n = A,T,C or G
tgaatcagctgaggctgttgccatcccgtcttgaggcacaggctgtgaggcttctggccgcacatgaagtcccagtgtttggctggcgcagcaggtcctccgggtcaccggccaccctcccaagcagcaaagatggaggcagctccagttacatggaagagatgtacttcgcctggttggaaaaccccgnnnnnnnnnnnnnnnnnnnnnnnnnnnnnnnnnnnnnnnnnnnnnnnnnnnnnnnnttctggctctgctcagacacggccnccttctgttgtccgtgacagcaggtctgcagtctcaagccggaccaagaccagcaagttagtggaggaccacctggctgtgcagtccctgatccgggcctacca

SEQ ID NO: 32703 - DNA, 827 bp, Macaca Mulatta
  misc_feature (1)...(827): n = A,T,C or G
agatagtgaattcctaagaagaaaataatggattgcatattagttattctctaagtggactcaacagtgtgcaagcttgttgcaaaagccaagagaagatggcaactccttatgtcccagttcctatgcccataggaaactctgcttccagttttacgaccaacagaaatcaaagaagttcttcttttggcagtgtctcaacaagctcaaactcttctaaaggccagttagaagacgcaaatatgggtaattttaaacagacaagtgttcctgatcaaatggataatacttcacctgtctgtagcagtcccctcattaggactaaatttacaggtgctgcttcttccattgagtattctactagaccgagagaaactgaagagcaaaatccggaaacagtgatttgggaagatagaccatctacacctactatactgggttatgaagtgnnnnnnnnnnnnnnnnnnnnnnnnnnnnnnnnnnnnnnnnnnnnnnnnnnnnnnnnnnnnnnnnnnnnnnnnnnnnnnnnnnnnnnnnnnnnnnnnnnnnnnnnnnnnnnnnnnnnnnnnnnnnnnnnnnnnnnnnnnnnnnnnnnnnnnnnnnnnnnnnnnnnnnnnnnnnnnnnnnnnnnnnnnnnnnnnnnnnnnnnnnnnnnnnnnnnnnnnnnnnnnnnnnnnnnnnnnnnnnnnngcattctgtgaaactttagaagagactaactaccgcttacagaaagaactacttgaaaaacaaaaggagatggaatcactaaagaaactgctcagtgagaagcaacttcatatagacactttagagaacagaatcag

SEQ ID NO: 32704 - DNA, 692 bp, Macaca Mulatta
  misc_feature (1)...(692): n = A,T,C or G
tgccgccgccgccacccccgcccaggatggcggaagtggaggcgccgacggcggccgagacggacatgaagcaatatcacggctccggcggcgtcgccatggacgtggaacggagccgtttcccctactgcgtggtgtggacgcccatcccggtgctcacgtgnnnnnnnnnnnnnnnnnnnnnnnnnnnnnnnnnnnnnnnnnnnnnnnnnnnnnnnnnnnnnnnnnnnnnnnnnnnnnnnnnnnnnnnnnnnnnnnnnnnnnnnnnnnnnnnnnntactggaagttggaccctgctcaggtctatgctagcgggcccaacgcgtgggacacggctgtgcatgatgcctctgaggagtacaagcaccgcatgnnnnnnnnnnnnnnnnnnnnnnnnnnnnnnnnnnnnnnnnnnnnnnnnnnnnnnnnnnnnnnnnnnnnnnnnnnnnnnnnnnnnnnnnnnnnnnnnnnnnnnnnnnnnnnnnnnnnnnnnnnnnnngtcagtgttggggccttcgtgaagacctggctgccgttcatccttctcctgggcatcatcctcaccgtcagcttggtctttaacctccggtgatggctgctctgtggccccgcacccaccagggtaccgaggaaacagccgccatcccttttggttccagatttttttctcctcaccgcaaaaggcacggttg

SEQ ID NO: 32705 - DNA, 2399 bp, Macaca Mulatta
  misc_feature (1)...(2399): n = A,T,C or G
ggtggctctggtaggcgaggaggaaggttttctgctcaaggaatgggngaaccttttacccagctgattatgcagagccagccaatactgatgataactatggcaatagtagcggcaatacgtggaacaacacnnnnnnnnnnnnnnnnnnnnnnnnnnnnnnnnnnnnnnnnnnnnnnnnnnnnnnnnnnnnnnnnnnnnnnnnnnnnnnnnnnnnnnnnnnnnnnnnnnnnnnnnnnnnnnnnnnnnnnnnnnnnnnnnnnnnnnnnnnnnnnnnnnnnnnnnnnnnnnnnnnnnnnnnnnnnnnnnnnnnnnnnnnnnnnnnnnnnnnnnnnnnnnnnnnnnnnnnnnnnnnnnnnnnnnnnnnnnnnnnnnnnnnnnnnnnnnnnnnnnnnnnnnnnnnnnnnnnnnnnnnnnnnnnnnnnnnnnnnnnnnnnnnnnnnnnnnnnnnnnnnnnnnnnnnnnnnnnnnnnnnnnnnnnnnnnnnnnnnnnnnnnnnnnnnnnnnnnnnnnnnnnnnnnnnnnnnnnnnnnnnnnnnnnnnnnnnnnnnnnnnnnnnnnnnnnnnnnnnnnnnnnnnnnnnnnnnnnnnnnnnnnnnnnnnnnnnnnnnnnnnnnnnnnnnnnnnnnnnnnnnnnnnnnnnnnnnnnnnnnnnnnnnnnnnnnnnnnnnnnnnnnnnnnnnnnnnnnnnnnnnnnnnnnnnnnnnnnnnnnnnnnnnnnnnnnnnnnnnnnnnnnnnnnnnnnnnnnnnnnnnnnnnnnnnnnnnnnnnnnnnnnnnnnnnnnnnnnnnnnnnnnnnnnnnnnnnnnnnnnnnnnnnnnnnnnnnnnnnnnnnnnnnnnnnnnnnnnnnnnnnnnnnnnnnnnnnnnnnnnnnnnnnnnnnnnnnnnnnnnnnnnnnnnnnnnnnnnnnnnnnnnnnnnnnnnnnnnnnnnnnnnnnnnnnnnnnnnnnnnnnnnnnnnnnnnnnnnnnnnnnnnnnnnnnnnnnnnnnnnnnnnnnnnnnnnnnnnnnnnnnnnnnnnnnnnnnnnnnnnnnnnnnnnnnnnnnnnnnnnnnnnnnnnnnnnnnnnnnnnnnnnnnnnnnnnnnnnnnnnnnnnnnnnnnnnnnnnnnnnnnnnnnnnnnnnnnnnnnnnnnnnnnnnnnnnnnnnnnnnnnnnnnnnnnnnnnnnnnnnnnnnnnnnnnnnnnnnnnnnnnnnnnnnnnnnnnnnnnnnnnnnnnnnnnnnnnnnnnnnnnnnnnnnnnnnnnnnnnnnnnnnnnnnnnnnnnnnnnnnnnnnnnnnnnnnnnnnnnnnnnnnnnnnnnnnnnnnnnnnnnnnnnnnnnnnnnnnnnnnnnnnnnnnnnnnnnnnnnnnnnnnnnnnnnnnnnnnnnnnnnnnnnnnnnnnnnnnnnnnnnnnnnnnnnnnnnnnnnnnnnnnnnnnnnnnnnnnnnnnnnnnnnnnnnnnnnnnnnnnnnnnnnnnnnnnnnnnnnnnnnnnnnnnnnnnnnnnnnnnnnnnnnnnnnnnnnnnnnnnnnnnnnnnnnnnnnnnnnnnnnnnnnnnnnnnnnnnnnnnnnnnnnnnnnnnnnnnnnnnnnnnnnnnnnnnnnnnnnnnnnnnnnnnnnnnnnnnnnnnnnnnnnnnnnnnnnnnnnnnnnnnnnnnnnnnnnnngcacacaagtgtggagagtgaggcgaatctccattcttcctccagcactttttccaccacatccagcacagtctctgcacctcccccagtggtcagtgtctcctccagtctcaatagtggcagtagcctgggcctcagcctaggcagcaactccactgtcacagcctcgactcgaagctcagttgctacgacttcagnnnnnnnnnnnnnnnnnnnnnnnnnnnnnnnnnnnnnnnnnnnnnnnnnnnnnnnnnnnnnnnnnnnnnnnnnnnnnnnnnnnnnnnnnnnnnnnnnnnnnnnnnnnnnnnnnnnnnnnnnnnnnnnnnnnnnnnnnnnnnnnnnnnnnnnnnnnnnnnnnnnnnnnnnnnnnnnnnnnnnnnnnnnnnnnnnnnnnnnnnnnnnnnnnnnnnnnnnnnnnnnnnnnnnnnnnnnnnnnnnnnnnnnnnnnnnnnnnnnnnnnnnnnnnnnnnnnnnnnnnnnnnnnnnnnnnnnnnnnnnnnnnnnnnnnnnnnnnnnnnnnnnnnnnnnnnnnnnnnnnnnnngcgctgcctcctggctacagttacaccagcctgccatactatacaggggtcccgggcctccccagcaccttccagtatgggcctgctgtgttccctgtgngtggctcctacctcttccaagcagcatggtgtgaatgtcagtgtgaatgcatcggccacccctttccaacagccgagtggatatgggtctcatggatacaacactggt

SEQ ID NO: 32706 - DNA, 290 bp, Macaca Mulatta
tgtgcgatgcctgcttttacaatgaaaggaaaactgttttgttcagtgtccccttgtcagcaacaccatatcccttcctcccctctgttcttctctgctgcatttggacatcagccaaatttgaacccaatcaaatataatgtgtctgacgttgattttgtttttactcaataaatttatagactccaaagcagtgtggtgtctgttacctgatcatgtgtggcgtttcctactcaagcctgatgagagttctgaagcctgtcttcttgttttgggtttcttgcttctca

SEQ ID NO: 32707 - DNA, 303 bp, Macaca Mulatta
  misc_feature (1)...(303): n = A,T,C or G
gtattgctggctggagcagatgtgaacctggcatggggccgccgttacgggctggtggggcggaatgggttggggaagacaacattactgaagatgctagccacccggagtctgcgggttccagcccacatttccctgctgcacgttgagcaagaggttgctggagatgacactcctgccctgcagagtgtgctggagagtgacagtgtgcgagaggatttgctacggcgggagcgggagctcagtgcccagattgctgctggcaggncagggcagagggctctgaagctgcagagctggcag

SEQ ID NO: 32708 - DNA, 181 bp, Macaca Mulatta
gaagagtaaccttcacaactcccagtcatgtattttggggacagtttccttccatcataagatactgaagggagtcacaaaggatggttcattgtgctccattttaaaagtctgtcaaggtgatggtcagctgcagagaattctagagaatcaagacaaactcttcaggcaggtcacattt

SEQ ID NO: 32709 - DNA, 306 bp, Macaca Mulatta
catctggctgtcctttgaggaccactccggctacaacttcccttggtccactcacttactggtgccgttcgggtggtacgggggtgtggtgcaccacgacctgcatcactctcactttaattgcaacttcgctccgtactttacacactgggacaaaatattgggaacgctgcggactgcatctgtcacagcgcggtgatgtggctgcggtgggtgcccctaagacgtgggactgctgtgcctttcacacttgaatcaagagaaacgcctgagctatagatattttttacggcaactaacttatta

SEQ ID NO: 32710 - DNA, 329 bp, Macaca Mulatta
tctcaagagtttggatggctccaaatcaccccccaggaattcctgtgcatgaaagcgctgctactcttcagcattattccagtggatgggctgaaaaatcaaaaattctttgatgaacttcgaatgaactacatcaaggaactcgatcgtatcattgcatgcaaaagaaaaaatcccacatcctgctcaaggcgtttctaccagctcaccaagctcctggactccgtgcagcctattgcgagagagctgcatcagttcacttttgacctgctaatcaagtcacacatggtgagcgtggactttccggaaatgatggcagagatcatctc

SEQ ID NO: 32711 - DNA, 466 bp, Macaca Mulatta
ctgggaccaaggccattctgcaggatggtgcctctcagatctcaggtcagcacgggagctggaaagctcttcttcccttgctcgacctcctggttcttcaggtggcaaagcctcctgagaatcagcagcccgggaacagaggagccaaagcagggagtgggcggggcctcagatgggtgccctcctcagccacacagaagtgcaagctccttcctcagtttccccttgagccccttgctcaccaggctcaggcaggaggggcatgctgctgggtaagagtctggtggagtccccctttctaggtgacttgtctttgctgttgatttgaacgcatttcctgcccgtgcctgcctccttgtctggcccttgcaggaggaccctgtcttaggctctgccccgcacactgccttgagatggggtggctccgctgcctgctttctcttccccccgataactgcctgtgtgt

SEQ ID NO: 32712 - DNA, 775 bp, Macaca Mulatta
  misc_feature (1)...(775): n = A,T,C or G
ggccgaggaagctggtcatcattgtagtgacctggaacgtgcagaggagcgggctgagctctcagaaggcaaatgtgccgagcttgaagaagaattgaaaactgtgacgaacaacttgaagtcactggaggctcaggctgagaagtactcgcagaaggaagacaaatatgaggaagagatcaaggtcctttccgacaagctgaaggaggctgagactcgggctgagtttgcggagaggtcagtaactaaattggagaaaagcattgatgacttagaagagaaagtggctcatgccaaagaagaaaaccttagtatgcatcagatgctggatcagactttactggagttaaacaacatgtgaaaacctccttagctgcgaccacattctttcannnnnnnnnnnnnnnnnnnnnnnnnnnnncacctgcttaccccttaaatgcatttttatttacttttaccactgtcacagaaacatccacgaaataccagctaggtcagggggtggagaaaacacacacaaaaaggcaagcccatgtcagggcgatcctggtttaaatgtgccatttcccgggttgatgttgccacactttgtagagagtttagcaacacggtatgcttagtcagtgtaggaatcctcaataaagcagaagaagttccattcaaagtgccaatgatagagtcaacaggaagatgaatgttggaaacacaatcaggtgtggattggtgctactttaaacaaaaggtccccctgtggtcctttgttcaacattgt

SEQ ID NO: 32713 - DNA, 143 bp, Macaca Mulatta
caggcccggcctgcatgcctgcgagaaggacgacggtgatgaagctcacctggaggagttgagtctgagcaaggaggggccagaaccagaggacactgtccaggacaacccaggggccgcaggggctgaggaggaacaggagg

SEQ ID NO: 32714 - DNA, 3545 bp, Macaca Mulatta
  misc_feature (1)...(3545): n = A,T,C or G
cttctaaggagcctaaattcaccaagtgtcgttcacctgagcgagagactttttcatgccactggacagatgcggttcatcatggttcaaagagcctaggacccatacagctgttctataccagaaggnnnnnnnnnnnnnnnnnnnnnnnnnnnnnnnnnnnnnnnnnnnnnnnnnnnnnnnnnnnnnnnnnnnnnnnnnnnnnnnnnnnnnnnnnnnnnnnnnnnnnnnnnnnnnnnnnnnnnnnnnnnnnnnnnnnnnnnnnnnnnnnnnnnnnnnnnnnnnnnnnnnnnnnnnnnnnnnnnnnnnnnnnnnnnnnnnnnnnnnnnnnnnnnnnnnnnnnnnnnnnnnnnnnnnnnnnnnnnnnnnnnnnnnnnnnnnnnnnnnnnnnnnnnnnnnnnnnnnnnnnnnnnnnnnnnnnnnnnnnnnnnnnnnnnnnnnnnnnnnnnnnnnnnnnnnnnnnnnnnnnnnnnnnnnnnnnnnnnnnnnnnnnnnnnnnnnnnnnnnnnnnnnnnnnnnnnnnnnnnnnnnnnnnnnnnnnnnnnnnnnnnnnnnnnnnnnnnnnnnnnnnnnnnnnnnnnnnnnnnnnnnnnnnnnnnnnnnnnnnnnnnnnnnnnnnnnnnnnnnnnnnnnnnnnnnnnnnnnnnnnnnnnnnnnnnnnnnnnnnnnnnnnnnnnnnnnnnnnnnnnnnnnnnnnnnnnnnnnnnnnnnnnnnnnnnnnnnnnnnnnnnnnnnnnnnnnnnnnnnnnnnnnnnnnnnnnnnnnnnnnnnnnnnnnnnnnnnnnnnnnnnnnnnnnnnnnnnnnnnnnnnnnnnnnnnnnnnnnnnnnnnnnnnnnnnnnnnnnnnnnnnnnnnnnnnnnnnnnnnnnnnnnnnnnnnnnnnnnnnnnnnnnnnnnnnnnnnnnnnnnnnnnnnnnnnnnnnnnnnnnnnnnnnnnnnnnnnnnnnnnnnnnnnnnnnnnnnnnnnnnnnnnnnnnnnnnnnnnnnnnnnnnnnnnnnnnnnnnnnnnnnnnnnnnnnnnnnnnnnnnnnnnnnnnnnnnnnnnnnnnnnnnnnnnnnnnnnnnnnnnnnnnnnnnnnnnnnnnnnnnnnnnnnnnnnnnnnnnnnnnnnnnnnnnnnnnnnnnnnnnnnnnnnnnnnnnnnnnnnnnnnnnnnnnnnnnnnnnnnnnnnnnnnnnnnnnnnnnnnnnnnnnnnnnnnnnnnnnnnnnnnnnnnnnnnnnnnnnnnnnnnnnnnnnnnnnnnnnnnnnnnnnnnnnnnnnnnnnnnnnnnnnnnnnnnnnnnnnnnnnnnnnnnnnnnnnnnnnnnnnnnnnnnnnnnnnnnnnnnnnnnnnnnnnnnnnnnnnnnnnnnnnnnnnnnnnnnnnnnnnnnnnnnnnnnnnnnnnnnnnnnnnnnnnnnnnnnnnnnnnnnnnnnnnnnnnnnnnnnnnnnnnnnnnnnnnnnnnnnnnnnnnnnnnnnnnnnnnnnnnnnnnnnnnnnnnnnnnnnnnnnnnnnnnnnnnnnnnnnnnnnnnnnnnnnnnnnnnnnnnnnnnnnnnnnnnnnnnnnnnnnnnnnnnnnnnnnnnnnnnnnnnnnnnnnnnnnnnnnnnnnnnnnnnnnnnnnnnnnnnnnnnnnnnnnnnnnnnnnnnnnnnnnnnnnnnnnnnnnnnnnnnnnnnnnnnnnnnnnnnnnnnnnnnnnnnnnnnnnnnnnnnnnnnnnnnnnnnnnnnnnnnnnnnnnnnnnnnnnnnnnnnnnnnnnnnnnnnnnnnnnnnnnnnnnnnnnnnnnnnnnnnnnnnnnnnnnnnnnnnnnnnnnnnnnnnnnnnnnnnnnnnnnnnnnnnnnnnnnnnnnnnnnnnnnnnnnnnnnnnnnnnnnnnnnnnnnnnnnnnnnnnnnnnnnnnnnnnnnnnnnnnnnnnnnnnnnnnnnnnnnnnnnnnnnnnnnnnnnnnnnnnnnnnnnnnnnnnnnnnnnnnnnnnnnnnnnnnnnnnnnnnnnnnnnnnnnnnnnnnnnnnnnnnnnnnnnnnnnnnnnnnnnnnnnnnnnnnnnnnnnnnnnnnnnnnnnnnnnnnnnnnnnnnnnnnnnnnnnnnnnnnnnnnnnnnnnnnnnnnnnnnnnnnnnnnnnnnnnnnnnnnnnnnnnnnnnnnnnnnnnnnnnnnnnnnnnnnnnnnnnnnnnnnnnnnnnnnnnnnnnnnnnnnnnnnnnnnnnnnnnnnnnnnnnnnnnnnnnnnnnnnnnnnnnnnnnnnnnnnnnnnnnnnnnnnnnnnnnnnnnnnnnnnnnnnnnnnnnnnnnnnnnnnnnnnnnnnnnnnnnnnnnnnnnnnnnnnnnnnnnnnnnnnnnnnnnnnnnnnnnnnnnnnnnnnnnnnnnnnnnnnnnnnnnnnnnnnnnnnnnnnnnnnnnnnnnnnnnnnnnnnnnnnnnnnnnnnnnnnnnnnnnnnnnnnnnnnnnnnnnnnnnnnnnnnnnnnnnnnnnnnnnnnnnnnnnnnnnnnnnnnnnnnnnnnnnnnnnnnnnnnnnnnnnnnnnnnnnnnnnnnnnnnnnnnnnnnnnnnnnnnnnnnnnnnnnnnnnnnnnnnnnnnnnnnnnnnnnnnnnnnnnnnnnnnnnnnnnnnnnnnnnnnnnnnnnnnnnnnnnnnnnnnnnnnnnnnnnnnnnnnnnnnnnnnnnnnnnnnnnnnnnnnnnnnnnnnnnnnnnnnnnnnnnnnnnnnnnnnnnnnnnnnnnnnnnnnnnnnnnnnnnnnnnnnnnnnnnnnnnnnnnnnnnnnnnnnnnnnnnnnnnnnnnnnnnnnnnnnnnnnnnnnnnnnnnnnnnnnnnnnnnnnnnnnnnnnnnnnnnnnnnnnnnnnnnnnnnnnnnnnnnnnnnnnnnnnnnnnnnnnnnnnnnnnnnnnnnnnnnnnnnnnnnnnnnnnnnnnnnnnnnnnnnnnnnnnnnnnnnnnnnnnnnnnnnnnnnnnnnnnnnnnnnnnnnnnnnnnnnnnnnnnnnnnnnnnnnnnnnnnnnnnnnnnnnnnnnnnnnnnnnnnnnnnnnnnnnnnnnnnnnnnnnnnnnnnnnnnnnnnnnnnnnnnnnnnnnnnnnnnnnnnnnnnnnnnnnnnnnnnnnnnnnnnnnnnnnnnnnnnnnnnnnnnnnnnnnnnnnnnnnnnnnnnnnnnnnnnnnnnnnnnnnnnnnnnnnnnnnnnnnnnnnnnnnnnnnnnnnnnnnnnnnnnnnnnnnnnnnnnnnnnnnnnnnnnnnnnnnnnnnnnnnnnnnnnnnnnnnnnnnnnnnnnnnnnnnnnnnnnnnnnnnnnnnnnnnnnnnnnnnnnnnnnnnnnnnnnnnnnnngagactgagtcttgctctgtcgccaggctggagtgcagtggcatgatctcaactcactgcaaactccgcctcccctgttcaagcgattctccagcctcagcctcccaagtagttgggattactggtatgcactgccatgcccagctaatttttgtatttttagtagagacggggtttcaccgtgttggccatgatggtctcgatttcctgacctcgtgatccacccgcctcggtctcccaaagtgctggg

SEQ ID NO: 32715 - DNA, 690 bp, Macaca Mulatta
  misc_feature (1)...(690): n = A,T,C or G
gggggaggcgggctctccggaagtcgccgagtgattagtgccagctattcaacagaaaagaacggtggcttttctaaaccaatttgtggtgcacactgtacagttcctcaaccgcttttctacagtttgtgaggagaaactggcagacctttcgcttcgtatccaacaaattgaaacaactctaaatattttagatgcaaagttgtcatctatcccaggcctagatgatgtcacagttgaagtatctcctttaaatgtcaccagtgtcacaaatggagcacatcctgaagccacttcagagcaaccacagcagagcagtacacaagactctggactacaggaaagtgaagtatcagcagaaaatatcttaactgtagccaaggatccaagatatgccagatatctcaaaatggttcaagtgggtgtaccagtgatggcaataagaaancaaatgatatcagaaggactagacccagatcttcttgagaggccagatgctccagtgcctgatggtgaaagtgaaaaaactgtagaagaaagttcagatagcgaatcttcttttagtgacntagcttattttgagaagaatacatatgcatgcataggggtacattacattctgtnagaatgagctgactctctatcatagaactcgatggcactgtcctacagctctcatgtaaaatataa

SEQ ID NO: 32716 - DNA, 153 bp, Macaca Mulatta
gcccgtggatctgctcggactgcggcaagacgttcgggcgccgggccgcgaaggccaagcaccagcgctaccacgcgggcgagaggccacaccgctgcgccgattgcggcaagagcttttgaagcggctcgcacctggcgcgccaccggcgca

SEQ ID NO: 32717 - DNA, 1731 bp, Macaca Mulatta
  misc_feature (1)...(1731): n = A,T,C or G
ggtgactctgctgggctgccagctcgcttaacattggagttcagtgcttttgacatgngagtgctcccaccccagcccgttgctgcccagctgttggaacactgtataacaccaacacactcgagtctttcaagactgcagataagaagctccttttggaacaagcagcaaatgagnagatatgggaatccataaaatcaggcactgctcttgaaaatcctgtactcctcaacaagttcctcctcttgacatttgcagnnnnnnnnnnnnnnnnnnnnnnnnnnnnnnnnnnnnnnnnnnnnnnnnnnnnnnnnnnnnnnnnnnnnnnnnnnnnnnnnnnnnnnnnnnnnnnnnnnnnnnnnnnnnnnnnncagattgaagcattagagtgtgcatatgataatctttgtcaaacagaaggagtcacagctcttccttacttcttaatcaagtatgatgagaacacggtgctggtttccttgcttaaacactacagtgatttcttccaaggtcaaaggatgaagnagataacaatttggtgtatatgatccctgtaacttagcccagtaccctggatggcctttgaggaattttttggtcctagcagcccacagatggnggagtagcagtttccagtctgttgaagttctttgcttccgtgaccgtaccatgcagggggcgcgagacgttgcccacagcatcatcttcgaagtgaagcttccagaaatggcatttagcccagnnnnnnnnnnnnnnnnnnnnnnnnnnnnnnnnnnnnnnnnnnnnnnnnnnnnnnnnnnnnnnnnnnnnnnnnnnnnnnnnnnnnnnnnnnnnnnnnnnnnnnnnnnnnnnnnnnnnnnnnnnnnnnnnnnnnnnnnnnnnnnnnnnnnnnnnnnnnnnnnnnnnnnnnnnnnnnnnnnnnnnnnnnnnnnnnnnnnnnnnnnnnnnnnnnnnnnnnnnnnnnnnnnnnnnnnnnnnnnnnnnnnnnnnnnnnnnnnnnnnnnnnnnnnnnnnnnnnnnnnnnnnnnnnnnnnnnnnnnnnnnnnnnnnnnnnnnnnnnnnnnnnnnnnnnnnnnnnnnnnnnnnnnnnnnnnnnnnnnnnnnnnnnnnnnnnnnnnnnnnnnnnnnnnnnnnnnnnnnnnnnnnnnnnnnnnnnnnnnnnnnnnnnnnnnnnnnnnnnnnnnnnnnnnnnnnnnnnnnnnnnnnnnnnnnnnnnnnnnnnnnnnnnnnnnnnnnnnnnnnnnnnnnnnnnnnnnnnnnnnnnnnnnnnnnnnnnnnnnnnnnnnnnnnnnnnnnnnnnnnnnnnnnnnnnnnnnnnnnnnnnnnnnnnnnnnnnnnnnnnnnnnnnnnnnnnnnnnnnnnnnnnnnnnnnnnnnnnnnnnnnnnnnnnnnnnnnnnnnnnnnnnnnnnnnnnnnnnnnnnnnnnnnnnnnnnnnnnnnnnnnnnnnnnnnnnnnnnnnnnnnnnnnnnnnnnnnnnnnnnnnnnnnnnnnnnnnnnnnnnnnnnnnnnnnnnnnnnnnnnnnnnnnnnnnnnnnnnnnnnnnnnnnnnnnnnnnnnnnnnnnnnnnnnnnnnnnnnnnnnnnnnnnnnnnnnnnnnnnnnnnnnnnnnnnnnnnnnnnnnnnnnnnnnnnnnnnnnnnnnnnnnnnnnnggggctatgccattgccagcagcagtgacgatcggatgaatgagcctccaacctctcttgggctcgtgcctcaccaggtt

SEQ ID NO: 32718 - DNA, 1606 bp, Macaca Mulatta
  misc_feature (1)...(1606): n = A,T,C or G
ggggcttggcctctgcccggccacagagccggagctggaggtactatcccgtccggcggcgaaccccgggcagggcccggggctggagtttcaagatgctgaacgtcccttcccagtctttcccggcccccaggtcgcagcagcgtgtagcctccggggggcgtaacaaggtannnnnnnnnnnnnnnnnnnnnnnnnnnnnnnnnnnnnnnnnnnnnnnnnnnnnnnnnnnnnnnnnnnnnnnnnnnnnnnnnnnnnnnnnnnnnnnnnnnnnnnnnnnnnnnnnnnnnnnnnnnnnnnnnnnnnnnnnnnnnnnnnnnnnnnnnnnnnnnnnnnnnnnnnnnnnnnnnnnnnnnnnnnnnnnnnnnnnnnnnnnnnnnnnnnnnnnnnnnnnnnnnnnnnnnnnnnnnnnnnnnnnnnnnnnnnnnnnnnnnnnnnnnnnnnnnnnnnnnnnnnnnnnnnnnnnnnnnnnnnnnnnnnnnnnnnnnnnnnnnnnnnnnnnnnnnnnnnnnnnnnnnnnnnnnnnnnnnnnnnnnnnnnnnnnnnnnnnnnnnnnnnnnnnnnnnnnnnnnnnnnnnnnnnnnnnnnnnnnnnnnnnnnnnnnnnnnnnnnnnnnnnnnnnnnnnnnnnnnnnnnnnnnnnnnnnnnnnnnnnnnnnnnnnnnnnnnnnnnnnnnnnnnnnnnnnnnnnnnnnnnnnnnnnnnnnnnnnnnnnnnnnnnnnnnnnnnnnnnnnnnnnnnnnnnnnnnnnnnnnnnnnnnnnnnnnnnnnnnnnnnnnnnnnnnnnnnnnnnnnnnnnnnnnnnnnnnnnnnnnnnnnnnnnnnnnnnnnnnnnnnnnnnnnnnnnnnnnnnnnnnnnnnnnnnnnnnnnnnnnnnnnnnnnnnnnnnnnnnnnnnnnnnnnnnnnnnnnnnnnnnnnnnnnnnnnnnnnnnnnnnnnnnnnnnnnnnnnnnnnnnnnnnnnnnnnnnnnnnnnnnnnnnnnnnnnnnnnnnnnnnnnnnnnnnnnnnnnnnnnnnnnnnnnnnnnnnnnnnnnnnnnnnnnnnnnnnggtacagaaatagtaaagccatatacacctgtatctggttccttactctcagagttcaaggaaccagttcttcccaacaataaatacatctattttttgataaaaatctatcacactggactcttcacaccagagcttgatcgtcttcagattggnnnnnnnnnnnnnnnnnnnnnnnnnnnnnnnnnnnnnnnnnnnnnnnnnnnnnnnnnnnnnnnnnnnnnnnnnnnnnnnnnnnnnnnnnnnnnnnnnnnnnnnnnnnnnnnnnnnnnnnnnnnnnnnnnnnnnnnnnnnnnnnnnnnnnnnnnnnnnnnnnnnnnnnnnnnnnnnnnnnnnnnnnnnnnnnnnnnnnnnnnnnnnnnnnnnnnnnnnnnnnnnnnnnnnnnnnnnagactggatgttgaatttgttctctcagcacctatttctgaatggaatggcaaacagggacatatttcaccagctcttctttctgaatttttgaaaagaaatttggacaaatccaaagttctcgtctgcatttgtggaccagtgccatttacagaacaaggagtaagg

SEQ ID NO: 32719 - DNA, 634 bp, Macaca Mulatta
  misc_feature (1)...(634): n = A,T,C or G
agtggccccagatgagccagtcccgagtatgtggatcagaacagattcctggaatagacatacagctgaataggaagtatnnnnnnnnnnnnnnnnnnnnnnnnnnnnnnnnnnnnnnnnnnnnnnnnnnnnnnnnnnnnnnnnnnnnnnnnnnnnnnnnnnnnnnnnnnnnnnnnnnnnnnnnnnnnnnnnnnnnnnnnnnnnnnnnnnnnnnnnnnnnnnnnnnnnnnnnnnnnnnnnnnnnnnnnnnnnnnnnnnnnnnnnnnnnnnnnnnnnnnnnnnnnnnnnnnnnnnnnnnnnnnnnnnnnnnnnnnnnnnnnnnnnnnnnnnnnnnnnnnnnnnnnnnnnnnnnnnnnnnnnnnnnnnnnnnnnnnnnnnnnnnnnnnnnnnnnnnnnnnnnnnnnnnnnnnnnnnnnnnnnnnnnnnnnnnnnnnnnnnnnnnnnnnnnnnnnnnnnnnnnnnnnnnnnnnnnnnnnnnnnnnnnnnnnnnnnnnnnnnnnnnnnnnnnnnnnnnnnnnnnnnnnnnnnnnnnnnnnnnnnnnnnnnnnnnnnnnnnnnnnnnnnnnnnnnnnnnnnnnnnnnnnnnnnnnnnnnnnnnncatcttgaattgctggtagagtatgtgaggaaaca

SEQ ID NO: 32720 - DNA, 1683 bp, Macaca Mulatta
  misc_feature (1)...(1683): n = A,T,C or G
gacaaagaagttatttacatatgtcctttcaatggccccattaagggaagagtttacatcacaaattatcgtctttatttaagaagtttggaaacgnnnnnnnnnnnnnnnnnnnnnnnnnnnnnnnnnnnnnnnnnnnnnnnnnnnnnnnnnnnnnnnnnnnnnnnnnnnnnnnnnnnnnnnnnnnnnnnnnnnnnnnnnnnnnnnnnnnnnnnnnnnnnnnnnnnnnnnnnnnnnnnnnnnnnnnnnnnnnnnnnnnnnnnnnnnnnnnnnnnnnnnnnnnnnnnnnnnnnnnnnnnnnnnnnnnnnnnnnnnnnnnnnnnnnnnnnnnnnnnnnnnnnnnnnnnnnnnnnnnnnnnnnnnnnnnnnnnnnnnnnnnnnnnnnnnnnnnnnnnnnnnnnnnnnnnnnnnnnnnnnnnnnnnnnnnnnnnnnnnnnnnnnnnnnnnnnnnnnnnnnnnnnnnnnnnnnnnnnnnnnnnnnnnnnnnnnnnnnnnnnnnnnnnnnnnnnnnnnnnnnnnnnnnnnnnnnnnnnnnnnnnnnnnnnnnnnnnnnnnnnnnnnnnnnnnnnnnnnnnnnnnnnnnnnnnnnnnnnnnnnnnnnnnnnnnnnnnnnnnnnnnnnnnnnnnnnnnnnnnnnnnnnnnnnnnnnnnnnnnnnnnnnnnnnnnnnnnnnnnnnnnnnnnnnnnnnnnnnnnnnnnnnnnnnnnnnnnnnnnnnnnnnnnnnnnnnggcaacaggaggaggatatgaaagtgatgatgcatatcataacgccgaacttttcttcttagacattcataatattcatgttatgcgggaatctttaaaaaaagtgaaggacattgtttatcctaatgtagaagaatctcattggttgtccagtttggagtctactcattggttagaacatatcaaggcaannnnnnnnnnnnnnnnnnnnnnnnnnnnnnnnnnnnnnnnnnnnnnnnnnnnnnnnnnnnnnnnnnnnnnnnnnnnnnnnnnnnnnnnnnnnnnnnnnnnnnnnnnnnnnnnnnnnnnnnnnnnnnnnnnnnnnnnnnnnnnnnnnnnnnnnnnnnnnnnnnnnnnnnnnnnnnnnnnnnnnnnnnnnnnnnnnnnnnnnnnnnnnnnnnnnnnnnnnnnnnnnnnnnnnnnnnnnnnnnnnnnnnnnnnnnnnnnnnnnnnnnnnnnnnnnnnnnnnnnnnnnnnnnnnnnnnnnnnnnnnnnnnnnnnnnnnnnnnnnnnnnnnnnnnnnnnnnnnnnnnnnnnnnnnnnnnnnnnnnnnnnnnnnnnnnnnnnnnnnnnnnnnnnnnnnnnnnnnnnnnnnnnnnnnnnnnnnnnnnnnnnnnnnnnnnnnnnnnnnnnnnnnnnnnnnnnnnnnnnnnnnnnnnnnnnnnnnnnnnnnnnnnnnnnnnnnnnnnnnnnnnnnnnnnnnnnnnnnnnnnnnnnnnnnnnnnnnnnnnnnnnnnnnnnnnnnnnnnnnnnnnnnnnnnnnnnnnnnnnnnnnnnnnnnagccgaatccagtggagcagcgttacatggaactcttagccttgcgcgatgaatacataaagcggcttgaggaactgcagctcgccaactctgccaagctttctgatcccccaacttcaccttccagtccttcgcaaatgatgccccatgtgcaaactcacttctgagggggg

SEQ ID NO: 32721 - DNA, 378 bp, Macaca Mulatta
cgcagcagcccagcattgggcacttccagcccctgtgtcttccttaagaaccagcctgcaggtgccctttggctcttcagggtcctccctccccgtgagcctctccccgtcctgccctcccacacctgtcttatgttccctcagtgaaaagccagagtgtcggatatcagcgatatgctcccccagggactccatgtaccagtctgtgtgtttgatatcagaggagaggaacgaatgtgtcattgccacggaggtgagtgccgggctcgccttccctcctggcttttgtgggtgggaaagtggcctggtccctcttgacccatgggcccttcctgaagggtaggttggaaccctgccttggcaggccaagttcagtgg

SEQ ID NO: 32722 - DNA, 2762 bp, Macaca Mulatta
  misc_feature (1)...(2762): n = A,T,C or G
atttaacccacctaaaagaacgaaatgttgaagatctttcaggaggagagttgcagagatttgcttgtgctgtcgtttgcatacagaaagctgatatnnnnnnnnnnnnnnnnnnnnnnnnnnnnnnnnnnnnnnnnnnnnnnnnnnaggctgctattactatacgatctctaataaatccagatannnnnnnnnnnnnnnnnnnnnnnnnnnnnnnnnnnnnnnnnnnnnnnnnnnnnnnnnnnnnnnnnnnnnnnnnnnnnnnnnnnnnnnnnnnnnnnnnnnnnnnnnnnnnnnnnnnnnnnnnnnnnnnnnnnnnnnnnnnnnnnnnnnnnnnnnnnnnnnnnnnnnnnnnnnnnnnnnnnnnnnnnnnnnnnnnnnnnnnnnnnnnnnnnnnnnnnnnnnnnnnnnnnnnnnnnnnnnnnnnnnnnnnnnnnnnnnnnnnnnnnnnnnnnnnnnnnnnnnnnnnnnnnnnnnnnnnnnnnnnnnnnnnnnnnnnnnnnnnnnnnnnnnnnnnnnnnnnnnnnnnnnnnnnnnnnnnnnnnnnnnnnnnnnnnnnnnnnnnnnnnnnnnnnnnnnnnnnnnnnnnnnnnnnnnnnnnnnnnnnnnnnnnnnnnnnnnnnnnnnnnnnnnnnnnnnnnnnnnnnnnnnnnnnnnnnnnnnnnnnnnnnnnnnnnnnnnnnnnnnnnnnnnnnnnnnnnnnnnnnnnnnnnnnnnnnnnnnnnnnnnnnnnnnnnnnnnnnnnnnnnnnnnnnnnnnnnnnnnnnnnnnnnnnnnnnnnnnnnnnnnnnnnnnnnnnnnnnnnnnnnnnnnnnnnnnnnnnnnnnnnnnnnnnnnnnnnnnnnnnnnnnnnnnnnnnnnnnnnnnnnnnnnnnnnnnnnnnnnnnnnnnnnnnnnnnnnnnnnnnnnnnnnnnnnnnnnnnnnnnnnnnnnnnnnnnnnnnnnnnnnnnnnnnnnnnnnnnnnnnnnnnnnnnnnnnnnnnnnnnnnnnnnnnnnnnnnnnnnnnnnnnnnnnnnnnnnnnnnnnnnnnnnnnnnnnnnnnnnnnnnnnnnnnnnnnnnnnnnnnnnnnnnnnnnnnnnnnnnnnnnnnnnnnnnnnnnnnnnnnnnnnnnnnnnnnnnnnnnnnnnnnnnnnnnnnnnnnnnnnnnnnnnnnnnnnnnnnnnnnnnnnnnnnnnnnnnnnnnnnnnnnnnnnnnnnnnnnnnnnnnnnnnnnnnnnnnnnnnnnnnnnnnnnnnnnnnnnnnnnnnnnnnnnnnnnnnnnnnnnnnnnnnnnnnnnnnnnnnnnnnnnnnnnnnnnnnnnnnnnnnnnnnnnnnnnnnnnnnnnnnnnnnnnnnnnnnnnnnnnnnnnnnnnnnnnnnnnnnnnnnnnnnnnnnnnnnnnnnnnnnnnnnnnnnnnnnnnnnnnnnnnnnnnnnnnnnnnnnnnnnnnnnnnnnnnnnnnnnnnnnnnnnnnnnnnnnnnnnnnnnnnnnnnnnnnnnnnnnnnnnnnnnnnnnnnnnnnnnnnnnnnnnnnnnnnnnnnnnnnnnnnnnnnnnnnnnnnnnnnnnnnnnnnnnnnnnnnnnnnnnnnnnnnnnnnnnnnnnnnnnnnnnnnnnnnnnnnnnnnnnnnnnnnnnnnnnnnnnnnnnnnnnnnnnnnnnnnnnnnnnnnnnnnnnnnnnnnnnnnnnnnnnnnnnnnnnnnnnnnnnnnnnnnnnnnnnnnnnnnnnnnnnnnnnnnnnnnnnnnnnnnnnnnnnnnnnnnnnnnnnnnnnnnnnnnnnnnnnnnnnnnnnnnnnnnnnnnnnnnnnnnnnnnnnnnnnnnnnnnnnnnnnnnnnnnnnnnnnnnnnnnnnnnnnnnnnnnnnnnnnnnnnnnnnnnnnnnnnnnnnnnnnnnnnnnnnnnnnnnnnnnnnnnnnnnnnnnnnnnntgtcatttttgtacacacatatttatataaccactgatcgagatttaggaaaaagcatttctaaagaatatttgcttcccttacaactacagactcgaaatctttaaagatggtgcctaagcatctgtgtatttttttcaagttccacagatttttctggtgggtagccaaggattatgaaccacgtcccaaaaggcaacattaatgcaaaagtccccagatagcaatacaaagtatcccttggtaccacatatattcatttctgagtttggatatagagcacattatctaaactattttttagttccaaaagcccatctaaatttcttgagtttctgaattttgaacaagatagcctggagcctggagccactttaagttgtacttctgactaaactggaattacgagtgaggaagagtgtttactaaataaatgactggggcaagcaaaattgaggggaaattagaaagtatttgacagactttaagagctacttgaaataatggaagtcttgattaaaatgcaaataatggctagaaagtatggtttaactggaccccattatgccttttaaaaaataatttcagtaacccataaatacatgttgtaaaaaattcagatatacagaatggaataaaaaaatgatctccctttattaccctcacaaaggttaaccagcgtttgaatttaataatgtatattctttcatgcttttttctgtgcacttacctaagtgtgtatatgtaaagggtttgttttgtacacaaatgggattatactaaaataagtaatgcctatttttaaggataggttaaatttgtgaattattatttcaaatatattgaataaaata

SEQ ID NO: 32723 - DNA, 1463 bp, Macaca Mulatta
  misc_feature (1)...(1463): n = A,T,C or G
naggaactttgtgaaggaagccgaggagatcagctccaaccgtcggatgaatagtctgaccctaaaccggcacacagaaattttagaaatactggagattcctcagctcatggacacctgtgtccggaacagttattatgaagaggccctggagcttgcagcctatgtacgccgactggagaggaaatactcttccatccctgtcatccagnnnnnnnnnnnnnnnnnnnnnnnnnnnnnnnnnnnnnnnnnnnnnnnnnnnnnnnnnnnnnnnnnnnnnnnnnnnnnnnnnnnnnnnnnnnnnnnnnnnnnnnnnnnnnnnnnnnnnnnnnnnnnnnnnnnnnnnnnnnnnnnnnnnnnnnnnnnnnnnnnnnnnnnnnnnnnnnnnnnnnnnnnnnnnnnnnnnnnnnnnnnnnnnnnnnnnnnnnnnnnnnnnnnnnnnnnnnnnnnnnnnnnnnnnnnnnnnnnnnnnnnnnnnnnnnnnnnnnnnnnnnnnnnnnnnnnnnnnnnnnnnnnnnnnnnnnnnnnnnnnnnnnnnnnnnnnnnnnnnnnnnnnnnnnnnnnnnnnnnnnnnnnnnnnnnnnnnnnnnnnnnnnnnnnnnnnnnnnnnnnnnnnnnnnnnnnnnnnnnnnnnnnnnnnnnnnnnnnnnnnnnnnnnnnnnnnnnnnnnnnnnnnnnnnnnnnnnnnnnnnnnnnnnnnnnnnnnnnnnnnnnnnnnnnnnnnnnnnnnnnnnnnnnnnnnnnnnnnnnnnnnnnnnnnnnnnnnnnnnnnnnnnnnnnnnnnnnnnnnnnnnnnnnnnnnnnnnnnnnnnnnnnnnnnnnnnnnnnnnnnnnnnnnnnnnnnnnnnnnnnnnnnnnnnnnnnnnnnnnnnnnnnnnnnnnnnnnnnnnnnnnnnnnnnnnnnnnnnnnnnnnnnnnnnnnnnnnnnnnnnnnnnnnnnnnnnnnnnnnnnnnnnnnnnnnnnnnnnnnnnnnnnnnnnnnnnnnnnnnnnnnnnnnnnnnnnnnnnnnnnnnnnnnnnnnnnnnnnnnnnnnnnnnnnnnnnnnnnnnnnnnnnnnnnnnnnnnnnnnnnnnnnnnnnnnnnnnnnnnnnnnnnnnnnnnnnnnnnnnnnnnnnnnnnnnnnnnnnnnnnnnnnnnnnnnnnnnnnnnnnnnnnnnnnnnnnnnnnnnnnnnnnnnnnnnnnnnnnnnnnnnnnnnnnnnnnnggcattcctcccactcagctctccaagtatggaaacctcgggcatgtgaacatcggcgccattcaagagcccctcgcctttatcctgccaaagagagagacgctcttcaccctggatgtttttttgctggggcctgagctcacagctccagcaccagattctttctccgaggagccacgcctggattccgcgatcccagcctgcccggagggagggcgagaggaggtggacgcgtaaccgcccagggtggggccctag

SEQ ID NO: 32724 - DNA, 273 bp, Macaca Mulatta
tctcagaaatcctcagccctggctccagaggatcatggaagctcctgtgaggtgaggaagaggagtcccagggggtggaaattcagtccaggagtagaaagctctgatctgtcactagaacctcatgactgagggaggcagctgggccacaggaagcagctggactctaagacctgctgctcctgaaacaaatcttgatcttcctgttgagaatgagcaacacgtgggtaatgtcttcatctctggaggccacctgtgtgacagtggagaggt

SEQ ID NO: 32725 - DNA, 409 bp, Macaca Mulatta
ccagatggagaaggacattcgtagtgatgtggaagaatcagactccagtgaggaggaggaggcgggagcccaggaacctctgcagctaaagaatggggcagctcgagggccgaggccagcccccactgatggccttcggagccgagtggccgggcgtctaactaggcacacaacggccacatagccaggcagggctggccgtaaagggctgcccccaacgccttggatatttctggggtgactggactggcggaccctgggccacctttccggagacagggagggccccacccggggtgggccgggagggttgatgatctgtctccagccccttccttctgcccacccgcccttcttccctctgggcaaatggacagagccgagagccagcagctggatgttgtggctg

SEQ ID NO: 32726 - DNA, 1452 bp, Macaca Mulatta
atggccggggagctccaggcgacccaggcgccgtcgctgcggcggagcctgggctgaccagccaggacagcggggtaaacccgaacaattctgcgcgaggtagggaggccatggcgtccggcagtaactggctatccggggtgaatgtcgtgctggtgatggcctacgggagcctggtgtttgtactgctatttattttcgtgaagaggcaaatcatgcgctttgcaatgaaatctcggaggggacctcatgtccctgtgggacacaatgcccccaaggacttgaaagaagagattgatattcgactctccagggttcaggatatcaagtatgagcctcagctccttgcagatgatgatgctagactgctacaactggaaacccagggaaatcaaagttgctacaactatctgtataggatgaaagctctggatgccattcgtacctctgaaatcccatttcattctgaaggccggcatccccgttccttaatgggcaagaatttccgctcctacctgctagatctgcgaaacactagtacacctttcaagggtgtacgcaaagccctcatcgataccctattggatggctatgagacagcccgctatgggacaggggtctttggccagaatgagtacctacgctatcaagaggccctgagtgagctggccactgtggttaaagcacgaattgggagctctcagcgacaccaccagtcagcagccaaagagctaactcagtcccctgaggtctccccaacaaccatccaggtgacatacctcccctcaagtcagaagagtaaacgtgccaagcacttccttgaattgaagagctttaaggataactataacacattggagagtactctgtgatggagctgaaggactcttgccgtagatgaagccagtcagttgcagtgtgcaagacaggctgcttgccgggctgccctggggacatctgactcagcaggcccagactgtatccatcgaagttcccgttgtatccagagttcttagagcttgtgtctaaagggtaattccccaaccttttcttatgggcatttttagaacattggctaagactattttcccccagtagcacttttttctggatttgcattcaggtgttattcttaatgtttctgtcaaagcttcttaaaaatcttcacttggtttcagccagttcaccttccctgttccaggtttatttaattccaaaggtgagagttggagagagatgtcttccatatctatacctttgtacacagttgaatgggaactgtttgggtttagggcgtcttagagttgattgatggaaaaagacaggaactggtgggaggtcaagtggggaagttggtgaatgtggaataacttacccttgtgctccacttaaaccagatgtgttgcagctttcctgacatgcaaggatctactttaattccacactctcatg

SEQ ID NO: 32727 - DNA, 782 bp, Macaca Mulatta
  misc_feature (1)...(782): n = A,T,C or G
gggtttatatttggattctatgcactgtgatcctaaggttaacagcatgaattaacatgcgcctttaaaggactgtaatgaaagatcattgcgtatttattgaattgtttatatctactgtcaagttgttttgacatggaagattttcaagtaacattggcagagaggtacaatatgttatccctatggtgaaaataaattcatttgttgtatatagttcctcaatctctgaagtaaaggtatgagtaatatagggtatgaatggtttaatcaaggctttattttggaagtaagaaaaatggcagtgatgattaaattgctgcagtccataatttgggcttgttatttgtacattaaagattttttccaagtaggttacactctgttcacttcctgctagccatcagcatgagccctactgcctaaacactatttcatttatttatgtttggaaaacccgtaaacatttttgtttgcaatcttgtttcttttattataagtcaagtttgaatgttacagtacttttattgaaaaacttttgttaagttttttcttgtaaattttctttacttgtaagtatcatcttgtcctttaatcctgtaccctaaaataagaaatacatttttgacagaggcttaatgttttaacaaaagagtgtggacnnnnnnnnnnnnnnnnnnnngcaaaaaaatcgctgtcaaatggttgccttattttgtctcacacagccatatagttttttcctggaagnnnnnnnnnnnnnnnnnnnnnngaaaaaaact

SEQ ID NO: 32728 - DNA, 129 bp, Macaca Mulatta
agaattcatggtttaaaatctgggaaaacactgaaggaatttcgtggccattcctcctttgttaacgaagcaacatttacacaagatggacattacattattagtgcatcctctgatggcactgtaaag

SEQ ID NO: 32729 - DNA, 3656 bp, Macaca Mulatta
  misc_feature (1)...(3656): n = A,T,C or G
ggaatccagagtttctgtaaggacttggtggaggtggctgacattttggagaagactacagagtgcatttctgaagaatcagagcctgagaaccaaaagctcactctggagaaggtcttccgagggctgttgcttttagaagcaaagctgaaaagtgtgtttgccaagcatggcctggagaagctgacacccattggtgacaaatatgatccccatgagcatgaactcatctgtcatgtgccagctggtgttggggtgcagcctggcaccgtggcattagtaagacaagatggctacaaacttcatggccgcaccattaggcttgcccgagtggaagtggcagtggagtctcagagaagactgtgaagaggccatcaggaactggatgttctcccagagcgcagtcacctatgtttcttttatttattaaactaggtttgtattgtacatgaggtacttcatgtgatatattttggatttagtcatattggctttatttctaagatattctattgatttaacgtgacctgtttggtctcatcagaagtcttaccattgggcatttgaacagtgtgacaagtgttccgatggcctttatcaaaacatgtttaggaaaattggtactgtgataaatttgaatccaaaatccttttaactaggtgttttcaactacatgtttcttcctagcggtccctataataggaattgtatagtattgtgtattttgtggaaannnnnnnnnnnnnnnnnnnnnnnnnnnnnnnnnnnnnnnnnnnnnnnnnnnnnnnnnnnnnnnnnnnnnnnnnnnnnnnnnnnnnnnnnnnnnnnnnnnnnnnnnnnnnnnnnnnnnnnnnnnnnnnnnnnnnnnnnnnnnnnnnnnnnnnnnnnnnnnnnnnnnnnnnnnnnnnnnnnnnnnnnnnnnnnnnnnnnnnnnnnnnnnnnnnnnnnnnnnnnnnnnnnnnnnnnnnnnnnnnnnnnnnnnnnnnnnnnnnnnnnnnnnnnnnnnnnnnnnnnnnnnnnnnnnnnnnnnnnnnnnnnnnnnnnnnnnnnnnnnnnnnnnnnnnnnnnnnnnnnnnnnnnnnnnnnnnnnnnnnnnnnnnnnnnnnnnnnnnnnnnnnnnnnnnnnnnnnnnnnnnnnnnnnnnnnnnnnnnnnnnnnnnnnnnnnnnnnnnnnnnnnnnnnnnnnnnnnnnnnnnnnnnnnnnnnnnnnnnnnnnnnnnnnnnnnnnnnnnnnnnnnnnnnnnnnnnnnnnnnnnnnnnnnnnnnnnnnnnnnnnnnnnnnnnnnnnnnnnnnnnnnnnnnnnnnnnnnnnnnnnnnnnnnnnnnnnnnnnnnnnnnnnnnnnnnnnnnnnnnnnnnnnnnnnnnnnnnnnnnnnnnnnnnnnnnnnnnnnnnnnnnnnnnnnnnnnnnnnnnnnnnnnnnnnnnnnnnnnnnnnnnnnnnnnnnnnnnnnnnnnnnnnnnnnnnnnctgccaagtagctaggactacaggcattcaccactgcgcccgcaaagtnnnnnnnnnnnnnnnnnnntaagttggtactcacaaatcactacctccgttatactgacaagctttatttcctattctttgtatctgttaagtcacatttgtgtaaacattgagctcaccttttatatattaacctcctagaattaatgggcctatgtgggtttttttcagtcttacagctggtgttctgtaaaagagttgtccaataaatgacttaatgaatgatacatcagtcagattttaggaaggcagtcaattatggatattttaatgttggaagaagccttaatgatcaaatctcaccctttctgcttctgaagtatgaaaatctagtcattttaggactggacacaaggaaaataatctctgttgactaaattgcagtaagaatatgaataaagaacaactagatattaatgtcaattattgaagattaatgggcatgcaattaagtctccnnnaagattaatgggcatgcaattaagtctccagcagacaatcagatgttgttggatgtctagattatataggtttagattgaagttattactcataaaataaatccattttccgctggaactctatggcattcagtggagtggtgaaaagttatcctcttatacattatagataattctaagacagcacacaaatgtatcagtaaagccatctccttgtggggcctatcatcttcatcggatttagacccttaaaaaacaaatatgcacttttaaaatnnnnnnnnnnnnnnnnnnnnnnnnnnnnnnnnnnnnnnnnnnnnnnnnnnnnnnnnnnnnnnnnnnnnnnnnnnnnnnnnnnnnnnnnnnnnnnnnnnnnnnnnnnnnnnnnnnnnnnnnnnnnnnnnnnnnnnnnnnnnnnnnnnnnnnnnnnnnnnnnnnnnnnnnnnnnnnnnnnnnnnnnnnnnnnnnnnnnnnnnnnnnnnnnnnnnnnnnnnnnnnnnnnnnnnnnnnnnnnnnnnnnnnnnnnnnnnnnnnnnnnnnnnnnnnnnnnnnnnnnnnnnnnnnnnnnnnnnnnnnnnnnnnnnnnnnnnnnnnnnnnnnnnnnnnnnnnnnnnnnnnnnnnnnnnnnnnnnnnnnnnnnnnnnnnnnnnnnnnnnnnnnnnnnnnnnnnnnnnnnnnnnnnnnnnnnnnnnnnnnnnnnnnnnnnnnnnnnnnnnnnnnnnnnnnnnnnnnnnnnnnnnnnnnnnnnnnnnnnnnnnnnnnnnnnnnnnnnnnnnnnnnnnnnnnnnnnnnnnnnnnnnnnnnnnnnnnnnnnnnnnnnnnnnnnnnnnnnnnnnnnnnnnnnnnnnnnnnnnnnnnnnnnnnnnnnnnnnnnnnnnnnnnaagaatctcaagttgaagggctctgggggagcctaagcagcatattagggcataggcttgaacttaaatcccagctcagtcacctgcgtgactttaggcaccagtcatttcacccttctgagcctgtttctttatttgtaaaatgattataataattctttcacagcgttgtgaggattaagtgaaatgtgttaaatgcctactacagtaggctctcagatatttannnnnnnnnnnnnttatgtacattgtttttcctgcctttttatggctgtctaaactttagggaaaagagaagactggttaatgatgagtagaaaaaacttgtaagctaatcattcactgacttattttccttccattttctggttttttaaaaattagccacaccacaagaaacccacatttttagatggaaagagcaagaaaattgtgtcagtgctcttaagttattttcatcttaatggtatagtgaaaagacattggcttgcagatgatgctaaggaagctttggctcactctcacttgaagaggggatcttgatgttttagtacttgtactgtacagatgttttactgacttttcttactgctataaaggaatcaggcagttgggtattgatacattatttggtgctctcattcatagcaaaggatttgataaataagttcttaaaacactaaagcaaaatcaaatgagcaaaactaaggataaaatgtaatattcatcagaacaaggatcactgagaaaaaatattcagaaacaactttaataaaacctgaattgaaataactgca

SEQ ID NO: 32730 - DNA, 444 bp, Macaca Mulatta
tatttgaagagctaaagacccttgaaaccacaatcaccattctctaaggattcgctacataatctgtcacttcattttcaacatatacttttattatatgttaggcaaacctgacgtatgttctatatgatacatttgcacaaatgtacctcaaaattctaaggtgaacacagtaattctttggcacattattagcatatagaaacttgtgaggagtgtggtcagtgatccagataagataaaagaaaagagctgtgagtcagaaattgtttcgcaacaacccaaacttcatacttggccgagaatacaaagttgataatattatcattgtttataaagtattgatagtcataggaaaccattaacttgataagctttgtgtattatgctttgtgtaaaactggcaataaagatttggcaaatctaacgtagaagaaatctaaa

SEQ ID NO: 32731 - DNA, 193 bp, Macaca Mulatta
attttgaggaccggactggtgcgactatactaaaaaaggatgccaaatccgggatctcggctccgagaggctcatctggcaaaagggcgcggaaaccacgggggccctgagactgagtgggctatcccacttctctctgggtggcggggctgtagctagcgactgacaggcgcagcgaaaggcagccctctgc

SEQ ID NO: 32732 - DNA, 300 bp, Macaca Mulatta
aggtacccgaggattaataaagaatctttacttcctgtagcaaaggacgtgtcttactcaggggaaaatacagaagcttggtaccctccaggtcatggtgatatttacgccagtttctacaactctggtttgcttgatacctttataggagaaggcaaagagtatatttttgtgtctaacatagataatctgggtgccacagtggatctgtatattcttaatcatctaatgaacccacccaatggaaaacgctgtgaatttgtcatggaagtcacaaataaaacacgtgcagatgtaaag

SEQ ID NO: 32733 - DNA, 3060 bp, Macaca Mulatta
  misc_feature (1)...(3060): n = A,T,C or G
acaccagtaggtagaggaagagcctggcttcgtttggcattaatgcaaaagaaactttcagaatatatgaaagctttgatcaataagaaagaacttctcagnnnnnnnnnnnnnnnnnnnnnnnnnnnnnnnnnnnnnnnnnnnnnnnnnnnnnnnnnnnnnnnnnnnnnnnnnnnnnnnnnnnnnnnnnnnnnnnnnnnnnnnnnnnnnnnnnnnnnnnnnnnnnnnnnnnnnnnnnnnnnnnnnnnnnnnnnnnnnnnnnnnnnnnnnnnnnnnnnnnnnnnnnnnnnnnnnnnnnnnnnnnnnnnnnnnnnnnnnnnnnnnnnnnnnnnnnnnnnnnnnnnnnnnnnnnnnnnnnnnnnnnnnnnnnnnnnnnnnnnnnnnnnnnnnnnnnnnnnnnnnnnnnnnnnnnnnnnnnnnnnnnnnnnnnnnnnnnnnnnnnnnnnnnnnnnnnnnnnnnnnnnnnnnnnnnnnnnnnnnnnnnnnnnnnnnnnnnnnnnnnnnnnnnnnnnnnnnnnnnnnnnnnnnnnnnnnnnnnnnnnnnnnnnnnnnnnnnnnnnnnnnnnnnnnnnnnnnnnnnnnnnnnnnnnnnnnnnnnnnnnnnnnnnnnnnnnnnnnnnnnnnnnnnnnnnnnnnnnnnnnnnnnnnnnnnnnnnnnnnnnnnnnnnnnnnnnnnnnnnnnnnnnnnnnnnnnnnnnnnnnnnnnnnnnnnnnnnnnnnnnnnnnnnnnnnnnnnnnnnnnnnnnnnnnnnnnnnnnnnnnnnnagagttcagacttaggagtaaaacagaaaagtgaactaaacagtcgcttggaagagaagactaatcagatggctgctaccattaaacaacttgaacaaagnagtgaaaaggatttggtgaaacaggcaaagaccttaaatagtgcagcaaataaactgatcccaaaacatcattaggcatttttcagttggcacgttgcaagtctgatatcacaacttcattgtaaaaggaataaatctgaaagctattacatttaagctctgattctctctaaaatgtcacaaaaaagttgactttgaatttgttggacttttaaaaaaccatttggagatgtacgttgggtgtttttcatattgttgtctccccagggttagaaaaattggtataagttcctaactaaaatctgaataaactttgagaaattatttctgatttgaccaataaataaaaataccacttttttgaaaaagcctagggaattgaagctctgtacatatattaatgatgcctttacaacccactcgttgataatatcacattctcggcgcattgttcatgtctgtnnnnnnnnnnnnnnnnnnnnnnnnnnnnnnnnnnnnnnnnnnnnnnnnnnnnnnnnnnnnnnnnnnnnnnnnnnnnnnnnnnnnnnnnnnnnnnnnnnnnnnnnnnnnnnnnnnnnnnnnnnnnnnnnnnnnnnnnnnnnnnnnnnnnnnnnnnnnnnnnnnnnnnnnnnnnnnnnnnnnnnnnnnnnnnnnnnnnnnnnnnnnnnnnnnnnnnnnnnnnnnnnnnnnnnnnnnnnnnnnnnnnnnnnnnnnnnnnnnnnnnnnnnnnnnnnnnnnnnnnnnnnnnnnnnnnnnnnnnnnnnnnnnnnnnnnnnnnnnnnnnnnnnnnnnnnnnnnnnnnnnnnnnnnnnnnnnnnnnnnnnnnnnnnnnnnnnnnnnnnnnnnnnnnnnnnnnnnnnnnnnnnnnnnnnnnnnnnnnnnnnnnnnnnnnnnnnnnnnnnnnnnnnnnnnnnnnnnnnnnnnnnnnnnnnnnnnnnnnnnnnnnnnnnnnnnnnnnnnnnnnnnnnnnnnnnnnnnnnnnnnnnnnnnnnnnnnnnnnnnnnnnnnnnnnnnnnnnnnnnnnnnnnnnnnnnnnnnnnnnnnnnnnnnnnnnnnnnnnnnnnnnnnnnnnnnnnnnnnnnnnnnnnnnnnnnnnnnnnnnnnnnnnnnnnnnnnnnnnnnnnnnnnnnnnnnnnnnnnnnnnnnnnnnnnnnnnnnnnnnnnnnnnnnnnnnnnnnnnnnnnnnnnnnnnnnnnnnnnnnnnnnnnnnnnnnnnnnnnnnnnnnnnnnnnnnnnnnnnnnnnnnnnnnnnnnnnnnnnnnnnnnnnnnnnnnnnnnnnnnnnnnnnnnnnnnnnnnnnnnnnnnnnnnnnnnnnnnnnnnnnnnnnnnnnnnnnnnnnnnnnnnnnnnnnnnnnnnnnnnnnnnnnnnnnnnnnnnnnnnnnnnnnnnnnnnnnnnnnnnnnnnnnncagctgcttaggtggggacacagataaccccttcgcttccagctcttaaaattctttatctttttcttggcaaaaccagaattaagagtgtacgatggattccatgtgtgcttatataggtccctgcacagattggacttgaaccaaaatcaagtcaaagaacatatgtttaaaccaacttcatggaagtggaagatcctgtgctcttgaacttattttaattcttataatttgcacctatataaacaaagctcctactacattcttctcttcatcatccttttgtggtgatgggttgccttttctatgagcatttggaaggagtgatcaaataccaaaattaaactttctaaaacctacacatagcatgcttctaaattctattatataaagccccaagtgttttaccttctaaaacatgcttctgtataggtgcaaagttataagatatttagaagaaaacatccatcagaatcttctagagaatatggtcagagtcttaaacaggcccagtgctgagttctttgtccacttagtcacacatcttttgtgggaatgggaaaggaaggagacagccaaattctgacaaaggcttttccttatggaataacccaaagcctgggtgagggttgatatataatgtcccatgatttaatatatgtggtttgggggaaaggacaagaaaaaactataattccacatataagaaggtagttgcccgtttacaagttcgagttatgtgtgtaaaacagaaaaattaagtaccaaacatgttaggaaatttt

SEQ ID NO: 32734 - DNA, 1344 bp, Macaca Mulatta
  misc_feature (1)...(1344): n = A,T,C or G
atggagatcagagggtcactcgatctacgaaaaaggcaagttctaatattcctgttttgctgggattgtctcgggcagatactgaatctgcacactattctgtggcagaggaaacagaaattggctcatttgtggctaatctagcgagggacctagggctgggggtggaggagctgtcttcacgtgaagcccgggtagtgtctgatgataataaaaagtatttgcaccttgatttgctgactggggatttgctcctaaatgagaaactagaccgangatgagnctgtgtggctccaccgagcncctgtgtgctgcattttcaggtggttttggaaaaccctttacagttttttcgggttgagctgcatgtcaaagacataaatgattcctcccctacatcctagacaaggaaatacttattaaaatatcagaaggtaccactattggaactacattcctaatggagagtgctcaagatttggatgtcggaagcaacagtctccaaaactacacaattagccccaattctctctctcacattaaaattcctgacagtagtgacagaaagatatacccagagctggtcctagatagagctttagattatgaacaggaagctgaactcagattaacactcacagcactggatggtggatccccgcccaagtctggaacaactttggttctcattaaggtgttggacatcaatgataatgcccctgagtttcctcagagtctctatgaggtgcaagtccccgaggatagacccattggctcctggattgtcaccatctcagctaaggatctggatgcaggaaactatgggaaaatatcttacacatttttccatgcatcacaagatattcgtaaaacatttgaaattaatccaatatctggggaagttaatttgagatcacccctggattttgaagtgatacagtcctacactataaatattcaggcaacagatggtgggggtctttcaggaaaatgcacccttctagttaaagttatggatataaacgacaatccaccagaagtgaccatatcatcgattaccaagagaattccggagaatgcctcagagactctagtagctctttttagtgtagtataccaagactctggagacaatgggaggatgatttgctctattcaagataacctcccctttttcctgaaaacgaccttcaagaacttttttcactctagtttctgaaaaagcactggacagagagagcctagcgaagtacaacatcacgatcaccgtcacagacttgggggaccccctgctgtataccgagtacaacttagccgtgctggtctccgacatcaatgacaacg

SEQ ID NO: 32735 - DNA, 403 bp, Macaca Mulatta
cacgtggaccagcccccggcccctcctcagctggagccgaaaagcccagcagggcaagcctggaggctgctcccagccccgtgccacagtgaagccagctctgccctcatcctcgaagtgcccagggtggctgtgagggccaggctccctgcacacctcagccctggctccagctggtgggaagcaccaagcatgccctccccacccagaggacctctgggcaatgcctgccccgcctcatgccagaggctgcctcgggcacctgcctgcccattaaagactatggtcagacctgtctgagcccagtgatgggagctgtggcctcttcacccacacacaggaagggtgccagtccctaaaaccggtctgaggtcagcttcctggggctgccccaccctgaggg

SEQ ID NO: 32736 - DNA, 696 bp, Macaca Mulatta
cgccagctctagagttgaatgcccaggtcctgatctcctttttgatctcagttcctcttgcctaggccccgccgaagtgtcccctcctgccgtgacttctagccaagaggtcatttctcccatggccaagtgatctctgatagatcctgtaggtccactgtagtcagatgggacaagctgagtcagagcctgggtccagtgcccagcgtgcttggggagggacaaagatgatgatgatcttgtcacaggccagtgtctcaggcacagatgccgagacaggttgagctacaggatgcatattgggggtcagcatcaggaaggcagcgaggatgggagaggagaggtcgattcaggcagcaggatccgcggagctgtggttggcccagcagggagctctggaggagaactggctgtgctgggccatgtggggccaggctggccgggacttcacgccatggcccggtgggtctccagcgtgggctgccctgggcaggtgtgacctggcagcatggctctttgcagccagagtgggtcccacagaaaccagaacgaggccatccgctggtacagtgttctccagcatgaagcaagaatacactggggccacagacgcctgcactggccgcagccgcagccttgcatggacccacacttccatgtcagagaggggctcctccaaggtcccgagggtctctc

SEQ ID NO: 32737 - DNA, 1935 bp, Macaca Mulatta
  misc_feature (1)...(1935): n = A,T,C or G
caggctgagagcgcccagagcaacagncagactgatgattcttcgtatgcacaatctgcatgggacgaagcccccaccctcagagggcagtgatgaagaagaggaagaggaagatgaagaggatgaggaagagcggaagcctcagctggagctggccatgttgccccactatggtggcatcaaccgagttcgggtnnnnnnnnnnnnnnnnnnnnnnnnnnnnnnnnnnnnnnnnnnnnnnnnnnnnnnnnnnnnnnnnnnnnnnnnnnnnnnnnnnnnnnnnnnnnnnnnnnnnnnnnnnnnnnnnnnnnnnnnnnnnnnnnnnnnnnnnnnnnnnnnnnnnnnnnnnnnnnnnnnnnnnnnnnnnnnnnnnnnnnnnnnnnnnnnnnnnnnnnnnnnnnnnnnnnnnnnnnnnnnnnnnnnnnnnnnnnnnnnnnnnnnnnnnnnnnnnnnnnnnnnnnnnnnnnnnnnnnnnnnnnnnnnnnnnnnnnnnnnnnnnnnnnnnnnnnnnnnnnnnnnnnnnnnnnnnnnnnnnnnnnnnnnnnnnnnnnnnnnnnnnnnnnnnnnnnnnnnnnnnnnnnnnnnnnnnnnnnnnnnnnnnnnnnnnnnnnnnnnnnnnnnnnnnnnnnnnnnnnnnnnnnnnnnnnnnnnnnnnnnnnnnnnnnnnnnnnnnnnnnnnnnnnnnnnnnnnnnnnnnnnnnnnnnnnnnnnnnnnnnnnnnnnnnnnnnnnnnnnnnnnnnnnnnnnnnnnnnnnnnnnnnnnnnnnnnnnnnnnnnnnnnnnnnnnnnnnnnnnnnnnnnnnnnnnnnnnnnnnnnnnnnnnnnnnnnnnnnnnnnnnnnnnnnnnnnnnnnnnnnnnnnnnnnnnnnnnnnnnnnnnnnnnnnnnnnnnnnnnnnnnnnnnnnnnnnnnnnnnnnnnnnnnnnnnnnnnnnnnnnnnnnnnnnnnnnnnnnnnnnnnnnnnnnnnnnnnnnnnnnnnnnnnnnnnnnnnnnnnnnnnnnnnnnnnnnnnnnnnnnnnnnnnnnnnnnnnnnnnnnnnnnnnnnnnnnnnnnnnnnnnnnnnnnnnnnnnnnnnnnnnnnnnnnnnnnnnnnnnnnnnnnnnnnnnnnnnnnnnnnnnnnnnnnnnnnnnnnnnnnnnnnnnnnnnnnnnnnnnnnnnnnnnnnnnnnnnnnnnnnnnnnnnnnnnnnnnnnnnnnnnnnnnnnnnnnnnnnnnnnnnnnnnnnnnnnnnnnnnnnnnnnnnnnnnnnnnnnnnnnnnnnnnnnnnnnnnnnnnnnnnnnnnnnnnnnnnnnnnnnnnnnnnnnnnnnnnnnnnnnnnnnnnnnnnnnnnnnnnnnnnnnnnnnnnnnnnnnnnnnnnnnnnnnnnnnnnnnnnnnnnnnnnnnnnnnnnnnnnnagaccgactcttgctctgtcacccaggctggagtgcagtggcacaatctcggctcactgcaacctccgcctccnnnnnnnnnnnnnnnnnnnnnnnnnnnnnnnnnnnnnnnnnnnnnnnnnnnnnnnnnnnnnnnnnnnnnnnnnnnnnnnnnnnnnnnnnnnnnnnnnnnnnnnnnnnnnnnnnnnnnnnnnnnnnnnnnnnnnnnnnnnnnnnnnnnnnnnnnnnnnnnnnnnnnnnnnnnnnnnnnnnnnnnnnnnnnnnnnnnnnnnnnnnnnnnnnnnnnnnnnnnnnnnnnnnnnnnnnnnnnnnnnnnnnnnnnnnnnnnnnnnnnnnnnnnnnnnnnnnnnnnnnnnnnnnnnnnnnnnnnnnnnnnnnnnnngcttctgccccttgtcttcctgccagctgggtttgaccaggatttccccgtgtgggggctacatgcgaccccctcccctcctccctgacctagaggctggtgctgtgtcgggaggaaggtcagggctcctgagcagcaataaaggaccaggaagagg

SEQ ID NO: 32738 - DNA, 114 bp, Macaca Mulatta
  misc_feature (1)...(114): n = A,T,C or G
gattcacagagagttaataaaaatttctgagggaacaggattcaggatacatatgatccacaaagcagcagtggcagccaagaaatttggacctaaatcatctaaaaagtttgn

SEQ ID NO: 32739 - DNA, 3288 bp, Macaca Mulatta
  misc_feature (1)...(3288): n = A,T,C or G
agtttctcgttctagctggaattgtggcatctcaactctcattacaaacacgcaaaagcccacaggaatcgctgatgtgtacagtaagttccgcccagtgaagcgggtttcgccactgaaacatcagccagagactctggagaacaatgaaagtgatgaccaaaagaaccagaaagtggttgagtaccagaaagggggtgagtctgacctgggcctccagcctgaggagctcagccctggagatggagtgggtggcccaccaggtaagagctctgagcccagcacatcgctgggcgaactggagcactacgacctcgacatggatgagattctggatgtgccttatattaaatccagtcagcagcttgcctcttttaccaaggtgacttcagaaaaaagaattttgggcttatgcacaaccatcaatggcctttctggcaaagcctgctctacaggaagttctgagagctcatcatccaacatggcaccattttgtgttctttctcctgtgaaaagccctcacttgagaaaagcatcagctgtcatccgtgaccagcacaagctggccactgaagaaaccgagatctcacctcctctggttaaatgtggctctgcatatgagcctgaaaaccagagtaaagacttcctanacaagacatttagtgatcctcatggtcgaaaagttgagaagacaacaccagactgccagctcagnnnnnnnnnnnnnnnnnnnnnnnnnnnnnnnnnnnnnnnnnnnnnnnnnnnnnnnnnnnnnnnnnnnnnnnnnnnnnnnnnnnnnnnnnnnnnnnnnnnnnnnnnnnnnnnnnnnnnnnnnnnnnnnnnnnnnnnnnnnnnnnnnnnnnnnnnnnnnnnnnnnnnnnnnnnnnnnnnnnnnnnnnnnnnnnnnnnnnnnnnnnnnnnnnnnnnnnnnnnnnnnnnnnnnnnnnnnnnnnnnnnnnnnnnnnnnnnnnnnnnnnnnnnnnnnnnnnnnnnnnnnnnnnnnnnnnnnnnnnnnnnnnnnnnnnnnnnnnnnnnnnnnnnnnnnnnnnnnnnnnnnnnnnnnnnnnnnnnnnnnnnnnnnnnnnnnnnnnnnnnnnnnnnnnnnnnnnnnnnnnnnnnnnnnnnnnnnnnnnnnnnnnnnnnnnnnnnnnnnnnnnnnnnnnnnnnnnnnnnnnnnnnnnnnnnnnnnnnnnnnnnnnnnnnnnnnnnnnnnnnnnnnnnnnnnnnnnnnnnnnnnnnnnnnnnnnnnnnnnnnnnnnnnnnnnnnnnnnnnnnnnnnnnnnnnnnnnnnnnnnnnnnnnnnnnnnnnnnnnnnnnnnnnnnnnnnnnnnnnnnnnnnnnnnnnnnnnnnnnnnnnnnnnnnnnnnnnnnnnnnnnnnnnnnnnnnnnnnnnnnnnnnnnnnnnnnnnnnnnnnnnnnnnnnnnnnnnnnnnnnnnnnnnnnnnnnnnnnnnnnnnnnnnnnncaaacagtggaacgtgtcacgctgcagaaccaactccaacaatttctagaagcccagaaatcagagggcaagtcactcccttcttcacccagnnnnnnnnnnnnnnnnnnnnnnnnnnnnnnnnnnnnnnnnnnnnnnnnnnnnnnnnnnnnnnnnnnnnnnnnnnnnnnnnnnnnnnnnnnnnnnnnnnnnnnnnnnnnnnnnnnnnnnnnnnnnnnnnnnnnnnnnnnnnnnnnnnnnnnnnnnnnnnnnnnnnnnnnnnnnnnnnnnnnnnnnnnnnnnnnnnnnnnnnnnnnnnnnnnnnnnnnnnnnnnnnnnnnnnnnnnnnnnnnnnnnnnnnnnnnnnnnnnnnnnnnnnnnnnnnnnnnnnnnnnnnnnnnnnnnnnnnnnnnnnnnnnnnnnnnnctgagacagctgaggcagaggtcactgagtgagtctgacacagactccaacatctctgaggaccccaagaatgccgcagtgaggaaggctgcccgaccaaggccacagcccattgtagaaagtgtagagagtatggacagcgcagaaagcctgcacgtgatgatcaagaaacacaccttggcatcagggggacgcaggtttcctttcagcatcaagacctccaaatccctggatggccatagcccatcgcccacctcagagagcagtgaaccagacttggaatcccagtatccaggctcagggagtactcctccaaaccagccctctggtgaccctccacagcccaaccctgacagcactgctgcccagaaagttgccacaagtcccaagagtgccctcaagtctccatcttccaagcgcaggacatctcagaacttaaaactgagagtcacctttgaggagcctgtggtgcagatggagcagcctagccttgaactgaatggagaaaaagacaaagataagggcaggactctccagcggacctccacaagtaacgaatcaggggatcaactgaaaaggccttttggagcctttcgatctatcatggagacactaagtggcaaccaaaacaataataataactaccaggcagccaaccagctgaaaacctcatacattgcccttgacctcacttgggagaaagacaacagatacagagggaaaccctgccagctcnnnnnnnnnnnnnnnnnnnnnnnnnnnnnnnnnnnnnnnnnnnnnnnnnnnnnnnnnnnnnnnnnnnnnnnnnnnnnnnnnnnnnnnnnnnnnnggcataatgacatcaatagaaaaatgaagaaatcctacagcataaagcacattgctgagccagagtcaaaagaactcttcttgtaaatcactttttaaattttctctcactgatgccctttggacactagtggaaatttctggatatcctctatggaaagagaaccatgaaaacaatgcctcaccagcagaagaacagaatatcaggatgccttaaatttatagtagtagactgtaaaagattccttttggggtgatatctgtatatataacttgnnnnnnnnnngatgctgtttaaaagcatgattgggaaaatgtatgtttttaaagagtagattgattcaccctacccacaggacgttgaccaaaccactgatgccattttatatttcatcaattgcatgagtatttgctaatgttgattgaacctccctttccccgtaatgtgggcagatttggctcagctccttcatgagatcaggtcagtgatattgttttatgtcaagagtgttctttctgtcatttctacttttgtataaaggaaataaaacaatgttaacagccacctataagcttggggcacctactttc

SEQ ID NO: 32740 - DNA, 141 bp, Macaca Mulatta
attcacccaggactctgagatggagaaatgcagtgactatgagtccatagaggtacccgacagttacacggggccacgcctctccttcccgctcctgcctgaccatgcaactgccctgatagaagcattcagactgaaaca

SEQ ID NO: 32741 - DNA, 653 bp, Macaca Mulatta
  misc_feature (1)...(653): n = A,T,C or G
ggggttgccgaggctcctcctccctctctcctgccggggcggaggcggaccaggggcgggccgttggcagcctccgccccctcaaccttcgcggggtgcgggcggcagctttttggttcacagccgggcagcgagaaccgcgggaagggctctccaggcgagagacggacgccaggcgtcgtggcaaggaaaagtgactagctccccttcgttgtcagccagggacgagaacagagccacgctcccacccggctgctcacgatccctcggcggcgatgtcggccgccggtgcccgaggcctgcgggccacctaccaccggctcctcgataaagtggagctgatgctgcccgagaaattgaggccgttgtacaaccatccagcaggtcccagaacagtttttttctgggctccaattatgaaatgggggttggtgtgtgctggattggctgatatggccagacctgcagaaaaacttagcacagctcaatctgctgttttgatggctacagggtttatttggtcaaggtactcacttgtaattattccaaaaaattggagtctgtttgctgttaatttccttgtggggacagcaggagcctctcagctttttcgtatttggagaataaccaagactaaaagctaaagncacaat

SEQ ID NO: 32742 - DNA, 1001 bp, Macaca Mulatta
  misc_feature (1)...(1001): n = A,T,C or G
cggcacgagacctgcgcctgagatccaaagaggcagcaaaggaaactagtagcaataaaagctccatttcaggaactgaacaggaaatattccaagtagaattaaaccttcaaaatccttctctgaatcatcaagggattgatcaaatatatgactgccaaggtttactgccacctccagagaagctcactgctgaggtcctgggaatcatttgcattgtcctgatggccactgtgttaaaaacaatagttcttattcctctcctggagcagaacaattctttcccgaatacaacaacccagagagtacgtcattgtggccattgtcctgaggagtggattacatattccaacagttgttattacattggcaaggaaaaaagaacttgggcagagagtttgctggcctgtgcttcaaagaactctagtctgctttctatagataatgaggaagaaatgaaatttctgaccgccattttaccttcttcatggattggtgtgtttcgtgacagcagtcatcatccatgggtgacaataaacggtctgactttcaaacatgagtaagttgttttgtacaatgctatataaaaaatatataaaggataaattgagaagaataatacgaataaatatatgtggactcattgacatgaagaaagatgtggaaggttagtgaaatgttgcatcactcatttacaaaagacaccagtgtccatatggctaccccccttagtccctaaaagccactggcattgaatgccacgagggcagtcaggaatctgagggcacttgaagaacaacagtctgcgcaactagaccgtacacccaagtatagaagtcgatggttgcaatcacgtctgcaaagacagtaccgtcaagtacgaaggcggccgtttaacgaatagcagcacaatgagcgagaaataatgactgccaaatcaagaatagatgcgcctgcttattacctgtcagtttnnnnngnngaacgaggtgagcagcaca

SEQ ID NO: 32743 - DNA, 1942 bp, Macaca Mulatta
  misc_feature (1)...(1942): n = A,T,C or G
gctggataatgcagacgaacaagcagcccagatcagaagggaacttgatggccggctgcaattggcagataaaatggcaaaggnnnnnnnnnnnnnnnnnnnnnnnnnnnnnnnnnnnnnnnnnnnnnnnnnnnnnnnnnnnnnnnnnnnnnnnnnnnnnnnnnnnnnnnnnnnnnnnnnnnnnnnnnnnnnnnnnnnnnnnnnnnnnnnnnnnnnnnnnnnnnnnnnnnnnnnnnnnnnnnnnnnnnnnnnnnnnnnnnnnnnnnnnnnnnnnnnnnnnnnnnnnnnnnnnnnnnnnnnnnnnnnnnnnnnnnnnnnnnnnnnnnnnnnnnnnnnnnnnnnnnnnnnnnnnnnnnnnnnnnnnnnnnnnnnnnnnnnnnnnnnnnnnnnnnnnnnnnnnnnnnnnnnnnnnnnnnnnnnnnnnnnnnnnnnnnnnnnnnnnnnnnnnnnnnnnnnnnnnnnnnnnnnnnnnnnnnnnnnnnnnnnnnnnnnnnnnnnnnnnnnnnnnnnnnnnnnnnnnnnnnnnnnnnnnnnnnnnnnnnnnnnnnnnnnnnnnnnnnnnnnnnnnnnnnnnnnnnnnnnnnnnnnnnnnnnnnnnnnnnnnnnnnnnnnnnnnnnnnnnnnnnnnnnnnnnnnnnnnnnnnnnnnnnnnnnnnnnnnnnnnnnnnnnnnnnnnnnnnnnnnnnnnnnnnnnnnnnnnnnnnnnnnnnnnnnnnnnnnnnnnnnnnnnnnnnnnnnnnnnnnnnnnnnnnnnnnnnnnnnnnnnnnnnnnnnnnnnnnnnnnnnnnnnnnnnnnnnnnnnnnnnnnnnnnnnnnnnnnnnnnnnnnnnnnnnnnnnnnnnnnnnnnnnnnnnnnnnnnnnnnnnnnnnnnnnnnnnnnnnnnnnnnnnnnnnnnnnnnnnnnnnnnnnnnnnnnnnnnnnnnnnnnnnnnnnnnnnnnnnnnnnnnnnnnnnnnnnnnnnnnnnnnnnnnnnnnnnnnnnnnnnnnnnnnnnnnnnnnnnnnnnnnnnnnnnnnnnnnnnnnnnnnnnnnnnnnnnnnnnnnnnnnnnnnnnnnnnnnnnnnnnnnnnnnnnnnnnnnnnnnnnnnnnnnnnnnnnnnnnnnnnnnnnnnnnnnnnnnnnnnnnnnnnnnnnnnnnnnnnnnnnnnnnnnnnnnnnnnnnnnnnnnnnnnnnnnnnnnnnnnnnnnnnnnnnnnnnnnnnnnnnnnnnnnnnnnnnnnnnnnnnnnnnnnnnnnnnnnnnnnnnnnnnnnnnnnnnnnnnnnnnnnnnnnnnnnnnnnnnnnnnnnnnnnnnnnnnnnnnnnnnnnnnnnnnnnnnnnnnnnnnnnnnnnnnnnnnnnnnnnnnnnnnnnnnnnnnnnnnnnnnnnnnnnnnnnnnnnnnnnnnnnnnnnnnnnnnnnnnnnnnnnnnnnnnnnnnnnnnnnnnnnnnnnnnnnnnnnnnnnnnnnnnnnnnnnnnnnnnnnnnnnnnnnnnnnnnnnnnnnnnnnnnnnnnnnnnnnnnnnnnnnnnnnnnnnnnnnnnnnnnnnnnnnnnnnnnnnnnnnnnnnnnnnnnnnnnnnnnnnnnnnnnnnnnnnnnnnnnnnnnnnnnnnnnnnnnnnnnnnnnnnnnnnnnnnnnnnnnnnnnnnnnnnnnnnnnnnnnnnnnnnnnnnnnnnnnnnnnnnnnnnnnnnnnnnnnnnnnnnnnnnnnnnnnnnnnnnnnnnnnnnnnnnnnnnnnnnnnnnnnnnnnnnnnnnnnnnnnnnnnnnnnnnnnnnnnnnnnnnnnnnnnnnnnnnnnnnnnnnggcatttgcctggtggcctgatttattggctgaacatgcagagaaattttgggctttatttacagtagatatggacactgcactagaggctcaaccacaagactcctgggatagttttcctcttttccaactgcttaataatttcctccgaaatgaca

SEQ ID NO: 32744 - DNA, 373 bp, Macaca Mulatta
  misc_feature (1)...(373): n = A,T,C or G
gggtttgctactcacaaagcagaaatcattgtgtctgcactggtcaagatcctggaagccaacatggacgtcgtctacaaagatatggtcaccaagatgcagcagnnnnnnnnnnnnnnnnnnnnnnnnnnnnnnnnnnnnnnnnnnnnnnnnnnnnnnnnnnnnnnnnnnnnnnnnnnnnnnnnnnnnnnnnnnnnnnnnnnnnnnnnnnnnnnnnnnnnnnnnnnnnnnnnnnnnnnnnnnnnnnnnnnnnnnnnnnnnnnnnnnnnnnnnnnnnnnnnnnnnnnnnnnnnnnnnnnnnnnnnnnnnnnnnnnnnnntattcattgaacgaaaagaagctgctggaattgcgaacagaaatagtggcattg

SEQ ID NO: 32745 - DNA, 753 bp, Macaca Mulatta
  misc_feature (1)...(753): n = A,T,C or G
tttcctgcttctgcagtttctgttttgaagagccagcacttacggcagaaactccttcagtctctgtttcttgataaagtgtattgggaaagtcaaggaggtagacaaggaattgaaaagcttattgatgtaatagaacacagagccaaaattcttatcacctatatcaatgcacacggggccaaagtattacctatgaatgaatgacaaaagaattttctggctaggatgttatatatannnnnnnnnnnnnnnnnnnnnnnnnaatcaagcacatcaacctcaagcgtgtttagcaatgaggcagtgtagatgaatacataaaataaatgactttaaccaagtagctataatggaactgagcactgtatgcatacttaaaaaagtttttaaaaacaagctacttaagaagtatttgtttatatttttctgtaacatcatgctatgtgtgaatctgaacatctgacaacagaagtttcagttattattctagctaagttttgaaaacatttgtcatgctgtttaatagaaaagtgtaagccagaggtactgactccattcataaagcatattttatgccattttgactgttctgaccaagtactaatgggaatgattcttgacattcttctgttgctgattgttaacatagagcagcctccacactaccccgaggcaactctacattggaacactgaggctcacagcctgcaagagcatcagaactgaccatacatttaaacagaaatgctg

SEQ ID NO: 32746 - DNA, 1372 bp, Macaca Mulatta
tctgctgcggctgctgctgccgccgctgttgttggtcacgcggagtcgccgaacccggcaggagtctactatgcaactgcatactggatgcctgctgaaatgacagtagaagtcaaaaatataatggacaagaatggggacgcctatggcttttacaataactctgtggaaaccacaggctggggcatcctggagatcagagctggctatggctctcaagccttgagcaatgagatcatcatgtttgtggctggctttttggagggttacctcactgccccgcacatgaatgaccactacacaaacctctacccgcagctgatcaggaaaccttccatcatggatgaagtgcaggattttatggagaagcaagataagtggacccggaaaaatatcaaagcatacaaggatgactcattttggagacacacaggctatgtgatggcacaaatagatggtctttacgtaggagcaaagaggagggccatcttagaaggaacaaagccaatgaccctgttccagattcagttcctgaatgctgttggagatttattggatctgataccctcactctctcccacaaaaaacagcagcctaaagttttttaagagatgggacatgggacattgctccgctcttattaaggttcttcctgggtttgagaacatcctttttgctcactcaagctggtacacgtacgcagccatgctcaggatatataaacactgggacttcaacatcaaagataaagataccagcagtagtcgcctctctttcagcagttacccaagatttttggagtctctggatgacttttacattcttagcagtggattggtactggctgcagaccacaaaacagtgtgtataataaaaccctgctaaagcagataatacccgagtctctcctggcatggcaaagagtccgtgtggccaatatgatggcagatagtggcaagaggtgggcagacatcttttcacaatacaactctggcacctataacaatcaatacatggttctggacctgaagaaggtaaagctgaaccacagccttgacaaaggcactctgtacattgtggagcaaattcctacatatgtagaatattccgaacaaactgatgttctacggagaggatattggccctcctacaatattcctttccatgaaaagatctacaactggagtggctatccactgttagttcagaagctgggcttggactactcttatgatttagcgccacgagccaaaaatcttccggagtgaccaagggaaagtgactgatgtggcatccatgaaatatatcatgcgatacaacaatgatacgacggatccttacagtaagggtgacccctgtaataaccatctgc

SEQ ID NO: 32747 - DNA, 2817 bp, Macaca Mulatta
  misc_feature (1)...(2817): n = A,T,C or G
acagcggcctcactcccagtgatccagatgagttctgtgtggatgtggggcccctgcttttggtccctggaggtttctttggggtctcagcagccaccnnnnnnnnnnnnnnnnnnnnnnnnnnnnnnnnnnnnnnnnnnnnnnnnnnnnnnnnnnnnnnnnnnnnnnnnnnnnnnnnnnnnnnnnnnnnnnnnnnnnnnnnnnnnnnnnnnnnnnnnnnnnnnnnnnnnnnnnnnnnnnnnnnnnnnnnnnnnnnnnnnnnnnnnnnnnnnnnnnnnnnnnnnnnnnnnnnnnnnnnnnnnnnnnnnnnnnnnnnnnnnnnnnnnnnnnnnnnnnnnnnnnnnnnnnnnnnnnnnnnnnnnnnnnnnnnnnnnnnnnnnnnnnnnnnnnnnnnnnnnnnnnnnnnnnnnnnnnnnnnnnnnnnnnnnnnnnnnnnnnnnnnnnnnnnnnnnnnnnnnnnnnnnnnnnnnnnnnnnnnnnnnnnnnnnnnnnnnnnnnnnnnnnnnnnnnnnnnnnnnnnnnnnnnnnnnnnnnnnnnnnnnnnnnnnnnnnnnnnnnnnnnnnnnnnnnnnnnnnnnnnnnnnnnnnnagggatgcagctgtccgcatggccgcagaagcccaggtctcctacctgcctgtgggcactgagcatcatttcttagagctggaccacatcctgggcctcctgcagaaggagcttcagggcccggcnnnnnnnnnnnnnnnnnnnnnnnnnnnnnnnnnnnnnnnnnnnnnnnnnnnnnnnnnnnnnnnnnnnnnnnnnnnnnnnnnnnnnnnnnnnnnnnnnnnnnnnnnnnnnnnnnnnnnnnnnnnnncaggcaggagctgaacgagagcctgcaggagtgtctgtccacaggcagccttcctctgggtcctgcaccacacacccccagggccccggggattctcaggaggcagcctctccctgccagcatgcctgcctgacccacctcagagcctgctttgcatcactgggaagcaggcagtgtctggggtgggtgcttgatcagcatcctcttcgtctgggtgcccagctcccacccacacctgagctttcagcacactcccatcttattaaaggtgatttccctctccccatgctgtgatatgctggtcttctttccagcctcaccctaatctctgtgaaggcttccaccccttctgagtnnnnnnnnnnnnnnnnnnnnnnnnnnnnnnnnnnnnnnnnnnnnnnnnnnnnnnnnnnnnnnnnnnnnnnnnnnnnnnnnnnnnnnnnnnnnnnnnnnnnnnnnnnnnnnnnnnnnnnnnnnnnnnnnnnnnnnnnnnnnnnnnnnnnnnnnnnnnnnnnnnnnnnnnnnnnnnnnnnnnnnnnnnnnnnnnnnnnnnnnnnnnnnnnnnnnnnnnnnnnnnnnnnnnnnnnnnnnnnnnnnnnnnnnnnnnnnnnnnnnnnnnnnnnnnnnnnnnnnnnnnnnnnnnnnnnnnnnnnnnnnnnnnnnnnnnnnnnnnnnnnnnnnnnnnnnnnnnnnnnnnnnnnnnnnnnnnnnnnnnnnnnnnnnnnnnnnnnnnnnnnnnnnnnnnnnnnnnnnnnnnnnnnnnnnnnnnnnnnnnnnnnnnnnnnnnnnnnnnnnnnnnnnnnnnnnnnnnnnnnnnnnnnnnnnnnnnnnnnnnnnnnnnnnnnnnnnnnnnnnnnnnnnnnnnnnnnnnnngagtgtatctgctcaacccctctcccgggagaacgaccccaccaccgcaggccctaatccgctgtcagcagtgcccagcggagctcggcgttgaaggaggcacgtgggggaggcgggagtggggagcaggcacgtggtccagccttctcagccccgtgctgnnnnnnnnnnnnnnnnnnnnnnnnnnnnnnnnnnnnnnnnnnnnnnnnnnnnnnnnnnnnnnnnnnnnnnnnnnnnnnnnnnnnnnnnnnnnnnnnnnnnngctgtccgcaagacctagtgctgaagtaggcgcggacgtgcccggtgcctagcgcgtggtagcaggcgcccagtgccccagccggcgaagaccatggcgtttatggtgaagaccatggtgggcggccagctgaagaacctcactgggagcctgggaggcggcgaggacaagggggatggggacaagtcggcagccgaagctcagggcatgagccgggaggagtacgaggagtatcagaagcaactggtggaagagaagnnnnnnnnnnnnnnnnnnnnnnnnnnnnnnnnnnnnnnnnnnnnnnnnnnnnnnnnnnnnnnnnnnnnnnnnnnnnnnnnnnnnnnnnnnnnnnnnnnnnnnnnccagatccagatggcaggtgcccataaggagctgccccgggagttggccaagatgatcgagccttaacagaggaggaggaggagaaggcctcagtccttgggcagctggccagccttcctggcttggacctgggctcactcaaggacaaggcccaggccacactgggggacctcaagcaatcagctgagaagtgtcacgtaatgtgaccacttccctggggttacccactgggctgggcctccatgagggctgagtgtgtgtcaacttccagagacccatactccatttggggctttgttttccttgccccatcctagttccaagacctttcccatccatgccccaaccctatcttctgtttttttcctctctgctgggagcaaagcccccatcttcaccttacccttcaggaccctccccgccagctcagcctgtggaggcctccccagattgcaggaatatgcccatccctctctggcc

SEQ ID NO: 32748 - DNA, 154 bp, Macaca Mulatta
ggcccaaggaaaattccagaaagcttggaaccactttaccattgccatagatattgatccaaagaactacttagcctatgaaggaagagctgtggtctgtcttcagatgggtaataattttgctgcaatgcaggatattaatgctgccgtgaag

SEQ ID NO: 32749 - DNA, 175 bp, Macaca Mulatta
ggaggagatggacctgaaggtactacagttcaagaacaaaaaactggcagagcggctggaacaacggcaggcttgtgaagatgaactccgagaacgaattgagaagttggagaagcggcaggccacagatgatgccacactcctcatcgtcaatcgctactgggcccaggtggat

SEQ ID NO: 32750 - DNA, 711 bp, Macaca Mulatta
cagaaaagatgacagcgatgacacgggggtggctggataacccccaataacatcaagcagatccagcaggagctggagcaatgtgacgtcgcccaaggacgtgcgggttggctgcgtgaccacagacttcgccatgcagaatgttctgctgcagatggggctgcacgtgctggcggtgaacggcatgctgattcgcgaggcccggagctacatcttgcgctgccacggctgtttcaagacaacgtctgacatgagccgagtgttctgtgctcactgtgggaacaagactctgaagaaagtgtccgtgaccgtcagcgacgacggcgccctgcacatgcacttctcccgcaaccccaaggtgctgaacccccgcggcctccggtactcgcttcccactcccaaagggggcaaatacgccgtcaacccccacctcaccgaggatcagcgcttccctcagctgcgactctcccgaaaggccaggcagaaaaccaacgtgttcgcccctgactacgtcgccggggtgtcgccctttgtggagaacgacgtctccagccgctcagctaccctgcaggtccgggacagcaccttgggagctgggcggagacgcttgaatcccaacgcttccagaaagaagtttgtgaagaaaaggtgaagtgcgagttcccgccaggcaactggatgggtgttctggccactgtggaggtccggtgt

SEQ ID NO: 32751 - DNA, 931 bp, Macaca Mulatta
gagtgtgtgccgagcagaatatcattagaaatacaaaaccagtgtttggggattattttcctcgaacgcagtatataagccaaggtctgaaggagcagttaggaaggtctcagaccttaaaatatcaactgatactgaatttctcagtataattacctccagccaggttgcttttttagctcaaaagaaagataaagggcagagtcctataaataaagggaatgcaaacatggagactgaaccaaaggcaagttacggggagataagaatacctgaagagaattcgattcagcttgatgattttacagatgcatatgaaagtggacaaaaccaagcatattctcttgaactttttagtcctgtttgtcctaaaacagaaaatagccacattcacataaactctgataaaggtcttgaagaaaatacagaatctcaagaacttttcagttctgaagatgaactgccaccaaatgagatacgtattgagttatgtagctcaggaatactgtgttcccagctaaatacctttcacaaaagtgctattaaaagaagctgcacctctgaagataaggtgggccagtctgaagctgtgtctcgagtccttcaagtagctaagaaaatgaagttgatttctaatgaaggagattctgctgtagaagtggatcagaggaatgtgtctgaatttaagggtattaaaaaaacgtcattaataaaaaactgtgattctaaaagccagaagtataattgtttagtcatggtgctatctccatgccatgtgaaggaaataaacataaaattcggaccaaattctggctctaaagtgcctttagcaacagttacagtaattgatcaatcagatactaaaaagaaagtttttctgtggaggactgccgcatttggggcattacagtgtttcttggagatataattt

SEQ ID NO: 32752 - DNA, 3710 bp, Macaca Mulatta
  misc_feature (1)...(3710): n = A,T,C or G
cagggttccaagccaccctgctgggaggcttctctccaagaattctgggtaccagagtggaaggcattttcccaccaactggagagagacgaaacatcggagaccaggaggctgtggagaaagcagttgacccaggtgcctcaactatcccagaagggtcagcgccacgtggctgccagcatctttgagaaaatcatccgcaaccaaacttcagagctgcggacagaggtgtggttagaactgagatacaacctgcccacctgggtcaggtctaaagacaagaagtcctgagttcttgccactgaggaggccagggtcatttgtccagaaaactttgagactgtctttgagtgacctagtctgggacccattcactggtgggttctaaggttagacgctcattcaggatattttcaatactaagtcagtgcatagctgccccactaacaaattggtgactgtagagtcagagcgggtcagttcttgggacaatggcgctggcgctgttagaggactggtgcaggataatgagtgtggatgagcagaagtcactgatggttacggggataccggtggactatgaggaggctgagattcaggaggtccttcaggagactttaaagtctctgggcagttatagactgcttggcaagatattccggaagcaggagaatgccaatgctgtcttactagagcttctggaagatactgatgtctcggccattcccagtgaggtccagggaaaggggggtgtctggaaggtggtctttaagacccctaatcaggacactgagtttctggaaagactgaacctctttctagaaaaagaggggcagacggtctcaggtatgtttcgagccctggggcacgagggcatgtctccagccacagtgccctgcatctcaccagaattactggcccatttgttgggacaggcaatggcacaagcgcctcagcccctgctacctatgagataccggaaactacgagtgttctctgggagtgctgtcccagccccagaggaagagccctttgaggtctggttggaacaggccacggagatagtcaaagagtggccagtaacagaggcagaaaagaaaaggtggctggcagaaagcctgcggggccctgccctggacctcatgcacatagtgcaggcagacaacccgtccatcagtgtagaagagtgtttggaggcctttaagcaggtgtttgggagcctagagagccgcaggacagcccaggtgaggtatctgaagacctatcaggaggaaggagagaaagtctcagcctatgtgttacggttagaaaccctgctccgaagagccgtggagaaacgcgccatccctcggcgtattgcggaccaggtccgcctggagcaggtcatggctggggccactcttaaccagatgctgtggtgccggcttagggagctgaaggatcagggcccgccccccaacttccttgagctaatgaaggtaatacgggaagaagaggaggaagaggcctcctttgagaatgagagtatcgaagagccagaggaaggagatggctatggcggctggaatcatgaaggggacgactgaaaaccacctgggggcaggacccatagccagtgggcnnnnnnnnnnnnnnnnnnnnnnnnnnnnnnnnnnnnnnnnnnnnnnnnnnnnnnnnnnnnnnnnnnnnnnnnnnnnnnnnnnnnnnnnnnnnnnnnnnnnnnnnnnnnnnnnnnnnnnnnnnnnnnnnnnnnnnnnnnnnnnnnnnnnnnnnnnnnnnnnnnnnnnnnnnnnnnnnnnnnnnnnnnnnnnnnnnnnnnnnnnnnntgggtctcactctcatcacccaggctggagtgcagtggnnnnnnnnnnnggctcactgcagccttgacttcccaggctcaggctcaggtgatcctcacaccttagcctcccaagtacctgggactacaggcatggaccaccacgcctagctattcttttgtttcttggtagagacagggttttgtgttgctcaggctggtctggaactcctaggctcaaatgatgtgcccaactcggcctcccgaagtgctgggattataggcatgaaccaccatgcctggcccttgatttttctttttaagaaaaaatatctaggagtttcttagaccctttgtagattattaatgaacaaaagattaaactccgaaatattagatagtaannnnnnnnnnnnnnnnnnnnnnnnnnnnnnnnnnnnnnnnnnnnnnnnnnnnnnnnnnnnnnnnnnnnnnnnnnnnnnnnnnnnnnnnnnnnnnnnnnnnnnnnnnnnnnnnnnnnnnnnnnnnnnnnnnnnnnnnnnnnnnnnnnnnnnnnnnnnnnnnnnnnnnnnnnnnnnnnnnnnnnnnnnnnnnnnnnnnnnnnnnnnnnnnnnnnnnnnnnnnnnnnnnnnnnnnnnnnnnnnnnnnnnnnnnnnnnnnnnnnnnnnnnnnnnnnnnnnnnnnnnnnnnnnnnnnnnnnnnnnnnnnnnnnnnnnnnnnnnnnnnnnnnnnnnnnnnnnnnnnnnnnnnnnnnnnnnnnnnnnnnnnnnnnnnnnnnnnnnnnnnnnnnnnnnnnnnnnnnnnnnnnnnnnnnnnnnnnnnnnnnnnnnnnnnnnnnnnnnnnnnnnnnnnnnnnnnnnnnnnnnnnnnnnnnnnnnnnnnnnnnnnnnnnnnnnnnnnnnnnnnnnnnnnnnnnnnnnnnnnnnnnnnnnnnnnnnnnnnnnnnnnnnnnnnnnnnnnnnnnnnnnnnnnnnnnnnnnnnnnnnnnnnnnnnnnnnnnnnnnnnnnnnnnnnnnnnnnnnnnnnnnnnnnnnnnnnnnnnnnnnnnnnnnnnnnnnnnnnnnnnnnnnnnnnnnnnnnnnnnnnnnnnnnnnnnnnnnnnnnnnnnnnnnnnnnnnnnnnnnnnnnnnnnnnnnnnnnnnnnnnnnnnnnnnnnnnnnnnnnnnnnnnnnnnnnnnnnnnnnnnnnnnnnnnnnnnnnnnnnnnnnnnnnnnnnnnnnnnnnnnnnnnnnnnnnnnnnnnnnnnnnnnnnnnnnnnnnnnnnnnnnnnnnnnnnnnnnnnnnnnnnnnnnnnnnnnnnnnnnnnnnnnnnnnnnnnnnnnnnnnnnnnnnnnnnnnnnnnnnnnnnnnnnnnnnnnnnnnnnnnnnnnnnnnnnnnnnnnnnnnnnnnnnnnnnnnnnnnnnnnnnnnnnnnnnnnnnnnnnnnnnnnnnnnnnnnnnnaattgttattattattattttgagactgagtcttgctctatcgcccaggctggagtacagtggcacaatctcagctcactgaaacctctgcctcccaggttcaagtgattctcatgcctcagcctcccaagtagctgggattacaggcgcccgccaccatgcccgactaatttttgtatttttagtagaaacggggtttcgccatgttggccaggctggtctcaaactcctgacctcaagtgatccgctcacctcagcctcccaaagtgctgggattacaggtgtgagccaccacgcccggcctaaactctttaaatctctagtaaataacagctagattcaaatgggctgataaccaaattttaacacagaagcattcaccaccaggtttgcgtttatttccagatgggctcattttgtgtagaccttagagcaaagtgtcctttatggtgtctgtgtacgtat

SEQ ID NO: 32753 - DNA, 298 bp, Macaca Mulatta
  misc_feature (1)...(298): n = A,T,C or G
gccccccgaagagtcactcaaggaggaggaagtggctgtggcggacccaagtcctcagnnnnnnnnnnnnnnnnnnnnnnnnnnnnnnnnnnnnnnnnnnnnnnnnnnnnnnnnnnnnnnnnnnnnnnngtcccagccgcagggtgctgacctggctcatgaagggcgtggagaaggtgatcccacagcctgtccatagcgtcacagaggacccggctcagnnnnnnnnnnnnnnnnnnnnnnnnnnnnnnnnnnnnnnnnnnnnnnncaatgaggccctcgaggcccaagacgctag

SEQ ID NO: 32754 - DNA, 106 bp, Macaca Mulatta
gtgtctccaagcctgaggcagtgctattcccagtaagcgactggcatccccgagaccagcctcagaaggaggaggacgtgggacctgctgtgcaccatgtctatga

SEQ ID NO: 32755 - DNA, 371 bp, Macaca Mulatta
ctgggaaccataggtgctaggcctggggtgtattgcttgcttcttccatcaaaaatctcttttatctcctaatgatttgccacctcagcagaaacaggtccctgtggaggtctcagctcagccccaggcagggttactacatggagtgcccagatcccaggggctacctcaggcccttctactaagctcctgaccctggctctgggtcagatgttggctgaacatgaactattgtagggctgacagctacagaccacagaaagagcaaagcttcagcaggttcctgcctgatgcagaagtcctcgggaagcccttggccttttatttcctcattgtcctttcagagaagagagcagcagttgggagagaaa

SEQ ID NO: 32756 - DNA, 168 bp, Macaca Mulatta
  misc_feature (1)...(168): n = A,T,C or G
ngagtcatggcctcgagcacaggtgaccagagccaggcagtgaggaacggactgaggacgaagaaaaagacgctgcacagcatgaatccgcgtgtgcggcgagtggagtacgcagtgcgtggccccatagtgcagcgagccttggagctggagcaggagctgcgccag

SEQ ID NO: 32757 - DNA, 401 bp, Macaca Mulatta
atgagttcctattttgtgaatcccactttccccgggagcctgcccagcggccaggactccttcttgggccagctgcccctctaccaggccggctatgacgcgctgaggcccttcccggcctcgtacggggcgtcgagtctcccggacaagacgtacacctcaccttgtttctaccaacagtccaactctgtcctggcctgcaaccgggcgtcctacgagtacggggcctcgtgtttctattctgataaggacctcagtggcgcctcgccctcgggcagtggcaagcagaggggccccggggactacctgcacttttctcccgagcagcagtacaaacccgacagcagcagcgggcagggcaaagcactccatgacgaaggcgccgaccggaagtactcgag

SEQ ID NO: 32758 - DNA, 497 bp, Macaca Mulatta
tcacgtccgcgctttctcctacacctggttcaacctgcaggcgcggaagcgcaagtacttcaagaagcatgaaaagcggatgtcgaaggacgaggagcgggcggtgaaggacgagctgctgggcgagaagcccgagatcaagcagaagtgggcatcccggctgctggccaagctgcgcaaggacatccggcccgagttccgcgaggacttcgtgctgaccatcacgggcaagaagcccccctgctgcgtgctctccaaccccgaccagaagggcaagatccggcggattgactgcctgcgccaggctgacaaggtgtggcggctggacctggtcatggtgattttgtttaaggggatccccctggaaagtactgatggggagcggctctacaagtcgcctcagtgctcgaaccccggcctgtgcgtccagccacatcacattggagtcacaatcaaagaactggatctttatctggcttactttgtccacactccgg

SEQ ID NO: 32759 - DNA, 352 bp, Macaca Mulatta
  misc_feature (1)...(352): n = A,T,C or G
ttgtcagtgtcatgatgtggccccttgctgtgtaccaccgactgtgggatcgagcatatgtgcggctgaagccagctctgcagcggctggacttcagtgtccgtggctacatgatgtccaagcagagagagagacaannnnnnnnnnnnnnnnnnnnnnnnnnnnnnnnnnnnnnnnnnnnnnnnnnnnnnnnnnnnnnnnnnnnnnnnnnnntcctaagctggacgattctactgttgccagggaattggccatcacagactctgagcactcagatgctgaagtctcctgtacagacaatggcacattcaatctttcaaggggccaaacacctctaacggaaggttctgaa

SEQ ID NO: 32760 - DNA, 226 bp, Macaca Mulatta
ggactagatttccagagtgtttttgtcacagctctggaatgccttactcaagatgacttgtttcaatagcaataatttgttgaatggaagacactctacttagcaaagtaccaaaaaatgcttataactgaaaatagatctcctgacatgtacaaaattaagtcagttttcataaagcagatcctactttgttacaatcagtaaggagtgttgaaaaagccaagaa

SEQ ID NO: 32761 - DNA, 643 bp, Macaca Mulatta
  misc_feature (1)...(643): n = A,T,C or G
agggcatctgtatcgtgtgttgtcaatctcaaaatccgagtgcctatttgaatcaattgctagggaatgttattgagcagtatattgggcgatttcttccagcttcaccatatgtttcagatcttggacaacatcctgttttactggcattgagaaaaagagcccactgttccgccaatatcatctcttaagaannnnnnnnnnnnnnnnnnnnnnnnnnnnnnnnnnnnnnnnnnnnnnnnnnnnnnnnnnnnnnnnnnnnnnnnnnnnnnnnnnnnnnnnnnnnnnnnnnnnnnnnnnnnnnnnnnnnnnnnnnnnnnnnnnnnnnnnnnnnnnnnnnnnnnnnnnnnnnnnnnnnnnnnnnnnnnnnnnnnnnnnnnnnnnnnnnnnnnnnnnnnnnnnnnnnnnnnnnnnnnnnnnnnnnnnnnnnnnnnnnnnnnnnnnnnnnnnnnnnnnnnnnnnnnnnnnnnnnnggcagtttatccaggattatggtatgaggtactattatcaggtttacagcattttagaaacagtagcaacattggaccagcaggttgtcatccacttgatttctaccctcactcaatctctgaaggattcagagcagaaatggggccttggcaggaatatagcacaaagg

SEQ ID NO: 32762 - DNA, 243 bp, Macaca Mulatta
aagaactcatgaccatcaagctcaaaacaaccgagggtaagagcgcagggctggctgtcaccacatcctccagggtgtagaccctggctccctaaagggtttcgtgtgtcaaagtattcactaggtggaaagtgtaattctaatgtacaagaagaaaggtttcctcagatttgaactaaaattataactttgtttaaaaacaattttttggtgtcttccttatttttaaataaggagtgatct

SEQ ID NO: 32763 - DNA, 493 bp, Macaca Mulatta
aagcatgaggacgtccgcatgttttctctttcagttagctggagggcgggatgttgggaaaggaaaggacagatgtctaaaggaggttgcagagcaggccaggcagacggggaggctcccttgaagagcttcctccctcccaaacctgggtctcaaagacctaggaagaggcaggcacagtccctggggacagcagggagccagaaggtttgtagcctattggtgcaaacattggacaaacacctgtgtctttcctagaagtgcactatcagaaacacaggagtgtgttgctgctttgtgtcctcttccccatctgtccctttagtcatggttaggacagatggggaggggacaccatgaagaggcagaaactagcccagaactcagttcttctagtgggggagtgcagagagaggagaactcaaatcaccagtagggagaggtaaaaaagcaaacaaagcaggccctaaggcacacaacgttgcagaaaatg

SEQ ID NO: 32764 - DNA, 519 bp, Macaca Mulatta
gcacccctgtttatgttcctgtcacttgccacagcctttactctcataagcaacaggagaatgaggaggttctagggctctgtgagtaaaaaatcaggaagatagggaaaggagaatggaagctcatctgaatcctccttccttgcctacatttgtttaaatttgagcaaaacagccagacaattgatcatttctggcaaaacatgttgagtccctcttagggtttaacagttttgggtaccttttaaagaaaatatttggttatatgtaaaattgggattttcccaccttttaaattcctgcttcttctatttgccattcttttccactccgtgagagagtagagacaggattcttcactagttctcctcagggggagctggttgaggacaatcagtaacatcttcgttgtgagtgtcaaatagactttgtaatttcaaagcagacgcaagtccctaatactaaaatctttgattacagctacctcttgctgatagaaaagggaagtcttgaaatttg

SEQ ID NO: 32765 - DNA, 1079 bp, Macaca Mulatta
  misc_feature (1)...(1079): n = A,T,C or G
attagtgatgatgaaccaggttatgaccttgatttattctgcatacctaatcattatgctgaggatttggaaagggtgtttattcctcatggactaattatggacaggnnnnnnnnnnnnnnnnnnnnnnnnnnnnnnnnnnnnnnnnnnnnnnnnnnnnnnnnnnnnnnnnnnnnnnnnnnnnnnnnnnnnnnnnnnnnnnnnnnnnnnnnnnnnnnnnnnnnnnnnnnnnnnnnnnnnnnnnnnnnnnnnnnnnnnnnnnnnnnnnnnnnnnnnnnnnnnnnnnnnnnnnnnnnnnnnnnnnnnnnnnnnnnnnnnnnnnnnnnnnnnnnnnnnnnnnnnnnnnnnnnnnnnnnnnnnnnnnnnnnnnnnnnnnnnnnnnnnnnnnnnnnnnnnnnnnnnnnnnnnnnnnnnnnnnnnnnnnnnnnnnnnnnnnnnnnnnnnnnnnnnnnnnnnnnnnnnnnnnnnnnnnnnnnnnnnnnnnnnntgttggatttgaaattccagacaagtttgttgtaggatatgcccttgactataatgaatacttcagggatttgaatncatgtttgtgtcattagtgaaactggaaaagcaaaatacaaaacaagcctcagttgagagttcaagttgagtctggaaacatctggagtcctatggacatcgccagtacaattatcaatgttctagttctgtggccatctgcttagtagagctttttgcatgtatcttctaagaattgtacgttttgtactttagaaatgtcagttgctgcattcctaaagtgtttatttgcactatgagcctatagactgtcagttccctttgggtggattgtggtttaacttgtaaatgaaataaatcacttaaaccacaccactgttgagtgaaacactgaaatcatatccataagaaataaggagaagatatattagttttataattggtattttaattattatatatgcaggaaagaacataggtgattgactattgttaatcttaccactgtgtgtttagaaaagtaagaagcagacaattttcacatcaaagacagcatctgagaagttttgttctgt

SEQ ID NO: 32766 - DNA, 844 bp, Macaca Mulatta
cattattccatatttttcagccttgatagggactagtctgggttcccagtgggaacagtcagagcactgatttcaaacataattgggaacttgatatttttatgaatgcctcaggatttagtgaggacagatcccctgggggtcagtgacagtgaagcttggacagtactaaggcttactgctgactgaggcacaagtaggagaaggtggcactttgtagtcctgggatgtctggggttggcctgggatgggacatggacaggaagccctggtaagggaatgtgggcctatcttttgagtagcagttatttctgctttgcatcttggcctatagttccctcctctccttctcttagcaggtgaaccaggacgtgagccggcagctgcttcaggatgggtatcacctggatgagattccagatgacgaggacttggacctcatcccccctaagcccatggcctcttcagcgtgctcctgctgctggtgctgtcttggggactcttcctcctgtaccctccagtagacattaccctccaagataggccctgctcaccacgaggcctacagagccctgttggccactcatagctcacagagtgcagtgagcactggagtcgctgacccctagaaagtaacctgcaggtagcccttacctgttgcttctcaggccaaagacccccatctgggctgtcggctgataggtggaattctgcagttttcctctgctgttggagcagagtttggagaagtcactttaataagggcaggacagaggaatactggttcttatggtgggtgacaaaggtgggctaaggaaaacacttgcagacagcttgactggta

SEQ ID NO: 32767 - DNA, 1110 bp, Macaca Mulatta
ggaattggtctgcagatgggaaccaacaaatgtgccagccaggcaggtatgacagcttatgggactaggaggcacctttatgaccccaaaatgcaaactgacaaaccttttgaccagaccacaattagtctgcagatgggcaccaataaaggagccagccaggcagggatgttagcaccaggtaccagaagagacatctatgatcagaagctaacattacagccggtggacaactcgacaatttccctacagatgggtaccaacaaagttgcttcccagaaaggaatgagtgtgtatgggcttgggcggcaagtatatgatcccaaatactgtgctgctcctacagaacctgtcattcacaacggaagccaaggaacaggaacaaatggttcggaaatcagtgatagtgattatcaggcagaataccccgatgagtatcatggcgagtaccaggatgactaccccagagattaccaatatagcgaccaaggcattgattattagatccacacataaggagcgcagtatttagtccattgtttttattcagtgagaaccaagctagccttgagtaatttttatcttgtcttcctaaaacactatttgagcttattgtactttttaagaaaaattgccttacatacatttccttttttcttttttctgcctcttcccttcaatagttgcctgtttagtgctgtaactagtttaaatccctacagccataattagtaaacctcgcattatgaagtcaaaaatgggataactgtggaaaaggggagaaactccttggtaaagacaatttcctttgatagcaaagtatcctagccatttttttccaaacctaaaatataaacaggggatttttccaaaataaaaggaaacaaaccttcttttcttttgttttgacagtcataagttgtttcccggggattacacacactggaaaaaaagacactcccccaggcttaattacacaaaaatgtgggagcattttgccaaacctatacttttcacaaatgccctcctttttcaaatagatctacgaattctaaaatcattgtactgcaaagaaatagttctttgcgtacattatttataataaaaact

SEQ ID NO: 32768 - DNA, 1916 bp, Macaca Mulatta
  misc_feature (1)...(1916): n = A,T,C or G
acaaccgccaccgcgagctggagaaggaggtccgcgccggccaggnnnnnnnnnnnnnnnnnnnnnnnnnnnnnnnnnnnnnnnnnnnnnnnnnnnnnnnnnnnnnnnnnnnnnnnnnnnnnnnnnnnnnnnnnnnnnnnnnnnnnnnnnnnnnnnnnnnnnnnnnnnnnnnnnnnnnnnnnnnnnnnnnnnnnnnnnnnnnnnnnnnnnnnnnnnnnnnnnnnnnnnnnnnnnnnnnnnnnnnnnnnnnnnnnnnnnnnnnnnnnnnnnnnnnnnnnnnnnnnnnnnnnnnnnnnnnnnnnnnnnnnnnnnnnnnnnnnnnnnnnnnnnnnnnnnnnnnnnnnnnnnngtgcccctggtgtccaagatctgccctagtgacacctacaaagtgtggaagagcggccagaacctgagggtagacaccacgctcctgggctttgaccacatgacctggcagcgagggaaccgcagctttgtcttcaggggccaannnnnnnnnnnnnnnnnnnnnnnnnnnnnnnnnnnnnnnnnnnnnnnnnnnnnnnnnnnnnnnnnnnnnnnnnnnnnnnnnnnnnnnnnnnnnnnnnnnnnnnnnnnnnnnnnnnnnnnnnnnnnnnnnnnnnnnnnnnnnnnnnnnnnnnnnnnnnnnnnnnnnnnnnnnnnnnnnnnnnnnnnnnnnnnnnnnnnnnnnnnnnnnnnnnnnnnnnnnnnnnnnnnnnnnnnnnnnnnnnnnnnnnnnnnnnnnggtgtatggagcatccaacgtggagctcatcacccggacacggacagagcatctttcagaacagcacaagggcaaggtcaaaggnnnnnnnnnnnnnnnnnnnnnnnnnnnnnnnnnnnnnnnnnnnnnnnnnnnnnnnnnnnnnnnnnnnnnnnnnnnnnnnnnnnnnnnnnnnnnnnnnnnnnnnnnnnnnnnnnnnnnnnnnnnnnnnnnnnnnnnnnnnnnnnnnnnnnnnnnnnnnnnnnnnnnnnnnnnnnnnnnnnnnnnnnnnnnnnnnnnnnnnnnnnnnnnnnnnnnnnnnnnnnnnnnnnnnnnnnnnnnnnnnnnnnnnnnnnnnnnnnnnnnnnnnnnnnnnnnnnnnnnnnnnnnnnnnnnnnnnnnnnnnnnnngggaattcatcaccctgcgcctgcctcctggcttcccggtcaagattnnnnnnnnnnnnnnnnnnnnnnnnnnnnnnnnnnnnnnnnnnnnnnnnnnnnnnnnnnnnnnnnnnnnnnnnnnnnnnnnnnnnnnnnnnnnnnnnnnnnnnnnnnnnnnnnnnnnnnnnnnnnnnnnnnnnnnnnnnnnnnnnnnnnnnnnnnnnnnnnnnnnnnnnnnnnnnnnnnnnnnnnnnnnnnnnnnnnnnnnnnnnnnnnnnnnnnnnnnnnnnnnnnnnnnnnnnnnnnnnnnnnnnnnnnnnnnnnnnnnnnnnnnnnnnnnnnnnnnnnnnnnnnnnnnnnnnnnnnnnnnnnnnnnnnnnnnnnnnnnnnnnnnnnnnnnnnnnnnnnnnnnnnnnnnnnnnnnnnnnnnnnnnnnnnnnnnnnnnnnnnnnnnnnnnncaggagcgccccgcccacgccgcagcgccagcctgcgcccccggcgtcagtgcccagccctcggcccagctcagggccaggttccagcggccacgtgttccggagctacgacgagcagctgcggctggcgatggagctgtcggcgcaggagcaggaggagcggcggcggcgcgcgcgccaggaggaagaggagctggagcgcatccttaggctctcactgaccgagcagtagcgccccctgccgggaccctcgcctgcgccatgcgcgccacgcccagggccaggagccagacaagcctaggcctgcgcgcctgcagagcggcggctggagactggagcca

SEQ ID NO: 32769 - DNA, 2264 bp, Macaca Mulatta
  misc_feature (1)...(2264): n = A,T,C or G
gatttttgcttcagtgtcttgaggatcttgatgccaatctacgaaaattaaactcccgtctgtttgtgattcgtggacaaccagcagatgtgtttcccaggcttttcaaggnnnnnnnnnnnnnnnnnnnnnnnnnnnnnnnnnnnnnnnnnnnnnnnnnnnnnnnnnnnnnnnnnnnnnnnnnnnnnnnnnnnnnnnnnnnnnnnnnnnnnnnnnnnnnnnnnnnnnnnnnnnnnnnnnnnnnnnnnnnnnngatcatagaactcaatggtggacaaccgcctctgacttacaaaagattccagactctcatcagcaaaatggaaccactggagataccagtagaaacaattacttcagaagtcatagaaaagtgcacaactcctctgtctgatgaccatgatgagaaatatggagtcccttcactggaagagctaggtntaggtttcgatacagatggcttatcctctgcagtgtggccaggcggagaaactgaagcacttacacgtttggaaaggcatttggaaagaaaagngcttgggtggcaaattttgaaagacctcgaatgaatgcaaattctctgcttgcaagccctactggacttagtccttatctccgatttggttgtttgtcatgtcgactgttttacttcaaactaacagatctctacaaaaaggtanaggtaaagaagaacagttcccctcccctttccctttatgggcaactattatggcgtgaatttttctatacagcagcaacaaataatccacgcttnnnnnnnnnnnnnnnnnnnnnnnnnnnnnnnnnnnnnnnnnnnnnnnnnnnnnnnnnnnnnnnnnnnnnnnnnnnnnnnnnnnnnnnnnnnnnnnnnnnnnnnnnnnnnnnnnnnnnnnnnnnnnnnnnnnnnnnnnnnnnnnnnnnnnnnnnnnnnnnnnnnnnnnnnnnnnnnnnnnnnnnnnnnnnnnnnnnnnnnnnnnnnnnnnnnnnnnnnnnnnnnnnnnnnnnnnnnnnnnnnnnnnnnnnnnnnnnnnnnnnnnnnnnnnnnnnnnnnnnnnnnnnnnnnnnnnnnnnnnnnnnnnnnnnnnnnnnnnnnnnnnnnnnnnnnnnnnnnnnnnnnnnnnnnnnnnnnnnnnnnnnnnnnnnnnnnnnnnnnnnnnnnnnnnnnnnnnnnnnnnnnnnnnnnnnnnnnnnnnnnnnnnnnnnnnnnnnnnnnnnnnnnnnnnnnnnnnnnnnnnnnnnnnnnnnnnnnnnnnnnnnnnnnnnnnnnnnnnnnnnnnnnnnnnnnnnnnnnnnnnnnnnnnnnnnnnnnnnnnnnnnnnnnnnnnnnnnnnnnnnnnnnnnnnnnnnnnnnnnnnnnnnnnnnnnnnnnnnnnnnnnnnnnnnnnnnnnnnnnnnnnnnnnnnnnnnnnnnnnnnnnnnnnnnnnnnnnnnnnnnnnnnnnnnnnnnnnnnnnnnnnnnnnnnnnnnnnnnnnnnnnnnnnnnnnnnnnnnnnnnnnnnnnnnnnnnnnnnnnnnnnnnnnnnnnnnnnnnnnnnnnnnnnnnnnnnnnnnnnnnnnnnnnnnnnnnnnnnnnnnnnnnnnnnnnnnnnnnnnnnnnnnnnnnnnnnnnnnnnnnnnnnnnnnnnnnnnnnnnnnnnnnnnnnnnnnnnnnnnnnnnnnnnnnnnnnnnnnnnnnnnnnnnnnnnnnnnnnnnnnnnnnnnnnnnnnnnnnnnnnnnnnnnnnnnnnnnnnnnnnnnnnnnnnnnnnnnnnnnnnnnnnnnnnnactttttaatgaatttcacagaggacaaaatgtaaatttgtatataaagaactggcaaagagaatttgcttaatgtaaatataaatagtcacaattagtatagacccatcaatatatttttgataatttttcatgtatggtaaaagttaaaatgacaaattgatattctgatataaaactcaaagttttgagagtcagtgggaaaaaaggaggtttttagactttcttaaaagactttgttaaaattttaggacagaattttcttgacgttgtttgatctaactttgcactctttgataataatgttttagataatgtgcataatctaaattggtattgtagcctctgttaacacagacagtatatgttttaaactttgatgtaaacctttttagacccaaacttgtggaagtatcatgtgttaagttctctttgtctctgtttctttgttcatttattactaaaatgacctggttattaaagtatatgcaaatatgaaa

SEQ ID NO: 32770 - DNA, 3393 bp, Macaca Mulatta
  misc_feature (1)...(3393): n = A,T,C or G
ggtactggaaattttcctgaaatgtcttttaatatctcttgagtgcagatgactcactcataaaatctacatttattatgagttcctattagccattaccactgatttctgaattctgaatttcttttattataattagaatcctcagtgttgttaatcatgcagcctttgaaaacttttttctataatctttccaaaaatatgaattctgttctctttgaatgaaatagcgtgctattcaaacaatcttaatgcaaaatggggattaattgaaatcagtttttcaaaattatacatgctattttggtgtgaagggtgcaaattacatcctcttatcttttaatgtatctttgttcttaggtatgttttaaagaagctgttttttcattactcccccgcatgaggtatgggctgttctataatactcctctgngatatctggctgtcaaaatactggactattcagggcattttcccagcatgtgctacacagactaaacatcacacaagaaggacccaaggnnnnnnnnnnnnnnnnnnnnnnnnnnnnnnnnnnnnnnnnnnnnnnnnnnnnnnnnnnnnnnnnnnnnnnnnnnnnnnnnnnnnnnnnnnnnnnnnnnnnnnnnnnnnnnnnnnnnnnnnnnnnnnnnnnnnnnnnnnnnnnnnnnnnnnnnnnnnnnnnnnnnnnnnnnnnnnnnnnnnnnnnnnnnnnnnnnnnnnnnnnnnnnnnnnnnnnnnnnnnnnnnnnnnnnnnnnnnnnnnnnnnnnnnnnnnnnnnnnnnnnnnnnnnnnnnnnnnnnnnnnnnnnnnnnnnnnnnnnnnnnnnnnnnnnnnnnnnnnnnnnnnnnnnnnnnnnnnnnnnnnnnnnnnnnnnnnnnnnnnnnnnnnnnnnnnnnnnnnnnnnnnnnnnnnnnnnnnnnnnnnnnnnnnnnnnnnnnnnnnnnnnnnnnnnnnnnnnnnnnnnnnnnnnnnnnnnnnnnnnnnnnnnnnnnnnnnnnnnnnnnnnnnnnnnnnnnnnnnnnnnnnnnnnnnnnnnnnnnnnnnnnnnnnnnnnnnnnnnnnnnnnnnnnnnnnnnnnnnnnnnnnnnnnnnnnnnnnnnnnnnnnnnnnnnnnnnnnnnnnnnnnnnnnnnnnnnnnnnnnnnnnnnnnnnnnnnnnnnnnnnnnnnnnnnnnnnnnnnnnnnnnnnnnnnnnnnnnnnnnnnnnnnnnnnnnnnnnnnnnnnnnnnnnnnnnnnnnnnnnnnnnnnnnnnnnnnnnnnnnnnnnnnnnnnnnnnnnnnnnnnnnnnnnnnnnnnnnnnnnnnnnnnnnnnnnnnnnnnnnnnnnnnnnnnnnnnnnnnnnnnnnnnnnnnnnnnnnnnnnnnnnnnnnnnnnnnnnnnnnnnnnnnnnnnnnnnnnnnnnnnnnnnnnnnnnnnnnnnnnnnnnnnnnnnnnnnnnnnnnnnnnnnnnnnnnnnnnnnnnnnnnnnnnnnnnnnnnnnnnnnnnnnnnnnnnnnnnnnnnnnnnnnnnnnnnnnnnnnnnnnnnnnnnnnnnnnnnnnnnnnnnnnnnnnnnnnnnnnnnnnnnnnnnnnnnnnnnnnnnnnnnnnnnnnnnnnnnnnnnnnnnnnnnnnnnnnnnnnnnnnnnnnnnnnnnnnnnnnnnnnnnnnnnnnnnnnnnnnnnnnnnnnnnnnnnnnnnnnnnnnnnnnnnnnnnnnnnnnnnnnnnnnnnnnnnnnnnnnnnnnnnnnnnnnnnnnnnnnnnnnnnnnnnnnnnnnnnnnnnnnnnnnnnnnnnnnnnnnnnnnnnnnnnnnnnnnnnnnnnnnnnnnnnnnnnnnnnnnnnnnnnnnnnnnnnnnnnnnnnnnnnnnnnnnnnnnnnnnnnnnnnnnnnnnnnnnnnnnnnnnnnnnnnnnnnnnnnnnnnnnnnnnnnnnnnnnnnnnnnnnnnnnnnnnnnnnnnnnnnnnnnnnnnnnnnnnnnnnnnnnnnnnnnnnnnnnnnnnnnnnnnnnnnnnnnnnnnnnnnnnnnnnnnnnnnnnnnnnnnnnnnnnnnnnnnnnnnnnnnnnnnnnnnnnnnnnnnnnnnnnnnnnnnnnnnnnnnnnncctgaataaatcatgccactatattatatttatatttacatgtttcatattcaaatcatgttttcctaaaatgtagcaactatatgtggtaaaagaaaattagaatattctgtaggactgttttgcataccttctatctggtttccactgattcctccttagccatggagtgcatttgtgattaatttgtatatgaaatagtggtttccatttatgtgagtatttgtaactgcatataccagtgtgtgtgcatctacctctgtcagcatcaaagtattctagtctttaatttcaaaaacttcaaattagcctcatgaggataatttttctctataaaaaagtaagaccaagaaaaaacaaactacagatgtgtgacattcaatcaaagtgaaaagccacaagaaagtgtcgttgattaaaaagaatatctggagtgtagccctactctttgaatgggattcatttcttactgcttatgaactttcaatttagtagtcagaaaccgtggatttattttactgtacaatgtgaagtttacattttattaacacttgagtagtctaatttagagactagttctattttttanaatagtggggtagcaaattacagaatagctaaataattttttaaaaacattttacagttgtaaaaaatatgcatcagaaaaatgacacacaaaacaaaatatctggacctttacagaagatgtttgctgacccccannnnnnnnnnnnnnnnnnnnnnnnnnnnnnnnnnnnnnnnnnnnnnnnnnnnnnnnnnnnnnnnnnnnnnnnnnnnnnnnnnnnnnnnnnnnnnnnnnnnnnnnnnnnnnnnnnnnnnnnnnnnnnnnnnnnnnnnnnnnnnnnnnnnnnnnnnnnnnnnnnnnnnnnnnnnnnnnnnnnnnnnnnnnnnnnnnnnnnnnnnnnnnnnnnnnnnnnnnnnnnnnnnnnnnnnnnnnnnnnnnnnnnnnnnnnnnnnnnnnnnnnnnnnnnnnnnnnnnnnnnnnnnnnnnnnnnnnnnnnnnnnnnnnnnnnnnnnnnnnnnnnnnnnnnnnnnnnnnnnnnnnnnnnnnnnnnnnnnnnnnnnnnnnnnnnnnnnnnnnnnnnnnnnnnnnnnnnnnnnngagaatacattttatctaacaggaaaatacatttgacactttatggaattaactttcatgagactttgtgggaacagaagttcttcaccttataaaatgtaaagattgctctttttattaagtctttaacagggatgcatttcattgtatgttttgggtatggctttggaataaatcgttttatat

SEQ ID NO: 32771 - DNA, 454 bp, Macaca Mulatta
agagcaacggcaaaggcaaggactgcgtcttcacagagattgtgctggagaataactacacagcgctgcagaatgccaagtacgagggatggtacatggccttcactcgcaagggccggccccgcaagggctccaagacgcggcagcaccagcgcgaggtccacttcatgaagcggctgccccggggccaccacaccaccgagcagagcctgcgcttcgagttcctcaactacccgcccttcacgcgcagcctgcgcggcagccagaggacttgggcccctgagccccgataggtgctacctggccctccccacaatgccagaccacagacaggctcatcctgtagggcgcccaaaactcaagcaagatgacctctgtgctgctgcaggctggggaggtgctgggggagccctgggttccagttgttgatactgtttgctgttgggtttttgct

SEQ ID NO: 32772 - DNA, 447 bp, Macaca Mulatta
agtcccaaagaaactaagtctcattcatcaggttaagaaaatgtctctaatttaatattccatgcattattacattttagtctcttggcagtagaaatggtagtacatccctgaaactgagcacattttttaccatttccagaaagctgcaaagatcttcccttacgtcagaaccacaagcattgtcattaattgcaggttattcttaacttgtttctattgttcattgttttaagcagcaaataaagctacatccttccctccctttagttctttttgtgtttctcgtgcttagagatgacttatgggaaaggcatgagatgtgtctgcatcagagtgtccaggggtgaggtttacctctctactgacattatcaatgtgggaaaattacttaccttttctgacattttgcttcaaaatctaaaaggggataggggtgataataat

SEQ ID NO: 32773 - DNA, 170 bp, Macaca Mulatta
  misc_feature (1)...(170): n = A,T,C or G
agggaagatggatcctatcttactaaccatcagccttttgagttttttctctgtggctctgttggtcatcttggcctgtgtgttatggnnnnnnnnnattaagcctattgtatggcccagtctccctgatcataagaagactctggaacatctttgtaagaaaccaagaa

SEQ ID NO: 32774 - DNA, 312 bp, Macaca Mulatta
ctgggcctcctcacccccagctttgctacccaaagcaccttagttggcattacagctggagaagaccctcctcgcacccccaagctgttttcttcgattccatggctaactggggagggagtgattagagagaggagaatgagcctcggcctcttccttgacgtcactggaccactgggcagagatggcaattttgcaacgaagacacagactgcgatgtgtcccaggtcctcatcactgggcgcaggagggggagcgttattggtcgagagccttttgggcagaccttgacctcgtgggctagggatgacc

SEQ ID NO: 32775 - DNA, 473 bp, Macaca Mulatta
  misc_feature (1)...(473): n = A,T,C or G
aggggcatcccctagagcttagaccggctgcttatcgtctccaccaccccctacagcgagaaagacacgaagcagatcctccggggtcggtgcgaggaggaagatgtggagatgagtgaggacgcctacacggtgctgacccgcatcgggctggagacgtcactgcgctacgccatccagctcatcacggctgcaagcctggtgtgccggaaacgcaagggtacagaagtgcaggtggatgacatcaagcgggtctactcactcttcctggacgagtcccgctccacgcagtacatgaaggagtaccaggacgccttcctcttcaatgaactcaaaggtgagaccatggacacctcctgagctggatgtcatcccctgatcccaccctgtttactaccagagttctgacactgtgactttgtataaaatggtttgaagcnnnnnnnnnnnnnnnnnnnnnnnnnnnnnnnnnn

SEQ ID NO: 32776 - DNA, 328 bp, Macaca Mulatta
tgtctcacagaggcggcactgtggaggtgcccgggttcccccagactgtagagaaggtggtgggagtgcagatgttctggccgaaagccctgtgtggggacagctggagatagtggggaccgagctgcaagcaggaccaaggtgctcgcaggagcctggcagccgcctgcaagggtcttggtcaggggacagctggggcctccctggagtctgagtgcaaacagaactcagctctgcccagggcctctccatacagcctcccaggcccctcaggcatgtgtcgagtgacagtgtcaccagtaagaggcgttcttacctttggaggtga

SEQ ID NO: 32777 - DNA, 733 bp, Macaca Mulatta
  misc_feature (1)...(733): n = A,T,C or G
gcagagctctgcagggagaagttgtggcttcattctttccgccatcttgattctttnnnnnnnnnnnnnnnnnnnnnnnnnnnnnnnnnnnnnnnnnnnnnnnnnnnnnnnnnnnnnnnnnnnnnnnnnnnnnnnnnnnnnnnnnnnnnnnnnnnnnnnnnnnnnnnnnnnnnnnnnncacggtccgttgctttgagggaaaagggccttgtggtccggcttctcccaggtcgcgatgcaggcgccatgggccagtaatcgtggctgggctggaacgagggaggaagnnnnnnnnnnnnnnnnnnnnnnnnnnnnnnnnnnnnnnnnnnnnnnnnnnnnnnnnnnnnnnnnnnnnnnnnnnnnnnnnnnnnnnnnnnnnnnnnnnnnnnnnnnnnnnnnnnnnnnnnnnnnnnnnnnnnnnnnnnnnnnnnnnnnnnnnnnnnnnnnnnnnnnnnnnnnnnnnnnnnnnnnnnnnnnnnnnnnnnnnnnnnnnnnnnnnnnnnnnnnnnnnnnnnnnnnnnnnnnnnnnnnnnnnnnnnnnnnnnnnnnnnnnnnnnnnnnnnnnnnnnnnnnnnnnnnnnnnnnnnnnnnnnnnnnnnnnnnnnnnnnaggtgaagggcaactataggtttaaaccaagacaaatgaagactgaaaccaagaatattgttcttatgctggaaatttgactgctaaacattctcttaataaagttttacagttttctgcaaag

SEQ ID NO: 32778 - DNA, 548 bp, Macaca Mulatta
  misc_feature (1)...(548): n = A,T,C or G
gcaccccaggaccccaaggagagaagggcagcaaaggcgatgggggtctcattggcccaaaaggggaaactggaactaagggagataaaggagacctgggcctcccaggnnnnnnnnnnnnnnnnnnnnnnnnnnnnnnnnnnnnnnnnnnnnnnnnnnnnnnnnnnnnnnnnnnnnnnnnnnnnnnnnnnnnnnnnnnnnnnnnggtttggctggttttcctggagctaaaggagatcnnnnnnnnnnnnnnnnnnnnnnnnnnnnnnnnnnnnnnnnnnnnnnnnnnnnnnnnnnnnnnnnnnnnnnnnnnnnnnnnnnnnnnnnnnnnnnnnnnnnnnnnnnnnnnnnnnnnnnnnnnnnnnnnnnnnnnnnnnnnnnnnnnnnnnnnnnnnnnnnnnnnnnnnnnnnnnnnnnnnnnnnnnnnnnnnnnnnnnnnnnnnttccaggccctgcaggtgtgaagggagaacaggggagcccggggctggcaggctccaagggagcccctggacgagctggccagaagggagaccagggagtaaaag

SEQ ID NO: 32779 - DNA, 651 bp, Macaca Mulatta
  misc_feature (1)...(651): n = A,T,C or G
ggggtagcacttccgggtcggccacccagttctgcggtttctgcggcggctggagaggtggtcggggaagtaggaacctcctgccaggctcgtggcggcttctttccgctccgcggcgggaagcgccttccccacaggacatcaatgcaagcttgaataagaaaagcaaattcttcctcctaagccatggcatatcagttatacagaaataccactttgggaaacagtcttcaggagagcctagatgagctcatacagtctcaacagatcaccccccaacttgcccttcaagttctacttcagtttgataaggctataaattcagcattggctcagagggtcaggaacagagtcaatttcaggggctctctaaatacgtacagattctgcgataatgtgtggacttttgtattgaatgatgttgaattcagagaggtgacagaacttattaaagtggataagttgaaattgtacctgtgatggtaaaatactggctcaatctacagaagaataaaaaatatggcttttatgccacctcgttaccatgcttgagagaactnnnnnnnnnnnnnnnnnnaaatgcaaatgctactgggcttcaaaatccataaattaatcggaccctatccttttaagaggaaaaatttttaa

SEQ ID NO: 32780 - DNA, 625 bp, Macaca Mulatta
  misc_feature (1)...(625): n = A,T,C or G
ttttgtttggttctatgtaacaaataggttaatcactcgaaatggaattatattgggtattcatcgaataannnnnnnnnnnnnnnnnnnntaagcttccaaaatcaagctgttacaccagtccctaagtctcatcatttaaagtggcggccaggttcggatttttaaaaataaacttaggagattggaaggaattgactcagaggatcctggttccaaaagaacatacatagaattacttgtaaatcataacctctgctgtcctcccttactggcagggcgcggggcatggaaattttggttgcgtttcagcttatcttcttataggtgtgatactattataccttcactgagagaaagaaattatcatccagctctacagcttttcattcagcttaaattctgtatcctggggaagcaatcttgagtttcaaagcaaaccaagttatatatggccctcctctaggtaattggnnnnnnnnnnnnnnnnnnnnnnnnnnnnnnttcactcttgttgcccaggctgcagtgcaatggcgcannnnnnnnnnnnnnnnnnnnnnnnnnnntgagttcgattnnnnnnnnnnnnnnnnnnnnnnnnnnnnnnnnnnnnnnnnnnatg

SEQ ID NO: 32781 - DNA, 453 bp, Macaca Mulatta
gtggtacctccagaaatttgaagagtatccaaagttcagaaaaattctaattccatttttgttttaagtgcattttcaacgaaattatcttcaagttgaagctttccaatggtgtttctctagggactttgtaaataagttatatctttgtaattttcctgctacttcatcattttcaagatgtcctctagaaatattttttctagtaattttgcaagctacctaataagtacttaaataaactgaaatggaggttgaagtatcctactgtgtaacagatcagaatttcaaactccaggtaataactgctgacatttgttctaatttcgaatttacctcttttggctatgtcttgccaagtgtgtctaagactagagtttacaactgttctttgatggcatttttcagaaacataaatgtcacaattcccttctatagccccctacagtgatc

SEQ ID NO: 32782 - DNA, 7250 bp, Macaca Mulatta
  misc_feature (1)...(7250): n = A,T,C or G
tcacccagtgtgattttgaggatgacgccaaacccctctgtgactggtcccaagtgtccgcagatgatggagactgggttcgagccagcgggccctctcccaccggcaccaccgggcctcccggggggtacccnnnnnnnnnnnnnnnnnnnnnnnnnnnnnnnnnnnnnnnnnnnnnnnnnnnnnnnnnnnnnnnnnnnnnnnnnnnnnnnnnnnnnnnnnnnnnnnnnnnnnnnnnnnnnnnnnnnnnnnnnnnnnnnnnnnnnnnnnnnnnnnnnnnnnnnnnnnnnnnnnnnnnnnnnnnnnnnnnnnnnnnnnnnnnnnnnnnnnnnnnnnnnnnnnnnnnnnnnnnnnnnnnnnnnnnnnnnnnnnnnnnnnnnnnnnnnnnnnnnnnnnnnnnnnnnnnnnnnnnnnnnnnnnnnnnnnnnnnnnnnnnnnnnnnnnnnnnnnnnnnnnnnnnnnnnnnnnnnnnnnnnnnnnnnnnnnnnnnnnnnnnnnnnnnnnnnnnnnnnnnnnnnnnnnnnnnnnnnnnnnnnnnnnnnnnnnnnnnnnnnnnnnnnnnnnnnnnnnnnnnnnnnnnnnnnnnnnnnnnnnnnnnnnnnnnnnnnnnnnnnnnnnnnnnnnnnnnnnnnnnnnnnnnnnnnnnnnnnnnnnnnnnnnnctacatgctcctggaccccaagaatgcaagacccgggcaaaaagccgtccttctgagtcccgtgagcccgtcctccggctgtctgagcttttccttccactacgtcctccggggccagtctcctggtgcagccctccacgtttatgcttccgtcttggnnnnnnnnnnnnnnnnnnnnnnnnnnnnnnnnnnnnnnnnnnnnnnnnnnnnnnnnnnnnnnnnnnnnnnnnnnnnnnnnnnnnnnnnnnnnnnnnnnnnnnnnnnnnnnnnnnnnnnnnnnnnnnnnnnnnnnnnnnnnnnnnnnnnnnnnnnnnnnnnnnnnnnnnngagggctttcctcagtgtgactttgaagacaacgcccatcccttctgtgactgggtccagacttccggggatggtggacactgggctgtcggacataaaaatggacccgtccacggcatgggtcccgtgggaggtttccctaatgcagnnncagggagtcactatatctaccttgaggctgacaagttctcccaggcagggcagtcggccagactggtgagccggcccttctgcgccccgggtgacatctgcgtggagttcgcgtaccacatgtatggccttggggagggtactatgctcgaactcctcctgggaagtcctgcggggagccctctgattcctctctggaaacgcctggggtctcagcgcccttactggcagaacgcctccgtcaccatcccctcaggacaccaacagcccatgcannnnnnnnnnnnnnnnnnnnnnnnnnnnnnnnnnnnnnnnnnnnnnnnnnnnnnnnnnnnnnnnnnnnnnnnnnnnnnnnnnnnnnnnnnnnnnnnnnnnnnnnnnnnnnnnnnnnnnnnnnnnnnnnnnnnnnnnnnnnnnnnnnnnnnnnnnnnnnnnnnnnnnnnnnnnnnnnnnnnnnnnnnnnnnnnnnnnnnnnnnnnnnnnnnnnnnnnnnnnnnnnnnnnnnnnnnnnnnnnnnnnnnnnnnnnnnnnnnnnnnnnnnnnnnnnnnnnnnnnnnnnnnnnnnnnnnnnnnnnnnnnnnnnnnnnnnnnnnnnnnnnnnnnnnnnnnnnnnnnnnnnnnnnnnnnnnnnnnnnnnnnnnnnnnnnnnnnnnnnnnnnnnnnnnnnnnnnnnnnnnnnnnnnnnnnnnnnnnnnnnnnnnnnnnnnnnnnnnnnnnnnnnnnnnnnnnnnnnnnnnnnnnnnnnnnnnnnnnnnnnnnnnnnnnnnnnnnnnnnnnnnnnnnnnnnnnnnnnnnnnnnnnnnnnnnnnnnnnnnnnnnnnnnnnnnnnnnnnnnnnnnnnnnnnnnnnnnnnnnnnnnnnnnnnnnnnnnnnnnnnnnnnnnnnnnnnnnnnnnnnnnnnnnnnnnnnnnnnnnnnnnnnnnnnnnnnnnnnnnnnnnnnnnnnnnnnnnnnnnnnnnnnnnnnnnnnnnnnnnnnnnnnnnnnnnnnnnnnnnnnnnnnnnnnnnnnnnnnnnnnnnnnnnnnnnnnnnnnnnnnnnnnnnnnnnnnnnnnnnnnnnnnnnnnnnnnnnnnnnnnnnnnnnnnnnnnnnnnnnnnnnnnnnnnnnnnnnnnnnnnnnnnnnnnnnnnnnnnnnnnnnnnnnnnnnnnnnnnnnnnnnnnnnnnnnnnnnnnnnnnnnnnnnnnnnnnnnnnnnnnnnnnnnnnnnnnnnnnnnnnnnnnnnnnnnnnnnnnnnnnnnnnnnnnnnnnnnnnnnnnnnnnnnnnnnnnnnnnnnnnnnnnnnnnnnnnnnnnnnnnnnnnnnnnnnnnnnnnnnnnnnnnnnnnnnnnnnnnnnnnnnnnnnnnnnnnnnnnnnnnnnnnnnnnnnnnnnnnnnnnnnnnnnnnnnnnnnnnnnnnnnnnnnnnnnnnnnnnnnnnnnnnnnnnnnnnnnnnnnnnnnnnnnnnnnnnnnnnnnnnnnnnnnnnnnnnnnnnnnnnnnnnnnnnaaaaacccaccatctccacagaaaaacccttcatccccacagaaaaacccaccatccccattgaagagactatcatctccacagaaaaacccaccatccccatnnnnnnnnnnnnnnnnnnnnnnnnnnnnnnnnnnnnnnnnnnnnnnnnnnnnnnnnnnnnnnnnnnnnnnnnnnnnnnnnnnnnnnnnnnnnnnnnnnnnnnnnnnnnnnnnnnnnnnnnnnnnnnnnnnnnnnnnnnnnnnnnnnnnnnnnnnnnnnnnnnnnnnnnnnnnnnnnnnnnnnnnnnnnnnnnnnnnnnnnnnnnnnnnnnnnnnnnnnnnnnnnnnnnnnnnnnnnnnnnnnnnnnnnnnnnnnnnnnnnnnnnnnnnnnnnnnnnnnnnnnnnnnnnngagcgctgccccccaaatgcacactacgaatcctgtgcttgtcctgcttcgtgcaagagtcccaggcctagctgtgggccactctgtcgggggggctgtgtctgcaaccttggctttttgtttagtgacaaccactgcatccaggcctcttcctgcaattgcttctacaacaacaactactatgagnnnnnnnnnnnnnnnnnnnnnnnnnnnnnnnnnnnnnnnnnnnnnnnnnnnnnnnnnnnnnnnnnnnnnnnnnnnnnnnnnnnnnnnnnnnnnnnnnnnnnnnnnnnnnnnnnnnnnnnnnnnnnnnnnnnnnnnnnnnnnnnnnnnnnnnnnnnnnnnnnnnnnnnnnnnnnnnnnnnnnnnnnnnnnnnnnnnnnnnnnnnnnnnnnnnnnnnnnnnnnnnnnnnnnnnnnnnnnnnnnnnnnnnnnnnnnnnnnnncagacccattcttcagggtgacagccaagaatgaggagcagggacaggaaggtgtgtcctgcctaagcaaagtctacgtgacccttccggagaccaccgtcaccctgcttaagggcagacgtactctggnnnnnnnnnnnnnnnnnnnnnnnnnnnnnnnnnnnnnnnnnnnnnnnnnnnnnnnnnnnnnnnnnnnnnnnnnnnnnnnnnnnnnnnnnnnnnnnnnnnnnnnnnnnnnnnnnnnnnnnnnnnnnnnnnnnnnnnnnnnnccagcacctactctggcaaactctgtggtttgtgtggaaactatgacggcaacagtgacaatgaccatctgaagtcggacggcagtccagcaggagacaaggaggagctggggaacagctggcagacggaccaggacgaggaccaggagtnnnnnnnnnnnnnnnnnnnnnnnnnnnnnnnnnnnnnnnnnnnnnnnnnnnnnnnnnnnnnnnnnnnnnnnnnnnnnnnnnnnnnnnnnnnnnnnnnnnnnnnnnnnnnnnnnnnnnnnnnnnnnnnnnnnnnnnnnnnnnnnnnnnnnnnnnnnnnnnnnnnnnnnnnnnnnnnnnnnnnnnnnnnnnnnnnnnnnnnnnnnnnnnnnnnnnnnnnnnnnnnnnnnnnnnnnnnnnnnnnnnnnnnnnnnnnnnnnnnnnnnnnnnnnnnnnnnnnnnnnnnnnnnnnnnnnnnnnnnnnnnnnnnnnnnnnnnnnnnnnnnnnnnnnnnnnnnnnnnnnnnnnnnnnnnnnnnnnnnnnnnnnnnnnnnnnnnnnnnnnnnnnnnnnnnnnnnnnnnnnnnnnnnnnnnnnnnnnnnnnnnnnnnnnnnnnnnnnnnnnnnnnnnnnnnnnnnnnnnnnnnnnnnnnnnnnnnnnnnnnnnnnnnnnnnnnnnnnnnnnnnnnnnnnnnnnnnnnnnnnnnnnnnnnnnnnnnnnnnnnnnnnnnnnnnnnnnnnnnnnnnnnnnnnnnnnnnnnnnnnnnnnnnnnnnnnnnnnnnnnnnnnnnnnnnnnnnnnnnnnnnnnnnnnnnnnnnnnnnnnnnnnnnnnnnnnnnnnnnnnnnnnnnnnnnnnnnnnnnnnnnnnnnnnnnnnnnnnnnnnnnnnnnnnnnnnnnnnnnnnnnnnnnnnnnnnnnnnnnnnnnnnnnnnnnnnnnnnnnnnnnnnnnnnnnnnnnnnnnnnnnnnnnnnnnnnnnnnnnnnnnnnnnnnnnnnnnnnnnnnnnnnnnnnnnnnnnnnnnnnnnnnnnnnnnnnnnnnnnnnnnnnnnnnnnnnnnnnnnnnnnnnnnnnnnnnnnnnnnnnnnnnnnnnnnnnnnnnnnnnnnnnnnnnnnnnnnnnnnnnnnnnnnnnnnnnnnnnnnnnnnnnnnnnnnnnnnnnnnnnnnnnnnnnnnnnnnnnnnnnnnnnnnnnnnnnnnnnnnnnnnnnnnnnnnnnnnnnnnnnnnnnnnnnnnnnnnnnnnnnnnnnnnnnnnnnnnnnnnnnnnnnnnnnnnnnnnnnnnnnnnnnnnnnnnnnnnnnnnnnnnnnnnnnnnnnnnnnnnnnnnnnnnnnnnnnnnnnnnnnnnnnnnnnnnnnnnnnnnnnnnnnnnnnnnnnnnnnnnnnnnnnnnnnnnnnnnnnnnnnnnnnnnnnnnnnnnnnnnnnnnnnnnnnnnnnnnnnnnnnnnnnnnnnnnnnnnnnnnnnnnnnnnnnnnnnnnnnnnnnnnnnnnnnnnnnnnnnnnnnnnnnnnnnnnnnnnnnnnnnnnnnnnnnnnnnnnnnnnnnnnnnnnnnnnnnnnnnnnnnnnnnnnnnnnnnnnnnnnnnnnnnnnnnnnnnnnnnnnnnnnnnnnnnnnnnnnnnnnnnnnnnnnnnnnnnnnnnnnnnnnnnnnnnnnnnnnnnnnnnnnnnnnnnnnnnnnnnnnnnnnnnnnnnnnnnnnnnnnnnnnnnnnnnnnnnnnnnnnnnnnnnnnnnnnnnnnnnnnnnnnnnnnnnnnnnnnnnnnnnnnnnnnnnnnnnnnnnnnnnnnnnnnnnnnnnnnnnnnnnnnnnnnnnnnnnnnnnnnnnnnnggtcggggagcgctggtacacagaggacacctgcaccaggctctgcacctgctccatccacaacaacatcacctgcttccaaagcacctgtaaacccaaccagatgtgctgggccctggatgggctactccgttgtcgggcctcaggnnnncaggtatgggagtgggtcagctcccaggggagtcccaatacgtggagctttgatggtagcaaccattccatccggggcactggcactcacgtcctggtgaaagtatgccaccccgccatggccttgccgttcttcaagatcagtgccaagcatgagaaggaggaaggtggaactaaggctttccgccttcacgaggtctacattaacatctacgacgcccaggtcaccctgcagaagggccaccgtgtgcnatcaacagcaaaaaggtcaccctccccgcaatctcccagatccccggggtcagcgtcaagtccagcagcatctacaccattgttaacatcaagatcggggtgcaagtcaagtttgacgggaatcatctcttagagattgaactccccacaacctactatggaaaggnnnnnnnnnnnnnnnnnnnnnnnnnnnnnnnnnnnnnnnnnnnnnnnnnnnnnnnnnnnnnnnnnnnnnnnnnnnnnnnnnnnnnnnnnnnnnnnnnnnnnnnnnnnnnnnnnnnnnnnnnnnnnnnnnnnnnnnnnnnnnnnnnnnnnnnnnnnnnnnnnnnnnnnnnnnnnnnnnnnnnnnnnnnnnnnnnnnnnnnnnnnnnnnnnnnnnnnnnnnnnnnnnnnnnnnnnnnnnnnnnnnnnnnnnnnnnnnnnnnnnnnnnnnnnnnnnnnnnnnnnnnnnnnnnnnnnnnnnnnnnnnnnnnnnnnnnnnnnnnnnnnnnnnnnnnnnnnnnnnnnnnnnnnnnnnnnnnnnnnnnnnnnnnnnnnnnnnnnnnnnnnnnnnnnnnnnnnnnnnnnnnnnnnnnnnnnnnnnnnnnnnnnnnnnnnnnnnnnnnnnnnnnnnnnnnnnnnnnnnnnnnnnnnnnnnnnnnnnnnnnnnnnnnnnnnnnnnnnnnnnnnnnnnnnnnnnnnnnnnnnnnnnnnnnnnnnnnnnnnnnnnnnnnnnnnnnnnnnnnnnnnnnnnnnnnnnnnnnnnnnnnnnnnnnnnnnnnnnnnnnnnnnnnnnnnnnnnnnnnnnnnnnnnnnnnnnnnnnnnnnnnnnnnnnnnnnnnnnnnnnnnnnnnnnnnnnnnnnnnnnnnnnnnnnnnnnnnnnnnnnnnnnnnnnnnnnnnnnnnnnnnnnnnnnnnnnnnnnnnnnnnnnnnnnnnnnnnnnnnnnnnnnnnnnnnnnnnnnnnnnnnnnnnnnnnnnnnnnnnnnnnnnnnnnnnnnnnnnnnnnnnnnnnnnnnnnnnnnnnnnnnnnnnnnnnnnnnnnnnnnnnnnnnnnnnnnnnnnnnnnnnnnnnnnnnnnnnnnnnnnnnnnnnnnnnnnnnnnnnnnnnnnnnnnnnnnnnnnnnnnnnnnnnnnnnnnnnnnnnnnnnnnnnnnnnnnnnnnnnnnnnnnnnnnnnnnnnnnnnnnnnnnnnnnnnnnnnnnnnnnnnnnnnnnnnngtcaacaaccagaagatggccgtcccctacaggccgaatgagcacctgcgggtcaccctgcggggccaacggctctacctggtcaccgactttgagctggtcatcagtttcggtggaaggaaaaatg

SEQ ID NO: 32783 - DNA, 1419 bp, Macaca Mulatta
  misc_feature (1)...(1419): n = A,T,C or G
ttgttggtgactttcagggatgtggccattgacttctctcaggaggaatgggaatgcctggaccctgctcagagggacttgtacagggatgtgatgttggagaactacagcaacctgatctcattggngacttggaatctagtcgtgcaaccaaagagttatctccagaaaaggaaatttatgaaatggaatcactccagtgggagaatatggggaaacttatcaaccatcaccttcagtacaatggtcttggagacaatatggagtgcagaggcaacttagagggtcaagaagcaagtcaggaagggctttacatgtgtgtcaaaattacctgtgaagaaagggccactgaaagccattcaacctcttctacttttcatcggataattcctaccaaggaaaaattgtacaaatgtaaggaatgtagacaaggtttcagctacctgtcatgccttattcaacatgagaaaaatcataatatagaaaaatgctatgaagttaagaaacataggaacacctttagcaaaaagccaaactatatgcaacatcagagaattcagactggtgagaaaccttannnnnnnnnnnnnnnnnnnnnnnnnnnnnnnnnnnnnnnnnnnnnnnnnnctatgaatgtaaggaatgtgggaagacttttgttcgtgctacacaacttacatatcatcaaagaattcatacaggtgaaaagccctacaaatgtaaggaatgtgacaaggcctttatatatggctcacaactcagtgaacatcagagaattcatagaggtgaaaaaccttatgaatgtaaacaatgtgggaaggcttttattcgtggctcacaccttactgaacatctgagaactcatactggagagaaaccctatgaatgtaaggaatgtgggaagggctttagtcgtggctcagaacttactctgcatcaaaggatccatactggtgagaaaccctatnnnnnnnnnnnnnnnnnnnnnnnnnnnnnnntgagagacactatgaatgtaaggaatgtgggaagacttttgttcgtgctacacaacttacatatcatcaaagaattcatacaggtgaaaagccctacaaatgtaaggaatgtgacaaggcctttatatatggctcacaactcagtgaacatcagagaattcatagaggtgaaaaaccttatgaatgtaaacaatgtgggaaggcttttattcgtggctcacaccttactgaacatctgagaactcatactggagagaaaccctatgaatgtaaggaatgtgggaagggctttagtcgtggctcagaacttactctgcatcaaaggatccatactggtgagaaaccctatacatgtggccagtgtggtaaagagtttagacgtccttcacaacttactcaacatataaggcttcataattga

SEQ ID NO: 32784 - DNA, 703 bp, Macaca Mulatta
  misc_feature (1)...(703): n = A,T,C or G
cggagaggctcgggttaccgcagcaccagcaccagcaccagccnnnnnnnnnnnnnnnnnnnnnnnnnnnnnnnnnnnnnnccccgagcagcagcacgggcgccgagcgcgaggacgacgacgagagcctcagcgtcagcaagccgctggtgcccaacgccgcgctcctggggccaccgactcaggtgggcgccgcggccggcccagcgcccgccgccttctnnnnnnnnnnnnnnnnnnnnnnnnnnnnnnnnnnnnnnnnnnnnnnnnnnnnnnnnnnnnnnnnnnnnnnnnnnnnnnnnnnnnnnnnnnnnnnnnnnnnnnnnnnnnnnnnnnnnnnnnnnnnnnnnnnnnnnnnnnnnnnnnnnnnnnnnnnnnctcctgctgcccgtgttgctgctgctgcggctgcccagaccgctctggccgcaggggtaggcgccgcggctgcgcccccagtcccaggtgccgctggggctaccaggcgctgtccgtggtgctgctgctggctcagggtggcctgctggatctgtacctcatcgccgtcaccgacctgtactggtgctcctggatcgccactgacctggtggtggtggtgggctgggccatcttcttcgccaagaacagccggggccgtcggggcggagtggccagcagcgcgcacaaccaccacctgcaccaccaccacgccgcgccgcccctg

SEQ ID NO: 32785 - DNA, 724 bp, Macaca Mulatta
  misc_feature (1)...(724): n = A,T,C or G
tgaagctctgcattgtgtatacaccagtgggatggacaccctttcggcctaagcgtatgagtgaaaataatgacgtcaaaagacaatagcaagtatggactactatttagggcaaaaggaatcctgaaatgaaggaaacagaactacaaggctaactggagcataatcttacagttttgcactcaggggattaagtttgaaacatggtgtcttttggccaaattgaacctacttgtaatgtggactaacttactttacacattttggtcagtcccagtgtatggaattagcttagttttctcatgcttgattaaaacaagacaactaaagccaatcnnnnnnnnnnnnnnnnnnnnnnnnnnnnnnnnnnnnnnnnnnnnnnnnnnnnnnnnnnnnnnnnnnnnnnnnnnnnnnnnnnnnnnnnnnnnnnnnnnnnnnnnnnnnnnnnnnnnnnnnnnnnnnnnnnnnnnnnnnnnnnnnnnnnnnnnnnnnnnnnnnnnnnnnnnnnnnnnnnnnnnnnnnnnnnnnnnnnnnnnnnnnnnnnnnnnnnnnnnnnnnnnnnnnnnnnnnnnnnnnnnnnnnnnnnnnnnnnnnnnnnnnnnnnnnnnnnnnnnnnnnnnnnnnnnnnnnnnnnnnnnnnnnnnnnnnnnnnnnnnnnnnnnnnnnnnnnnnnnnnnnnnnnnnnnnnnnnnnnnnnnnnnnnnnnnnnnnnnnnnnnnnnnnn

SEQ ID NO: 32786 - DNA, 119 bp, Macaca Mulatta
ccaacaagcgtcccagcaatagcacgccgccccccacgcagctcagcaaaatcaagtactcaggggggccccagattgtcaagaaggagcgacggcaaagctcctcccgcttcaacctc

SEQ ID NO: 32787 - DNA, 1517 bp, Macaca Mulatta
  misc_feature (1)...(1517): n = A,T,C or G
gagatgtactgaatttcctgcgctcaggggacctcccacccagggagcgtgttcgagctgtgtacaaagaggcccagtactatgccatcgggcccctcctggagcagctggagaacatgcagccactgaagggcgagaaggtgcgccaagcgtttctgggactcatgccctattacaaannnnnnnnnnnnnnnnnnnnnnnnnnnnnnnnnnnnnnnnnnnnnnnnnnnnnnnnnnnnnnnnnnnnnnnnnnnnnnnnnnnnnnnnnnnnnnnnnnnnnnnnnnnnnnnnnnnnnnnnnnnnnnnnnnnnnnnnnnnnnnnnnnnnnnnnnnnnnnnnnnnnnnnnnnnnnnnnnnnnnnnnnnnnnnnnnnnnnnnnnnnnnnnnnnnnnnnnnnnnnnnnnnnnnnnnnnnnnnnnnnnnnnnnnnnnnnnnnnnnnnnnnnnnnnnnnnnnnnnnnnnnnnnnnnnnnnnnnnnnnnnnnnnnnnnnnnnnnnnnnnnnnnnnnnnnnnnnnnnnnnnnnnnnnnnnnnnnnnnnnnnnnnnnnnnnnnnnnnnnnnnnnnnnnnnnnnnnnnnnnnnnnnnnnnnnnnnnnnnnnnnnnnnnnnnnnnnnnnnnnnnnnnnnnnnnnnnnnnnnnnnnnnnnnnnnnnnnnnnnnnnnnnnnnnnnnnnntcctgaggcacagctcccaggggacagagatgtagccccactctccctgactgcacctcagggttgggctcagggcttgcagcctgcaggcactccggccagcgctcacctggcctttcctcaaggcatggtagtctttccttgaggctgatagctagggcttgagcaggaagtcccaagaagtttcgtcaccttcttgaccttgcaagagagtttctgcccattttagagccacattatcaaatcgatgaggcctaatcacttcctcgaccctgttcaagcgtccctcccttgtgcttagtgtattgtgtgaacacggaacatgatgggggatttacctgaccagccaccccgtagcccctggctgaagaagaaagagcatcttctgtcccactgcaccccttctcctccaagaatagttgcccactttcctaaaatgtggaaagacttctcttttccttccggaacatgttattcaccaccttttggagatttaaccatagctgccaaagctatgcacccagttggccttagaaaaccacaatgtttacagccctgtcttagggccacagcttctcctatcttccaccaccctccttgcttgcagggttgtcttctcacagggctggaatgcaaatttcagaggcttcttttgaagattccccaagtcaagcaggcaagatgcctagatcttctgttatgtttgacatgtaacatcctttttagaggctcagaacacctccttggctgctatctcatgtgttagaatccaatttgtggtgaacctctttggaaggggccccctctttaaaccttgttgctctgtcctggtaacattctcc

SEQ ID NO: 32788 - DNA, 659 bp, Macaca Mulatta
  misc_feature (1)...(659): n = A,T,C or G
gggagaactagcctctatttttccatatttcaaggatctaatttgaaacgagatacttgccagttcattatttgtgtatatagttaaacaccacgcccggcctcttgttgtattaagaaggattccataaagggagagtggcaaccctgctgctgctgtgcctgaccagagttcttgaggggccctgaccctaaccctccagctcagccctgtgcacctgaccctgtaaatgagtggggtttgctgactatagtccctgacaccagtaaaaccaaaaggagtcttgggggctcagtatgagagccagggttacacactctgccaagtaaggacaaactgctaggctgtatcccatatttcaggatgagaacgtttaaccataaattttgtggtacacttaacctccttaagnnnnnnnnnnnnnnnnnnnnnnnnnnnnnnnnnnncggcccgccccggcctccaagaacttttaaaaccattcttttggccccgcggccccataagggaaaggaaaatgggccaaacctttttcccagggaatcccggcccagaaaaagggttggattnnnnnnnnnnnnnnnnnnnnnnnnnnnnnnnnnnnnnnnnnnnnnnnncgaaggggttttgggggtctttcttgttttttaccaaggtcc

SEQ ID NO: 32789 - DNA, 875 bp, Macaca Mulatta
ggctttgtgaccggcgtggacacctcaggacagaggggccgctgctgaagggggacagggtctccatggagttccgggaaccaggccacccgcctgtcacctggccccacagggccccagaacactgagtcaggacgcctggcgccgcgtggtgaggatggagttcctccgcgaccagctgtccctcccgcacctaagcgaggggcttccccggctggggtctgatgacagtggaggggccagctgccaaccgtccccaaacccgtagccgggcctggcgctgagcgggctgcggagaggcctgtgggagccggcgcccaagcgtctcctccgtcctccccacaggcacctccaactggtcggaggattacttcagcagcacgacgggggtgggcctggtggtcacccagagccccggcgcgcagcccgcgggggccacggtacaggagcagctgcggcagctctttgagcgggactggagttcgcgctacgccgtcggcctggacggacaggctccgggccaggactgcgtttggcagggctgaggggggcccttttttctctcggcgaccccgccccgtccccgccctcccctctgacccggcctgggcttcagcagcttcctcctgtaagcagcccgggtcggcactgagccaggagccgcctgcgaccgcccgggcgccgcgcaccgcccgccagctctctgatttccgagtccagcccccctaagccccgcctcctccagggagccctccaggaggcccctaccctgactcctggcccacaggccaggcctaaaaaacactcgtggcttcccagtgcctctgtgtgagtccagcgctggcggcccttcatccttttgccaagggcccgcc

SEQ ID NO: 32790 - DNA, 155 bp, Macaca Mulatta
gccgccgcagccacctctgaggagacggccaggagcgagagccgacagcgagcctgcgagccacctccgccgccatggggagccgcgtgtcgcgggaagacttcgagtgggtctacaccgaccagccccacgccgaccggcgccgggagatcctg

SEQ ID NO: 32791 - DNA, 1594 bp, Macaca Mulatta
  misc_feature (1)...(1594): n = A,T,C or G
aggttctgagtgcaaaagtagttacaaatgctcgaagtcctggggcaaaatgctatggcattgtaactatgtcttcaagcacagaggtgtccaggtgtattgcacatcttcatcgcactgagctgcatggacagctgatttctgttgaaaaagtannnnnnnnnnnnnnnnnnnnnnnnnnnnnnnnnnnnnnnnnnnnnnnnnnnnnnnnnnnnnnnnnnnnnnnnnnnnnnnnnnnnnnnnnnnnnnnnnnnnnnnnnnnnnnnnnnnnnnnnnnnnnnnnnnnnnnnnnnnnnnnnnnnnnnnnnnnnnnnnnnnnnnnnnnnnnnnnnnnnnnnnnnnnnnnnnnnnnnnnnnnnnnnnnnnnnnnnnnnnnnnnnnnnnnnnnnnnnnnnnnnnnnnnnnnnnnnnnnnnnnnnnnnnnnnnnnnnnnnnnnnnnnnnnnnnnnnnnnnnnnnnnnnnnnnnnnnnnnnnnnnnnnnnnnnnnnnnnnnnnnnnnnnnnnnnnnnnnnnnnnnnnnnnnnnnnnnnnnnnnnnnnnnnnnnnnnnnnnnnnnnnnnnnnnnnnnnnnnnnnnnnnnnnnnnnnnnnnnnnnnnnnnnnnnnnnnnnnnnnnnnnnnnnnnnnnnnnnnnnnnnnnnnnnnnnnnnnnnnnnnnnnnnnnnnnnnnnnnnnnnnnnnnnnnnnnnnnnnnnnnnnnnnnnnnnnnnnnnnnnnnnnnnnnnnnnnnnnnnnnnnnnnnnnnnnnnnnnnnnnnnnnnnnnnnnnnnnnnnnnnnnnnnnnnnnnnnnnnnnnnnnnnnnnnnnnnnnnnnnnnnnnnnnnnnnnnnnnnnnnnnnnnnnnnnnnnnnnnnnnnnnnnnnnnnnnnnnnnnnnnnnnnnnnnnnnnnnnnnnnnnnnnnnnnnnnnnnnnnnnnnnnnnnnnnnnnnnnnnnnnnnnnnnnnnnnnnnnnnnnnnnnnnnnnnnnnnnnnnnnggcgagatgatccttactggagcgagaataaaaagttgtctctagatacagatgcacgatttggccatggatctgactactctcgccaacagaacagatttaatgactttgatcaccgagagaggggcaggtttcctgagagttcagcagtacagtcttcatcttttgaaaggnnnnnnnnnnnnnnnnnnnnnnnnnnnnnnnnnnnnnnnnnnnnnnnnnnnnnnnnnnnnnnnnnnnnnnnnnnnnnnnnnnnnnnnnnnnnnnnnnnnnnnnnnnnnnnnnnnnnnnnnnnnnnnnnnnnnnnnnnnnnnnnnnnnnnnnnnnnnnnnnnnnnnnnnnnnnnnnnnnnnnnnnnnnnnnnnnnnnnnnnnnnnnnnnnnnnnnnnnnnnnnnnnnnnnnnnnnnnnnnnnnnnnnnnnnnnnnnnnnnnnnnnnnnnnnnnnnnnnnnnnnnnnnnnnnnnnnnnnnnnnnnnnnnnnnnnagagtcgaaaggccagaacgatctgggagagaagtatcagggcacagcgtgagaggtgctccccctgggaatcgtagcagcgcttcggggtacgggagcagagagggagacagaggggtcatcacagaccgag

SEQ ID NO: 32792 - DNA, 812 bp, Macaca Mulatta
  misc_feature (1)...(812): n = A,T,C or G
gctggcgcgcgcctcaggggcaattcagactcctaaactcgcgctctccgtgctctgcgccgnnnnnnnnnnnnnnnnnnnnnnnnnnnnnnnnnnnnnnnnnnnnnnnnnnnnnnnnnnnnnnnnnnnnnnnnnnnnnnggccatggagctggcggtcgggaacctcagcgagggcaacgcgagctggccggagcccccagccccggagcccgggccgctgttcggcatcggcgtggagaacttcgtcacgctggtggtgttcggcctgatcttcgcgctgggcgtgctgggcaacagcctagtgatcactgtgctggcgcgcagcaagccgggcaagccgcggagcaccaccaacctgttcatcctcaacctgagcatcgccgacctggcctacctgctcttctgcatccccttccaggccacggtgtacgcgctgcccacctgggtgctgggcgccttcatctgcaagttcatacactacttcttcaccgtgtccatgctggtcagcatcttcaccctggctgcgatgtcagtggaccgctatgtggccatcgtgcactcgcggcgctcctcctccctcagggtgtcccgcaacgcgctgctgggcgtaagctgcatctgggcgctgtccatcgccatggcctcgcccgtggcctaccaccagggcctcttccagccgcgcgccagcaaccagactttctgctgggagcagtggcctgaccctcgccacaagaaggcctatgtggtgtgcaccttcgtcttcggctacctgctgccgctcctgctcatctgcttctgctatgcaaaggt

SEQ ID NO: 32793 - DNA, 108 bp, Macaca Mulatta
  misc_feature (1)...(108): n = A,T,C or G
ttttcttattattgttttgtttccttgttttnaggtgatnggattgtatttgcaactatctggtccataagtgataaaatgccatttccatgcacccaccggcctgtg

SEQ ID NO: 32794 - DNA, 326 bp, Macaca Mulatta
ttcagaagttatatatgcgtatgtgtgtgcatgtatggtgtatgcaaacatatttttggtatatacaatattgctgatgaactgaaaattaacaagtaaaacactcatgctaaggtagtgtttatgtgtttctttatctgtgggctcatttttagcatatgcatatttattgcaattaacatttggagtccagtttatcctaacatcctttaataaaactattcagggagagcttatctgacttacgattttgctgatttcaataaaaacactgagattaaataacctgaatatgaatataagaaaaccccacatttatatataca

SEQ ID NO: 32795 - DNA, 157 bp, Macaca Mulatta
tttcaatacttaataagacacctccagaaaccagtaagcctctctgcaacattaatgaaacatttagggggataaaaagtatataaagcagactcccaaggagtttatacatgtttatggtcccaattgtggtaatcagatctaaaattcttcacta

SEQ ID NO: 32796 - DNA, 186 bp, Macaca Mulatta
atgccggtggacgcccgtggccccctcggactgcgggtgacggccctgcccgccaccagacccctaaatcttggccatcgtgtggccgccacctccgggaagccttgtacagtggcacctaagggagttcaagaagccgacgccgagtcaggctgagtgaaagaggcctgccccgcccagactgcc

SEQ ID NO: 32797 - DNA, 485 bp, Macaca Mulatta
tctttctgagtagaggatttgctggtaaaggggcagatgtttttcattcatactgataaaacaaactgaggggaacatccctcttagctggtaaacttttactctttaggagcttggcatcatggactgttaatgtatgtgatttttcccctattttctctctccaaaatgataaaaacaataattttattattagtcactgtgttgttatttattgggtgtgctatttcattagctgcttaatcctagagtcctaagactctttggagatgctgtgaacctccaatgtgggcccttttaagagctttacttgcatataagccttttctctttctactttgacttctctccaggcatctcatctttaatagatctttcactaattatagctaaaaactcacagaatacagcataataaaccaccagtgagatgtttgctttgtatctgttactgcaaatgagaaaaatgggtaggggtagaaaga

SEQ ID NO: 32798 - DNA, 121 bp, Macaca Mulatta
gtggcaccagcaccattcctttccttaccacatcaatttgattaaagcagtgaccagcaggaactgtccagagaaccggctggccttgtttcgtgagtctaatctctttggcggagtggga

SEQ ID NO: 32799 - DNA, 3175 bp, Macaca Mulatta
  misc_feature (1)...(3175): n = A,T,C or G
aggagaaacatcagatggagtgagtaagtcagttcacaaggtctttgcttccatgcttnnnnnnnnnnnnnnnnnnnnnnnnnnnnnnnnnnnnnnnnnnnnnnnnnnnnnnnnnnnagaaacacctgagcaacccactgctggcgatgtatttgtattggagatggttctcaatcgtgaaaccaagaaaatgatgaaagnnnnnnnnnnnnnnnnnnnnnnnnnnnnnnnnnnnnnnnnnnnnnnnnnnnnnnnnnnnnnnnnnnnnnnnnnnnnnnnnnnnnnnnnnnnnnnnnnnnnnnnnnnnnnnnnnnnnnnnnnnnnnnnnnnnnnnnnnnnnnnnnnnnnnnnnnnnnnnnnnnnnnnnnnnnnnnnnnnnnnnnnnnnnnnnnnnnnnnnnnnnnnnnnnnnnnnnnnnnnnnnnnnnnnnnnnnnnnnnnnnnnnnnnnnnnnnnnnnnnnnnnnnnnnnnnnnnnnnnnnnnnnnnnnnnnnnnnnnnnnnnnnnnnnnnnnnnnnnnnnnnnnnnnnnnnnnnnnnnnnnnnnnnnnnnnnnnnnnnnnnnnnnnnnnnnnnnnnnnnnnnnnnnnnnnnnnnnnnnnnnnnnnnnnnnnnnnnnnnnnnnnnnnnnnnnnnnnnnnnnnnnnnnnnnnnnnnnnnnnnnnnnnnnnnnnnnnnnnnnnnnnnnnnnnnnnnnnnnnnnnnnnnnnnnnnnnnnnnnnnnnnnnnnnnnnnnnnnnnnnnnnnnnnnnnnnnnnnnnnnnnnnnnnnnnnnnnnnnnnnnnnnnnnnnnnnnnnnnnnnnnnnnnnnnnnnnnnnnnnnnnnnnnnnnnnnnnnnnnnnnnnnnnnnnnnnnnnnnnnnnnnnnnnnnnnnnnnnnnnnnnnnnnnnnnnnnnnnnnnnnnnnnnnnnnnnnnnnnnnnnnnnnnnnnnnnnnnnnnnnnnnnnnnnnnnnnnnnnnnnnnnnnnnnnnnnnnnnnnnnnnnnnnnnnnnnnnnnnnnnnnnnnnnnnnnnnnnnnnnnnnnnnnnnnnnnnnnnnnnnnnnnnnnnnnnnnnnnnnnnnnnnnnnnnnnnnnnnnnnnnnnnnnnnnnnnnnnnnnnnnnnnnnnnnnnnnnnnnnnnnnnnnnnnnnnnnnnnnnnnnnnnnnnnnnnnnnnnnnnnnnnnnnnnnnnnnnnnnnnnnnnnnnnnnnnnnnnnnnnnnnnnnnnnnnnnnnnnnnnnnnnnnnnnnnnnnnnnnnnnnnnnnnnnnnnnnnnnnnnnnnnnnnnnnnnnnnnnnnnnnnnnnnnnnnnnnnnnnnnnnnnnnnnnnnnnnnnnnnnnnnnnnnnnnnnnnnnnnnnnnnnnnnnnnnnnnnnnnnnnnnnnnnnnnnnnnnnnnnnnnnnnnnnnnnnnnnnnnnnnnnnnnnnnnnnnnnnnnnnnnnnnnnnnnnnnnnnnnnnnnnnnnnnnnnnnnnnnnnnnnnnnnnnnnnnnnnnnnnnnnnnnnnnnnnnnnnnnnnnnnnnnnnnnnnnnnnnnnnnnnnnnnnnnnnnnnnnnnnnnnnnnnnnnnnnnnnnnnnnnnnnnnnnnnnnnnnnnnnnnnnnnnnnnnnnnnnnnnnnnnnnnnnnnnnnnnnnnnnnnnnnnnnnnnnnnnnnnnnnnnnnnnnnnnnnnnnnnnnnnnnnnnnnnnnnnnnnnnnnnnnnnnnnnnnnnnnnnnnnnnnnnnnnnnnnnnnnnnnnnnnnnnnnnnnnnnnnnnnnnnnnnnnnnnnnnnnnnnnnnnnnnnnnnnnnnnnnnnnnnnnnnnnnnnnnnnnnnnnnnnnnnnnnnnnnnnnnnnnnnnnnnnnnnnnnnnnnnnnnnnnnnnnnnnnnnnnnnnnnnnnnnnnnnnnnnnnnnnnnnnnnnnnnnnnnnnnnnnnnnnnnnnnnnnnnnnnnnnnnnnnnnnnnnnnnnnnnnnnnnnnnnnnnnnnnnnnnnnnnnnnnnnnnnnnnnnnnnnnnnnnnnnnnnnnnnnnnnnnnnnnnnnnnnnnnnnnnnnnnnnnnnnnnnnnnnnnnnnnnnnnnnnnnnnnnnnnnnnnnnnnnnnnnnnnnnnnnnnnnnnnnnnnnnnnnnnnnnnnnnnnnnnnnnnnnnnnnnnnnnnnnnnnnnnnnnnnnnnnnnnnnnnnnnnnnnnnnnnnnnnnnnnnnnnnnnnnnnnnnnnnnnnnnnnnnnnnnnnnnnnnnnnnnnnnnnnnnnnnnnnnnnnnnnnnnnnnnnnnnnnnnnnnnnnnnnnnnnnnnnnnnnnnnnnnnnnnnnnnnnnnnnnnnnnnnnnnnnnnnnnnnnnnnnnnnnnnnnnnnnnnnnnnnnnnnnnnnnnnnnnnnnnnnnnnnnnnnnnnnnnnnnnnnnnnnnnnnnnnnnnnnnnnnnnnnnnnnnnnnnnnnnnnnnnnnnnnnnnnnnnnnnnnnnnnnnnnnnnnnnnnnnnnnnnnnnnnnnnnnnnnnnnnnnnnnnnnnnnnnnnnnnnnnnnnnnnnnnnnnnnnnnnnnnnnnnnnnnnnnnnnnnnnnnnnnnnnnnnagaaatgacaatttcagaattacctaacactgtatttatttttaatatgtaataattatcttgtggtatatatgcaaaattattcctacaaaaatttgtatattctgtcattttcctttcgcattctatagtgaaattgttcccaatgctgaaatggacatataagcctttgagctagcttgcagttgaatacactatttttaactcactttagctttgtatttaatactatagctctgtcagtatcacatgaggcagtttttcaaatacgtataaacagaggttgtttattattaaggggaagacaaagtgggactcttgatgatgtcatgaccatgataactaagcacctaagaaaattatttaaaatagttatgtcgtaggtggaagacaaataatttagtcttttacttttcacctgcatgtatcttagctacctcaactgaaacatgggatgctgggcttaattcaaaacatattgcttcaaggcaaataaaaaaatgcttcatctatatttgtggttgatgaaaaaatagagaagagcttgttcaataacaggacatggcttccatttcaagatcacaaagaatataagactgggcaagtagtatatatggaataaaggacatactcctga

SEQ ID NO: 32800 - DNA, 828 bp, Macaca Mulatta
ccaattctctcggaaattaaagcccaatgatataataggggttccccccccctggtttgcccagagaatttttctccacctttgtttaacaaaaaatggggggggttcgtttttttcatttcaattccccaccctttggggggaggaaaggataaacttggaaagggcccaccagggaaagttatttgccttcttttgaaagggtttttcccaacggtaatagatctccatgaatcagatccttccatgcaggatgatgccatatttaccaagagatcgagcaatcaaagcgttatctgtcaaagcaattcgcttcttattgattttgccataaccacgcttgtagattagctcatttactgacttcagattggggtacccccatgcaatatatggctctacaatcctcagcatgttaatcgaagccttgttgagcttcacaaaggttccattgaagatttgacgaaggcgcaaaagctgcaatacctttcggacctttgggctcacgccattgatacctctgatcctgatgacaaacgccaatttgggttcagcaggtacatagaagttgccagcttttcttgccatcctcgccattcgaatttcagttctgtacatctgcctatattccttgtgatagtgcttcgctttttcatagataagcttcctccttgcctttcgaagcatcttttgggcaaacttctttctcaggcgctttatcttcagctctgcgaaattccttcgctttttcttaagggtttctggcacagcaggaaccttcttcttctcttccgcaccctccatggttccagccgggaaaagagcccc

SEQ ID NO: 32801 - DNA, 96 bp, Macaca Mulatta
gggtgtgacagatgtgttgtgtgaagcttgtgaccagttgggatggacaaaacccaccaagatcctgattgaagctattcctttggccttacaagg

SEQ ID NO: 32802 - DNA, 2237 bp, Macaca Mulatta
  misc_feature (1)...(2237): n = A,T,C or G
gaatacagctacctacccaggcaatatgaagattttatttgtagaacctgccattttccttagtgcatttgctatgactttgaccagtccgctgacaacgcaatatgtttatcggagaatatgggaagaaactggcaactacacgttttcatctgatagcaatatttctgagtgtgaaaaaaacaaaagcagtccaatttttgcattccaggagnnnnnnnnnnnnnnnnnnnnnnnnnnnnnnnnnnnnnnnnnnnnnnnnnnnnnnnnnnnnnnnnnnnnnnnnnnnnnnnnnnnnnnnnnnnnnnnnnnnnnnnnnnnnnnnnnnnnnnnnnnnnnnnnnnnnnnnnnnnnnnnnnnnnnnnnnnnnnnnnnnnnnnnnnnnnnnnnnnnnnnnnnnnnnnnnnnnnnnnnnnnnnnnnnnnnnnnnnnnnnnnnnnnnnnnnnnnnnnnnnnnnnnnnnnnnnnnnnnnnnnnnnnnnnnnnnnnnnnnnnnnnnnnnnnnnnnnnnnnnnnnnnnnnnnnnnnnnnnnnnnnnnnnnnnnnnnnnnnnnnnnnnnnnnnnnnnnnnnnnnnnnnnnnnnnnnnnnnnnnnnnnnnnnnnnnnnnnnnnnnnnnnnnnnnnnnnnnnnnnnnnnnnnnnnnnnnnnnnnnnnnnnnnnnnnnnnnnnnnnnnnnnnnnnnnnnnnnnnnnnnnnnnnnnnnnnnnnnnnnnnnnnnnnnnnnnnnnnnnnnnnnnnnnnnnnnnnnnnnnnnnnnnnnnnnnnnnnnnnnnnnnnnnnnnnnnnnnnnnnnnnnnnnnnnnnnnnnnnnnnnnnnnnnnnnnnnnnnnnnnnnnnnnnnnnnnnnnnnnnnnnnnnnnnnnnnnnnnnnnnnnnnnnnnnnnnnnnnnnnnnnnnnnnnnnnnnnnnnnnnnnnnnnnnnnnnnnnnnnnnnnnnnnnnnnnnnnnnnnnnnnnnnnnnnnnnnnnnnnnnnnnnnnnnnnnnnnnnnnnnnnnnnnnnnnnnnnnnnnnnnnnnnnnnnnnnnnnnnnnnnnnnnnnnnnnnnnnnnnnnnnnnnnnnnnnnnnnnnnnnnnnnnnnnnnnnnnnnnnnnnnnnnnnnnnnnnnnnnnnnnnnnnnnnnnnnnnnnnnnnnnnnnnnnnnnnnnnnnnnnnnnnnnnnnnnnnnnnnnnnnnnnnnnnnnnnnnnnnnnnnnnnnnnnnnnnnnnnnnnnnnnnnnnnnnnnnnnnnnnnnnnnnnnnnnnnnnnnnnnnnnnnnnnnnnnnnnnnnnnnnnnnnnnnnnnnnnnnnnnnnnnnnnnnnnnnnnnnnnnnnnnnnnnnnnnnnnnnnnnnnnnnnnnnnnnnnnnnnnnnnnnnnnnnnnnnnnnnnnnnnnnnnnnnnnnnnnnnnnnnnnnnnnnnnnnnnnnnnnnnnnnnnnnnnnnnnnnnnnnnnnnnnnnnnnnnnnnnnnnnnnnnnnattatgatgaatcattcatcgttaggaaaataatgatgtaagtttcacatatgtgtaatttcacttatacttcgtaatgcttcgtttgatggagcctgttaagctgctattgatagagcttatatactgacttctgaagactgtacacgaattccacaatcagtgcttcactgatacaaaatccttaaaagggaggcactttaaagactatgtatttttcacttttcttaatatgtttcatcagtgacaggcatgataatgtttctaatgtaatgggtaattgggaaaaatagattagaaataaaattgctctaaagaagttaaaaaactgaatgaacagctaatagtggtataaannnnnaatgtttggagccaacatgttgtcccttgtgttagtaaaaggatattcacattccatgatccctggctgagttccacctctagtctttcttacccagctgttgtctatccttgttcaattagaaatactgataagagaatttttagaatacagatcttgtactccttaaatttgaatccgtcagcattgtcactcataggaaaatgatcaaacaagcaagccagtcatgatttgacccctttccatctcatttctgactgccttacactcatcctgaggtccaccttggtctctcaaaacaccatgtgctctcatgcccccatgtcttttcacacactgttccatttgctcttcctcccacattacactgaaactttcaagcctcagccaaaacattgctgcttctgcatagcag

SEQ ID NO: 32803 - DNA, 270 bp, Macaca Mulatta
tcagcaggaaggattccatccgcaccatctatacttccttgcataatgagctgaagaaggtggtgactggccgtggtgccctgggtgggactgctcctcatgtagaagaactcctttcccacctgtcagagcagctctgcttctttgttcaggctcggatggagatcgcagacttctatgagaagatgtacaccctcagcacacagaagttcatcaatgctgaagagctcgttggccttttggatgccatcctgaaaaaatacagctcca

SEQ ID NO: 32804 - DNA, 391 bp, Macaca Mulatta
tagtgcaaccacattatattctaacatcttgatttccttgtgtttctagctgactatatagtcatgcagtttggacgtgtagcagatgacgtgttcacactggactacaactacccactttgcgcagttcaggcctttggcatcggtctttctagctttgacagtaagctggcatgtgaatgacagaacaatcaggcagggggcctttctccccacagagctttcaggagcggacagtggcctcctcttcccctccctgccccaggacttgaagagcaatagtttgccccttttggaatgatccctgaatttatgaaacacacacacgaaaagcagtagtttgccccttttggaatgatccctgaatttatagaaaacacacacgaaaagc

SEQ ID NO: 32805 - DNA, 1568 bp, Macaca Mulatta
  misc_feature (1)...(1568): n = A,T,C or G
gcgccagccagcctttgacacctttgacgggtccctgtttgctgtttttccttctctaaatgaagagcaaacactgcaagaagtgccaacaggcttggattccatttcccatgactcggccaactgcgagttgactttgttaaccccgtgcagcaaggctgtgatgagtcaagccttaaaagctaccttcaatggcttcaaaaaggaacagcggcgcctcggcattccnnnnnnnnnnnnnnnnnnnnnnnnnnnnnnnnnnnnnnnnnnnnnnnnnnnnnnnnnnnnnnnnnnnnnnnnnnnnnnnnnnnnnnnnnnnnnnnnnnnnnnnnnnnnnnngatgctgtgtaaccttggcaaggaacgctttctggagctggcacctgactttgtgggtgacattctctgggaacatctggagcaaatgatcaaannnnnnnnnnnnnnnnnnnnnnnnnnnnnnnnnnnnnnnnnnnnnnnnnnnnnnnnnnnnnnnnnnnnnnnnnnnnnnnnnnnnnnnnnnnnnnnnnnnnnnnnnnnnnnnnnnnnnnnnnnnnnnnnnnnnnnnnnnnnnnnnnnnnnnnnnnnnnnnnnnnnnnnnnnnnnnnnnnnnnnnnnnnnnnnnnnnnnnnnnnnnnnnnnnnnnnnnnnnnnnnnnnnnnnnnnnnnnnnnnnnnnnnnnnnnnnnnnnnnnnnnnnnnnnnnnnnnnnnnnnnnnnnnnnnnnnnnnnnnnnnnnnnnnnnnnnnnnnnnnnnnnnnnnnnnnnnnnnnnnnnnnnnnnnnnnnnnnnnnnnnnnnnnnnnnnnnnnnnnnnnnnnnnnnnnnnnnnnnnnnnnnnnnnnnnnnnnnnnnnnnnnnnnnnnnnnnnnnnnnnnnnnnnnnnnnnnnnnnnnnnnnnnnnnnnnnnnnnnnnnnnnnnnnnnnnnnnnnnnnnnnnnnnnnnnnnnnnnnnnnnnnnnnnnnnnnnnnnnnnnnnnnnnnnnnnnnnnnnnnnnnncacaggaagtggacctattcagctgtggcagtttctcctggagctgctatctgacaaatcctgccagtcattcatcagctggactggagacggatgggagtttaagctcgccgaccccgatgaggnnnaggtggcccgccggtggggaaagaggaaaaataagcccaagatgaactacgagaagctgagccggggcttacgctattattacgacaagaacatcatccacaagacgtcggggaagcgctacgtgtaccgcttcgtgtgcgacctccagaacttgctggggttcacgcccgaggaactgcacgccatcctgggcgtccagcccgacacggaggactgaggtcgccaggaccaccctgagccggccccaggctggtggactgagtgggaagcccatcctgaccacctgctccgaggacccaggaaaggcaggattgaaaacgtctaggaaagtcgccaagaagcagtggccttattgcatcccaaaccacgcctcttgaccaggctgcctcgcatgtggcagcgacggcacagctgattctactcatagtgcttttaaatgaa

SEQ ID NO: 32806 - DNA, 949 bp, Macaca Mulatta
  misc_feature (1)...(949): n = A,T,C or G
gatgcagaagatttttgcaggcatgcggggcttcaacttcaagggtgtggagatcctgtccctgaggnnnnnnnnnnnnnnnnnnnnnnnnnnnnnnnnnnnnnnnnnnnnnnnnnnnnnnnnnnnnnnnnnnnnnnnnnnnnnnnnnnnnnnnnnnnnnnnnnnnnnnnnnnnnnnnnnnnnnnnnnnnnnnnnnnnnnnnnnnnnnnnnnnnnnnnnnnnnnnnnnnnnnnnnnnnnnnnnnnnnnnnnnnnnnnnnnnnnnnnnnnnnnnnnnnnnnnnnnnnnnnnnnnnnnnnnnnnnnnnnnnnnnnnnnnnnnnnnnnnnnnnnnnnnnnnnnnnnnnnnnnnnnnnnnnnnnnnnnnnnnnnnnnnnnnnnnnnnnnnnnnnnnnnnnnnnnnnnnnnnnnnnnnnnnnnnnnnnnnnnnnnnnnnnnnnnnnnnnnnnnnnnnnnnnnnnnnnnnnnnnnnnnnnnnnnnnnnnnnnnnnnnnnnnnnnnnnnnnnnnnnnnnnnnnnnnnnnnnnnnnnnnnnnnnnnnnnnnnnnnnnnnnnnnnnnnnnnnnnnnnnnnnnnnnnnnnnnnnnnnnnnnnnnnnnnnnnnnnnnnnnnnnnnnnnnnnnnnnnnnnnnnnnnnnnnnnnnnnnnnnnnnnnnnnnnnnnnnnnnnnnnnnnnnnnnnnnnnnnnnnnnnnnnnnnnnnnnnnnnnnnnnnnnnnnnnnnnnnnnnnnnnnnnnnnnnnnnnnnnnnnnnnnnnnnnnnnaggtgcacatcaagagacccgagatgacctcatcctcagtgtgagccctgcgggccccgtcaccatcccctctgccctgcctgggacacaaggctctgcactgcgtccatttcaagtggtggccccagaacgggagcagcccaggcacctgctgttcttgggcaaaatgagactgttcccccaaatcc

SEQ ID NO: 32807 - DNA, 109 bp, Macaca Mulatta
tagagaatggcaatttaaaagaaaaagatatacttgttttgcctcttgacctgaccgacaccggttcccatgaagcggctaccgaagctgttctccaggagtttggtag

SEQ ID NO: 32808 - DNA, 1940 bp, Macaca Mulatta
  misc_feature (1)...(1940): n = A,T,C or G
gcccccaccatgccgtggcccctgctgctgctgctggccgtgagtggggcccagacaacccggccatgctttcccgggtgccagtgcgaggtggagaccttcgtgacttttcgacagcttcagcctgactcgggtggattgcagtggcttgggcccccacatcatgtcagtgcccatccctctggacacagtccacttggacctgtcctccaaccagctagagatggtgaacgagtcggtgttnnnnnnnnnnnnnnnnnnnnnnnnnnnnnnnnnnnnnnnnnnnnnnnnnnnnnnnnnnnnnnnnnnnnnnnnnnnnnnnnnnnnnnnnnnnnnnnnnnnnnnnnnnnnnnnnnnnnnnnnnnnnnnnnnnnnnnnnnnnnnnnnnnnnnnnnnnnnnnnnnnnnnnnnnnnnnnnnnnnnnnnnnnnnnnnnnnnnnnnnnnnnnnnnnnnnnnnnnnnnnnnnnnnnnnnnnnnnnnnnnnnnnnnnnnnnnnnnnnnnnnnnnnnnnnnnnnnnnnnnnnnnnnnnnnnnnnnnnnnnnnnnnnnnnnnnnnnnnnnnnnnnnnnnnnnnnnnnnnnnnnnnnnnnnnnnnnnnnnnnnnnnnnnnnnnnnnnnnnnnnnnnnnnnnnnnnnnnnnnnnnnnnnnnnnnnnnnnnnnnnnnnnnnnnnnnnnnnnnnnnnnnnnnnnnnnnnnnnnnnnnnnnnnnnnnnnnnnnnnnnnnnnnnnnnnnnnnnnnnnnnnnnnnnnnnnnnnnnnnnnnnntaccgggactgcaggtcctggacctgtcgggcaaccccaagctcaactgggcaggagctgaggtgttctcaggcctgaactccctgcaggagctggacctttcgggcaccaacctggtgcccctgcctgaggcgctgcttctccacctcccggcactgcagagtgtcagcgtgggccaggatgtgtggtgccggcgcctggtgcgggagggtgcctacccccggaggcctggctccagccccaaggtggccctgcactgcgtagacacccgggaatctgctgccaggggccccaatatcttgtgacgaatggtgtggcccagggccacatagcagactgctgtcctgggctgcataaggtcccgagtgacttatgttccatgtgccaacaccagtggggagcccgcaggcctatgttgcagcgtcactgcaggagttgtgggcctaggagaggctttggacctgggagtcacacctagcagcaaagtctcgcccctttgtctacgttgctcccccaaaccatgagcagagggacttcgatgccaaaccagactctggtcccctcctgcttcccttccccaattatcccccaagtgccttccctcatggctgggctggcctgacccnnnnnnnnnnnnnnnnnnnnnnnnnnnnnnnnnnnnnnnnnnnnnnnnnnnnnnnnnnnnnnnnnnnnnnnnnnnnnnnnnnnnnnnnnnnnnnnnnnnnnnnnnnnnnnnnnnnnnnnnnnnnnnnnnnnnnnnnnnnnnnnnnnnnnnnnnnnnnnnnnnnnnnnnnnnnnnnnnnnnnnnnnnnnnnnnnnnnnnnnnnnnnnnnnnnnnnnnnnnnnnnnnnnnnnnnnnnnnnnctgagtccttgagaaggaaaaaggctaatctgagttccaacggggcagtggcaagaatggagcatagcctcctgcctcccagccgggcccattgcactttcttgtctcctctaataagccctgccctccccgcctgggctccccttgctgcccttgcccattccccattagcacaagagtagcagcagcaggacaggcaagagcctcacaagtgggactctgggcctggtgaccagctgtgtggcatgggctaagtcactctgcccttcggagcctctggaagcttagggcacattggttccagcctag

SEQ ID NO: 32809 - DNA, 823 bp, Macaca Mulatta
  misc_feature (1)...(823): n = A,T,C or G
ggtatggtttctagtggtaatagacgtgtcgtccataatcttgcagttcccgcaggcctcccacttaatgagacaacatttgcagccttgctaaagaagcaaggatacagcacggggcttataggnnnnnnnnnnnnnnnnnnnnnnnnnnnnnnnnnnnnnnnnnnnnnnnnnnnnnnnnnnnnnnnnnnnnnnnnnnnnnnnnnnnnnnnnnnnnnnnnnnnnnnnnnnnnnnnnnnnnnnnnnnnnnnnnnnnnnnnnnnnnnnnnnnnnnnnnnnnnnnnnnnnnnnnnnnnnnnnnnnnnnnnnnnnnnnnnnnnnnnnnnnnnnnnnnnnnnnnnnnnnnnnnnnnnnnnnnnnnnnnnnnnnnnnnnnnnnnnnnnnnnnnnnnnnnnnnnnnnnnnnnnnnnnnnnnnnnnnnnnnnnnnnnnnnnnnnnnnnnnnnnnnnnnnnnnnnnnnnnnnnnnnnnnnnnnnnnnnnnnnnnnnnnnnnnnnnnnnnnnnnnnnnnnnnnnnnnnnnnnnnnnnnnnnnnnnnnnnnnnnnnnnnnnnnnnnnnnnnnnnnnnnnnnnnnnnnnnnnnnnnnnnnnnnnnnnnnnnnnnnnnnnnnnnnnnnnnnnnnnnnnnnnnnnnnnnnnnnnnnnnnnnnnnnnnnnnnnnnnnnnnnnnnnnnnnnnnnnnnnnggcaagattcttgatgctatcgatgattttggcctaaggaacaacaccattgtctactttacatcagaccatggagggcatttggaagctaggcgagggcatgcccaacttggtggatggaatggaatatataaaggtg

SEQ ID NO: 32810 - DNA, 871 bp, Macaca Mulatta
gctgagactcggcacgaggcgatgtcgttgcgaggacgtggtgggtcctgtggtgcgatattccggatttcgttgggtcttccggtaggagctgtgatcaattgtgctgacaacacaggagccaaaaacctgtatatcatctccgtgaaggggatcaagggacggctgaacagacttcccggttggttgttgtggttgacatggtgatggccacggtcaagaaaggcaaaccggagctcagaaaaaaggtacatccagcagtggtcattcgacaacgaaagtcataccgtagaaaagatggcgtgtttctttattttgaagataatgcaggggtcatagtgaacaataaaggcgagatgaaaggttccgccattacgggaccggtagcaaaggagtgtgcagacttgtggccccggattgcatccagtgctggcagcattgcgtgattctccagtgtatttgtaagaaatgaaaattttagacccattaggagggcaaaagggagacaagaggggaaaacatgtcgggccgcctcgggccctgcaaaagcctttctaaaaacagtcggtgtggcgccggcgggccgcaaaaggataagtggaccaagggacaaaacggcgctcccgaagaggacgccacgcgcatgggcgggccgcctgagaaatcgagaccacgagaagagacaccccccgggcgggacaagcgagaaggttgataaaacaggcgggcggaaagagggagccgctaaaacgaggcagacagacgcgaggacgttaacgacggggaggaagcacggaaaccacacgccatcaccaaataccgacaaaggagcgaccggcagcagaagaaggaaagaacacaaagaaagaac

SEQ ID NO: 32811 - DNA, 562 bp, Macaca Mulatta
cagtaccttggctggaatgtcaggcctcaggaccacaggttctcaggatgggtcattttccctctcagccctgagagaagcacagaacctggcattcactggactgaatctggttgccaggaatgagtgctcacgtgatggagacccagcagagggaggcagaagggccttcccactctgccagcttcctggagccgtgcatttcctcccccttgtacagttcttcatcggcttacactgccaggccctgcaggacttggcagctgctaagagaagtggagcacctggggactcaccgacacattcctcccgcgtgagctctggggtagagaccaaccctgaggactcagtgtgcatcctggaaggcttctctgtgactgcacttagcattcttcagcacctggtgtgccacagcggagcagtggtctccctattactgtcacgagttggggcagattctgctgctggggaaggaaatgggagcctggttcacaggtttagtgatggagatatgacctcagccccaaggggggttgctgatgaccaagaacggcacccactg

SEQ ID NO: 32812 - DNA, 517 bp, Macaca Mulatta
gtgatgatgaagatgatgccgaagatgaaaataacattgataacagaactaacttcgatggaccatctgcaaaacggccaaaaccaccgtcttaacaatagcctttatgacatttaaaagatggctgttgtatcccaattgtcacactaggacatttaaggaagacttatgctgtaatttggaaaagcatttgtgttgttttcctgggacaatcttgtcaaagagaaaactggtttttctgtttctagcaaagacagtaaaggcttagaaataaaacctgttttcttgagaaataaatttcagaccgtgggaggaaaatagaacacttcataatatataaaatcctcttaagttggcaactgaattcttatcattgttttctatttttaaaataaccattggtttgtgtgatgtctacctcttttaacttctgcttctgttataaacagtacgtcatggttcataggcagtaacatttccgagaactgacatgaacaagtggtgaaaagtgggcatt

SEQ ID NO: 32813 - DNA, 559 bp, Macaca Mulatta
  misc_feature (1)...(559): n = A,T,C or G
cggcggcccgggcggggggcggccgtgcacggggacgccgctgcgccagacactctggcctctcagcatccacgaccccacgcgccgcgcccgcgtcaaggagtacttcgtgttccggnnnnnnnnnnnnnnnnnnnnnnnnnnnnnnnnnnnnnnnnnnnnnnnnnnnnnnnnnnnnnnnnnnnnnnnnnnnnnnnnnnnnnnnnnnnnnnnnnnnnnnnnnnnnnnnnnnnnnnnnnnnnnnnnnnnnnnnnnnnnnnnnnnnnnnnnnnnnnnnnnnnnnnnnnnnnnnnnnnnnnnnnnnnnnnnnnnnnnnnnnnnnnnnnnnnnnnnnnnnnnnnnnnnnnnnnnnnnnnnnnnnnnagttggaaagcttcaaggctctgttaattcaagctgtcaaaaaagcccaaaaagaaagccctttgccaggacaggcgaatggcgtgctgatcctggagcgtcccctgctcatcgagacctacgtgggactcatgtccttcattaacaacgaggctaaactaggctactccatgaccaggggcaaaataggctttta

SEQ ID NO: 32814 - DNA, 2751 bp, Macaca Mulatta
gaattctgtctgtgccagaaggagggagaggctaaggacaggctgagaagagatgccccccccaaagagtgggtgccagggcaagcaaatgtcctgaagagaagtctagggggaagggagttgtagggagagggaaggcttaagaggggagaaatgcggggccaggagctgaggcctgtgggcagacagaaggaggctgctgcagggaaggaggcagccaacccagggggctggaggctgcccactccccagtctcctggtattatttctctggtggccagagcttgtattttcttcttgctcttatttttccttcaacccaaccctattagtttaacttatcacagctgccacagcccctgaacccacaacagttgttacaggttctggtcatacaaactctaccccaggcggagaaaaggagacttcggctacccaaagaagttcaatgcccatctctactaagaatgctgtgagtatgaccagcagactctccagccacagccccgtttcaggctcctccaccactcagggacaggacgtcaccctagccctggccacggaaccagccacaggttcggctaccaccttgggacacaatgtcacctcggccccggacaccagtgcagccccgggctccaccggccccccagccggcgtagtcacctcggccccggacaccagtgcagccccgggctccaccggccccccagcccgcgtagtcacctcggccccggacaccagtgcagccccgggctccaccggccccccagcccgcgtagtcacctcggccccggacaccagtgcagccccgggctccaccggccccccagcccgcgttgtcacctcggccccggacaccagtgcagccccgggctccaccggccccccagcccgcgttgtcacctcggccccggacaccagtgcagccccgggctccaccggccccccagcccgcgttgtcacctcggccccggacaccagtgcagccccgggctccaccggccccccagcccgcgttgtcacctcggccccggacaccagtgcagccccgggctccaccggccccccagcccgcgttgtcacctcggccccggacaccagtgcagccccgggctccaccggccccccagcccgcgttgtcacctcggccccgggcactagtgcagccccgggctccaccgcacccccgggctccaccgcacccccagcccacgatgtcacctcggcctcagactctgcatcaggctcagcttccactctggtgcacagcaccacctctgccagggctaccaccaccccagccagcaagagcactccattctcaattcccagccaccactctgatactcctaccacccttgccagccacagcaccaagactgatgccagtagcactcaccatagcacagtacctcctttcacctccaatcacagcacttctccccagttgtctcttggggtctctttctttttcttgtcttttcacatttcaaaccttcagtttaattcctctctggaagatcccagcaccaactactaccaacagctgcagagagacatttctgaattggtgagtatcgacctttcctttcccatgttcccctgaagcagccatcagaactgtccacaccctttgcatcaagcctgagtcctttccctctcaccccagtttttgcagatttataaacaaggggattttctgggcctctccaatattatgttcaggtatagttctgggtgtggactcagtgtggtggttggagggtgggtgttggtcatgaccgtaaggagggactggtgcactcaaggttgggggagagtcctgagccagagctgggacctgtggctgaagtgcccatttccctgtgaccaggccaggatctgtggtggtacaatcgactctggtcttccgagaaggtaccaccaatgtccacgatgtggagacacagttcaatcaacgtaaaacggaagcagcctctcgatataacctgacgatctcagacatcagcggtgacgctacttccccggctgcagcccagcaccatgctggggcccctctcctaccagtgtctagttccccactttttccttagtgctggcagttagaggggcacctcctctgggagactgccctaaccactgcttttccttttagtgcgtgatgtgccatttcctttctctgcccaaaccggggctggggtgccaggctggggcattgcgctcctggtgctggtctgtgttctggttgtgctggccatcgtctatttcattgccttggtgagtgcagtccctggccctgatcagtgcccacccccccgccgacagaaagcactccatggtctgccataacctcctatttccccaggctgtctgtcagtgccgccaaaagaactacaggcagctggacatctttcccgcccgggatgcctaccatcctatgagcgagtaccccacctaccacacccatgggcgctatgtgcccgctggtggtaccaatcgtagcccctatgaggtgagattgggcccccacaggctggggaggcagaggctttggctgggcaagggttctgaagggggtacttggaaaacccaaagagcttggaagaggtgagaaatggcatgaagtgagcagaggaggacctggcaaggatggggggcagaggtcagaggagttctgggggacaggcctgggaggagaccatgaaagaaaggggccctcaagagggagtggccccactaccagaattc

SEQ ID NO: 32815 - DNA, 127 bp, Macaca Mulatta
gatcagtgacattcagagatgtggccattgacttctctcaggaggagtgggagtgcctgcagcctgatcagaggaccttgtacagggacgtgatgttggagaactacagccacctgatctcactggg

SEQ ID NO: 32816 - DNA, 3823 bp, Macaca Mulatta
  misc_feature (1)...(3823): n = A,T,C or G
ccctgtctccctggactaaatacgcacaccccctctttctgtgcaagcaagaggggcctggaacagggggttctgaggaggctggnnnnnnnnnnnnnnnnnnnnnnnnnnnnnnnnnnnnnnnnnnnnnnnnnnnnnnncaggcacctccactgggattacagatcccagagccccgaggagctggaaggcatgtccccttctttgcaccccagcccgcagccagtcccccatcccccagcccttcctttctccgtgctctcaggacccacagtgaccactctaggctcctatgaggcctctgagggctgtgagaggaagaagggccaacgctggggctccctggaacgacgagggatgcaagctatggaggnnnnnnnnnnnnnnnnnnnnnnnnnnnnnnnnnnnnnnnnnnnnnnnnnnnnnnnnnnnnnnnnnnnnnnnnnnnnnnnnnnnnnnnnnnnnnnnnnnnnnnnnnnnnnnnnnnnnnnnnnnnnnnnnnnnnnnnnnnnnnnnnnnnnnnnnnnnnnnnnnnnnnnnnnnnnnnnnnnnnnnnnnnnnnnnnnnnnnnnnnnnnnnnnnnnnnnnnnnnnnnnnnnnnnnnnnnnnnnnnnnnnnnnnnnnnnnnnnnnnnnnnnnnnnnnnnnnnnnnnnnnnnnnnnnnnnnnnnnnnnnnnnnnnnnnnnnnnnnnnnnnnnnnnnnnnnnnnnnnnnnnnnnnnnnnnnnnnnnnnnnnnnnnnnnnnnnnnnnnnnnnnnnnnnnnnnnnnnnnnnnnnnnnnnnnnnnnnnnnnnnnnnnnnnnnnnnnnnnnnnnnnnnnnnnnnnnnnnnnnnnnnnnnnnnnnnnnnnnnnnnnnnnnnnnnnnnnnnnnnnnnnnnnnnnnnnnnnnnnnnnnnnnnnnnnnnnnnnnnnnnnnnnnnnnnnnnnnnnnnnnnnnnnnnnnnnnnnnnnnnnnnnnnnnnnnnnnnnnnnnnnnnnnnnnnnnnnnnnnnnnnnnnnnnnnnnnnnnnnnnnnnnnnnnnnnnnnnnnnnnnnnnnnnnnnnnnnnnnnnnnnnnnnnnnnnnnnnnnnnnnnnnnnnnnnnnnnnnnnnnnnnnnnnnnnnnnnnnnnnnnnnnnnnnnnnnnnnnnnnnnnggacacagagagcaacagagagatggctggagtcccaaacactaagtatgacgtcggcagagtctcagacttcggaaatggatttcttagagcctgatcctgaaatgcagctgttacggcagcagctacgggatgctgaagagcagatgcatggcatgaagaacaagnnnnnnnnnnnnnnnnnnnnnnnnnnnnnnnnnnnnnnnnnnnnnnnnnnnnnnnnnnnnnnnnnnnnnnnnnnnnnnnnnnnnnnnnnnnnnnnnnnnnnnnnnnnnnnnnnnnnnnnnnnnnnnnnnnnnnnnnnnnnnnnnnnnnnnnnnnnnnnnnnnnnnnnnnnnnnnnnnnnnnnnnnnnnnnnnnnnnnnnnnnnnnnnnnnnnnnnnnnnnnnnnnnnnnnnnnnnnnnnnnnnnnnnnnnnnnnnnnnnnnnnnnnnnnnnnnnnnnnnnnnnnnnnnnnnnnnnnnnnnnnnnnnnnnnnnnnnnnnnnnnnnnnnnnnnnnnnnnnnnnnnnnnnnnnnnnnnnnnnnnnnnnnnnnnnnnnnnnnnnnnnnnnnnnnnnnnnnnnnnnnnnnnnnnnnnnnnnnnnnnnnnnnnnnnnnnnnnnnnnnnnnnnnnnnnnnnnnnnnnnnnnnnnnnnnnnnnnnnnnnnnnnnnnnnnnnnnnnnnnnnnnnnnnnnnnnnnnnnnnnnnnnnnnnnnnnnnnnnnnnnnnnnnnnnnnnnnnnnnnnnnnnnnnnnnnnnnnnnnnnnnnnnnnnnnnnnnnnnnnnnnnnnnnnnnnnnnnnnnnnnnnnnnnnnnnnnnnnnnnnnnnnnnnnnnnnnngtgtgacacactgctgtccagactgacagaattgcaggaaaagtacaaggccagccagaaggagatggggcagctgcagatggagcagtgtgagctcctggaggaccagaggaggatgcaggaggagcagggccagctgcaggaagagctgcacaggctcacactgccactgcccaagagtggcctcttactcaagnnnnnnnnnnnnnnnnnnnnnnnnnnnnnnnnnnnnnnnnnnnnnnnnnnnnnnnnnnnnnnnnnnnnnnnnnnnnnnnnnnnnnnnnnnnnnnnnnnnnnnnnnnnnnnnnnnnnnnnnnnnnnnnnnnnnnnnnnnnnnnnnnnnnnnnnnnnnnnnnnnnnnnnnnnnnnnnnnnnnnnnnnnnnnnnnnnnnnnnnnnnnnnnnnnnnnnnnnnnnnnnnnnnnnnnnnnnnnnnnnnnnnnnnnnnnnnnnnnnnnnnnnnnnnnnnnnnnnnnnnnnnnnnnnnnnnnnnnnnnnnnnnnnnnnnnnnnnnnnnnnnnnnnnnnnnnnnnnnnnnnnnnnnnnnnnnnnnnnnnnnnnnnnnnnnnnnnnnnnnnnnnnnnnnnnnnnnnnnnnnnnnnnnnnnnnnnnnnnnnnnnnnnnnnnnnnnnnnnnnnnnnnnnnnnnnnnnnnnnnnnnnnnnnnnnnnnnnnnnnnnnnnnnnnnnnnnnnnnnnnnnnnnnnnnnnnnnnnnnnnnnnnnnnnnnnnnnnnnnnnnnnnnnnnnnnnnnnnnnnnnnnnnnnnnnnnnnnnnnnnnnnnnnnnnnnnnnnnnnnnnnnnnnnnnnnnnnnnnnnnnnnnnnnnnnnnnnnnnnnnnnnnnnnnnnnnnnnnnnnnnnnnnnnnnnnnnnnnnnnnnnnnnnnnnnnnnnnnnnnnnnnnnnnnnnnnnnncctgctgagcctgaagacatggagnnctttgaggaaatggttgcgaaggtgctgatcaagctgcaggcggtgcaggccatgtaccagataagccaggaggaacacagccagctgcaagagcagatggaaaagttactggccaagcagaaagacctgaaggaagagctggatgcctgtgaaagggagttcaaggagtgcatggaatgccttgaaaagcccgtggccccccagaacgacaagaatganagatcaaagaactgcagaccaagctgcgagaactgcagctgcaataccaggctagcatggatgagcaggggcggcttctggtagtgcaagagcagctggaggggcagctgcagtgctgccaggaggagctccgccagctcagggagaagaggccctctgttgtcaaagaagcccgggggaagaatgctaataagaacatgaacaagaacgccaatggggttaaaatgaaaaaggtgatcaagccgtgctcggatacttctgagagtgactttgagaccagaaannnnnnnnnnnnnnnnnnnnnnnnnnnnnnnnnnnnnnnnnnnnnnnnnnnnnnnnnnnnnnnnnnnnnnnnnnnnnnnnnnnnnnnnnnnnnnnnnnnnnnnnnnnnnnnnnnnnnnnnnnnnnnnnnnnnnnnnnnnnnnnnnnnnnnnnnnnnnnnnnnnnnnnnnnnnnnnnnnnnnnnnnnnnnnnnnnnnnnnnnnnnnnnnnnnnnnnnnnnnnnnnnnnnnnnnnnnnnnnnnnnnnnnnnnnnnnnnnnnnnnnnnnnnnnnnnnnnnnnnnnnnnnnnnnnnnnnnnnnnnnnnnnnnnnnnnnnnnnnnnnnnnnnnnnnnnnnnnnnnnnatcttctccttgcctcttgtaggcctggtggtcatctcggctttgctctggtgctggtgggctgagacgtcgtcctaatgca

SEQ ID NO: 32817 - DNA, 273 bp, Macaca Mulatta
caggcaaggagctaagagccacatttcccaaatggactcatatccaaaaccgtcttctggtggcagagcaagggagggcaggaggagaaagatggagaaagactgagtcactatggctgagaagaaggtcaataggaagaagagagatcctggaaaggttgtctcttagggacatgggttagaaaatgaaagtatgcaggaaagaaaagatacatcggatgccaaactgtctcccagtgagtcaaaagcagactgctgatgagaagtaaacca

SEQ ID NO: 32818 - DNA, 96 bp, Macaca Mulatta
ggtgtgggaaggccttcaggaacagctcaggcctcacagtgcataaaaggatccacacaggtgagaaaccctatgaatgtgatgagtgtgggaagg

SEQ ID NO: 32819 - DNA, 371 bp, Macaca Mulatta
  misc_feature (1)...(371): n = A,T,C or G
tgcccaagttcatgaggagaaacaagaccccagactaccggggacagcacgtatttggggtgccacccctcatccatgtacagcnnnnnnnnnnngcactgccacagagcattcagcaagccatgcgctacttgcgcagccagtgcctggaccaagnnnnnnnnnggaccaggtaggcatcttccgcaagtctggggtcaagtctaggatccagaacctgcgccaaatgaatgagacctcgcctgacaacgtctgctatgagggccagtcagcctacgacgtggctgacctgctaaagcagtatttccgggacctgcccgagcccatcttcaccagcaagctcaccaccactttcctccagatctaccagc

SEQ ID NO: 32820 - DNA, 772 bp, Macaca Mulatta
gggactctgggcttttgctcggtcaggctggtggcgttttggtatcttcgtttgttatggccgctgccgtcgctatggagacagatgatgctggaaatcgacttcggtttcagttggagttggaatttgtgcaatgtttagccaacccaaattaccttaattttcttgcccaaagaggttacttcaaagacaaagcttttgttaattatcttaaatacttgctttactggaaagacccagaatatgccaagtatctaaagtaccctcagtgtttacacatgttagagctgctccaatacgaacacttccgaaaggagctggtgaatgctcagtgtgcgaaattcattgatgaacagcagattctacattggcagcactattcccggaagcggatgcgccttcagcaagccttggcagagcagcaacagcaaaataacacatcgggaaaatgaaaaaccggatacagatgaggctctcaatacatgtatataatgtatttcttttgtacagtgaagacaaaaaatgaaaactcttcctatctacctttattatggtagcccctagaacctttagtgtgctttttaatcccactttttattgttaatagactatttcttttaaacctgaattggtctactttgatttccctgtggattttgtaaggtgttttccttttggaggccattttacataatccgcctgatttaagaatggaaaagttaggtggctttagaccaaatgaggcactggggcaatggggttagggggtgga

SEQ ID NO: 32821 - DNA, 483 bp, Macaca Mulatta
tggcactctgggtcccagttcccagtgcagctgtaggttgccatcacctaaccacatgtgcaataaagtcctcgtgcctcctgctcacagcccccgagagcccctcctcctggagaataaaaccttaggcggctgcccttcctcactgcattgtggttgtgtctaatgaaccgagacgtcccgtctatcaccttcctgggctcaaggctccaccgaatgctgcccctcggtttgggaggctctgtggtgccgccatctcaccaggctcccaaggaagcttgtgaccttgggttgggccctaagcagccaggtacccgctggggctctgcttctctctttcactgagagagagaaagagaccaaagaatggtctgcagggagggcgcctgtgcaaacacccagggaaccaggggcttgagctgtcttcatttccttacagacacacattcccttccatgcctccttagtgagggcatgacgcac

SEQ ID NO: 32822 - DNA, 583 bp, Macaca Mulatta
gaccacaaactctagacagattcattcttcggtgtagttaagctttcctttccctggataagcagttttcatatgaccaaaagaacatggaaaaaaatgcagatgtctaattattgatatttcggtgtttgttgtggaatattttgttgaagaaacagaaatatggtaacactccgcgttctttctgcttcctttccatgcaacccagctgaccttttctgaagccataagaaacaaagccagattatccatcactgggagtgtgggagagaatggccgcgtcttgacgcctgactgcccaaaggctgtacaaaatggaactgcaatcagacaaagttcaggattggctgtcattgcatcggacctaccataaaaaccaaaaaaataattgagtgccttaattaaactgtgttggtgactgatggaaacgcagccctgaggaacacgccacgcgcgggtctttgctaaaccaatcctttggctgagaacgggaagtccgtcctaacgggctggccggacatcagcagcagcaacgtgtgcatgagctcagctcggaaacccaaactcagatatttatcaggaa

SEQ ID NO: 32823 - DNA, 157 bp, Macaca Mulatta
ggttggacttcagatcttaccagttgacggcaatccacataagacatctgctattgtttgtcacccaaacggggtggctggcatggccatttcctatgatggccgctacgccttcaccgcaggagggcacgatcgctctgtggtgcagtggaaaatc

SEQ ID NO: 32824 - DNA, 1734 bp, Macaca Mulatta
  misc_feature (1)...(1734): n = A,T,C or G
actgaaatctgtcttgtcagctcaggaatgggattccccctggaaggaaagcatttttctgttctgggaagcccagacctgttactttggggcagggacgaacatgtgcctcgtgaatttgcttgaaaacagtccccatcatctacccccatcactgtagagtacaaaacttgattaaagtggtatctgagaaccataatgatcgaatcttatcatctagatggtatttgggagtcttcttaggagttaggcaagtacaggtgttttagagcaggataacattggtattaaagggtgccaaggagccctggaaactgctttactagtgcggttgcattgaaccctggaggcacagattcctaggaacctttttaccatcattacaattggccttagcagcttcaagtctaaatggaagtagacnnnnnnnnnnnnnnnnnnnnncctttccctataaaagtatatacgcacattcaagaagatttggtagggattttaaaaagggcacccatgttcccagctcgttaataacaaccattaacattttgttgtcttttactaattgtctgcataggttttaaagatagttattactgtacatttaattttatatacttttcttacattatcatttttccattttgtgtggtcatcatnnnnnnnnnnnnnnnnnnnnnnnnnnnnnnnnnnnnnnnnnnnnnnnnnnnnnnnnnnnnnnnnnnnnnnnnnnnnnnnncggctcagtgcaaccttgacctcctgggctcaagtgatcctcccacttcagccccccanatagctgggactacaggagtatgccaccacgcccaactaannnnnnnnnnnnnnnnnnnnnnnnnnnnnnnnnnnnnnnnnnnnnnnnnnnnnnnnnnnnnnnnnnnnnnnnnnnnnnnnnnnnnnnnnnnnnnnnnnnnnnnnnnnnnnnnnnnnnnnnnnnnnnnnnnnnnnnnnnnnnnnnnnnnnnnnnnnnnnnnnnnnnnnnnnnnnnnnnnnnnnnnnnnnnnnnnnnnnnnnnnnnnnnnnnnnnnnnnnnnnnnnnnnnnnnnnnnnnnnnnnnnnnnnnnnnnnnnnnnnnnnnnnnnnnnnnnnnnnnnnnnnnnnnnnnnnnnnnnnnnnnnnnnnnnnnnnnnnnnnnnnnnnnnnnnnnnnnnnnnnnnnnnnnnnnnnnnnnnnnnnnnnnnnnnnnnnnnnnnnnnnnnnnnnnnnnnnnnnnnnnnnnnnnnnnnnnnnnnnnnnnnnnnnnnnnnnnnnnnnnnnnnnnnnnnnnnnnnnnnnnnnnnnnnnnnnnnnnnnnnnnnnnnnnnnnnnnnnnnnnnnnnnnnnnnnnnnnnnnnnnnnnnnnnnnnnnnnnnnnnnnnnnnnnnnnnnnnnnnnnnnnnnnnnnnnnnnnnnnnnnnnnnnnnnnnnnnnnnnnnnnnnnnnnnnnnnnnnnnnnnnnnnnnnnnnnnnnnnnnnnnnnnnnnnnnnnnnnnnnnnnnnnnnnnnnnnnnnnnnnnnnnnnnnnnnnnnnnnnnnnnnnnnnnnnnnnnnnnnnnnnnnnnnnnnnnnnnnnnnnnnnnnnnnnnnnnngagtgggagtatggcatagtttattctggacagtttccatactgccggacatttcaattgtttctggtggttcacttgtttagatactgcaatgaatatcttatatgaagcttttcctgcattttggaataaacagtaaaaata

SEQ ID NO: 32825 - DNA, 1299 bp, Macaca Mulatta
  misc_feature (1)...(1299): n = A,T,C or G
ctaccagatacngactgttgtagatgtgttttccatcgacagccctgnatagtttagaaaacatcccagaaaagtggaccccggaagtcaagcatttctgtcccaacgtgcccatcatcctggttgggaataagaaggatcttcggaatgatgagcacacaaggcgggagctagccaagatgaagcaggagccggtgaaacctgaagaaggcagagatatggcaaacaggattggtgcttttgggtacatggagtgttcagcaaagaccaaagatggagtgagagaggtttttgaaatggctacgagagctgctctgcaagctagacgtgggaagaaaaaatctgggtgccttgtcttgtgaaaccttgctgcaagcacagcccttatgcggttaattttgaagtgctgtttattaatcttagtgtatgattactggcctttttcatttatctataatttacctaagattacaaatcagaagtcatcttgctaccagtatttagaagccaactatgattattaatgatgtccaacccgtctggcccaccagggtccttttgacactgctctaacagccctcctctgcactcccacctgacacaccaggcgctaattcaaggaatttcttaacttcttgcttctttctagaaagagaaacagttggtaacttttgtgaattaggctgtaactactttataactaacatgtcctgcctattatctgtcagctgcaaggtactctggtgagtcaccacttcagggctttactcattaacagattttgttggcatagctctgggggtgggcagttttttttgaaaatgggctcaaccagaaaaagcccaagttcatgcagctgtggcagagttacagtttctggtggtttcatggttagtttaccttatagttactggtgtaaattaagtggccacttaaatggtatgttacccaaaaaaataaaatattatcctaccccccagaactaagaatgtagtattttttgtataattggatttcctaatactgatatttgtcatccccaaagaaagtgtattnnnnnnnnnnnnnnnnnngtgtatttggaaataaagtcagatggaaaattcattttttaaattcccgtttttgtcactttttctgataaaagatggccatattacccccttttccgccccattgtatctcaattacccctaatctggagccttgggctaaaataaaataaggaaattggttttccacgccctgaaaggcaaattaagacacctttttggaaaagggttgggcattaaccccgga

SEQ ID NO: 32826 - DNA, 160 bp, Macaca Mulatta
agagtccctccagcaccacccctccaattgagatcagctcctctcgtctgaccaagttgacccgccgaaccaccgacaggaagagtgagttcctgaaaactctgaaggatgaaaggaatggagacttctcagagaacagagactgtgacaagctggaaga

SEQ ID NO: 32827 - DNA, 569 bp, Macaca Mulatta
  misc_feature (1)...(569): n = A,T,C or G
gggtatttaagatatagcaaggacatggcnnnnnnnnnnnnnnnnnnnnttggcactaataagtgggtttattggtcttttctaattgtataatttaatttagtacaaagtttgtaaaatatcagaggatatatatatattgtttctacgacatggtattgcatttatatctttttactacagtgatctgtgacagcagcagcttcatgttgtattttttttactgaaattgtacaatatccatcttaaagacatcaactattctaaaaattgtgtacaggatattcctttagtggtggaattaaaatgtacgaatatttgcnnnnnnnnnnnnnnnnnnnnnnctgttaaaagtttaaagatttttgctatatattatggaagaaaaatgtaatcgtaaatattaattttgtacctatattgtgcaatacttgaaaaaaaggtataaaaaagtattttgagtcagtgtcttacatgttaagagggactgaaatagtttatattaagtttgtattaaaattctttaaaactnnnnnnnnnnnnnnnnnnnnnnnannnnnacatgtcgg

SEQ ID NO: 32828 - DNA, 2435 bp, Macaca Mulatta
  misc_feature (1)...(2435): n = A,T,C or G
gtggaacaccaagacaaatggctagaaatcttgtacatggaaacagtggcccacccaaagtttgactttccctaggaagttatagagaaatgaggaggtatcagaagatcagtcaataaaagaaaaatttcttgaaaagacatatgggtgggatgagaatgaatgattcttactttatctgtagaaactgaattttgctgcaactaagagagacctggataatagtgatttacacaaacaagattttgttctgtcaagaaaactgatattcagcagtccagcctgatgcagtggcttcatgagctcttcagcaacccagacaccttccaggtcttctttggcaattttagtgctggtaactccttcatgtcatcatccaaaatggctgccagaggtccagacatcacgtgtatatctgagttccaggaaactagacagagggagaaaagaagggcnnnnnnnnnnnnnnnnnnnnnnnnnnnnnnnnnnnnnnnnnnnnnnnnnnnnnnnnnnnnnnnnnnnnnnnnnnnnnnnnnnnnnnnnnnnnnnnnnnnnnnnnnnnnnnnnnnnnnnnnnnnnnnnnnnnnnnnnnnnnnnnnnnnnnnnnnnnnnnnnnnnnnnnnnnnnnnnnnnnnnnnnnnnnnnnnnnnnnnnnnnnnnnnnnnnnnnnnnnnnnnnnnnnnnnnnnnnnnnnnnnnnnnnnnnnnnnnnnnnnnnnnnnnnnnnnnnnnnnnnactggttcaataaatagacaactcttcattcctatggtacttcttagagataaaccacatgcatgtatcagagaaaacaactctcaacctggtaaatgaacaggaaaaacttggattagaattctacttcttcaaggtggggagcaaatttccataataccacatggacatacagaccaagtcatgcttggtgctatctacacaatcaaggcagagaacacaaaaacttggccatgaatgttcacaacaccattattgataatagtcaaaaaatggaaacaaccgaaatgcccaccaactgaggcatgaataaacaaaatgtggtgcatctattcaatggaatattattcagccattaaaaaggataaattactgatacatgctacaacatggatgaacttcaaaaacacatgctaagtgaaagaagccagccatcaaggaccacaaattgtattattcaatttatatgaaattctaaagtaggcaaatctataaagacaaaatagattagtcattgcatagggctggggttgggagaggagaatgggagtgactgccaatgagcaagaggtttctggtgaaaatgtggagaagaggtttgaataattatctgagattagatttgttatttggaagcaccgttacctacttaatttccttcacaattcaaattcactagaaaactactgttggctgtacttttttgataatgtaattcctgaatttctaaactgtttttaaggtttttcttaatctctccctttaaaaaaaaaatactgagacagttaaaagtacaatagacttttgtaaattttactttcaaaagaagataatcaaaagtgatataattatcacaattggtgttaaattattgttttgatcttaatattttattccccattcatttgttgttgttttttgtctgttctaatgctataataacttacctcaactttaacaaaatgaaactttgttttcatgctttattaacctgaagctaataattttaccttaggtgttatcaaaaatgacttatttttaggataagttaatatctcaagcaacagtgttatgctctaccacctaccaaactctggagtgagaaaatccaatcagtttaactgaccttgcacaatttaaccatcaaataaattccatatgcgggcttggtggctcatgcctgtaatcccagcactttgggaggtcgaggcaggtggattacttgagcccaggacttcaagactagcctaggcaacatggtgaaaccctatcttttctaaaaatacaaaaattagccaagcatggtagcgtgcacctgggaaggctaaggtgggagaatccttgaggccaggaggttgaggctgcagtgagctgtgattgtaccactgcactttagtctgggtgacagagtgagaccctgtctcaaacaaacaaacaaacaaaaaatctatgatggacaacttagaaatctaatttgataatcctaannnnnnnnnnnnnnnnnnnnnnnnntccctcatgttctctaaaagggtcaagaaacaacaattgtaactctgacatctaaatgtaatttgtaaaatattttcttatgctctccctggtattctccttaaaatcattctagctttcccagaaccaaacgatatgtcttctaattaaaatttcatatgctgatgttttctgccatttctgtttgg

SEQ ID NO: 32829 - DNA, 1024 bp, Macaca Mulatta
  misc_feature (1)...(1024): n = A,T,C or G
cagacttgccctacctttgacctatacaccaggctctgtttccacaatttccaacctggggagtctcgtgtgcatttaaatccgaggtaggctgcagtattggcttgaggctctgacactgtcagagaaagtggatttattgtgtcacaggagtttctgggacccagctcttcctgagaggggtgggaagattggggatcctcactcagcagattgggtagggccctttgaggcagagtgtcttcggccagtgaagatttactctgctcagagtgttggggtcccatcctttctccccggctcccctgttaacagatggagctggaccttgccccagaaggggcttgtagcttttttatgtcaacgaaatgccctcctgtactctgtcttcagcagccaactcctggagctgccaagcgaggggttaaagaagaggtggttaggcagcgtggctccctgggtaatgtttgttgctttggttctcagtcctgggtattctagaagtttggacacgggattccgtctcctgtgnnnnnnnnnnnnnnnnnnnnnnnnnnnnnnnnnnnnnnnnnnnnnnnnnnnnnnnnnnnnnnnnnnnnnnnnnnnnnnnnnnnnnnnnnntacttgccaggacctttccttgctactcttcccaannnnggaggcaaagcggctgggtcaccagagcctaaccagactgacgccccagggggaagacgcagaggccgggaggagacaccccctcccaaacacacaaaacttgcctcttcctggcctcggctcccctcactggggccttgggcagggctgacccgcacccaactaggcctaagggggacgctcggagcctcttacccccaggaggcggagatgcgcccagggcgggcgcccggcctgttccccagccctgcctggaagctccgcagccactgcattttgttnnnnnnnnnnnnnncgggcccttctcttattactacagtgttttgtacgcggttaaaacactagtaaagctttttcattatta

SEQ ID NO: 32830 - DNA, 2712 bp, Macaca Mulatta
  misc_feature (1)...(2712): n = A,T,C or G
gcgccgatcccgagtggacctcacggccgaaatgatcagcgccccactgggcgacttccgccacaccatgcacgttggccgggccggagatgcctttggggacacctccttcctcaacagcaaggctggcgagcctgacggcgagtccttggacgaacaggcctcctcttcatcttccaaacgcagtctcctgtccaggaagttccggggcagcaagcggtcacagtcagtgaccaggggggagcgggagcagcgcgacatgctgggatccctgcgggactcggccctctttgtcaagaatgccatgtccctgccccagctcaatgagaaggaggccgcggagaagggtaccagtaagctgcccaagagtctgtcatccagccccgtgaagaaggccaatggcggggagggtggcgacgaggaggcaggcatggaggaggccgtgccccgtcggaatggggccgcgggtccccattcccctgaccccctcctcgacgagcaggcctttggggatctggcagatctgcctgtcatgcccaaggccacctatgggctgaagcatgcggagtccatcatgtccttccacatcgacctggggccctccatgctgggtgacgtcctcagcatcatggacaaggaggagtgggaccccgaggaggaggagggtggttaccatggcgatgagggcgccactggcaccatcacccaggctcccccatacgctgtggcggcccctcccctgacgaggcaggaaggcaaggccggcccagacttgccctccctcccctcccatgctctggaggacgaggggtgggcagcagcggcccccagccccggctccgcccgcagcatgggcagccacaccacacgagacagcagctccctctccagctgcacctcgggcgtcctggaggagcgcagccctgccttccggggaccggacagggcccgggctgctgtctcgagacagccggacaaggagttctccttcatggannnnnnnnnnnnnnnnnnnnnnnnnnnnnnnnnnnnnnnnnnnnnnnnnnnnnnnnnnnnnnnnnnnnnnnnnnnnnnnnnnnnnnnnnnnnnnnnnnnnnnnnnnnnnnnnnnnnnnnnnnnnnnnnnnnnnnnnnnnnnnnnnnnnnnnnnnnnnnnnnnnnnnnnnnnnnnnnnnnnnnnnnnnnnnnnnnnnnnnnnnnnnnnnnnnnnnnnnnnnnnnnnnnnnnnnnnnnnnnnnnnnnnnnnnnnnnnnnnnnnnnnnnnnnnnnnnnnnnnnnnnnnnnnnnnnnnnnnnnnnnnnnnnnnnnnnnnnnnnnnnnnnnnnnnnnnnnnnnnnnnnnnnnnnnnnnnnnnnnnnnnnnnnnnnnnnnnnnnnnnnnnnnnnnnnnnnnnnnnnnnnnnnnnnnnnnnnnnnnnnnnnnnnnnnnnnnnnnnnnnnnnnnnnnnnnnnnnnnnnnnnnnnnnnnnnnnnnnnnnnnnnnnnnnnnnnnnnnnnnnnnnnnnnnnnnnnnnnnnnnnnntcagcccttccctgctccaccccagctcctgccctggaaatctggagccccttggagctgagctggaccaggggaccagccatgagcacgtgcactaaacgcagccctttccaggggaagaagagcaggatgggaaatggaaggaaagcccccacacttcgtgaattgcaagaagggacccttccaggatgacactaggaacagggctagggcactcactcagtccctaggggcttgtgtgttcaaaataattatgtataaatccttatagagcaatatcaggatggtgttaatagatctgcctcagaaggagaatcaatccttttagaaaacctttatactaaacctcttcgaaattcacagtggcaattagcagactggagtctgnnnnnnnnnnnnnnnnnnnnnnnnnnnnnnnnnnnnnnnnnnnnnnnnnnnnnnnnnnnnnnnnnnnnnnnnnnnnnnnnnnnnnnnnnnnnnnnnnnnnnnnnnnnnnnnnnnnnnnnnnnnnnnnnnnnnnnnnnnnnnnnnnnnnnnnnnnnnnnnnnnnnnnnnnnnnnnnnnnnnnnnnnnnnnnnnnnnnnnnnnnnnnnnnnnnnnnnnnnnnnnnnnnnnnnnnnnnnnnnnnnnnnnnnnnnnnnnnnnnnnnnnnnnnnnnnnnnnnnnnnnnnnnnnnnnnnnnnnnnnnnnnnnnnnnnnnnnnnnnnnnnnnnnnnnnnnnnnnnnnnnnnnnnnnnnnnnnnnnnnnnnnnnnnnnnnnnnnnnnnnnnnnnnnnnnnnnnnnnnnnnnnnnnnnnnnnnnnnnnnnnnnnnnnnnnnnnnnnnnnnnnnnnnnnnnnnnnnnnnnnnnnnnnnnnnnnnnnnnnnnnnnnnnnnnnnnnnnnnnnnnnnnnnnnnnnnnnnnnnnnnnnnnnnnnnnnnnnnnnnnnnnnnnnnnnnnnnnnnnnnnnnnnnnnnnnnnnnnnnnnnnnnnnnnnnnnnnnnnnnnnnnnnnnnnnnnnnnnnnnnnnnnnnnnnnnnnnnnnnnnnnnnnnnnnnnnnnnnnnnnnnnnnnnnnnnnnnnnnnnnnnnnnnnnnnnnnnnnnnnnnnnnnntgactcaagacactaacttagttcctggttcggtgccctgttggtgctcctgtttctaatagcttaggtcccacggtaggggaggaaccgcgggggct

SEQ ID NO: 32831 - DNA, 472 bp, Macaca Mulatta
cgtcttcctcaacaagtgcgagacctgggtgtccaacctgcgctacaaccgcatgctgcggaagaagaagaacctactgcttcagtacaacagcggggaagacctggccgttaacatcatcttccccgagaagatcgacaccaccaccttcagcaaggaggccggcggcgaggagatctaagcagccctcccacagtcccccctagattcttggagttccgcagagctcactatatgcggtctgtcctaatctttgtgctggagttcgcgctttcttgtgtcaaatgtggtgaacgctacgcttacatatattgtctttgtgttgctgtgtgacaagcgcaatgctaaaacaatcctctttctctctcttaatgcatgatacagaataataataagaatttcatctttaaacaagtaagagaaataagtatgttattctaaactctaaacttaatgaaatatcaaaaaagac

SEQ ID NO: 32832 - DNA, 269 bp, Macaca Mulatta
aagagaagaaaatccctaggaggacatgttggtagaatcattctggaaaacaaccatgtcattgacacctattctaggattttattccccgttgtgtacattttatttaatttgttttactggggtgtgtatgtatgaaggggaatttcacatgtatacaactttgaagccagacgatgtttcgaaacaaaactcttgaatatgaggtgggtagtcctagatggaactgggaaagagccagttgcctctcctgccctaatgagaatttg

SEQ ID NO: 32833 - DNA, 476 bp, Macaca Mulatta
  misc_feature (1)...(476): n = A,T,C or G
gctgagattgtgggcagaaaattattaagccttctgcctgatgaagagaaagatgaagtctaccaaaagattattctcagatttcctttgttaaactcagnnnnnnnnnnnnnnnnnnnnnnnnnnnnnnnnnnnnnnnnnnnnnnnnnnnnnnnnnnnnnnnnnnnnnnnnnnnnnnnnnnnnnnnnnnnnnnnnnnnnnnnnnnnnnnnnnnnnnnnnnnnnnnnnnnnnnnnnnnnnnnnnnnnnnnnnnnnnnnnnnnnnnnnnnnnnnnnnnnnnnnnnnnnnnnnnnnnnnnnnnnnnnnnnnnnnnnnnnnnnnnnnnnnnnnnnnnnnnnnnnnnnnnnnnnnnnnnnnnnnnnnnnnnnnnnnnnnnnnnnnnnnnnnnnnnnnnnnnnnnnnnnnnnnnnnnnnnnnnnnagtagctctcaaggtcaaagaggacatactagcatggaagtcgtgtatgttgaacc

SEQ ID NO: 32834 - DNA, 258 bp, Macaca Mulatta
ctgctgcacccggccttccagagctttctcctgctgaccctgcttggcttatggagaaccacccctgaggcgcacgcttcgtccccgggtgcgccagctatcagcgctgcctccttcctgcaggatctaatgcatcgctatggcgagggtgacagcctcactctgcagcagctgaaggccctgctcaaccacctggatgtgggagtgggccggggtaatgtcacccagcacgtgcagggacacaggaacctctccacg

SEQ ID NO: 32835 - DNA, 2780 bp, Macaca Mulatta
  misc_feature (1)...(2780): n = A,T,C or G
aggaatttataagtatttgaccattttcaaaatgtgcaaggaagaataatggaagcccctgaataccttgatttggatgaaattgactttagtgatgacatatctnnnnnnnnnnnnnnnnnnnnnnnnnnnnnnnnnnnnnnnnnnnnnnnnnnnnnnnnnnnnnnnnnnnnnnnnnnnnnnnnnnnnnnnnnnnnnnnnnnnnnnnnnnnnnnnnnnnnnnnnnnnnnnnnnnnnnnnnnnnnnnnnnnnnnnnnnnnnnnnnnnnnnnnnnnnnnnnnnnnnnnnnnnnnnnnnnnnnnnnnnnnnnnnnnnnnnnnnnnnnnnnnnnnnnnnnnnnnnnnnnnnnnnnnnnnnnnnnnnnnnnnnnnnnnnnnnnnnnnnnnnnnnnnnnnnnnnnnnnnnnnnnnnnnnnnnnnnnnnnnnnnnnnnnnnnnnnnnnnnnnnnnnnnnnnnnnnnnnnnnnnnnnnnnnnnnnnnnnnnnnnnnnnnnnnnnnnnnnnnnnnnnnnnnnnnnnnnnnnnnnnnnnnnnnnnnnnnnnnnnnnnnnnnnnnnnnnnnnnnnnnnnnnnnnnnnnnnnnnnnnnnnnnnnnnnnnnnnnnnnnnnnnnnnnnnnnnnnnnnnnnnnnnnnnnnnnnnnnnnnnnnnnnnnnnnnnnnnnnnnnnnnnnnnnnnnnnnnnnnnnnnnnnnnnnnnnnnnnnnnnnnnnnnnnnnnnnnnnnnnnnnnnnnnnnnnnnnnnnnnnnnnnnnnnnnnnnnnnnnnnnnnnnnnnnnnnnnnnnnnnnnnnnnnnnnnnnnnnnnnnnnnnnnnnnnnnnnnnnnnnnnnnnnnnnnnnnnnnnnnnnnnnnnnnnnnnnnnnnnnnnnnnnnnnnnnnnnnnnnnnnnnnnnnnnnnnnnnnnnnnnnnnnnnnnnnnnnnnnnnnnnnnnnnnnnnnnnnnnnnnnnnnnnnnnnnnnnnnnnnnnnnnnnnnnnnnnnnnnnnnnnnnnnnnnnnnnnnnnnnnnnnnnnnnnnnnnnnnnnnnnnnnnnnnnnnnnnnnnnnnnnnnnnnnnnnnnnnnnnnnnnnnnnnnnnnnnnnnnnnnnnnnnnnnnnnnnnnnnnnnnnnnnnnnnnnnnnnnnnnnnnnnnnnnnnnnnnnnnnnnnnnnnnnnnnnnnnnnnnnnnnnnnnnnnnnnnnnnnnnnnnnnnnnnnnnnnnnnnnnnnnnnnnnnnnnnnnnnnnnnnnnnnnnnnnnnnnnnnnnnnnnnnnnnnnnnnnnnnnnnnnnnnnnnnnnnnnnnnnnnnnnnnnnnnnnnnnnnnnnnnnnnnnnnnnnnnnnnnnnnnnnnnnnnnnnnnnnnnnnnnnnnnnnnnnnnnnnnnnnnnnnnnnnnnnnnnnnnnnnnnnnnnnnnnnnnnnnnnnnnnnnnnnnnnnnnnnnnnnnnnnnnnnnnnnnnnnnnnnnnnnnnnnnnnnnnnnnnnnnnnnnnnnnnnnnnnnnnnnnnnnnnnnnnnnnnnnnnnnnnnnnnnnnnnnnnnnnnnnnnnnnnnnnnnnnnnnnnnnnnnnnnnnnnnnnnnnnnnnnnnnnnnnnnnnnnnnnnnnnnnnnnnnnnnnnnnnnnnnnnnnnnnnnnnnnnnnnnnnnnnnnnnnnnnnnnnncaaacagtggaacgtgtcacgctgcagaaccaactccaacaatttctagaagcccagaaatcagagggcaagtcactcccttcttcacccagnnnnnnnnnnnnnnnnnnnnnnnnnnnnnnnnnnnnnnnnnnnnnnnnnnnnnnnnnnnnnnnnnnnnnnnnnnnnnnnnnnnnnnnnnnnnnnnnnnnnnnnnnnnnnnnnnnnnnnnnnnnnnnnnnnnnnnnnnnnnnnnnnnnnnnnnnnnnnnnnnnnnnnnnnnnnnnnnnnnnnnnnnnnnnnnnnnnnnnnnnnnnnnnnnnnnnnnnnnnnnnnnnnnnnnnnnnnnnnnnnnnnnnnnnnnnnnnnnnnnnnnnnnnnnnnnnnnnnnnnnnnnnnnnnnnnnnnnnnnnnnnnnnnnnnnnnctgagacagctgaggcagaggtcactgagtgagtctgacacagactccaacatctctgaggaccccaagaatgccgcagtgaggaaggctgcccgaccaaggccacagcccattgtagaaagtgtagagagtatggacagcgcagaaagcctgcacgtgatgatcaagaaacacaccttggcatcagggggacgcaggtttcctttcagcatcaagacctccaaatccctggatggccatagcccatcgcccacctcagagagcagtgaaccagacttggaatcccagtatccaggctcagggagtactcctccaaaccagccctctggtgaccctccacagcccaaccctgacagcactgctgcccagaaagttgccacaagtcccaagagtgccctcaagtctccatcttccaagcgcaggacatctcagaacttaaaactgagagtcacctttgaggagcctgtggtgcagatggagcagcctagccttgaactgaatggagaaaaagacaaagataagggcaggactctccagcggacctccacaagtaacgaatcaggggatcaactgaaaaggccttttggagcctttcgatctatcatggagacactaagtggcaaccaaaacaataataataactaccaggcagccaaccagctgaaaacctcatacattgcccttgacctcacttgggagaaagacaacagatacagagggaaaccctgccagctc

SEQ ID NO: 32836 - DNA, 642 bp, Macaca Mulatta
cagcgcgatgcccaaggccaagggcaaaacccggaggcagaagtttggttacaatgtcaaccgaaagcgtctgaaccggaatgctcgacggaaggcagcgccgcggatcgaatgctcccacatccgacatgcctgggaccacgctaaatcggtgcggcagaacctggccgagatgggattggctgtggaccccaacagggcggtgcccctccgtaagagaaaggtgaaggccatggaggtggacagagaggaggggcctaaggagcttgtgcggaagccctatgtgctgaatgacctggaggcagaagccagccttccagaaaagaaaggaaatactctgtctcgggacctcattgactacgtacgccacatggtggagaaccacggggaggactacaaggccatggcccgtgatgagaagaattactatcaagatactccaaaacagattcggaataagatcaacgtctataaacgcttttacccagcagagtggcaagacttccttgattctctgcagaagagtaagatggaggttgagtgactgttttacatcacagccgccccaggctgaggcgtgccccggaccagtgaagctggagtcaggctgtaaggcaaggagggctgtgtggctccagaggt

SEQ ID NO: 32837 - DNA, 2450 bp, Macaca Mulatta
  misc_feature (1)...(2450): n = A,T,C or G
agaatgagtctgcaggtcttaaacgannnnnnnnnnnnnnnnnnnnnnnnnnnnnnnnnnnnnnnnnnnnnnnnnnnnnnnnnnnnnnnnnnnnnnnnnnnnnnnnnnnnnnnnnnnnnnnnnnnnnnnnnnnnnnnnnnnnnnnnnnnnnnnnnnnnnnnnnnnnnnnnnnnnnnnnnnnnnnnnnnnnnnnnnnnnnnnnnnnnnnnnnnnnnnnnnnnnnnnnnnnnnnnnnnnnnnnnnnnnnnnnnnnnnnnnnnnnnnnnnnnnnnnnnnnnnnnnnnnnnnnnnnnnnnnnnnnnnnnnnnnnnnnnnnnnnnnnnnnnnnnnnnnnnnnnnnnnnnnnnnnnnnnnnnnnnnnnnnnnnnnnnnnnnnnnnnnnnnnnnnnnnnnnnnnnnnnnnnnnnnnnnnnnnnnnnnnnnnnnnnnnnnnnnnnnnnnnnnnnnnnnnnnnnnnnnnnnnnnnnnnnnnnnnnnnnnnnnnnnnnnnnnnnnnnnnnnnnnnnnnnnnnnnnnnnnnnnnnnnnnnnnnnnnnnnnnnnnnnnnnnnnnnnnnnnnnnnnnnnnnnnnnnnnnnnnnnnnnnnnnnnnnnnnnnnnnnnnnnnnnnnnnnnnnnnnnnnnnnnnnnnnnnnnnnnnnnnnnnnnnnnnnnnnnnnnnnnnnnnnnnnnnnncaaagcagagactccacacagagccaaggaagaatgccggcatggtggggtctctgctcccacagcaggggccacttcgcctcctagtgcgatccctgaggaagcctgtggaggagcacccctggggggtctgcctggtgaggccctggcctgccctgtgggtatgggcacccccgtgccagcagatgacactcaggcccttccctgtgcacacacttcttgtcctgagagcacagccccgaccagccacctggtgactggcagggccatgaccctgagtcctcaggaagaagcagctgtggaccaaatggccagctcctcgaggagcggacccataaaactagaatttgatttatctgatggcgccaccagcaaaagggcagccccaccaaggagactgggagagagatctggcctcaagcctcccttgaggagagcagcagcgaggcagcaaaaggccctgcgggaggtggaggaggnnnnnnnnnnnnnnnnnnnnnnnnnnnnnnnnnnatgccggcttctcggggctcttaccacctcgactgggacaaactggatgacccaaacttcaacccattcagaggtgacaccctgtctggtcacagagaggcccagcccccagaaagccctgagaccaggctgggccggccagcgtctgaacagctttttgatgggcctgccacggaggagccaggcacgtgtctgagccannnnnnnnnnnnnnnnnnnnnnnnnnnnnnnnnnnnnnnnnnnnnnnnnnnnnnnnnnnnnnnnnnnnnnnnnnnnnnnnnnnnnnnnnnnnnnnnnnnnnnnnnnnnnnnnnnnnnnnnnnnnnnnnnnnnnnnnnnnnnnnnnnnnnnnnnnnnnnnnnnnnnnnnnnnnnnnnnnnnnnnnnnnnnnnnnnnnnnnnnnnnnnnnnnnnnnnnnnnnnnnnnnnnnnnnnnnnnnnnnnnnnnnnnnnnnnnnngtttaaggagtcggccttgaggaagcagtccttgtacctcaagttcgaccccctgctgagggacagtcctcgtagaccagtgcccgtggccgtggagaccagcannnnnnnnnnnnnnnnnnnnnnnnnnnnnnnnnnnnnnnnnnnnnnnnnnnnnnnnnnnnnnnnnnnnnnnnnnnnnnnnnnnnnnnnnnnnnnnnnnnnnnnnnnnnnnnnnnnnnnnnnnnnnnnnnnnnnnnnnnnnnnnnnnnnnnnnnnnnnnnnnnnnnnnnnnnnnnnnnnnnnnnnnnnnnnnnnnnnnnnnnnnnnnnnnnnnnnnnnnnnnnnnnnnnnnnnnnnnnnnnnnnnnnnnnnnnnnnnnnnnnnnnnnnnnnnnnnnnnnnnnnnnnnnnnnnnnnnnnnnnnnnnnnnnnnnnnnnnnnnnnnnnnnnnnnnnnnnnnnnnnnnnnnnnnnnnnnnnnnnnnnnnnnnnnnnnnnnnnnnnnnnnnnnnnnnnnnnnnnnnnnnnnnnnnnnnnnnnnnnnnnnnnnnnnnnnnnnnnnnnnnnnnnnnnnnnnnnnnnnnnnnnnnnnnnnnnnnnnnnnnnnnnnnnnnnnnnnnnnnnnnnnnnnnnnnnnnnnnnnnnnnnnnnnnnnnnnnnnnnnnnnnnnnnnnnnnnnnnnnnnnnnnnnnnnnnnnnnnnnnnnggcaaacgaggagatcgcccaagtccggagcaaggcccaggcggaagtgttggccctccaggccagcttgaggaaggagcagatgcggatccagtcgctggagaagacagtggagcagaa

SEQ ID NO: 32838 - DNA, 387 bp, Macaca Mulatta
  misc_feature (1)...(387): n = A,T,C or G
tcagtgtccttcagtgatgtggctttgggcttcacccaggaggagtggcagcatctggaccctgcccagaggaccctgtacagagatgtgatgctggagaactacaacctcctcctctncttcatttatcatcagagaactcatactggagaaaggccctatgaatgtaatgactgtgggaagtctttctcagtgaagtcaaaacttattgtgcatcagagaactcatacacgggaaaaaccctatgaatgtaatgaatgtgggaaaatcttttttccagaagtcgtcttttatagtacatcagagaacacacacaggggagaaaccatataaatgtaatgcatgtgggaaaagtttttcccagaagtcatcccttactgtacatca

SEQ ID NO: 32839 - DNA, 784 bp, Macaca Mulatta
gcaaggggaaatggggcccatgtgtttgaccattggggtacttaataaagccttgaatcttaattgataaaggaaaaggaaggggtttttgtcccaaaacagttccaggttaataaattttcctctcccattgcttcaccttaaggggttaataatttagagaggagggagaacccacattgatggccagaaacctactggtacttaatagcatttgcccctccccacagattaggtttttttgtcatcctcagatcccacagacattgctaagaaggtacttcctatacccaggtataactcaaaatccaaagggatagggccaggatccctattcctaccccgtctattctctattggctccaagagctaccccagagaccttaaacagaaacagtagctggggcttcttcccagatacctgactagggaaggttctctctcctttcttgcccaaccaggtcaaagtaaaatgtgagttgacagctcaaagcacttgtaactgctgccccctccctacctctactccccaaaatggaatcatgggatagggaaggcccccatggggtcagaagggcacagtagttcttgcaattatttttgttttacccttcataacctgtcggacatatttttttctaatgagaaagccaggcccccaccagcacacatgctgtttttaatgcgctgtagttcttgtgtgtctgctgtgctgtgcaaatggagattcagttcaaagtaaaatcatttaaaaacctacataaaaagaactctaaacccaccc

SEQ ID NO: 32840 - DNA, 383 bp, Macaca Mulatta
tacatctatgcattgacagatggtattcctaaatctctctcattgtaggtacgtcattttacagccaacggttgtcatttcaaattttaggcagcacaaggctgccaactattccagaggaagctgctgccagctgttttgtattgataaaaatcttggggaacaaagacagatttcggtatcattgataaatcagctagcctctttttaaaagaatgtttctgggaatcagatgtctaggaaaggattccactgaggagtgatacacatgtacatcgtttaagagcatattctagtgtgactaggccattaaagggaaggatattcatgaaagaatataggcaacctgttatttagaaaaccttcacttctgtaaggtgctt

SEQ ID NO: 32841 - DNA, 135 bp, Macaca Mulatta
cacatcgccttccacctgaacccccggttttgatgagaacgctgtggtccgcaacacccagatcaacaactgttgggggtctgaggagcgaagtctgccccgaaaaatgcccttcgtccgaggccagagcttctc

SEQ ID NO: 32842 - DNA, 183 bp, Macaca Mulatta
aggtgaaacctttgtcctggggaatagtctggcccggtccttggaaccacactcagactcaatggactctgcctcgaatcccaccaactttgtcagcacctcccaaaggcaccggcccttgcttccatcctgtggcctcccaccaagcactgcctcagctgtgcgcaggctatgctccagggg

SEQ ID NO: 32843 - DNA, 273 bp, Macaca Mulatta
taaaggcacgctttccttaatgcctgaattcaaagcgcgggagagagcattgttggaggcattgcatcgctttggcatgaccgaggaaggttgtatccaggcatggttctctttaccccattccatgcgcatattctatgttcacgcatataccagcaaaatttggaatgaggcagtatcttacagacttgcaacctatggagcaagagtagtggagggtgatttggtctgtttggatgaagatattgatgacgagaatttcccaaatagtaa

SEQ ID NO: 32844 - DNA, 256 bp, Macaca Mulatta
ctcccggtgtgatcgcgtccttccctggctgactggaagcctctggttgtctgccgtttcctcctgttggactgcccgagagaggggaagagagggacctcggacctgcatgtcaagatggattttccccttttatctctgtcctcctccactccctttttgtaactccctgacagcccccgaacccttcttgaaatgagagccagcaagctgagcacagaccagcagcgacctaccttccagcccccagaaagct

SEQ ID NO: 32845 - DNA, 1057 bp, Macaca Mulatta
  misc_feature (1)...(1057): n = A,T,C or G
aggatacagatgattcagttgatgctcaaaatatttgccatgtgtggcacatgaatatagaagcccttccagaatggataaactgcctgatccaaaaannnnnnnnnnnnnnnnnnnnnnnnnnnnnnnnnnnnnnnnnnnnnnnnnnnnnnnnnnnnnnnnnnnnnnnnnnnnnnnnnnnnnnnnnnnnnnnnnnnnnnnnnnnnnnnnnnnnnnnnnnnnnnnnnnnnnnnnnnnnnnnnnnnnnnnnnnnnnnnnnnnnnnnnnnnnnnnnnnnnnnnnnnnnnnnnnnnnnnnnnnnnnnnnnnnnnnnnnnnnnnnnnnnnnnnnnnnnnnnnnnnnnnnnnnnnnnnnnnnnnnnnnnnnnnnnnnnnnnnnnnnnnnnnnnnnnnnnnnnnnnnnnnnnnnnnnnnnnnnnnnnnnnnnnnnnnnnnnnnnnnnnnnnnnnnnnnnnnnnnnnnnnnnnnnnnnnnnnnnnnnnnnnnnnnnnnnnnnnnnnnnnnnnnnnnnnnnnnnnnnnnnnnnnnnnnnnnnnnnnnnnnnnnnnnnnnnnnnnnnnnnnnnnnnnnnnnnnnnnnnnnnnnnnnnnnnnnnnnnnnnnnnnnnnnnnnnnnnnnnnnnnnnnnnnnnnccagactaaatgaaacgcagccttttcacctttcaggcttgcctttacaatctagtaaaaatagctgttcctttcagaatccatccagttttgatcctagtatgctgctgcaaagattttcagtggccccccatgagacccagacacaaagaggaggagaatttcattgtggtctagaagcttcttcagtgtactctgaccatactaatactaacaatctgactttcctgatggacctgccctcagctggcaggagcatgctggaggcctcagaccaggaagagcacctctcccctctggacttcctgcactcagccagtttttcattgggcagcattaatcagaggctcaataagagagaaaggagcaagttgaagaatctaagaaggaaacaacgaaggcgtgaaagatggctacagaaacagg

SEQ ID NO: 32846 - DNA, 922 bp, Macaca Mulatta
  misc_feature (1)...(922): n = A,T,C or G
ggggtaccagctcctttctgccctgcagacaagcgtgccgtgcgtgcttgtggccaagggaaggaagaggtcccagggtctgtgttcacacacatctgggggaaagaaaaagagcaggaaactaccccgcacagagttaagcaggaaacaacaacaacatcatgcaaaaaccctgcaaagaaaacgaaggaaagccaaagtgcagcgtgccaaagagggaggaagaacgcccctatggagaatttgaacgccagcaaacagaagggaattttagacagaggctgcttcagtctctcgaagaatttaaagaggacatagactataggcattttaaagatgaagaaatgacaagggagggagatgagatggaaaggtgtttggaagagataaggggtctgagaaagaaaatttagggctctgcattctaaccacaggcattctcgggaccgtccttatcccatttaattaatttcccctgaacaattcaattatttttctgttattaaatgttgccccctttctgttttgtctggcattttccttgataaaaaatatttggctatccattttactcccacgtccttttgatggttgcttgagaatttaccatatggactccttgttcaaacattttcaatctttttggaccccaatccttgatttcatttttaataaggaagttctccatttcattttgagagcggaaaaaatggcccacttgcgatatttgccacacgtggaaaaaataaccaacgtttgccaaaacccggcggcatacacacaaatttgcgcgtggtacgattattggacacacctctctcaattttgcgaacattttgtcccaacgctccacacccttttcttgcgcccaccagggtatacaattgcgctcccgcacatntttttcgttatatgagagcct

SEQ ID NO: 32847 - DNA, 2803 bp, Macaca Mulatta
  misc_feature (1)...(2803): n = A,T,C or G
attccacgcagaacttggaagagagagaagttatgaatggtgtacagacagaactaacatcaccaaaaactaaggacacattgagnnnnnnnnnnnnnnnnnnnnnnnnnnnnnnnnnnnnnnnnnnnnnnnnnnnnnnnnnnnnnnnnnnnnnnnnnnnnnnnnnnnnnnnnnnnnnnnnnnnnnnnnnnnnnnnnnnnnnnnnnnnnnnnnnnnnnnnnnnnnnnnnnnnnnnnnnnnnnnnnnnnnnnnnnnnnnnnnnnnnnnnnnnnnnnnnnnnnnnnnnnnnnnnnnnnnnnnnnnnnnnnnnnnnnnnnnnnnnnnnnnnnnnnnnnnnnnnnnnnnnnnnnnnnnnnnnnnnnnnnnnnnnnnnnnnnnnnnnnnnnnnnnnnnnnnnnnnnnnnnnnnnnnnnnnnnnnnnnnnnnnnnnnnnnnnnnnnnnnnnnnnnnnnnnnnnnnnnnnnnnnnnnnnnnnnnnnnnnnnnnnnnnnnnnnnnnnnnnnnnnnnnnnnnnnnnnnnnnnnnnnnnnnnnnnnnnnnnnnnnnnnnnnnnnnnnnnnnnnnnnnnnnnnnnnnnnnnnnnnnnnnnnnnnnnnnnnnnnnnnnnnnnnnnnnnnnnnnnnnnnnnnnnnnnnnnnnnnnnnnnnnnnnnnnnggccctgaaggacttggtttcactgtggttaccagagactcttccatacatggtcctggtcccatttttgtaaaaaacattttaccaaagggagcagcaataaaagatggccgcctacaatcaggggacagaattttggaggtaannnnnnnnnnnnnnnnnnnnnnnnnnnnnnnnnnnnnnnnnnnnnnnnnnnnnnnnnnnnnnnnnnnnnnnnnnnnnnnnnnnnnnnnnnnnnnnnnnnnnnnnnnnnnnnnnnnnnnnnnnnnnnnnnnnnnnnnnnnnnnnnnnnnnnnnnnnnnnnnnnnnnnnnnnnnnnnnnnnnnnnnnnnnnnnnnnnnnnnnnnnnnnnnnnnnnnnnnnnnnnnnnnnnnnnnnnnnnnnnnnnnnnnnnnnnnnnnnnnnnnnnnnnnnnnnnnnnnnnnnnnnnnnnnnnnnnnnnnnnnnnnnnnnnnnnnnnnnnnnnnnnnnnnnnnnnnnnnnnnnnnnnnnnnnnnnnnnnnnnnnnnnnnnnnnnnnnnnnnnnnnnnnnnnnnnnnnnnnnnnnnnnnnnnnnnnnnnnnnnnnnnnnnnnnnnnnnnnnnnnnnnnnnnnnnnnnnnnnnnnnnnnnnnnnnnnnnnnnnnnnnnnnnnnnnnnnnnnnnnnnnnnnnnnnnnnnnnnnnnnnncacagctctggggtggattcagcagtatattttccagatcagcacatcaacttcagatctgtgacaccggccaggcagcctgaatcaattaatttgaaagcctcgaagagcatggaccttgnnnnnnnnnnnnnnnnnnnnnnnnnnnnnnnnnnnnnnnnnnnnnnnnnnnnnnnnnnnnnnnnnnnnnnnnnnnnnnnnnnnnnnnnnnnnnnnnnnnnnnnnnnnnnnnnnnnnnnnnnnnnnnnnnnnnnnnnnnnnnnnnnnnnnnnnnnnnnnnnnnnnnnnnnnnnnnnnnnnnnnnnnnnnnnnnnnnnnnnnnnnnnnnnnnnnnnnnnnnnnnnnnnnnnnnnnnnnnnnnnnnnnnnnnnnnnnnnnnnnnnnnnnnnnnnnnnnnnnnnnnnnnnnnnnnnnnnnnnnnnnnnnnnnnnnnnnnnnnnnnnnnnnnnnnnnnnnnnnnnnnnnnnnnnnnnnnnnnnnnnnnnnnnnnnnnnnnnnnnnnnnnnnnnnnnnnnnnnnnnnnnnnnnnnnnnnnnnnnnnnnnnnnnnnnnnnnnnnnnnnnnnnnnnnnnnnnnnnnnnnnnnnnnnnnnnnnnnnnnnnnnnnnnnnnnnnnnnnnnnnnnnnnnnnnnnnnnnnnnnnnnnnnnnnnnnnnnnnnnnnnnnnnnnnnnnnnnnnnnnnnnnnnnnnnnnnnnnnnnnnnnnnnnnnnnnnnnnnnnnnnnnnnnnnnnnnnnnnnnnnnnnnnnnnnnnnnnnnnnnnnnnnnnnnnnnnnnnnnnnnnnnnnnnnnnnnnnnnnnnnnnnnnnnnnnnnnnnnnnnnnnnnnnnnnnnnnnnnnnnnnnnnnnnnnnnnnnnnnnnnnnnnnnnnnnnnnnnnnnnnnnnnnnnnnnnnnnnnnnnnnnnnnnnnnnnnnnnnnnnnnnnnnnnnnnnnnnnnnnnnnnnnnnnnnnnnnnnnnnnnnnnnnnnnnnnnnnnnnnnnnnnnnnnnnnnnnnnnnnnnnnnnnnnnnnnnnnnnnnnnnnnnnnnnnnnnnnnnnnnnnnnnnnnnnnnnnnnnnnnnnnnnnnnnnnnnnnnnnnnnnnnnnnnnnnnnnnnnnnnnnnnnnnnnnnnnnnnnnnnnnnnnnnnnnnnnnnnnnnnnnnnnnnnnnnnnnnnnnnnnnnnnnnnnnnnnnnnnnnnnnnnnnnnnnnnnnnnnnnnnnnnnnnnnnnnnnnnnnnnnnnnnnnnnnnnnnnncaggggaggacccgcagatgctgtagactatctgccagcagcacctcgagggctctacaaggaaagggagcttccctattatccaggggctcatcctatgcaccctcccaaagggagctatccccgccccacagagctgagggtggcagatctccggtatcctcagcactacccacctccgcctgcttcccagcacaaaggaccctttcgacaagacgtcccgccttcccctccccagcacca

SEQ ID NO: 32848 - DNA, 669 bp, Macaca Mulatta
tctcaattaaccactcgtcaattgctgattctaccgggctgcagcctcggacctcatttcaggcaccagattggtcactacaccctggacaagtgactgaccctctctgagccttgatttcctcagctgccaaatgggaagaatagacgaattcacccctaaacccctcctgtgcgctggccctgtgctagacagtgctggagatatagttgggggtggagaactgcccttatggagcttgcagtccagtgaggtggacagacctgtcccagacagtgatggcccaaaatgggcaggactttaatggaggaggtgaggtgataaaagcacaggcagagtggtcagggctgaagtcggagaagcacagggactaggcccaatccagcctagaaggtcagggaggacttcctggaggaagggacattgaactaagacctgaactatgagaaataggtgggaagaagttgtacctgactcatttttctcaggtgtctccagggagcaggacccatggagggagccctggtgtaggcctaggcggtagactcttcctcagcagcctggcaggcaggaaatggacataggacccaagcccagatctgaatggcatggaggtgctgcccgtaaccctgacaccattgtaagagctgtccccatttgtatgttgtg

SEQ ID NO: 32849 - DNA, 543 bp, Macaca Mulatta
gtccagcattctgctctgttctttatctttagatttaaaaataatgtttctttgaacttattaaaattctagaatactatgactctattgagtcttttcacatccttttgctactagtagaaaaaagaatagtaataattttcagaggctactgtccagtttgtgacataaattttctcccatgtttctctgctcatgcaattactatgatgtcttttattttaatttcagcaccacctgagaaaagccctgtggtccaggattgctaccatggtgatggacagagttatcgaggcacatcctccaccactgtcacaggaaggaactgtcagtcttggtcatctatgataccacactggcatcagaggaccccagaaaactacccaaatgcgtatgtatttgattaaaaccataagaggagcaacagccaactcaattattggttagaagagccatgctttaggttcacttcctagggacaaatttctcttagattcacattttggcaaaatgtctcaggacctttgcttttgagcaaagagc

SEQ ID NO: 32850 - DNA, 286 bp, Macaca Mulatta
  misc_feature (1)...(286): n = A,T,C or G
aggttttacacatccataagtagacctttttggagcctcaccagccaattcaatggcgtcctcttctactgtgcctctgggatttcactatgaaacaaagtatgttgttctcagctacttgggactcctctctcaagagaagctgcaagagcaacatctttcctcaccccaagnnggggttcaactagatatagcttcacaatctctggatcaagaaattttattaaaagttaaaactgaaattgaagaagagctaaaatctctggacaaagaaatttctgaaggn

SEQ ID NO: 32851 - DNA, 512 bp, Macaca Mulatta
ggcatgctggtggcagaggcctttgaacacactccaggcatccaaatggctagcctgggcacatacctaaagaccaatctcttcctcttcctgtttgcacttggtttttacctgcttcttagactgctcaacattgacctactgtggtccgtgcccatagccaaaaagtggtgtgccaaccccgactggatccacgttgacaccacgccttttgctggactcgtgagaaacctcggggtcctcttcggcttgggctttgcagtcaactcggagatgttcctcctgagctgccgaggtggatatagctacacactgagcttccggttgctctgtgccttgacctcattgaccacattgcacctctaccatttcctccagatcccgactcaggaagagcatttattttatgtgctgtctttttgtaaaagtgcatccattcccctaactttggttactttcattccctactatgttcatatgttaatgaaacaaaacggaaagaagattcagta

SEQ ID NO: 32852 - DNA, 669 bp, Macaca Mulatta
  misc_feature (1)...(669): n = A,T,C or G
ggactctgaagcccaaggaaccacgggccctggcagagctgagggcgggggagacccccgggaaggtctcaggcagctttgcggggagtgtccacatcaccctgacccccgtgagacctgagaggacgccgcgcccagccagcccaggacccagcctcccagnnnnnnnnnnnnnnnnnnnnnnnnnnnnnnnnnnnnnnnnnnnnnnnnnnnnnnnnnnnnnnnnnnnnnnnnnnnnnnnnnnnnnnnnnnnnnnnnnnnnnnnnnnnnnnnnnnnnnnnnnnnnnnnnnnnnnnnnnnnnnnnnnnnnnnnnnnnnnnnnnnnnnnnnnnnnnnnnnnnnnnnnnnnnnnnnnnnnnnnnnnnnnnnnnnnnnnnnnnnnnnnnnnnnnnnnnnnnnnnnnnnnnnnnnnnnnnnnnnnnnnnnnnnnnnnnnnnnnnnnnnnnnnnnnnnnnnnnnnnnnnnnnnnnnnnnnnnnnnnnnnnnnnnnnnnnnnnnnnnnnnnnnnnnnnnnnnnnnnnnnnnnnnnnnnnnnnnnnnnnnnnnnnnnnnnnnnnnnnnnnnnnnnnnnnnnnnnnnnnnnnnnnnnnnnnnnnnngtccaaggaccagcgtctggaggagcagcagctggacatcgagggcgaactgcgccggctcatggccaagc

SEQ ID NO: 32853 - DNA, 2189 bp, Macaca Mulatta
  misc_feature (1)...(2189): n = A,T,C or G
aacaattgtgttaaatgaactcaactggacaagtgccttagatgaagttttcaaaaaaaatcgagaggaagacccttcactgttgtggcaggtttttggcagtgccactggcctggctcgatattatccagnagcttcaccatgggttgacaatagtagaactccaaacaagattgacctttatgatgtacgcagaagaccatggtanggtacatccaaggagctgcatctcctaaagacatgcttattcttgtggatgtgnnnnnnnnnnnnnnnnnnnnnnnnnnnnnnnnnnnnnnnnnnnnnnnnnnnnnnnnnnnnnnnnnnnnnnnnnnnnnnnnnnnnnnnnnnnnnnnnnnnnnnnnnnnnnnnnnnnnnnnnnnnnnnnnnnnnnnnnnnnnnnnnnnnnnnnnnnnnnnnnnnnnnnnnnnnnnnnnnnnnnnnnnnnnnnnnnnnnnnnnnnnnnnnnnnnnnnnnnnnnnnnnnnnnnnnnnnnnnnnnnnnnnnnnnnnnnnnnnnnnnnnnnnnnnnnnnnnnnnnnnnnnnnnnnnnnnnnnnnnnnnnnnnnnnnnnnnnnnnnnnnnnnnnnnnnnnnnnnnnnnnnnnnnnnnnnnnnnnnnnnnnnnnnnnnnnnnnnnnnnnnnnnnnnnnnnnnnnnnnnnnnnnnnnnnnnnnnnnnnnnnnnnnnnnnnnnnnnnnnnnnnnnnnnnnnnnnnnnnnnnnnnnnnnnnnnnnnnnnnnnnnnnnnnnnnnnnnnnnnnnnnnnnnnnnnnnnnnnnnnnnnnnnnnnnnnnnnnnnnnnnnnnnnnnnnnnnnnnnnnnnnnnnnnnnnnnnnnnnnnnnnnnnnnnnnnnnnnnnnnnnnnnnnnnnnnnnnnnnnnnnnnnnnnnnnnnnnnnnnnnnnnnnnnnnnnnnnnnnnnnnnnnnnnnnnnnnnnnnnnnnnnnnnnnnnnnnnnnnnnnnnnnnnnnnnnnnnnnnnnnnnnnnnnnnnnnnnnnnnnnnnnnnnnnnnnnnnnnnnnnnnnnnnnnnnnnnnnnnnnnnnnnnnnnnnnnnnnnnnnnnnnnnnnnnnnnnnnnnnnnnnnnnnnnnnnnnnnnnnnnnnnnnnnnnnnnnnnnnnnnnnnnnnnnnnnnnnnnnnnnnnnnnnnnnnnnnnnnnnnnnnnnnnnnnnnnnnnnnnnnnnnnnnnnnnnnnnnnnnnnnnnnnnnnnnnnnnnnnnnnnnnnnnnnnnnnnnnnnnnnnnnnnnnnnnnnnnnnnnnnnnnnnnnnnnnnnnnnnnnnnnnnnnnnnnnnnnnnnnnnnnnnnnnnnnnnnnnnnnnnnnnnnnnnnnnnnnnnnnnnnnnnnnnnnnnnnnnnnnnnnnnnnnnnnnnnnnnnnnnnnnnnnnnnnnnnnnnnnnnnnnnnnnnnnnnnnnnnnnnnnnnnnnnnnnnnnnnnnnnnnnnnnnnnnnnnnnnnnnnnnnnnnnnnnnnnnnnnnnnnnnnnnnnnnnnnnnnnnnnnnnnnnnnnnnnnnnnnnnnnatttgattaatagagtcttgcttgatgcaggctttacaaatgaacttgtccaaaattactggagtaagcagaaaaatatncaagggagtgaaagcacgatttgttgtgactgatggtgggattaccagagtttatcccaaagagnnnnnnnnnnnnnnnnnnnnnnnnnnnnnnnnnnnnnnnnnnnnnnnnnnnnnnnnnnnnnnnnnnnnnnnnnnnnnnnnnnnnnnnnnnnnnnnnnnnnnnnnnnnnnnnnnnnnnnnnnnnnnnnnnnnnnnnnnnnnnnnnnnnnnnnnnnnnnnnnnnnnnnnnnnnnnnnnnnnnnnnnnnnnnnnnnnnnnnnnnnnnnnnnnnnnnnnnnnnnnnnnnnnnnnnnnnnnnnnnnnnnnnnnnnnnnnnnnnnnnnnnnnnnnnnnnnnnnnnnnnnnnnnnnnnnnnnnnnnnnnnnnnnnnnnnnnnnnnnnnnnnnnnnnnnnnnnnnnnnnnnnnnnnnnnnnnnnnnnnnnnnnnnncagattggaagattttttggagagattgatcccagcttgatgagacacctggttaatatatcagtttatgcttttaacaaatcttatgattatcagtcagtatgcgagcctggtgctgcaccaaaacaaggagcaggacatcgctcagcatatgt

SEQ ID NO: 32854 - DNA, 653 bp, Macaca Mulatta
tactccacaagtcctctaatgtgatccacagacacatctaaatcaaagacagatactctggattacctgaaaagaccagttgggtgaaatttaatgtggactcaaatggttactacattgttcactatgagggtcatggatgggaccaactcatcacacagctgaatcagaaccacacacttctcagacctaaggacagaataggtctgattcatgatgtgtttcagctagttggtgcagggagactgaccctagacaaagctcttgacatgactcactacctccaacatgaaacaagcagccccgcacttctcaaaggtctgagttacttggaattgttttaccacatgatggacagaaggaatatttcagatatctctgaaaacctcaagcgttaccttcttcagtattttaagccagtgattgacaggcaaagctggagtgacgagggctcagtctgggacaggatgctccgctcggctctcttgaagctggcctgtgacctgaaccatgctccttgcatccagaaagctgctgaactcttctctcagtggatggaatccagtggaaaattaaatataccaacagatgtctcaaagattgtgtattctgtgggtgctcagacgacaacaggatggcattaccttttagag

SEQ ID NO: 32855 - DNA, 1378 bp, Macaca Mulatta
  misc_feature (1)...(1378): n = A,T,C or G
atgctttaaggaagttatcattgttctgcttttcaagtgctgcagcccctttcggaatctccagatgaatcctcattttaccccttgttatcccagagtttcgaacaggtcgtgctgaccagaatgaacaagagatacctgtagcttgctcacttggcaaagtttgttttcctgctttccttcgatcctgttggcgacagggcgtgtttgtttatggtttcacgctgtccaaaacaaaaaagtagggattagggtgataaaatgatcgnnnnnnnnnnnnnnnnnnnnnnnnnnnnnnnnnnnnnnnnnnnnnnnnnnnnnnnnnnnnnnnnnnnnnnnnnnnnnnnnnnnnnnnnnnnnnnnnnnnnnnnnnnnnnnnnnnnnnnnnnnnnnnnnnnnnnnnnnnnnnnnnnnnnnnnnnnnnnnnnnnnnnnnnnnnnnnnnnnnnnnnnnnnnnnnnnnnnnnnnnnnnnnnnnnnnnnnnnnnnnnnnnnnnnnnnnnnnnnnnnnnnnnnnnnnnnnnnnnnnnnnnnnnnnnnnnnnnnnnnnnnnnnnnnnnnnnnnnnnnnnnnnnnnnnnnnnnnnnnnnnnnnnnnnnnnnnnnnnnnnnnnnnnnnnnnnnnnnnnnnnnnnnnnnnnnnnnnnnnnnnnnnnnnnnnnnnnnnnnnnnnnnnnnnnnnnnnnnnnnnnnnnnnnnnnnnnnnnnnnnnnnnnnnnnnnnnnnnnnnnnnnnnnnnnnnnnnnnnnnnnnnnnnnnnnnnnnnnnnnnnnnnnnnnnnnnnnnnnnnnnnnnnnnnnnnnnnnnnnnnnnnnnnnnnnnnnnnnnnnnnnnnnnnnnnnnnnnnnnnnnnnnnnnnnnnnnnnnnnnnnnnnnnnnnnnnnnnnnnnnnnnnnnnnnnnnnnnnnnnnnnnnnnnnnnnnnnnnnnnnnnnnnnnnnnnnnnnnnnnnnnnnnnnnnnnnnnnnnnnnnnnnnnnnnnnnnnnnnnnnnnnnnnnnnnnnnnnnnnnnnnnnnnnnnnnnnnnnnnnnnnnnnnnnnnnnnnnnnnnnnnnnnnnnnnnnnnnnnnnnnnnnnnnnnnnnnnnnnnnnnnnnnnnnnnnnnnnnnnnnnnnnnnnnnnnnnnnnnnnnnnnnnnnnnnnnnnnnnnnnnnnnnnnnnnnnnnnnnnnnnnnnnnnnnnnnnnnnnnnnnnnnnnnnnnnnnnnnnggttatatcaatcagtgaaaattctgtattcctttggcatttttgtgacatattcaattcagttctatgttccagcagagatcattatccctgggatcacatccaaatttcatactaaatggaagcaaatctgtgaatttgggataagatccttcttggttagtattacttg

SEQ ID NO: 32856 - DNA, 104 bp, Macaca Mulatta
ggtataattcccaatctaatttatgttgttataccaacaatacccctgctgttactgatactggttgcttttggaacctgttgtttccagatgctgcataaaag

SEQ ID NO: 32857 - DNA, 781 bp, Macaca Mulatta
ggggtttgtttttaagtttctcctttcccccaaccagcctcagaagaggcaccttcagaaacacacatttcttaaaaggaaagtgcagcttcaagatattgtgtaaatactgagccaagacatttctggagctgtgctctgtctccaaaaacctcactgcctttagggcttttctcagtggtccagctagcctcctctttggaggaggacgaagccgcattgctcattctctgcttcctgtcgtagcctctgttgtcagtggaaatgcagaagctcatctggtgcccgtcggtgagaagccacgttctgcgctctctccgttagacctccatgctgtccccagtcttgtacgttccgtgctgctatgttacaaactctcagaggtagtttgcaggggaggaaggggaatatgaattttaaaacaaaatatttgcaacaacaaaaattcttaggatcagctgacctttgtaatgttatttatgttggggagggaggggggctgagaaggggaaatcagcagtgtgcaacatctttctcatttgtactttaattaccaatcacaaggaaaccaataagttgaaatcctatataacaggtttatatatatagaatatgtataatttgaagcccctctacagactggagtctatgttttactaaattctttgtttactgtggttaccccatcttgggaattaagggggagtgtaaacttccctttttctgaggcctccccaactttgcctcctcaaggagaattaatgagcccaaggtttgaatt

SEQ ID NO: 32858 - DNA, 17334 bp, Macaca Mulatta
  misc_feature (1)...(17334): n = A,T,C or G
caacttgagccccagttggaggcccccctaaatgaggagattccactgctgcccccacctgatgcgtcacccctgtccccaccacctgaggaatcacccacatccccaccgcctgaggcatcacgcctgtccccaccacctgaggactcgcccgcatccccgcttcctgaggcattgcacctgtcccggccgccggaggaatcgcccctctctccgccgcctgaggagtctcctctgtctcccccacctgaatcatcacctttttctccactggaggagtcgcccttctctccactggaagagtcacccccgtctcctgcacttgagacgcctctatccccaccacctgaagcatcgcccctgtccgcaccatttgaggaatctcccttgtccccgccacctgaggaactgcccacttccccaccacctgaagcatctcgcctgtctccaccgcctgaggagtcacccatgtcccctccacctgaagagtcacccatgtctccaccaccagaggcatctcgtctgttcccaccatttgaagagtctcctctgtcccctcccacctgaagagtctcccctctcccacccacctgatgcatcatgcctgtccccaccccctgaagactcgcctatgtcccccccaccctgaagaatcacctatgtccctcctacttgaggtatcgcgcctggcctccgctgcctgtggtgtcacgcctgtctccaccgcctgaggaaannnnnnnnnnnnnnnnnnnnnnnnnnnnnnnnnnnnnnnnnnnnnnnnnnnnnnnnnnnnnnnnnnnnnnnnnnnnnnnnnnnnnnnnnnnnnnnnnnnnnnnnnnnnnnnnnnnnnnnnnnnnnnnnnnnnnnnnnnnnnnnnnnnnnnnnnnnnnnnnnnnnnnnnnnnnnnnnnnnnnnnnnnnnnnnnnnnnnnnnnnnnnnnnnnnnnnnnnnnnnnnnnnnnnnnnnnnnnnnnnnnnnnnnnnnnnnnnnnnnnnnnnnnnnnnnnnnnnnnnnnnnnnnnnnnnnnnnnnnnnnnnnnnnnnnnnnnnnnnnnnnnnnnnnnnnnnnnnnnnnnnnnnnnnnnnnnnnnnnnnnnnnnnnnnnnnnnnnnnnnnnnnnnnnnnnnnnnnnnnnnnnnnnnnnnnnnnnnnnnnnnnnnnnnnnnnnnnnnnnnnnnnnnnnnnnnnnnnnnnnnnnnnnnnnnnnnnnnnnnnnnnnnnnnnnnnnnnnnnnnnnnnnnnnnnnnnnnnnnnnnnnnnnnnnnnnnnnnnnnnnnnnnnnnnnnnnnnnnnnnnnnnnnnnnnnnnnnnnnnnnnnnnnnnnnnnnnnnnnnnnnnnnnnnnnnnnnnnnnnnnnnnnnnnnnnnnnnnnnnnnnnnnnnnnnnnnnnnnnnnnnnnnnnnnnnnnnnnnnnnnnnnnnnnnnnnnnnnnnnnnnnnnnnnnnnnnnnnnnnnnnnnnnnnnnnnnnnnnnnnnnnnnnnnnnnnnnnnnnnnnnnnnnnnnnnnnnnnnnnnnnnnnnnnnnnnnnnnnnnnnnnnnnnnnnnnnnnnnnnnnnnnnnnnnnnnnnnnnnnnnnnnnnnnnnnnnnnnnnnnnnnnnnnnnnnnnnnnnnnnnnnnnnnnnnnnnnnnnnnnnnnnnnnnnnnnnnnnngatgttagtccagcccgagatgagggctccctacggctctgtaccgactcactgccagagactgatgattcactattgtgcgatgctgggacagctatcagcggaggcaaaactgagggggagaaggggcggcggcgcagctccccagcccgttcccgcataaaacagnnnnnnnnnnnnnnnnnnnnnnnnnnnnnnnnnnnnnnnnnnnnnnnnnnnnnnnnnnnnnnnnnnnnnnnnnnnnnnnnnnnnnnnnnnnnnnnnnnnnnnnnnnnnnnnnnnnnnnnnnnnnnnnnnnnnnnnnnnnnnnnnnnnnnnnnnnnnnnnnnnnnnnnnnnnnnnnnnnnnnnnnnnnnnnnnnnnnnnnnnnnnnnnnnnnnnnnnnnnnncaggacatgtgtgtggtatgtggcagctttggccggggagcagaggggcacctcccttgcctgttcacagtgctctcagtgctatcacccttactgtgtcaacagcaannnnnnnnnnnnnnnnnnnnnnnnnnnnnnnnnnnnnnnnnnnnnnnnnnnnnnnnnnnnnnnnnnnnnnnnnnnnnnnnnnnnnnnnnnnnnnnnnnnnnnnnnnnnnnnnnnnnnnnnnnnnnnnnnnnnnnnnnnnnnnnnnnnnnnnnnnnnnnnnnnnnnnnnnnnnnnnnnnnnnnnnnnnnnnnnnnnnnnnnnnnnnnnnnnnnnnnnnnnnnnnnnnnnnnnnnnnnnnnnnnnnnnnnnnnnnnnnnnnnnnnnnnnnnnnnnnnnnnnnnnnnnnnnnnnnnnnnnnnnnnnnnnnnnnnnnnnnnnnnnnnnnnnnnnnnnnnnnnnnnnnnnnnnnnnnnnnnnnnnnnnnnnnnnnnnnnnnnnnnnnnnnnnnnnnnnnnnnnnnnnnnnnnnnnnnnnnnnnnnnnnnnnnnnnnnnnnnnnnnnnnnnnnnnnnnnnnnnnnnnnnnnnnnnnnnnnnnnnnnnnnnnnnnnnnnnnnnnnnnnnnnnnnnnnnnnnnnnnnnnnnnnnnnnnnnnnnnnnnnnnnnnnnnnnnnnnnnnnnnnnnnnnnnnnnnnnnnnnnnnnnnnnnnnnnnnnnnnnnnnnnnnnnnnnnnnnnnnnnnnnnnnnnnnnnnnnnnnnnnnnnnnnnnnnnnnnnnnnnnnnnnnnnnnnnnnnnnnnnnnnnnnnnnnnnnnnnnnnnnnnnnnnnnnnnnnnnnnnnnnnnnnnnnnnnnnnnnnnnnnnnnnnnnnnnnnnnnnnnnnnnnnnnnnnnnnnnnnnnnnnnnnnnnnnnnnnnnnnnnnnnnnnnnnnnnnnnnnnnnnnnnnnnnnnnnnnnnnnnnnnnnnnnnnnnnnnnnnnnnnnnnnnnnnnnnnnnnnnnnnnnnnnnnnnnnnnnnnnnnnnnnnnnnnnnnnnnnnnnnnnnnnnnnnnnnnnnnnnnnnnnnnnnnnnnnnnnnnnnnnnnnnnnnnnnnnnnnnnnnnnnnnnnnnnnnnnnnnnnnnnnnnnnnnnnnnnnnnnnnnnnnnnnnnnnnnnnnnnnnnnnnnnnnnnnnnnnnnnnnnnnnnnnnnnnnnnnnnnnnnnnnnnnnnnnnnnnnnnnnnnnnnnnnnnnnnnnnnnnnnnnnnnnnnnnnnnnnnnnnnnnnnnnnnnnnnnnnnnnnnnnnnnnnnnnnnnnnnnnnnnnnnnnnnnnnnnnnnnnnnnnnnnnnnnnnnnnnnnnnnnnnnnnnnnnnnnnnnnnnnnnnnnnnnnnnnnnnnnnnnnnnnnnnnnnnnnnnnnnnnnnnnnnnnnnnnnnnnnnnnnnnnnnnnnnnnnnnnnnnnnnnnnnnnnnnnnnnnnnnnnnnnnnnnnnnnnnnnnnnnnnnnnnnnnnnnnnnnnnnnnnnnnnnnnnnnnnnnnnnnnnnnnnnnnnnnnnnnnnnnnnnnnnnnnnnnnnnnnnnnnnnnnnnnnnnnnnnnnnnnnnnnnnnnnnnnnnnnnnnnnnnnnnnnnnnnnnnnnnnnnnnnnnnnnnnnnnnnnnnnnnnnnnnnnnnnnnnnnnnnnnnnnnnnnnnnnnnnnnnnnnnnnnnnnnnnnnnnnnnnnnnnnnnnnnnnnnnnnnnnnnnnnnnnnnnnnnnnnnnnnnnnnnnnnnnnnnnnnnnnnnnnnnnnnnnnnnnnnnnnnnnnnnnnnnnnnnnnnnnnnnnnnnnnnnnnnnnnnnnnnnnnnnnnnnnnnnnnnnnnnnnnnnnnnnnnnnnnnnnnnnnnnnnnnnnnnnnnnnnnnnnnnnnnnnnnnnnnnnnnnnnnnnnnnnnnnnnnnnnnnnnnnnnnnnnnnnnnnnnnnnnnnnnnnnnnnnnnnnnnnnnnnnnnnnnnnnnnnnnnnnnnnnnnnnnnnnnnnnnnnnnnnnnnnnnnnnnnnnnnnnnnnnnnnnnnnnnnnnnnnnnnnnnnnnnnnnnnnnnnnnnnnnnnnnnnnnnnnnnnnnnnnnnnnnnnnnnnnnnnnnnnnnnnnnnnnnnnnnnnnnnnnnnnnnnnnnnnnnnnnnnnnnnnnnnnnnnnnnnnnnnnnnnnnnnnnnnnnnnnnnnnnnnnnnnnnnnnnnnnnnnnnnnnnnnnnnnnnnnnnnnnnnnnnnnnnnnnnnnnnnnnnnnnnnnnnnnnnnnnnnnnnnnnnnnnnnnnnnnnnnnnnnnnnnnnnnnnnnnnnnnnnnnnnnnnnnnnnnnnnnnnnnnnnnnnnnnnnnnnnnnnnnnnnnnnnnnnnnnnnnnnnnnnnnnnnnnnnnnnnnnnnnnnnnnnnnnnnnnnnnnnnnnnnnnnnnnnnnnnnnnnnnnnnnnnnnnnnnnnnnnnnnnnnnnnnnnnnnnnnnnnnnnnnnnnnnnnnnnnnnnnnnnnnnnnnnnnnnnnnnnnnnnnnnnnnnnnnnnnnnnnnnnnnnnnnnnnnnnnnnnnnnnnnnnnnnnnnnnnnnnnnnnnnnnnnnnnnnnnnnnnnnnnnnnnnnnnnnnnnnnnnnnnnnnnnnnnnnnnnnnnnnnnnnnnnnnnnnnnnnnnnnnnnnnnnnnnnnnnnnnnnnnnnnnnnnnnnnnnnnnnnnnnnnnnnnnnnnnnnnnnnnnnnnnnnnnnnnnnnnnnnnnnnnnnnnnnnnnnnnnnnnnnnnnnnnnnnnnnnnnnnnnnnnnnnnnnnnnnnnnnnnnnnnnnnnnnnnnnnnnnnnnnnnnnnnnnnnnnnnnnnnnnnnnnnnnnnnnnnnnnnnnnnnnnnnnnnnnnnnnnnnnnnnnnnnnnnnnnnnnnnnnnnnnnnnnnnnnnnnnnnnnnnnnnnnnnnnnnnnnnnnnnnnnnnnnnnnnnnnnnnnnnnnnnnnnnnnnnnnnnnnnnnnnnnnnnnnnnnnnnnnnnnnnnnnnnnnnnnnnnnnnnnnnnnnnnnnnnnnnnnnnnnnnnnnnnnnnnnnnnnnnnnnnnnnnnnnnnnnnnnnnnnnnnnnnnnnnnnnnnnnnnnnnnnnnnnnnnnnnnnnnnnnnnnnnnnnnnnnnnnnnnnnnnnnnnnnnnnnnnnnnnnnnnnnnnnnnnnnnnnnnnnnnnnnnnnnnnnnnnnnnnnnnnnnnnnnnnnnnnnnnnnnnnnnnnnnnnnnnnnnnnnnnnnnnnnnnnnnnnnnnnnnnnnnnnnnnnnnnnnnnnnnnnnnnnnnnnnnnnnnnnnnnnnnnnnnnnnnnnnnnnnnnnnnnnnnnnnnnnnnnnnnnnnnnnnnnnnnnnnnnnnnnnnnnnnnnnnnnnnnnnnnnnnnnnnnnnnnnnnnnnnnnnnnnnnnnnnnnnnnnnnnnnnnnnnnnnnnnnnnnnnnnnnnnnnnnnnnnnnnnnnnnnnnnnnnnnnnnnnnnnnnnnnnnnnnnnnnnnnnnnnnnnnnnnnnnnnnnnnnnnnnnnnnnnnnnnnnnnnnnnnnnnnnnnnnnnnnnnnnnnnnnnnnnnnnnnnnnnnnnnnnnnnnnnnnnnnnnnnnnnnnnnnnnnnnnnnnnnnnnnnnnnnnnnnnnnnnnnnnnnnnnnnnnnnnnnnnnnnnnnnnnnnnnnnnnnnnnnnnnnnnnnnnnnnnnnnnnnnnnnnnnnnnnnnnnnnnnnnnnnnnnnnnnnnnnnnnnnnnnnnnnnnnnnnnnnnnnnnnnnnnnnnnnnnnnnnnnnnnnnnnnnnnnnnnnnnnnnnnnnnnnnnnnnnnnnnnnnnnnnnnnnnnnnnnnnnnnnnnnnnnnnnnnnnnnnnnnnnnnnnnnnnnnnnnnnnnnnnnnnnnnnnnnnnnnnnnnnnnnnnnnnnnnnnnnnnnnnnnnnnnnnnnnnnnnnnnnnnnnnnnnnagcgactacgagagctgctgattcggcagcagatccagcgcaacactttgcgccaggagaaggaaacagctgcagcagctgcaggagcagtgggacctccaggcagctggggtgctgagcccagcagccctgcctttgagcagctgagtcgaggccagaccgcctttgctgggactcaggnaggacaagagcaaccttgtggggctgcccccaggcaagctgagtggccccatcctggggcaagggtccttccctggcgatgaccgactctcccggccacctccaccagccacgccttcctctatggatgtgaacagccggnnnnnnnnnnnnnnnnnnnnnnnnnnnnnnnnnnnnnnnnnnnnnnnnnnnnnnnnnnnnnnnnnnnnnnnnnnnnnnnnnnnnnnnnnnnnnnnnnnnnnnnnnnnnnnnnnnnnnnnnnnnnnnnnnnnnnnnnnnnnnnnnnnnnnnnnnnnnnnnnnnnnnnnnnnnnnnnnnnnnnnnnnnnnnnnnnnnnnnnnnnnnnnnnnnnnnnnnnnnnnnnnnnnnnnnnnnnnnnnnnnnnnnnnnnnnnnnnnnnnnnnnnnnnnnnnnnnnnnnnnnnnnnnnnnnnnnnnnnnnnnnnnnnnnnnnnnnnnnnnnnnnnnnnnnnnnnnnnnnnnnnnnnnnnnnnnnnnnnnnnnnnnnnnnnnnnnnnnnnnnnnnnnnnnnnnnnnnnnnnnnnnnnnnnnnnnnnnnnnnnnnnnnnnnnnnnnnnnnnnnnnnnnnnnnnnnnnnnnnnnnnnnnnnnnnnnnnnnnnnnnnnnnnnnnnnnnnnnnnnnnnnnnnnnnnnnnnnnnnnnnnnnnnnnnnnnnnnnnnnnnnnnnnnnnnnnnnnnnnnnnnnnnnnnnnnnnnnnnnnnnnnnnnnnnnnnnnnnnnnnnnnnnnnnnnnnnnnnnnnnnnnnnnnnnnnnnnnnnnnnnnnnnnnnnnnnngagcttgctcacctgggttctaggtgtgatgtggccaagaggtgatgatgaactgggccccttagaaaacctggagacgaatgacccccacttgggatgacctcctcaagggagatgagtttgaacatgctggcatatactgatcctgagctggacactggggacaagaaggacatcttcaatgagcacctgaggctggtagaatcagctaatgagaaggctgaacgggaggccctgctgcgtggggtggagccaggacccttgggccctgaggagcgccctcctcctgctgctgatgcctctgagccccgcctggcatctgtgctccctgaggtgaagcctaaggtggaggagggtggacgccacccttccccttgccagttcaccattgctacccccaaggtagagcccgcacctgctgccaattcccttggcctggggctaaagccaggacagagcgtgatgggcagccgggatacccggatgggcacagggccattttctagcagtgggcacacagctgagaagggctcctttggggccacaggaggaccaccagctcacctgctgacccccagcccactgagtggcccaggaggatcctccctgctagaaaagtttgagctcgagagtggggctttgaccttgcctggtggacctgtagcatctggggatgagctagacaagatggagagctcactggtagccagcgagatacccctgctcattgaggacctgttggagcatgagaagaaggagctgcagaagaagcagcaactttcagcacagttgcagcctgcccnnnnnnnnnnnnnnnnnnnnnnnnnnnttccctactctctgcaccaggccctgcccaggccatgtctttgccacatgagggttcttctcccagtttggctgggtcccagcgagcaaatttccctgggtcttggaggtgcccgacagccaggcttgccccnnnnnnnnnnnnnnnnnnnnnnnnnnnnnnnnnnnnnnnnnnnnnnnnnnnnnnnnnnnnnnnnnnnnnnnnnnnnnnnnnnnnnnnnnnnnnnnnnnnnnnnnnnnnnnnnnnnnnnnnnnnnnnnnnnnnnnnnnnnnnnnnnnnnnnnnnnnnnnnnnnnnnnnnnnnnnnnncaccttccatgtgcatgaagccacagcaactggcaatgcagcagcagctggcaaacagcttcttcccagatacannnnnnnnnnnnnnnnnnnnnnnnnnnnnnnnnnnnnnnnnnnnnnnnnnnnnnnnnnnnnnnnnnnnnnnnnnnnnnnnnnnnnnnnnnnnnnnnnnnnnnnnnnnnnnnnnnnnnnnnnnnnnnnnnnnnnnnnnnnnnnnnnnnnnnnnnnnnnnnnnnnnnnnnnnnnnnnnnnnnnnnnnnnnnnnnnnnnnnnnnnnnnnnnnnnnnnnnnnnnnnnnnnnnnnnnnnnnnnnnnnnnnnnnnnnnnnnnnnnnnnnnnnnnnnnnnnnnatgaagctgaccagcggcagtatgaggagtggctgttccatacccagcagctcctacagatgcagctgaaggtgctagaggagcagattggtgtacaccgcaagtcccggaaggctctgtgtgccaagcagcgcactgccaaaaaagctggccgtgagttcccagaagctgatgctgagaagctcaagctgttacagagcagcagagcaagatccagaaacagctggatcaggnnnnnnnnnnnnnnnnnnnnnnnnnnnnnnnnnnnnnnnnnnnnnnnnnnnnnnnnnnnnnnnnnnnnnnnnnnnnnnnnnnnnnnnnnnnnnnnnnnnnnnnnnnnnnnnnnnnnnnnnnnnnnnnnnnnnnnnnnnnnnnnnnnnnnnnnnnnnnnnnnnnnnnnnnnnnnnnnnnnnnnnnnnnnnnnnnnnnnnnnnnnnnnnnnnnnnnnnnnnnnnnnnnnnnnnnnnnnnnnnnnnnnnnnnnnnnnnnnnnnnnnnnnnnnnnnnnnnnnnnnnnnnnnnnnnnnnnnnnnnnnnnnnnnnnnnnnnnnnnnnnnnnnnnnnnnnnnnnnnnnnnnnnnnnnnnnnnnnnnnnnnnnnnnnnctcttcgaagcctcccacttgattcaagacttttacaggaaaggcagctgcagctgctatcagcaacgcatgcagctggcccagaaannnnnnnnnnnnnnnnnnnnnnnnnnnnnnnnnnnnnnnnnnnnnnnnnnnnnnnnnnnnnnnnnnnnnnnnnnnnnngtcctggagtacagacaaaccaagctctgggtcctaagccccagggacttctgcctcctagcagccaccaaggcctcctggtccagcagctgtcccctcaaccaccccaggggccccagggcatgctgggccctgcccaggtggctgtgttgcagcagcagcaccctggagctttgggcccccagggccctcacagacaggtgcttatgacccagtcccgggtgctcagttccccccagctggcacagcagggtcagggccttatgggacacaggctggtcnnnnnnnnnnnnnnnnnnnnnnnnnnnnnnnnnnnnnnnnngggtccatggcagggctgtcccatcttcagcagagtctgatgtcacacagtgggcagcctaaactgagcactcagcccatgggctctttannnnnnnnnnnnnnnnnnnnnnnnnnnnnnnnnnnnnnnnnnnnnnnnnnnnnnnnnnnnnnnnnnnnnnnnnnnnnnnnnnnnnnnnnnnnnnnnnnnnnnnnnnnnnnnnnnnnnnnnnnnnnnnnnnnnnnnnnnnnnnnnnnnnnnnnnnnnnnnnnnnnnnnnnnnnnnnnnnnnnnnnnnnnnnnnnnnnnnnnnnnnnnnnnnnnnnnnnnnnnnnnnnnnnnnnnnnnnnnnnnnnnnnnnnnnnnnnnnnnnnnnnnnnnnnnnnnnnnnnnnnnnnnnnnnnnnnnnnnnnnnnnnnnnnnnnnnnnnnnnnnnnnnnnnnnnnnnnnnnnnnnnnnnnnnnnnnnnnnnnnnnnnnnnnnnnnnnnnnnnnnnnnnnnnnnnnnnnnnnnnnnnnnnnnnnnnnnnnnnnnnnnnnnnnnnnnnnnnnnnnnnnnnnnnnnnnnnnnnnnnnnnnnnnnnnnnnnnnnnnnnnnnnnnnnnnnnnnnnnnnnnnnnnnnnnnnnnnnnnnnnnnnnnnnnnnnnnnnnnnnnnnnnnnnnnnnnnnnnnnnnnnnnnnnnnnnnnnnnnnnnnnnnnnnnnnnnnnnnnnnnnnnnnnnnnnnnnnnnnnnnnnnnnnnnnnnnnnnnnnnnnnnnnnnnnnnnnnnnnnnnnnnnnnnnnnnnnnnnnnnnnnnnnnnnnnnnnnnnnnnnnnnnnnnnnnnnnnnnnnnnnnnnnnnnnnnnnnnnnnnnnnnnnnnnnnnnnnnnnnnnnnnnnnnnnnnnnnnnnnnnnnnnnnnnnnnnnnnnnnnnnnnnnnnnnnnnnnnnnnnnnnnnnnnnnnnnnnnnnnnnnnnnnnnnnnnnnnnnnnnnnnnnnnnnnnnnnnnnnnnnnnnnnnnnnnnnnnnnnnnnnnnnnnnnnnnnnnnnnnnnnnnnnnnnnnnnnnnnnnnnnnnnnnnnnnnnnnnnnnnnnnnnnnnnnnnnnnnnnnnnnnnnnnnnnnnnnnnnnnnnnnnnnnnnnnnnnnnnnnnnnnnnnnnnnnnnnnnnnnnnnnnnnnnnnnnnnnnnnnnnnnnnnnnnnnnnnnnnnnnnnnnnnnnnnnnnnnnnnnnnnnnnnnnnnnnnnnnnnnnnnnnnnnnnnnnnnnnnnnnnnnnnnnnnnnnnnnnnnnnnnnnnnnnnnnnnnnnnnnnnnnnnnnnnnnnnnnnnnnnnnnnnnnnnnnnnnnnnnnnnnnnnnnnnnnnnnnnnnnnnnnnnnnnnnnnnnnnnnnnnnnnnnnnnnnnnnnnnnnnnnnnnnnnnnnnnnnnnnnnnnnnnnnnnnnnnnnnnnnnnnnnnnnnnnnnnnnnnnnnnnnnnnnnnnnnnnnnnnnnnnnnnnnnnnnnnnnnnnnnnnnnnnnnnnnnnnnnnnnnnnnnnnnnnnnnnnnnnnnnnnnnnnnnnnnnnnnnnnnnnnnnnnnnnnnnnnnnnnnnnnnnnnnnnnnnnnnnnnnnnnnnnnnnnnnnnnnnnnnnnnnnnnnnnnnnnnnnnnnnnnnnnnnnnnnnnnnnnnnnnnnnnnnnnnnnnnnnnnnnnnnnnnnnnnnnnnnnnnnnnnnnnnnnnnnnnnnnnnnnnnnnnnnnnnnnnnnnnnnnnnnnnnnnnnnnnnnnnnnnnnnnnnnnnnnnnnnnnnnnnnnnnnnnnnnnnnnnnnnnnnnnnnnnnnnnnnnnnnnnnnnnnnnnnnnnnnnnnnnnnnnnnnnnnnnnnnnnnnnnnnnnnnnnnnnnnnnnnnnnnnnnnnnnnnnnnnnnnnnnnnnnnnnnnnnnnnnnnnnnnnnnnnnnnnnnnnnnnnnnnnnnnnnnnnnnnnnnnnnnnnnnnnnnnnnnnnnnnnnnnnnnnnnnnnnnnnnnnnnnnnnnnnnnnnnnnnnnnnnnnnnnnnnnnnnnnnnnnnnnnnnnnnnnnnnnnnnnnnnnnnnnnnnnnnnnnnnnnnnnnnnnnnnnnnnnnnnnnnnnnnnnnnnnnnnnnnnnnnnnnnnnnnnnnnnnnnnnnnnnnnnnnnnnnnnnnnnnnnnnnnnnnnnnnnnnnnnnnnnnnnnnnnnnnnnnnnnnnnnnnnnnnnnnnnnnnnnnnnnnnnnnnnnnnnnnnnnnnnnnnnnnnnnnnnnnnnnnnnnnnnnnnnnnnnnnnnnnnnnnnnnnnnnnnnnnnnnnnnnnnnnnnnnnnnnnnnnnnnnnnnnnnnnnnnnnnnnnnnnnnnnnnnnnnnnnnnnnnnnnnnnnnnnnnnnnnnnnnnnnnnnnnnnnnnnnnnnnnnnnnnnnnnnnnnnnnnnnnnnnnnnnnnnnnnnnnnnnnnnnnnnnnnnnnnnnnnnnnnnnnnnnnnnnnnnnnnnnnnnnnnnnnnnnnnnnnnnnnnnnnnnnnnnnnnnnnnnnnnnnnnnnnnnnnnnnnnnnnnnnnnnnnnnnnnncatcccctgagagcatcttgccgttaagaggcccctcgtttccctcatctgggctcaggccgnnnnnnnnnnnnnnnnnnnnnnnnnnnnnnnnnnnnnnnnnnnnnnnnnnnnnnnnnnnnnnagtcttcccagataccaaaccttatggggcccttgacctggaggtccctggaaagctgcctgctacaacttgggaaaagggcaaaggaagtgaggtgtcagtcatgctcacagtctctgctgctgcagccaagnnnnnnnnnnnnnnnnnnnnnnnnnnnnnnnnnnnnnnnnnnnnnnnnnnnnnnnnnnnnnnnnnnnnnnnnnnnnnnnnnnnnnnnnnnnnnnnnnnnnnnnnnnnnnnnnnnnnnnnnnnnnnnnnnnnnnnnnnnnnnnnnnnnnnnnnnnnnnnnnnnnnnnnnnnnnnnnnnnnnnnnnnnnnnnnnnnnnnnnnnnnnnnnnnnnnnnnnnnnnnnnnnnnnnnnnnnnnnnnnnnnnnnnnnnnnnnnnnnnnnnnnnnnnnnnnnnnnnnnnnnnnnnnnnnnnnnnnnnnnnnnnnnnnnnnnnnnnnnnnnnnnnnnnnnnnnnnnnnnnnnnnnnnnnnnnnnnnnnnnnnnnnnnnnnnnnnnnnnnnnnnnnnnnnnnnnnnnnnnnnnnnnnnnnnnnnnnnnnnnnnnnnnnnnnnnnnnnnnnnnnnnnnnnnnnnnnnnnnnnnnnnnnnnnnnnnnnnnnnnnnnnnnnnnnnnnnnnnnnnnnnnnnnnnnnnnnnnnnnnnnnnnnnnnnnnnnnnnnnnnnnnnnnnnnnnnnnnnnnnnnnnnnnnnnnnnnnnnnnnnnnnnnnnnnnnnnnnnnnnnnnnnnnnnnnnnnnnnnnnnnnnnnnnnnnnnnnnnnnnnnnnnnnnnnnnnnnnnnnnnnnnnnnnnnnnnnnnnnnnnnnnnnnnnnnnnnnnnnnnnnnnnnnnnnnnnnnnnnnnnnnnnnnnnnnnnnnnnnnnnnnnnnnnnnnnnnnnnnnnnnnnnnnnnnnnnnnnnnnnnnnnnnnnnnnnnnnnnnnnnnnnnnnnnnnnnnnnnnnnnnnnnnnnnnnnnnnnnnnnnnnnnnnnnnnnnnnnnnnnnnnnnnnnnnnnnnnnnnnnnnnnnnnnnnnnnnnnnnnnnnnnnnnnnnnnnnnnnnnnnnnnnnnnnnnnnnnnnnnnnnnnnnnnnnnnnnnnnnnnnnnnnnnnnnnnnnnnnnnnnnnnnnnnnnnnnnnnnnnnnnnnnnnnnnnnnnnnnnnnnnnnnnnnnnnnnnnnnnnnnnnnnnnnnnnnnnnnnnnnnnnnnnnnnnnnnnnnnnnnnnnnnnnnnnnnnnnnnnnnnnnnnnnnnnnnnnnnnnnnnnnnnnnnnnnnnnnnnnnnnnnnnnnnnnnnnnnnnnnnnnnnnnnnnnnnnnnnnnnnnnnnnnnnnnnnnnnnnnnnnnnnnnnnnnnnnnnnnnnnnnnnnnnnnnnnnnnnnnnnnnnnnnnnnnnnnnnnnnnnnnnnnnnnnnnnnnnnnnnnnnnnnnnnnnnnnnnnnnnnnnnnnnnnnnnnnnnnnnnnnnnnnnnnnnnnnnnnnnnnnnnnnnnnnnnnnnnnnnnnnnnnnnnnnnnnnnnnnnnnnnnnnnnnnnnnnnnnnnnnnnnnnnnnnnnnnnnnnnnnnnnnnnnnnnnnnnnnnnnnnnnnnnnnnnnnnnnnnnnnnnnnnnnnnnnnnnnnnnnnnnnnnnnnnnnnnnnnnnnnnnnnnnnnnnnnnnnnnnnnnnnnnnnnnnnnnnnnnnnnnnnnnnnnnnnnnnnnnnnnnnnnnnnnnnnnnnnnnnnnnnnnnnnnnnnnnnnnnnnnnnnnnnnnnnnnnnnnnnnnnnnnnnnnnnnnnnnnnnnnnnnnnnnnnnnnnnnnnnnnnnnnnnnnnnnnnnnnnnnnnnnnnnnnnnnnnnnnnnnnnnnnnnnnnnnnnnnnnnnnnnnnnnnnnnnnnnnnnnnnnnnnnnnnnnnnnnnnnnnnnnnnnnnnnnnnnnnnnnnnnnnnnnnnnnnnnnnnnnnnnnnnnnnnnnnnnnnnnnnnnnnnnnnnnnnnnnnnnnnnnnnnnnnnnnnnnnnnnnnnnnnnnnnnnnnnnnnnnnnnnnnnnnnnnnnnnnnnnnnnnnnnnnnnnnnnnnnnnnnnnnnnnnnnnnnnnnnnnnnnnnnnnnnnnnnnnnnnnnnnnnnnnnnnnnnnnnnnnnnnnnnnnnnnnnnnnnnnnnnnnnnnnnnnnnnnnnnnnnnnnnnnnnnnnnnnnnnnnnnnnnnnnnnnnnnnnnnnnnnnnnnnnnnnnnnnnnnnnnnnnnnnnnnnnnnnnnnnnnnnnnnnnnnnnnnnnnnnnnnnnnnnnnnnnnnnnnnnnnnnnnnnnnnnnnnnnnnnnnnnnnnnnnnnnnnnnnnnnnnnnnnnnnnnnnnnnnnnnnnnnnnnnnnnnnnnnnnnnnnnnnnnnnnnnnnnnnnnnnnnnnnnnnnnnnnnnnnnnnnnnnnnnnnnnnnnnnnnnnnnnnnnnnnnnnnnnnnnnnnnnnnnnnnnnnnnnnnnnnnnnnnnnnnnnnnnnnnnnnnnnnnnnnnnnnnnnnnnnnnnnnnnnnnnnnnnnnnnnnnnnnnnnnnnnnnnnnnnnnnnnnnnnnnnnnnnnnnnnnnnnnnnnnnnnnnnnnnnnnnnnnnnnnnnnnnnnnnnnnnnnnnnnnnnnnnnnnnnnnnnnnnnnnnnnnnnnnnnnnnnnnnnnnnnnnnnnnnnnnnnnnnnnnnnnnnnnnnnnnnnnnnnnnnnnnnnnnnnnnnnnnnnnnnnnnnnnnnnnnnnnnnnnnnnnnnnnnnnnnnnnnnnnnnnnnnnnnnnnnnnnnnnnnnnnnnnnnnnnnnnnnnnnnnnnnnnnnnnnnnnnnnnnnnnnnnnnnnnnnnnnnnnnnnnnnnnnnnnnnnnnnnnnnnnnnnnnnnnnnnnnnnnnnnnnnnnnnnnnnnnnnnnnnnnnnnnnnnnnnnnnnnnnnnnnnnnnnnnnnnnnnnnnnnnnnnnnnnnnnnnnnnnnnnnnnnnnnnnnnnnnnnnnnnnnnnnnnnnnnnnnnnnnnnnnnnnnnnnnnnnnnnnnnnnnnnnnnnnnnnnnnnnnnnnnnnnnnnnnnnnnnnnnnnnnnnnnnnnnnnnnnnnnnnnnnnnnnnnnnnnnnnnnnnnnnnnnnnnnnnnnnnnnnnnnnnnnnnnnnnnnnnnnnnnnnnnnnnnnnnnnnnnnnnnnnnnnnnnnnnnnnnnnnnnnnnnnnnnnnnnnnnnnnnnnnnnnnnnnnnnnnnnnnnnnnnnnnnnnnnnnnnnnnnnnnnnnnnnnnnnnnnnnnnnnnnnnnnnnnnnnnnnnnnnnnnnnnnnnnnnnnnnnnnnnnnnnnnnnnnnnnnnnnnnnnnnnnnnnnnnnnnnnnnnnnnnnnnnnnnnnnnnnnnnnnnnnnnnnnnnnnnnnnnnnnnnnnnnnnnnnnnnnnnnnnnnnnnnnnnnnnnnnnnnnnnnnnnnnnnnnnnnnnnnnnnnnnnnnnnnnnnnnnnnnnnnnnnnnnnnnnnnnnnnnnnnnnnnnnnnnnnnnnnnnnnnnnnnnnnnnnnnnnnnnnnnnnnnnnnnnnnnnnnnnnnnnnnnnnnnnnnnnnnnnnnnnnnnnnnnnnnnnnnnnnnnnnnnnnnnnnnnnnnnnnnnnnnnnnnnnnnnnnnnnnnnnnnnnnnnnnnnnnnnnnnnnnnnnnnnnnnnnnnnnnnnnnnnnnnnnnnnnnnnnnnnnnnnnnnnnnnnnnnnnnnnnnnnnnnnnnnnnnnnnnnnnnnnnnnnnnnnnnnnnnnnnnnnnnnnnnnnnnnnnnnnnnnnnnnnnnnnnnnnnnnnnnnnnnnnnnnnnnnnnnnnnnnnnnnnnnnnnnnnnnnnnnnnnnnnnnnnnnnnnnnnnnnnnnnnnnnnnnnnnnnnnnnnnnnnnnnnnnnnnnnnnnnnnnnnnnnnnnnnnnnnnnnnnnnnnnnnnnnnnnnnnnnnnnnnnnnnnnnnnnnnnnnnnnnnnnnnnnnnnnnnnnnnnnnnnnnnnnnnnnnnnnnnnnnnnnnnnnnnnnnnnnnnnnnnnnnnnnnnnnnnnnnnnnnnnnnnnnnnnnnnnnnnnnnnnnnnnnnnnnnnnnnnnnnnnnnnnnnnnnnnnnnnnnnnnnnnnnnnnnnnnnnnnnnnnnnnnnnnnnnnnnnnnnnnnnnnnnnnnnnnnnnnnnnnnnnnnnnnnnnnnnnnnnnnnnnnnnnnnnnnnnnnnnnnnnnnnnnnnnnnnnnnnnnnnnnnnnnnnnnnnnnnnnnnnnnnnnnnnnnnnnnnnnnnnnnnnnnnnnnnnnnnnnnnnnnnnnnnnnnnnnnnnnnnnnnnnnnnnnnnnnnnnnnnnnnnnnnnnnnnnnnnnnnnnnnnnnnnnnnnnnnnnnnnnnnnnnnnnnnnnnnnnnnnnnnnnnnnnnnnnnnnnnnnnnnnnnnnnnnnnnnnnnnnnnnnnnnnnnnnnnnnnnnnnnnnnnnnnnnnnnnnnnnnnnnnnnnnnnnnnnnnnnnnnnnnnnnnnnnnnnnnnnnnnnnnnnnnnnnnnnnnnnnnnnnnnnnnnnnnnnnnnnnnnnnnnnnnnnnnnnnnnnnnnnnnnnnnnnnnnnnnnnnnnnnnnnnnnnnnnnnnnnnnnnnnnnnnnnnnnnnnnnnnnnnnnnnnnnnnnnnnnnnnnnnnnnnnnnnnnnnnnnnnnnnnnnnnnnnnnnnnnnnnnnnnnnnnnnnnnnnnnnnnnnnnnnnnnnnnnnnnnnnnnnnnnnnnnnnnnnnnnnnnnnnnnnnnnnnnnnnnnnnnnnnnnnnnnnnnnnnnnnnnnnnnnnnnnnnnnnnnnnnnnnnnnnnnnnnngtttgtattttgggttggtttacactcgcacatactcaattttcagttttcccctttacagtcttctcccctcacctccaggaccctccccctttttaaaaaataaatcgctgacaagtgtgaatcccgtgaagactttattttgtgttgtgtgtatcctgtacagcaaggttggtccttcgtaacaacggatgaaatggttcccttttttaaagcgccctctctccctccaccctcagcgcccctgtccttggcatgttttgtatcagcgatcattctgaactgtacataatttatgttgcgagaggcaaagggcaagttttggattttgcttcttccaagtttgtttttaaacgacaaataaaaaaagaacattttaaatacaa

SEQ ID NO: 32859 - DNA, 770 bp, Macaca Mulatta
tttgaaataaggggggctggggtaaaaataagagactggagaacctaactggggttgctttccccagggaagtttaagggcattcttagacaccggaatgagaacaggacgtcagcaccaagatccaggtcataaagactttgctgataaaacaggttgcgtaaaagaagccggccaagacccaccaaaaccaagatggcgatgagagtgacttctggtcatcctcactgctacactcccaccagcgccatgacagcttacagatgccgtggcaatgtcaggaaattaccctatattgtctttcgcagcatcctgggataggtgctgtgctgggccctcaggatcatcaggcctttccatgctcagcagtcaggcagcaggaaggtatcactctccccatcctccctggcatgtgaatagggatgctttggccaaacgcccttggtagccatcacctccttgcctcaaactccatcctgctgccaagaaccaggggctcagactccactggtcctccgcctcctcctttcatgtcccccttgtttggaaatggagttcttcacagatgaaatccagttaagatgaggtcaccctggagtaggttggcccctgaatccaatgactgctgtccactctgtcctgtgcaaggatgcagatgtaccaagaccccagcacatgcttgcctgactttgtgtcactccccaagacattcccagcatgtgaaggtccaggagtcactagaagcctgggtggctgttccccagcctccc

SEQ ID NO: 32860 - DNA, 119 bp, Macaca Mulatta
ttttctcggatgtcctgatgaaggagatcctgtgtcctgagagtcagtctcctaatggagtgagattccacttcattgatatttacctggatgaactctccaaagttggggggaaggag

SEQ ID NO: 32861 - DNA, 701 bp, Macaca Mulatta
tcatctccaccatccacccaggagccctctcccactggtgatatggctgtaggatcccccttgatgcgagaggtaggctccccgaaagaccctggaaagtccctgccacctgtaccaccaatgggcctgcccccaccccaggagtttggccgggggaacccattcatgctgttcctctgcctggccatcctgctggagcaccgcgaccacatcatgcgcaatgggctggattataacgagctggccatgcactttgaccgcctcgtgcgaaaacaccacctggggcgtgtcctgcgccgggccagggctctctttgctgattacctgcagtcagaggtgtgggactcggaggagggggctgaggccacagctgcatcttgatcaggctttctccagccctccattggctctaccagatctccattctttgccatgagggccaacacatgagaccccacctccctccctgcctgccagccctagacctgttggagcatagatcccttcctccccaggtctaagtatgtggagctctgcttaggcactgccccacagaggccacgcctctttattctgtttctgttgttttgtttttaacaactatactttgcacacatgaaggtcactgtggtttgtgtgtttctctgcctcctccctgggttttgctgtagatggagtcctcaggggccctttacctgatg

SEQ ID NO: 32862 - DNA, 244 bp, Macaca Mulatta
tcgctgatgctgcaagctccactttctgtgtttgaaggagacttcgtggttctgaggtgccgggcaaaggggaagtagcactgagtactatggacaagaatggtaacgtcctggcattccttaaaaaatctctgacttccgtattcatcatgcaagtctcaaggacaatggtgcatatcactgtactggatttaacggaagtaatttctgtgtttcttccaacatagtcaaaatccaagtccaa

SEQ ID NO: 32863 - DNA, 1343 bp, Macaca Mulatta
aaaggctgggttcttattaggacacaaatttacaagctgtgtggacttggggatggaaattaaacacctcttgtttttggttgctgctgcttgcttactgcctgtgttgtccatgaaaaggaaatcagctaaaaaactatttaataagctcgtcactgacttgccaaatgtacaacaagagatcgttaatatacacaacactctcagaagaggagtagttccaccagccagcaacatgctgaagatgagttggagtgaagaggctgcacaaaatgccaaaattttttcacgctattgtgatatgacagagagcaacccccttgagaggagacttccaaataccttttgcggagaaaataggaatatgacatcttatcctgtatcatggtccagtgtaattggagtctggtacagtgagtctaaatatttcagatatggactatggccatcaacggatgatgacataagtactgaccggtacactcagattgtttgggccacatcttacctgattggctgtgccattgcaccatgccgccacagaggatcacctcgatatttctacgtttgtcactattgtcatgagggaaatgatcctgaaacaaagcatgaaccttataagaagggtgtcccatgtgaagcctgcccaaataactgtgaagacaaactttgcactaacccctgtatctactatgatgaatacaccgactgtagcttagaagtccgttttcttggatgcaaccactcgacacctcgcatgttctgtaaagccacttgtctgtgtgacactgagataaaatagacgaattccttggatgcaaccactcgacacctcgcatgttctgtaaagccacttgtctgtgtgacactgagataaaataggtctttgttattttcatcagttctgtgctgtgacgatgaggaggagatgtctgttggatcatgtcttttgctatagttcagtagcttctgctaaattttatttgattttaatcatgctagagatcttaactcctgtcctgatacatcctgaagtaacactgttttcaattttcttattactggagtaaaaggccaagcccaacgcctgccttaaatttaaatcatgcaatttatagttcttaagttggcataattcaacttacggtataactgagtccctcaacagtaacctgggctaaagtaggtcttacgtggttgaactcccacccctgctttccccatattttcagccactctgattatcttccctgcacaactaacatccagtaataattcttcacttttaaaattttacttctactttaaatcaataattaaaggaatccacaaagcaaaaaaaa

SEQ ID NO: 32864 - DNA, 313 bp, Macaca Mulatta
gcactgaccacctcctacctccacccctgtagtgctcccacccctggactggtgggccccgccctgggggagatcttctcatgcgcctgcaccaggagacagagagagaaggcgacaggaggcctttgttgctcagcagggagctctgcccttgctccttccttcttgcttctcatagccccagtgtgcagtgcacactctcccaactcctgcaattaaacagtagcatcacctccctcagttcttggctgtctggggacgtgctcacaggcagggtttctaaagttccctatgaagccttcttgtcctgctg

SEQ ID NO: 32865 - DNA, 494 bp, Macaca Mulatta
  misc_feature (1)...(494): n = A,T,C or G
actagttagagatgaaattgagctttattttaaaaacgttctaaagcctgataattgatgagctatgcttcggcttttcatcgtactttaatgaaacagctagataggaacctctgctccagaactgccagataattattggtgggttataactattctccnnnnnnnnnnnnnnnnnnnnnctcctttggtttctgtgttatctttcttaacttcccgcatttctttatcctttttagtgggggcctgtaattcaggctaattcaatggcaacaatagacaacgtgatatggctgctgtcactttaaaacctgaaaggtcttttgggtaggaactgagtagtgacaagaggtccagtcaacttcaatatatatacaaaggaaagacagatgataaaccaaggctgaggaaatttttctgatactttcttcatttctccaatgtactttttgcactcttttcctgatccttgttctaattaggaggaagataca

SEQ ID NO: 32866 - DNA, 202 bp, Macaca Mulatta
  misc_feature (1)...(202): n = A,T,C or G
tcccctgcctcaagattctcctcagcaaaggcctggggctgggcattgtggctggctcacttctnctagtaaagctgccccaggtgtttaaaatcctgggagccaagagtgccgaaggattgagtctccagtctgtaatgctggagctagtggcattgactgggaccatggtctacagcatcactaacaacttcccattcag

SEQ ID NO: 32867 - DNA, 694 bp, Macaca Mulatta
  misc_feature (1)...(694): n = A,T,C or G
tttttttttttttggggacaatttattcgggctctcacagtggttagagccactctgtcttcagaacaatcacagcacaggaaatgcgtcaccgagactgcccagaaaagtctgaccagctgaatcttattgcttaaaatacacatattcacaataactgacaaagggtagcgtgccccacacaggaatgtgttcgcatttgcaaatcttccgactggctgtagcaccaaaccctccaccaaccccgtctcattcacgtggaaaaccagtctcagtcacatctccctggccccctaaggattccttcagctccctattaaatctctctctgagcagggcagcctcctgtagcaggggccaaactgtgacttgggatccaagcccagctccgcaggttgcatttctgtcttctcgtgcctttagggtaggacgctgcagtgagtcccacagttaacacttgcccagttccccactctaactggggaaaggaacttgagagggtcagaactcatccatttgatctgttaactgaaaaaggattcattttggtaaaacttgttcgcctttgagacccttcagtgagttatttggggatnnnnnnnnnnnnnnnnnnnnnnnnnnnnnnnnnnnnnnnnnnnnnnnnnnnnnnnnnnnnnnnnnnnnnnnnnnnnnnnnnnnnnnnnnnnnnnnnnnn

SEQ ID NO: 32868 - DNA, 266 bp, Macaca Mulatta
ctgaatctttggtttttgatctaaggagaccattagctctttacaggtagtgggtccttcattaaatgtcatagaaatatcagtgaagattaattctcagttacaaaacttgtaatgttttgtctcctgagttttaatttttagagtaattggcaacactgaaaggtactttatgaaatccattaacgcatcatttactggaattgagggcatgaattcatgctcagaaaaacattgaccgaaaggaaaatcctttgacctttcta

SEQ ID NO: 32869 - DNA, 223 bp, Macaca Mulatta
taactcattttgggggtggagggagccacctgggtggcaggggccctggagctctattgacctagtacactgctccgggactcctcccccgccaccctccacgcatagggtccttggtctggaccctgccccccaaacgtagggccttgctcccctaccttgctctgagcacggagagtcctgaccccaccagcaggctcgcccccagagaggcccaagtggt

SEQ ID NO: 32870 - DNA, 208 bp, Macaca Mulatta
acagattacggaaccattaagaaagtgcgggcgcccctgaatcagaccgcaagcagctgtttgctggaggagattgagctcttccctgagaggcggagggagcccatcaggagcctgcagatcctgcacagccagagcgtcctgttcgtgggcctgtgggagcacgtggtcaagatccccctgaagaggtgccagttctaccgcacac

SEQ ID NO: 32871 - DNA, 357 bp, Macaca Mulatta
  misc_feature (1)...(357): n = A,T,C or G
cgccagtccctccgcctggaccccanagggcaagtccctgaaggatgaggatattctacagaagctgcccgtgggcaccacggccacgctctacttccgggacctgggggcccagatcagctgggtgacggtnggtcttcctaacagagtacgcagggccccttttcatctacctgctcttctacttccgagtgcccttcatctatggccacaaatacgacttcacgtccagtcggcacacggtggtgcancctcgcctgcatctgccactcattccactacgtcaagcgcctgctggagacactcttcgtgcaccgtttctcccatggcaccatgcctttgcgcaacatcttcaag

SEQ ID NO: 32872 - DNA, 2092 bp, Macaca Mulatta
  misc_feature (1)...(2092): n = A,T,C or G
ggacccttttggagagaagcggggccactttgactaccagtnnnnnnnnnnnnnnnnnnnnnnnnnnnnnnnnnnnnnnnnnnnnnnnnnnnnnnnnnnnnnnnnnnnnnnnnnnnnnnnnnnnnnnnnnnnnnnnnnnnnnnnnnnnnnnnnnnnnnnnnnnnnnnnnnnnnnnnnnnnnnnnnnnnnnnnnnnnnnnnnnnnnnnnnnnnnnnnnnnnnnnnnnnnnnnnnnnnnnnnnnnnnnnnnnnnnnnnnnnnnnnnnnnnnnnnnnnnnnnnnnnnnnnnnnnnnnnnnnnnnnnnnnnnnnnnnnnnnnnnnnnnnnnnnnnnnnnnnnnnnnnnnnnnnnnnnnnnnnnnnnnnnnnnnnnnnnnnnnnnnnnnnnnnnnnnnnnnnnnnnnnnnnnnnnnnnnnnnnnnnnnnnnnnnnnnnnnnnnnnnnnnnnnnnnnnnnnnnnnnnnnnnnnnnnnnnnnnnnnnnnnnnnnnnnnnnnnnnnnnnnnnnnnnnnnnnnnnnnnnnnnnnnnnnnnnnnnnnnnnnnnnnnnnnnnnnnnnnnnnnnnnnnnnnnnnnnnnnnnnnnnnnnnnnnnnnnnnnnnnnnnnnnnnnnnnnnnnnnnnnnnnnnnnnnnnnnnnnnnnnnnnnnnnnnnnnnnnnnnnnnnnnnnnnnnnnnnnnnnnnnnnnnnnnnnnnnnnnnnnnnnnnnnnnnnnnnnnnnnnnnnnnnnnnnnnnnnnnnnnnnnnnnnnnnnnnnnnnnnnnnnnnnnnnnnnnnnnnnnnnnnnnnnnnnnnnnnnnnnnnnnnnnnnnnnnnnnnnnnnnnnnnnnnnnnnnnnnnnnnnnnnnnnnnnnnnnnnnnnnnnnnnnnnnnnnnnnnnnnnnnnnnnnnnnnnnnnnnnnnnnnnnnnnnnnnnnnnnnnnnnnnnnnnnnnnnnnnnnnnnnnnnnnnnnnnnnnnnnnnnnnnnnnnnnnnnnnnnnnnnnnnnnnnnnnnnnnnnnnnnnnnnnnnnnnnnnnnnnnnnnnnnnnnnnnnnnnnnnnnnnnnnnnnnnnnnnnnnnnnnnnnnnnnnnnnnnnnnnnnnnnnnnnnnnnnnnnnnnnnnnnnnnnnnnnnnnnnnnnnnnnnnnnnnnnnnnnnnnnnnnnnnnnnnnnnnnnnnnnnnnnnnnnnnnnnnnnnnnnnnnnnnnnnnnnnnnnnnnnnnnnnnnnnnnnnnnnnnnnnnnnnnnnnnnnnnnnnnnnnnnnnnnnnnnnnnnnnnnnnnnnnnnnnnnnnnnnnnnnnnnnnnnnnnnnnnnnnnnnnnnnnnnnnnnnnnnnnnnnnnnnnnnnnnnnnnnnnnnnnnnnnnnnnnnnnnnnnnnnnnnnnnnnnnnnnnnnnnnnnnnnnnnnnnnnnnnnnnnnnnnnnnnnnnnnnnnnnnnnnnnnnnnnnnnnnnnnnnnnnnnnnnnnnnnnnnnnnnnnnnnnnnnnnnnnnnnnnnnnnnnnnnnnnnnnnnnnnnnnnnnnnnnnnnnnnnnnnnnnnnnnnnnnnnnnnnnnnnnnnnnnnnnnnnnnnnnnnnnnnnnnnnnnnnnnnnnnnnnnnnnnnnnnnnnnnnnnnnnnnnnnnnnnnnnnnnnnnnnnnnnnnnnnnnnnnnnnnnnnnnnnnnnnnnnnnnnnnnnnnnnnnnnnnnnnnnnnnnnnnnnnnnnnnnnnnnnnnnnnnnnnnnnnnnnnnnnnnnnnnnnnnnnnnnnnnnnnnnnnnnnnnnnnnnnnnnnnnnnnnnnnnnnnnnnnnngaaaaggcaccctgcttccaatttccctcttccattcctcgagctactccagggcttagaaaaatgcccttggtctgtgggtccagtgttgtctgtcatccatttaagtgttcccactttcaagcgacaatcctctccttggccctgccatagggcagagcatgtctggcatagcagcctgacttgtatgccctaaccttgagttgaggaaatatatgcacaggagtcaaagagatgtctttatatctgactgtacataaatgaagtttnnnnnnnnnnnnnnnnncctttttggtgcaataaagtttgttttggcaga

SEQ ID NO: 32873 - DNA, 454 bp, Macaca Mulatta
  misc_feature (1)...(454): n = A,T,C or G
ctgaaggaaagcagcctcagccacccctcagggtttgctgcgtcctgtttggaaagaggtccttgtgttccggatcctggagcatcaggagctgagcgtggcgataaagccaagatgaaactcctcctacttctggctcttctatttggggcagtttctgctcttcatctgaggcctgagacttccacctttgacagcactttgggtgctaagaccctgcctgaggatgaggagatgccagaacaggaggtggaggagatcctttccagggagctggaggaagaggaggaggggggctctggaagtgaagatgcctccaaggaagatggggctgttaagttgatctcagtcccagatatggtagacaaaaaccttacatgtcctngaggaagaggacacagtaaaagtggtgggcatccctgggtgcccgacctngccgctanncctcctggtg

SEQ ID NO: 32874 - DNA, 628 bp, Macaca Mulatta
caggctagtggagctcttctccaccgtgcccatcggctcccactggggggtgctgtccaagtgcttggcctacagcaaggccgcgtccgacccctttgtgtactccttactgcgacaccagtaccgcaaaagctgcaaggagattctgaacaggctcctgcacagacgctccatccactcctccggcctcacgggcgactctcacagccagaacattctgccggtgtctgagtgaaggaccacgctcctgctgaagagtttagaatgaggcagcggtgagaagaagggagggagggcgtgggggcccctgggtggacaccaccagccaccagtccctggcacacccagtgatcctggttccctggcttgtaggggctccagagcctgcttcctggttcctcaagggcagacattggacactcactatttgtcaccaaaggatgactgtgggccgtgtgctggcctttctttctaagaagctcctttgagctcctggactcacctgaggctccctgggggatgacactcagttctgtcactgtcaaggatgcagacagctgatggtaggtggggagcacggtgtccacctgcctgctgaccactgggcgctactccatgcgaagaaaag

SEQ ID NO: 32875 - DNA, 1056 bp, Macaca Mulatta
  misc_feature (1)...(1056): n = A,T,C or G
tgtagcttttaggctaaaatctaatgtagatatatttatacagatattattttcaagatgtatgaatcgcttgttattgtccatgataatatgttatgtactttgcatcattcactctcaaacatagttcatgcctgtagctctcttccttttgtttctcaccctccagaagcatctttttcagtagcgccaggtagatgagccnnnnnnnnnnnnnnnnnnnnnccatattcaagggagtctgctgcattttaaaacacagtcactggtgtttcttgaattgctagggactgatgtagtgttcgactcagctcttgcccatctgtattgattgtgtgtgtttttttattttggagtctgctttctgtgggggtgaggctgggctgtctcatggtggctcccactgacgggcactgaagctggcaccctgtggcatggagaagcctcagggaaagggctgtcccccagcacacactcccatagtgtcctaggtccagccgaccattccttattctcttctatcatctccttgttcatctgaagcttccaatagcttgaggcctttgctgctggatgatgccctttttgggagcatcttgtctctgacctttggaagaggggtcagtcctcatgatccccatgtgttaagcatgtgctttgcaggtgctcacacgacacttacaacttacttcctgagctgtgtctctactccaggctctggtttgtgtatttatctgccattagcatcatgnnnnnnnnnnnnnnnnnnnnnnnnnnnngttgggacaggtgccatttacattgcctccatgcttcccacttgcacctagctggatcaggttgggaggatgagcaaactcgtattccagttagttggagtttttaaaggctctgtttgcctggagaagcaaggaggttagaatgtatttcctttttaagcatttgcactatttagagtcctagcccctcatgtttagctgtgctgtgtttctactgaccaaacaggagagccagcagcacttccagcgttcgggaatggccgagattacttctgta

SEQ ID NO: 32876 - DNA, 641 bp, Macaca Mulatta
  misc_feature (1)...(641): n = A,T,C or G
aacgctgtcctagccgccgccacccgaacagcctgtcctggtgccccggctccctgccccgcgcccagtcatggccctgcgcccctcactcctcccgctccatnnnnnnnnnnnnnnnnnnnnnnnnnnnnnnnnnnnnnnnnnnnnnnnnnnnnnnnnnnnnnnnnnnnnnnnnnnnnnnnnnnnnnnnnnnnnnnnnnnnnnnnnnnnnnnnnnnnnnnnnnnnnnnnnnnnnnnnnnnnnnnnnnnnnnnnnnnnnnnnnnnnnnnnnnnnnnnnnnnnnnnnnnnnnnnnnnnnnnnnnnnnnnnnnnnnnnnnnnnnnnnnnnnnnnnnnnnnnnnnnnnnnnnnnaggtctggagcagagtcttctagacatgtgtgtggnnnnnnnnnnnnnnnnnnnnnnnnnnnnnnnnnnnnnnnnnnnnnnnnnnnnnnnnnnnnnnnnnnnnnnnnnnnnnnnnnnnnnnnnnnnnnnnnnnnnnnnnnnnnnnnnnnnnnnnnnnnnnnnnnnnnnnnnnnnnnnnnnnnnnnnnnnnnnnnnnnnnnnnnnnnnnnnnnnnnnnnnnnnnnnnnnnnattgggaatcacctatacagaaaggccaacagacccaaagtctccaaagagaagctcaag

SEQ ID NO: 32877 - DNA, 608 bp, Macaca Mulatta
  misc_feature (1)...(608): n = A,T,C or G
ggtggtcctgccattgtggctgtcctctgcaaaggtctcctcactcattgagagaatctctgaccccaaggacttgaaaaaactgctcagaacccggaataatgtactggtgctttactccaaatctnnnnnnnnnnnnnnnnnnnnnnnnnnnnnnnnnnnnnnnnnnnnnnnnnnnnnnnnnnnnnnnnnnnnnnnnnnnnnnnnnnnnnnnnnnnnnnnnnnnnnnnnnnnnnnnnnnnnnnnnnnnnnnnnnnnnnnnnnnnnnnnnnnnnnnnnnnnnnnnnnnnnnnnnnnnnnnnnnnnnnnnnnnnnnnnnnnnnnnnnnnnnnnnnnnnnnnnnagtccatagtggcttttttgaaggatccaaaagggcccccactgtgggaggaagatcctggagccaaagatgttgtccaccttgacagtgaaaagnnnnnnnnnnnnnnnnnnnnnnnnnnnnnnnnnnnnnnnnnnnnnnnnnnnnnnnnnnnnnnnnnnnnnnnnnnnnnnnnnnnnnnnnnnnnnnnnnnnnnnnnnnnnnnnnnnnnnnnnnnnnnnnngtgctggccgggatgaatgtctactcctatgaattgaaaaca

SEQ ID NO: 32878 - DNA, 1189 bp, Macaca Mulatta
  misc_feature (1)...(1189): n = A,T,C or G
cgttcgctagttgaaatgatggcgactggaacgccagattctcaagcgcgattcggtcagtccgtgaaggggcttctcacggagaaggtgaccacctgtggtactgacgtcatcgcgctcaccaagcaggtgctgaagggctcccggagctccgannnnnnnnnnnnnnnnnnnnnnnnnnnnnnnnnnnnnnnnnnnnnnnnnnnnnnnnnnnnnnnnnnnnnnnnnnnnnnnnnnnnnnnnnnnnnnnnnnnnnnnnnnnnnnnnnnnnnnnnnnnnnnnnnnnnnnnnnnnnnnnnnnnnnnnnnnnnnnnnnnnnnnnnnnnnnnnnnnnnnnnnnnnnnnnnnnnnnnnnnnnnnnnnnnnnnnnnnnnnnnnnnnnnnnnnnnnnnggttttctgttttcttccccaaaagttaagttagaaaagttctgtgttnnnnnnnncgcggtgtctcatgcctgtaatctcagcactttgagaggctgaggtgggtggatcacctgaggtcaggagttcaagaccagcctgaccaacatggtaaaacaccatctctactaaatatacattaaaaaattagctgggcatgttggctcgtgcctgtaatctcaactactcgggaagctgaggcaagagaatcacttgaacccaggagacggaagttgcagtgagccgagatcacgccactgtgctccagcctgggcaacagagtgagattcnnnnnnnnnnnnnnnnnnnnnnnnnnnnnngaaaagttctgtgttgatgcacagtttctcctaagaagaagcgaggtggttgaattttggaggcacttcttgaatcggactaacccatgctcttattgaattctttcagctgctgagtttagtttgatattaaagcaaaattaaaagagcttttagtttttcccatagaacttttaatatgtcaaaagctatattgtctgaattgcagtacttaagcttatactgagtagtgttttaaattaagaaatagagcttctattatgaacacataacaatgattttttctcttaatcattattaaggaaatattttaatttcatggtcgtataatggtgagaagtaatacctgattgtttccttttctgttctagtaactcagaggaggtatgtgttttatttgtgatagcaaattcctaaatgaacattaggcaagtggta

SEQ ID NO: 32879 - DNA, 954 bp, Macaca Mulatta
  misc_feature (1)...(954): n = A,T,C or G
agccccaggtacccagtttgttaagccgacagttggagttccacaagtgttctcccagatgacccctgtgaggccaggctccacaatgcctgtgaggcccaccaccaacacgttcaccaccgtcatcccggccactcttaccattcgaagcaccgtcccacagtcccagtcccagcagaccaagtccactcccagcacttccaccactcccactgccacacagccaacctcactggggcaactagctgttcagtctcctggccagtcaaaccagaccacgaatcccaagctannnnnnnnnnnnnnnnnnnnnnnnnnnnnnnnnnnnnnnnnnnnnnnnnnnnnnnnnnnnnnnnnnnnnnnnnnnnnnnnnnnnnnnnnnnnnnnnnnnnnnnnnnnnnnnnnnnnnnnnnnnnnnnnnnnnnnnnnnnnnnnnnnnnnnnnnnnnnnnnnnnnnnnnnnnnnnnnnnnnnnnnnnnnnnnnnnnnnnnnnnnnnnnnnnnnnnnnngtgacctcttccatcccagtatttgacctccaggatggtggacggaaaatatgtccacggtgtaatgctcaatttcgtgttactgaagctttgagaggtcacatgtgttactgttgccccgaaatggttgaataccagaagaaaggaaagtccctggattcagaacccagtgtcccatcagcagcaaagcccccatcccctgagaagacagctcctgttgcttccacaccctcttctacacctattcctgctctgtcaccacctaccaaagtaccagagccaaatgagaacgtgggtgatgccgtccagaccaaactcattatgcttgtagatgacttctactatggacgggatggtggcaaagtagcccagctcacaaatttccctaaggtcgccacatctttccgatgcccacattgtaccaaaagactaaaaaacaatattc

SEQ ID NO: 32880 - DNA, 506 bp, Macaca Mulatta
atggggttccttccaaacactgttaggcatttgcgctactttgttagaaaatgctgagtggaataacttgttagaatcagggttaaactttgaggaataatgaaaagcttttaaagagctttgggtttagttggaggtgtctttttgagggctcatcattcaattatagatggtgtcaaagctaaccttacatttcttaaaagcaaaatattacaaatgcattaccagtctagatacaaagcattgttttacagcaattattgtgccataatttttagtgtgtcccatgtttggtgtgtcccaatttttggtattgtggcagaaggtgaacgctctgaaagcaaagatgcagcagtggtagtgtctttacttatcaaaaccatcaagtcccttttcttgggtatatctgtaatcagtaagctaattagtggcataaaaagtagcaccagggacttttcccaagcctatgagtaagagcattatttcataaagaacatggatttatc

SEQ ID NO: 32881 - DNA, 269 bp, Macaca Mulatta
tgaggaatttcataggtagtttcttggataatagaaatgaaacataagtttgcaacagatattttgtccctcttcacccacatactaatgtgatatggaaatttacatgtttccctggacccttcagactgtatgcagcagccagggagctcaggtcaccattgcaatggactcagccccacccattttgccaagctcttcactttcaacaaagcccaggtttcctacagttttcttgttgtggcagagagttgcttgcctggccccac

SEQ ID NO: 32882 - DNA, 1028 bp, Macaca Mulatta
  misc_feature (1)...(1028): n = A,T,C or G
ttctttctctctgnnnnnnnnnnnnnnnnnnnnnnnnnnnnnnnnnnnnnnnnnnnnnctttttcctctctgtgttgctgagagtccgggtttattcttcacaccaggtgggtctcaatttctcatacctgagggccccttcaatgaggtaggggagcgcgttccctcttgagagaggactggagaccacccctggaagagaatgtattcccatacggtttgcctccaaattgtttgaaatgcttgttttccggtgctataaacagcacttgaacataaatttaatttatttggtaaggccattttttacttcctgcagaaagggtacactcaccagcagttttgccacgagtgtacaccgagcgaaggagacagggtcatttataacctgtcgcatccaccctactgctgtatctggtttccattggctggaacaggacctcgcattctgtatttgtcccgattggctagcaacttagaactttttaaaagaggcaaaggtagaggagaacaaaggaaggaggaagtaacttgtggaatgctgagaaaggtaaaaacacttttaaataaggaagaggaacaggctatgacctaacgcttgcttggaccagtatgagcacgccaggggcaaatatttaggagcacaggtctttgaataaattttgcttctaagagaagttactatttattcctaattagatagggaggaaagtctttgaagagcaacctctactttgctttttacagaataaatgcaggcgaaaagaacataaactttgccaggggtagaatgttatggacagaatgtttctgttcccctgaaattcatatttgaaatcctaactcccaatggtatggtattaggagggggcctttgggaagtaatttaggtgtgaaagttgattataagaatcgagtaattctgtttttatgtctacttcttctttgtctagcatcaggattgcaatccttttcttattgctaccaatttgtcttgtaaatctttgttcattattttactgtggtat

SEQ ID NO: 32883 - DNA, 796 bp, Macaca Mulatta
  misc_feature (1)...(796): n = A,T,C or G
aggaaaagccgcataaatgcaaccagtgcggcaaagccttcaaccgcagctccacgctcaacacgcatatccgcatccacgcgggctacaagcccttcgtctgcgaattttgcggcaaaggctttcaccaaaaaggnnnnnnnnnnnnnnnnnnnnnnnnnnnnnnnnnnnnnnnnnnnnnnnnnnnnnnnnnnnnnnnnnnnnnnnnnnnnnnnnnnnnnnnnnnnnnnnnnnnnnnnnnnnnnnnnnnnnnnnnnnnnnnnnnnnnnnnnnnnnnnnnnnnnnnnnnnnnnnnnnnnnnnnnnnnnnnnnnnnnnnnnnnnnnnnnnnnnnnnnnnnnnnnnnnnnnnnnnnnnnnnnnnnnnnnnnnnnnnnnnnnnnnnnnnnnnnnnnnnnnnnnnnnnnnnnnnnnnnnnnnnnnnnnnnnnnnnnnnnnnnnnnnnnnnnnnnnnnnnnnnnnnnnnnnnnnnnnnnnnnnnnnnnnnnnnnnnnnnnnnnnnnnnnnnnnnnnnnnnnnnnnnnnnnnnnnnnnnnnnnnnnnnnnnnnnnnnnnnnnnnnnnnnnnnnnnnnnnnnnnnnncacctttgtatattcaggaaacttatttaaatccagtgcgccgaaacgtatttaattccaggcctccgcttctcctggggcagccagttttaaccccagcctgtcaccgtgagcgccccagaagagcgcggcgcccctaaccatctttatacagccatgtaaatcctcctgtacaagcgaacacggaatatatacgtatataactcaataaacaga

SEQ ID NO: 32884 - DNA, 648 bp, Macaca Mulatta
gccaggatggtcattgaaattaccaggaatgtttaaatcacaaaggactttgcgtgtgtgtgcatgcacgtgcgtgtgttttccatgaggcactgctttttatgcatttccctcccccctctcatctttagaacatttagacattaaagcaaatttctggtgagcaatggaattcacaaagttggacattccactgtttctgaaatagaaaagtaggcggaggcgagaaaaaccctggcagctggatgtacacggtggctggatctctgggtctctggcgatgctgcctggatggagtttgcacgagatacagagcgggcgtggtcttggggagcagagaggtcctcagccagcagcaggccttcctcgagacacgtatggtccagggaaataatggtccatggcctcatcccctttccctgcagggccgcctggaccctccgcccagtgtggcccagtgtggatcacctctgcctgttgtggggctggggttggggtgccgggtgcaccgggcttctgagagtcccagattgtggcttcttatcagcagcacacccaagtggtggtgtgtggccgttacaaagagcatcaccgaccatgcttaaccctgctgccagctgccgggagaatgcagcagcccctctgagg

SEQ ID NO: 32885 - DNA, 120 bp, Macaca Mulatta
gatatggcgagagcttttttccccacttcatgcactgaattttggaattgggggagatacaacaagacatgttttgtggagactaaagaatggagaactggagaatattaagcctaaggt

SEQ ID NO: 32886 - DNA, 1019 bp, Macaca Mulatta
  misc_feature (1)...(1019): n = A,T,C or G
gtgcattgctctgccantgctttggagcagcggggctggcgctgtgacactgcgagaaaactgggggtgaaccccaagggttcccgaaggcactactggtcagtcctacataccagctattctcagagataccatcaaagaacaaacactaatgttaattgcccaattgagtgcttcatgcctttagatgtacaggctgacgaaagacccgaagtaatctttccaaccagaggaacaagcgtgtctctctgccaagatccatctaaactggagtgatgttagcagacccatcttagagttcttgtttctttcttaagccctttgctctggaggaagtgctccagcttcagctcaactcacagcttctccaaagcatcaccctgggagtgtcctgagagttttctcgtaaatgagggctgcacattgcctgttctgcttcaaagtattcaataccgctcagtattttaaatgaagtgattctaacttgtgatttggtgtggtatcaataggaaagcatatgcaggcaaccaagatgcaacatgtattgaaatgatatgaccaaaattttaagtaggaaagtcacccaaacacttctgctttcacttaagtgtctggcccgcgatactgtaggaacaagcatgaccttgttactgtgatattttaaatatccacagtactcactttttccaaatgatcctagtaattgcctagaaatctttctcttacctgttatttatcaatttttcccagtatttttatacggaaaaaattgtattgaaaacacttagtatgcagttgataagaggaatttggtataactatggttggtgattattttttatactgtatgtgccaaagctttactactgtggaaagacaactgttttaataaaagatttacattcnnnnnnnnnnnnnnnnnnnnnnnnnnnnnnnnnnnnnnnnnnnnnnnnnnnnnnnnnnnnnnnnnnnnnnnnnnnnnnnnnnnnnnnnnnnnnnnnnnnnnnnnnnnnnnnnna

SEQ ID NO: 32887 - DNA, 672 bp, Macaca Mulatta
ggggatagatctgtctcgggtgccatttgctaactctgttctctgtgtagctgcttttgacagctcctcatctctcttctaatccaccactcatggtcctagagaacagagaccacaagttaagaccttcacctacagaatcccaagggccagcagtgggcagaggacaactccatccttctttcaaaagggcttctccacaagaagcatttctgttagactctgagcagtgagataccctgcttcaagaagaatttctcatggagccagaagcctttgaaatttgcccttacgatcctcaccaccgaatcccactcagcagattccagtaccacctagcatcatgcaggagaaagaaccccaagaaagccaaaaagatggccatctgcaaatacaacgcctgccacgtggtccccatcaaaaagctggaggaacatgaggctgtttgtgtcaacaggagctctgtggaggaagaggacaccgagaaacctctgaaagttagtcttccaagttcagagcagaacggtgacccccagcaggtctcaccctgccttcccagtcctgatatctggaatgtcgatggcgctaattgccagcttatgtttgtcttaagacttttgtcccccaaagcttgttgtgaaatgaccaaagagtagcgagaagatcgtccca

SEQ ID NO: 32888 - DNA, 674 bp, Macaca Mulatta
ctttttgaactcctgcttcccaaagccagcccatgcccagaaatgacctcaccaggacctctgggtgcctgttcttcgggtgggtcccagcatggcctggcaactgggctgagaccccctgcctgtgcgctctgccctgctgcctctgggagcacacagcacaccctggggacacgtgcccatggtctgctccagctctttcctttccagcccctgacatcaatcctgcctggtacaccagtcgtgggatcaggcctgtgggccgcttcggtcggaggagggcagccctgtgggacgtccccaagcctggcctgcgaccccggctgacttgcttccccctggaaggcgatgctatgtcctcccaggatgggtgatagccagcttgtcaagaaaatcactctggagcctcccccaccccgccctctcctctccttcgggctcctttcccttcaatcctaataaaagctctggtcttgcttagttgcacattcacgactgtgtggtggtgactctgaagttcttccctcctgggacgttagactagaaagaacctcagagcccagcaacttctttggaagaaaaggctctgtgacttggcagagggcacctggcactgaggtgtggagctgggaccacccttggtcaccagcagcccacagtcacccctacaccca

SEQ ID NO: 32889 - DNA, 271 bp, Macaca Mulatta
atgatacataatagatgccatcacaattttcacatgtcgcaaaatgttctcttatttttcaaccaatggaaaatgtaagaacattattaggccacaggccatatgaaaacaggtggtgggccagatttggcctgcaggatgtagttagcctgccctgttctaaataattccattttttattacttttatggtgatagttaatcggcagtaaaggagtagttatgtaaaggacaactataaagtggtgttagtaacttattagtcagtactc

SEQ ID NO: 32890 - DNA, 150 bp, Macaca Mulatta
  misc_feature (1)...(150): n = A,T,C or G
agagtccctggaagcaggaagagtgagggcagactcctgcagctcagcagcactntgcagggattcatctttgagaggacaaagcgaaaagcaccttccccaccctccaaaatacccctgcatcaaagtgatgaaaatagtcgtgtgact

SEQ ID NO: 32891 - DNA, 720 bp, Macaca Mulatta
tggtgagcctggacggacggacgggggctggggctgtccgtgcaagcagcaagttatgcttcccagagacagccccatgcgggaggatccacccaggcaacccagacacgggtgttcacacatgaggcggcgagctccatacaacacagaggaggcacactgacttcaggcggccatgtctgcggggacctgggtgatccaggtgccacagccagaggcaccattccctgcacatggccatcagccaccccagcgtggggcagcctgtccagacagcaccttggggactcccgtgagggtcagcaagggcccgaccccaggcaggactgtgcatggacactgttcttcagccgggacagaactggcctccgctgccttctgccctgctgcatgggctcccggcctggccccacatgagcttgggtgtgatgctgggtgttcccggggcgcccgcctcgcttctttgcctttaaggcacaagcaaggagggaaaacatccctgggcggctccccacatccgtgtaggccacgctggactgtgaaccactgggccacgaaatgaggtttgtaggccacaagcagccttgtgttatgtaacagagaacagaaaacatgaggacatgtaacatgtaaaaaaggaaagtacttgttcacaaaacttttgagttacgtgtgtgtgtaagaaccagatcagactgggaaaaaacccctcgtgccgat

SEQ ID NO: 32892 - DNA, 195 bp, Macaca Mulatta
tacccaacatccaaataaagaactttataacttatcttcatctgctgctgcccatccttgttatttctttcatctggctttggtctccaggtgcaatgaacagaaaatgggcatatattgagacaaatgcatttgctttttctgaagaatttcatcctaaaaaatttgaaaatttactttcttctaagactacct

SEQ ID NO: 32893 - DNA, 570 bp, Macaca Mulatta
  misc_feature (1)...(570): n = A,T,C or G
cccctcctcagcggcagccaggccacagtggcctcggtggtcaccagcacgctcctcgccggcctggggttcggcggtggtggcatctcctctttccccagcaccgtgtggcccacacgcctcccgacagccgcctcagccagcaagcaggcggctaggccagtcctcgccactacagaggccttggcttctccagggccaaatggtgattcatcaccaaccaaggacagcgagggcacnnnggggtgacccacgctgccgaggagcggaaccagacggagcccagccccacaccctcatctcccaacaggactgccgaggggggacatcatactatacctgggcatgagcaggaccacactgccatccccacagaccagacaggcggaaggagggatgccggcccaggcccggaccccgatgcggtcacctccacccaagtgccccccaccgccacagaggagcagtatgcagggagtgaccccaagaggcccgaaatgccatctaaaaagcctgtgtcccgtggggaccgattttctgaagacagcagatttatcactgttaatccag

SEQ ID NO: 32894 - DNA, 139 bp, Macaca Mulatta
cttgcttctgacataaccgtgttcactagcaacctcaaacagacactatggtgcatctgactcctgaggagaagactgttgtcagtgccctgtggggcaaagtgaatgtggatgcagttggtggtgaggccctgggcag

SEQ ID NO: 32895 - DNA, 380 bp, Macaca Mulatta
cacgatggtcgacagcctccttcactttatcacacccccactggtctttgacatctttatctggtttgcttacttcaactcagcctgcaaccccatcatctatgtcttttcctaccggtggtttcggaaggcactgaaactcacactgagtcagaagctcttctcaccgcagacacgcactgttgatttgtaccaagaatgattccttctactaaatgcaggcaaggagtagaacctcacaggaaggatgagcggcactgtgaccgtgggctgtgtggtgttgggtttgtgggcatgcttccaggacagcaaggcttaagtagaagaaaaagacaagctccttaatttggaaaagggtaagcactcccctcattcaatgg

SEQ ID NO: 32896 - DNA, 740 bp, Macaca Mulatta
  misc_feature (1)...(740): n = A,T,C or G
ggtggacttcaagatccgaaccattgagctggatggcaaaactatcaaacttcagatctgggacacagcgggccaggaacggttccggaccatcacttccagctactgccggggggctcatggcatcatcgtggtgtatgacgtcactgaccaggagtcctatgccaacgtgaagcagtggctgcaggagattgaccgctacgccagtgagaacgttaataagctcctggtgggcaacaagagcgacctcaccaccaagaaggtggtggacaacaccacagccaaggagtttgtggactctctgggcatccccttcttggagacaagtgccaagaacgccaccaatgtcgagcaggcgttcatgaccatggctgccgagatcaaaaagtggatggggcccggagcagcctccgggggcgagcggcccaatctcaagatcgacagcaccactgtaaagccggctggcggtggctgttgctaggaggggcacatggagtgggacaggagggggcaccttctccagatgatgtccctgggtggggggcaggaggtgcctccctctccctctcctgnggcatttgagtctgtggctttggggtgtcctgggctccccatctccctctggcccatctgcctgctgccctgagccccagttctgtcagagtccctaagggaggacactcaggacctgtggtcaggcagggcaggggcctgctctgctgctgcctctaggtgacttt

SEQ ID NO: 32897 - DNA, 208 bp, Macaca Mulatta
ggttgtcagttaatatattcaataacctattgctaataccttttaaagtgtgtcttttgagatctatacctgggtgtaggagtcaagttcacctagaatataatactgcccaataggaagtgcaggtctttagaatcataggagtgaacctactctgaatgttcttagtataaatttttaatgtttagagtccagatttgatgatatc

SEQ ID NO: 32898 - DNA, 967 bp, Macaca Mulatta
gggctctttccttgcctaacgcagccatggctcgtggtcccaagaagcatctgaagcgggtagcagctccgaagcattggatgctggataaattgaccggtgtgtttgctcctcgtccatcgaccggtccccacaaattgagagagtgtctccccctcatcatcgtcctaaggaacaaacttaagtatgccctgacaggagatgaagtaaagaagatttgcatgcagcggttcattaagatcgatggcaaggtccgaactgatataacctaccctgctggattcatggatgtcatcagcattgacaagacaggagagaattgccgtctgatctatgacaccaaaggtcgctttgctgaacatcataatacacctgaagaggccaagtacaaattttgcaaagaggaaaaagatctattgtgggctactaaagggaatcccctcagtctgggggacctcatgaaagccctgcaaacaatcccgcataaccccgaatcccccctaccatcaaagggtggaaattgaataacccaatttctgaaatctggaattttttgggacgaacctggggcacaaaaaaatttaccttggaaattttacaaatcccaatatttttcaaaacacacctgtggaaaaaaaatctttggagactaattggggaggaaacctggaggagagggtggactctaaacaccatagaagttaagagaaaattagaggtgggtgtgacagaccacacttgttcgaaaaaagacagtaggggcccatccccccgggggactaccttattgaaaacaataggacttttatatgccttgggaacaggaaagggcccacaatctggggggaaactgtaccacctttatgttcaaatattccgtaaccttttacacccccgccgatttctactggcgtgtaattataggccttaggggggctgaaaacacaagcttcctagggggatttat

SEQ ID NO: 32899 - DNA, 1994 bp, Macaca Mulatta
  misc_feature (1)...(1994): n = A,T,C or G
atcaagaggtggaatctgattcccctcccttgtatcagggctgccttagtgacttgccgataagcacagaatgtggaggaagtgaagctgagtgacttttaaattaaggtcgaaagaagtcttgcaagttcatccttattctctctgaatgtttgccctctagattgtccttccctgaattcagctaccatgctgacaaaagctcatgccatatggaagatctacatgtgggtactactgggtctccaggctcatctcagcccctcctttgagtcaccccagcctaggagtcaaaaatatgagtggagaagcctccagatgactcgagctaccagccacgtagagtctttttatgnnnnnnnnnnnnnnnnnnnaggaaagataagccatccctgctgtgcttctactaattcccgactcattgaannnnnnnnnnnnnnnnnnnnnnnnnnnnnnnnnnnnnnnnnnnnnnnnnnnnnnnnnnnnnnnnnngagacaggggtctcactgtctcccaggctggaatgtagggtgtgctcatagctcactgtagccttaaacttctggactcaagtgatcctctcgccacagcctcctgagtaactgggactacaggcatgtgccagcacacccagttaattnnnnnnnnnnnnnnnnnnnacatgggatcttgctatgttatccgggctggtcttgaactcctatcctaaagtaatcctcctgccttagcattccagagtgctaannnnnnnnnnnnnnnnnnnnnnnnnnnnnnnnnnnnnnnnnnnnnnnnnnnnnnnnnnnnnnnnnnnnnnnnnnnnnnnnnnnnnnnnnnnnnnnnnnnnnnnnnnnnnnnnnnnnnnnnnnnnnnnnnnnnnnnnnnnnnnnnnnnnnnnnnnnnnnnnnnnnnnnnnnnnnnnnnnnnnnnnnnnnnnnnnnnnnnnnnnnnnnnnnnnnnnnnnnnnnnnnnnnnnnnnnnnnnnnnnnnnnnnnnnnnnnnnnnnnnnnnnnnnnnnnnnnnnnnnnnnnnnnnnnnnnnnnnnnnnnnnnnnnnnnnnnnnnnnnnnnnnnnnnnnnnnnnnnnnnnnnnnnnnnnnnnnnnnnnnnnnnnnnnnnnnnnnnnnnnnnnnnnnnnnnnnnnnnnnnnnnnnnnnnnnnnnnnnnnnnnnnnnnnnnnnnnnnnnnnnnnnnnnnnnnnnnnnnnnnnnnnnnnnnnnnnnngtgctcttgggggcccaggaagccccctgcctccacaggctcagaagtgcctgctcctgctgcctggcctttccttattcctggcacccactcttattttggagcaaagttgtggccaagcctgggcactgtcatgacctggccaggtgtgtgtgtgcttgggatggtgctgacacaccaggcccctgctgctttggtgccctccagactttgagtgccagcgagcacaggagggaggccatgggggcactgagggtggcacagcacaggcctgcaggtatcccttggcatgaacagcctgggcaccgtgaacagcagcaggaagtgacaggctcctgagtggaaagggatgtgtcactgctgaagccccaccttcaagccagggatggcctgaagcctgggggccaggctgccagttccacagactggagtgagaacttatggtgcttttttcaggcccacctgtggctgcacattgaccagtcggcatgcacttcctcccctctgaagcccataaaaaccctagactcagccagactctggcagaggtcgggatgacctgcctgcagagaggagttattcactgtggggtcttctctcagctgagagctgaacagatatcaggatgacctgcctgcagaaaggagctacccactgtgggtctcctcttatctgggagctgagcagatgccgggatgacctgcttgcagaaaggagctaccaacttcagatctcctgagagctgtactgttgctgaataaagcacctctttg

SEQ ID NO: 32900 - DNA, 620 bp, Macaca Mulatta
tcagacaatccctgcatgcaaacccctagtactctctcacactcgcacccgcgcctcaagatccctcgcccagaacacacagccgcggagatgacgtcacgcaagacccggcgctgacgtcacatatcaccgtggtgatggtgtcacgtggccatgtagatgtcacgcggccatgtagaggtcatgaagagatttagcgatggcgtcgcgcagatgcgcacgtcgcacacagacatggggggtgtggcatgacgtcacaataagatgcagcaatgacgtcacgggccacgttgacgtcgcacgtcatgtcaatgtcacatagaggcggcgatggcatcacacagatggtgatgatgtcatacacagacacagtgacaacacacaccgtcacaacgtcacctatagatatggcaccaacatcacatgcccgcatgtcctttcacacactctttctacccaattctcacctagtgtcacgtccccccgaccctggcacacgggccaaggtatccacagcatcccaccctaagccgcacagccctgggccccagaaactcccctcctccagcttccttgcctcccagccacttgctcacccccaagtgctgtacccggaggtg

SEQ ID NO: 32901 - DNA, 437 bp, Macaca Mulatta
aaaatatcaaataagcaaaataaaactactgagacaattcaaatatgaaatgcactctgtgtgttcccagggaggaccctgttaggaatgtcagactatagttttcttgatgtgcgcaatgcttttctagtttgtcacttatgaccaaaccctgctcagttctacaacctgtgttggcctgccatcttttccaggtgacttcacctcaccctggcagaatgccctctgggtgggaggggtcctgcaagctgactcagtgccacaggggccaccctggtcatggaaaatggccaggcactcttccctgctggaggtgaggcagcctgctcctaacccaaccacctgtcacagctgtttgcccttcaggcttctcaagcctgattctgacagtagtttagtttgtcctaatgccccagggaacccgagaaaacactcac

SEQ ID NO: 32902 - DNA, 632 bp, Macaca Mulatta
ggtgaaaggcaaacacacagctccagcccaaatcctcctggtggcgcatcctaccccagaggctaaagtgattcaaggactccaggacacctcttaagagcctttctaagaacatgataggcttacttctgctccataataaagtgggagaaaaaagaatgtaacttaagactagataactgtgtacgttatggaccattttcttttttttggctgggtcgagaaatcatataaaatgcagggtgttcagcacggagatcactctcagaacactgggagggtctggcactcgatgggggttagttgcttggcagcctgcctgccactgagggaagtcccattagagacgtatccccaccttgtcaccaacaggatgatgttaccaggtaataaaccctcatccttgtatcttggcttcggtaaatttgaacttagctgacggtagtttcctaattttattttaagtggctttaaagaagtctcatccaagttatcacacagcacttaacccagccctgggatttactgtcttgatgagtaaatggctctgcacagtctgagatgcttcagtgtgcaaggcagcagcggggggaaggtcttcacagggacagctggcaagagacttcccgagg

SEQ ID NO: 32903 - DNA, 781 bp, Macaca Mulatta
  misc_feature (1)...(781): n = A,T,C or G
tctatcntgctccnaggctatccttggcactgttatttttttaaaaataatgcactgactttgctttcaaagaaattactggacagttaaaatatacacacgtgcaaaaattgaggagcaatttcctataaaatgtaagcaagaataatagttattttatgttatttctgtaagtgttagtggcagtaagtaaagaatgaattgtaaaattgtgacagggaaggtagaggagtgctttttgaaacctgttttccattagatcttaaagaaagttgagaacataaatttgtggagaagtgagggtgattattcttaagggaggcgaaagcaagacttagtaacagtgcagaacaaggaatcagcaaagcctgttgaaaacgtcagaaaacgtaggggaagctggagtggcgggttagagttgggagacctgagtgagggtcttggcttccactcagtgggcagttgggacccacctaatgtggaatgaccatggggttctggaatgggctgatacagtgacatatcgcccattttagtggatccatgaatcattttctacaaagtcatcttgtttggttttcagacaaaccttggaaatcaagaaagttctggaatgatgaagctgttcatgccaagacctaaagtgctggcccagtatgagtccattcagttcatgccatggcaattgtcttggaactcctttttattgttagttctcatttgtttccatatttagtgaacatacacttaattggaaagctgtcattaataaaaattctta

SEQ ID NO: 32904 - DNA, 214 bp, Macaca Mulatta
aggtgagggtggaactactccacaatccagccttctgcagcctggccaccgccaagaggcgtcaccagcagaccgtaaccatcccccccaagtcctcgctgtccgttccttatgtcatcgtgcccctaaagaccggccagcaggaagtggaagtcaaggctgccgtctaccattttttcatcagtgacggtgtcaggaagtccctgaaggtcgt

SEQ ID NO: 32905 - DNA, 761 bp, Macaca Mulatta
  misc_feature (1)...(761): n = A,T,C or G
agtgtggaactccaacagaaaccggtgaataaagatcattgtcccagagagagaccagaggagttggagtcaggaggcgtgtaccactgccacagtggctcccaggccacagagaacagggcgaatgagcacgcctatgccaagtggaagctctgtgctgcttcagcaatatgcttcattttcatgattgcagaggtcgtgggtgnnnnnnnnnnnnnnnnnnnnnnnnnnnnnnnnnnnnnnnnnnnnnnnnnnnnnnnnnnnnnnnnnnnnnnnnnnnnnnnnnnnnnnnnnnnnnnnnnnnnnnnnnnnnnnnnnnnnnnnnnnnnnnnnnnnnnnnnnnnnnnnnnnnnnnnnnnnnnnnnnnnnnnnnnnnnnnnnnnnnnnnnnnnnnnnnnnnnnnnnnnnnnnnnnnnnnnnnnnnnnnnnnnnnnnnnnnnnnnnnnnnnnnnnnnnnnnnnnnnnnnnnnnnnnnnnnnnnnnnnnnnnnnnnnnnnnnnnnnnnnnnnnnnnnnnnnnnnnnnnnnnnnnnnnnnnnnnnnnnnnnnnnnnnnnnnnnnnnnnnnnnnnnnnnnnnnnnnnnnnnnnnnnnnnnnnnnnnnnnnnnnnnnnnnnnnnnnnnnnnnnnnnnnnnnnnnnnnnnnnnnnnnnngccagagtataaactagccgacccaatctgcacattcatcttttccatcctggttttggccagcaccatcactatcttaaaggacttctccatcttactcatggaaggt

SEQ ID NO: 32906 - DNA, 905 bp, Macaca Mulatta
tgcaaacccacatctgaagaggatgaatgacgaggaccactgtgatgcctgctggtgaggagccaggctctaagccccaatgcacagggcctatggtgaagaaaagccaagcatggcttcccttctttttgtgttagaagactgtgccttcatctcagtcatagactgagcactggcccctgtcccaggctagggcctgattctggtcacactctgaatactgagccttaatcactgaactatgattctggccctagactgagcctggatcctagtcacagaccgagctttgatgccagttattgactgagccttagtcttggtcacagactgagccccaaccttggtctcaaatggatccatgattctgatcacatattgggccctgaacctggctccagtggtggcctgcaatcaatctttccacatctgccattgttctgaaggagggtgaggggaatgtagatgagtcagtgctaggtgccaatgaaagaccccaaaccacaggtcccagtttcttcttcccaggacttaaaccacatggggtattgtgggaaagagctgggacactggagccaggtcaacttgggtcccatcaagtgcccagtggatgacagctgggtataagggcggcctagctgcaaatgtcctaaccccctgtggtctcattccagattggttcccagtggcttgcgccacccccttatagcatctccttctgggaagctgctgccaccacctaaccagcgtgaaagcctaagtcccaccagaaggaccttcccagatgcccctcctgctcacagtcagaacagcagtttctacacatactctcctgtccctggcaataaaggctcatttctgcacccttctgtgtggctcattgtgttccctccatttgggatttg

SEQ ID NO: 32907 - DNA, 680 bp, Macaca Mulatta
ggaaaggaggttgaagaaggcgaaaagttagacttcagtcttccacttcctatttccacccagttccagcgccaggggcttcagcagacccagcagcagcaacagacagcagctttggtccggcaacttcaacaacagctctccagtaagcctgcctgccttcccaaggagaaccccatggaataaatttagggggcggggtgggccaaagtagctgaaaagatggcttcaggcccaggttatgagaggaggcattctattccatccccttcccttgatacctgaacagctttcctcgtgcatacccacacccctgcctggtctgccatccctgataatctctggtttttcacagatacccagccacagcccagtaccaacatatttggacgctactgagccacctggaggaactgcttgtgcactggatgtggccccaccctttcctcttaattcccaatcccgttcctgggctagcaccagtagtggttggggcccttccctcaggctccgtttttaataagtttttagtatttttgttaatgtgaggcattgagctgttgggttttgtatattatttatatagagaccccagagctgttgcacccaatacacagagcttctttgcaaagggagtgtgtgagttctgcatgtctgggaagggtggtctcttgggagat

SEQ ID NO: 32908 - DNA, 760 bp, Macaca Mulatta
aaagcaagaggacatttccagggcaaaactgagtcagagcctgggcagcagcccatggagttagagaataaggcagctgtacctttggggggcttcctttgcaatgtagcagataaatcaggggccatggagatggctggcctgtgcccctcagcctgcatgcagaccccaggaatgaagctggctattcagttcacaaacaggaaccaatattgctatggctccagggatctccttggactgcacagtatgaagaggcggcagctggctcggcttggctaccgtgtggtagagttatcctactgggaatggttcccactactgaaacgaactcgcttagaaaagttggcatttcttcatgagaaagtattcacctctgctctctgaagggcatttaggggcatttctatgacaaagctgtaggtgtatactgtaccaggtgttgcaaaatgattataaaagccagaatgtaagtttggcaataaaatagtctattgaggagacttagttgtgtccaaggcagattagagctagtgtatgttactgtgaattgtaatgtagttggattgtacaaattgctgcaaatgtatacatattactcttagtaaataataaacatcttaatatgtcctacggtcagtaagtccttgttggatttttctttctgtttaccagccttatgtcacagagtttttagaataaaagtatagtcagacattgtgtaaagccgaatttttaaaaattttattcttttctggag

SEQ ID NO: 32909 - DNA, 138 bp, Macaca Mulatta
gaaacagctgtgctctttccagatctatgaagttccctgggaggacagattgtccctggtgaattccaggtgtcaagaagcctagggatctgtgcctggccagtcacaccaaccgcctcctactcccaccccctgtag

SEQ ID NO: 32910 - DNA, 142 bp, Macaca Mulatta
agatatctgtttattccgagctcaacaagattgaagtaagttttcgggagctacagaaattaaatcaagaaaagaatgatagaggattatattcaattgaagtgctggagctcttatggtattaccaactctccttcataga

SEQ ID NO: 32911 - DNA, 2085 bp, Macaca Mulatta
  misc_feature (1)...(2085): n = A,T,C or G
caggtgagagtggggcagggaagacagaagccagtaagcacatcatgcagtacattgctgctgtcaccaacccaagccagagggctgaggtagagagnnnnnnnnnnnnnnnnnnnnnnnnnnnnnnnnnnnnnnnnnnnnnnnnnnnnnnnnnnnnnnnnnnnnnnnnnnnnnnnnnnnnnnnnnnnnnnnnnnnnnnnnnnnnnnnnnnnnnnnnnnnnnnnnnnnnnnnnnnnnnnnnnnnnnnnnnnnnnnnnnnnnnnnnnnnnnnnnnnnnnnnnnnnnnnnnnnnnnnnnnnnnnnnnnnnnnnnnnnnnnnnnnnnnnnnnnnnnnnnnnnnnnnnnnnnnnnnnnnnnnnnnnnnnnnnnnnnnnnnnnnnnnnnnnnnnnnnnnnnnnnnnnnnnnnnnnnnnnnnnnnnnnnnnnnnnnnnnnnnnnnnnnnnnnnnnnnnnnnnnnnnnnnnnnnnnnnnnnnnnnnnnnnnnnnnnnnnnnnnnnnnnnnnnnnnnnnnnnnnnnnnnnnnnnnnnnnnnnnnnncaccagggaaacatcgaaaatgtggagacggaggagagtgggctgcagaaggagggnnnnnnnnnnnnnnnnnnnnnnnnnnnnnnnnnnnnnnnnnnnnnnnnnnnnnnnnnnnnnnnnnnnnnnnnnnnnnnnnnnnnnnnnnnnnnnnnnnnnnnnnnnnnnnnnnnnnnnnnnnnnnnnnnnnnnnnnnnnnnnnnnnnnnnnnnnnnnnnnnnnnnnnnnnnnnnnnnnnnnnnnnnnnnnnnnnnnnnnnnnnnnnnnnnnnnnnnnnnnnnnnnnnnnnnnnnnnnnnnnnnnnnnnnnnnnnnnnnnnnnnnnnnnnnnnnnnnnnnnnnnnnnnnnnnnnnnnnnnnnnnnnnnnnnnnnnnnnnnnnnnnnnnnnnnnnnnnnnnnnnnnnnnnnnnnnnnnnnnnnnnnnnnnnnnnnnnnnnnnnnnnnnnnnnnnnnnnnnnnnnnnnnnnnnnnnnnnnnnnnnnnnnnnnnnnnnnnnnnnnnnnnnnnnnnnnnnnnnnnnnnnnnnnnnnnnnnnnnnnnnnnnnnnnnnnnnnnnnnnnnnnnnnnnnnnnnnnnnnnnnnnnnnnnnnnnnnnnnnnnnnnnnnnnnnnnnnnnnnnnnnnnnnnnnnnnnnnnnnnnnnnnnnnnnnnnnnnnnnnnnnnnnnnnnnnnnnnnnnnnnnnnnnnnnnnnnnnnnnnnnnnnnnnnnnnnnnnnnnnnnnnnnnnnnnnnnnnntactccgtggaaggcttcatcgacaagaacagagatttcctcttccaggacttcaagcggctgctgtacaacagncagcacggatcccactctacgggccatgtggccagatgggcagcaggacatcacagaggtgaccaagcgccccctgacggccggcacactcttcaagaactccatggtggccctggtggagaaccttgcctccaagnnnnnnnnnnnnnnnnnnnnnnnnnnnnnnnnnnnnnnnnnnnnnnnnnnnnnnnnnnnnnnnnnnnnnnnnnnnnnnnnnnnnnnnnnnnnnnnnnnnnnnnnnnnnnnnnnnnnnnnnnnnnnnnnnnnnnnnnnnnnnnnnnnnnnnnnnnnnnnnnnnncaggtacaagatgacctgtgaatacacatggcccaaccacctgctgggctccgacaaggcagctgtgagcgctctcctggagcagcacggactgcagggggacgtggcctttggccacagcaagctgttcatccgctcaccccggacactggtcacactggagcagagccgagcccgcctcatccccatcattgtgctactattgcagaagnnaggcatggcggggcaccttggcgaggtggcgctgccggaggctgagggctatctacaccatcatgcgctggttccggagacacaaggtgcgaaataacctggctgagctgcagcggcgattccaggctgcaaggcagccgccgctctacgggcgtgaccttgtgtggccgctgccccctgctgtgttgcagcccttccaggacacctgccaagcactcttatgcagg

SEQ ID NO: 32912 - DNA, 852 bp, Macaca Mulatta
tctgtttggttggttggtttgtatgtttgttttggcacagtgtgaaggggtcgcagacctttcacttattatttgctgagttctccatgactgatgtccatttctaccgggtgatccatccccaaccctttctaaaaggctaactgatctttcttgcttctgtatgctctttccctctcttccctctcttttcttaatttcagggactccttccacagatctagtttcaggaaatgtgaaacccagttgtcacagggcagctaagaaaagccatcttcattcgtggagactgtggccctgcaactctgcagaaggactcactggtacttaaaaaatgggacatttgccacccaggaccgactgtatactccccgatcagccagcactctggaagctttgggatccaaagaaccatggaattatacccaaatggactctgaccagatttttgccatactagggggtggcgggatggagaatgggtactcaggcatgactgcgtatttattaaagtgtgttttttcacaatgtaccaaacaaggcataagcagcttctcctgctgactggccaatcactgcccatctgagagatgatttcctctggcccatattgaatttattggaataactcaaaatgcctgaggaaaaatggaaaaattatccaccaatcgattcaaactgaacttcactctttataggaagggaaggtgaagttgtaggagtacgaaacattttcaataaatctgcaaagggaagtcttactacaattctaaaaatcatcatggttggaaatttgggagtagattatttgtgaacttgttacccttttggtaatggtggactaattgtcgt

SEQ ID NO: 32913 - DNA, 1574 bp, Macaca Mulatta
  misc_feature (1)...(1574): n = A,T,C or G
acgccttggctttgacctctgtgacggggagcaggagtttctggacaggaggaagcaggtcgtggccaaggccctgcagcaggtgctgggattgagtgaggctccggacagtggccaggtnnnnnnnnnnnnnnnnnnnnnnnnnnnnnnnnnnnnnnnnnnnnnnnnnnnnnnnnnnnnnnnnnnnnnnnnnnnnnnnnnnnnnnnnnnnnnnnnnnnnnnnnnnnnnnnnnnnnnnnnnnnnnnnnnnnnnnggtgcatctccacactctacagggacccagcctggtcccaggtggccttgcagggccccattgagcgtgcccaggttcacgtctgcagcagtaagatgggagctttgtccacggagcggctacagtactacgctcaggaactgggggtccggaagcgcagtggccacagcgtgtccccggtcgacctctggggcctctttgtggagtatttcctgtaccaggagnnnnnnnnnnnnnnnnnnnnnnnnnnnnnnnnnnnnnnnnnnnnnnnnnnnnnnnnnnnnnnnnnnnnnnnnnnnnnnnnnnnnnnnnnnnnnnnnnnnnnnnnnnnnnnnnnnnnnnnnnnnnnnnnnnnnnnnnnnnnnnnnnnnnnnnnnnnnnnnnnnnnnnnnnnnnnnnnnnnnnnnnnnnnnnnnnnnnnnnnnnnnnnnnnnnnnnnnnnnnnnnnnnnnnnnnnnnnnnnnnnnnnnnnnnaggtgtgtggggcagtgcctttgccaccagcctggaagagatctccctaaagactgtgggctcgggcctcagcttcctggagtggtacagaggcagtgtgaatatnnnnnnnnnnnnnnnnnnnnnnnnnnnnnnnnnnnnnnnnnnnnnnnnnnnnnnnnnnnnnnnnnnnnnnnnnnnnnnnnnnnnnnnnnnnnnnnnnnnnnnnnnnnnnnnnnnnnnnnnnnnnnnnnnnnnnnnnnnnnnnnnnnnnnnnnnnnnnnnnnnnnnnnnnnnnnnnnnnnnnnnnnnnnnnnnnnnnnnnnnnnnnnnnnnnnnnnnnnnnnnnnnnnnnnnnnnnnnnnnnnnnnnnnnnnnnnnnnnnnnnnnnnnnnnnnnnnnnnnnnnnnnnnnnnnnnnnnnnnnnnnnnnnnnnnnnnnnnnnnnnnnnnnnnnnnnnnnnnnnnnnnnnnnnnnnnnnnnnnnnnnnnnnnnnnnnnnnnnnnnnnnnnnnnnnnnnnnnnnnnnnnnnnnnnnnnnnnnnnnnnnnnnnnnnnnnnnnnnnnnnnnnnnnnnnnnnnnnnnnnnnnnnnnnnnnnnnnnnnnnnnnnnnnnnnnnnnnnnnnnnnnnnnnnnnnnnnnnnnnnnnnnnnnnnnnnnnnnnnnnnnnnnnnnnaggtgtggagcgacaaacagctgacgagaaggactttggggactttgtcatcaacagggcagacaccccctatggcatgatgaacttcacctatgagccccaggactttgatcggctggtggccctgagtcgatacaatattctgaacaatgtggagaccttgaagtgtgccctccagctggctctggacc

SEQ ID NO: 32914 - DNA, 703 bp, Macaca Mulatta
  misc_feature (1)...(703): n = A,T,C or G
agggactgcagcccagccccagcctctctgcccatccatttctagtctagccgcatttcagcagtgccttctggggtgtccccccacaccctgctttggctccagaggcgagggcccagtggaggtgccagggaggccccaggaccctctggtccccaggccctgcctccccanccctggggtgggggctcccggccacctgtcttgctcctatggagtcacataagccaacgccagagcccctccaccacaggattcaggcccctgcccctgcctctccattatttatttgctctgctctcaggaagcgacgtgacccctgccccagctggaacctggcagaggcctcaggaccccgttccaagtgcactgcccagccaagccccagcctcagcctgtgcctgagctgcatgtgccaccatttttggcagcgtggcagctttgcaaggggctgtggccctcggcatggggctgtgccttctgtatgttctgtagagcgtctgggatttgctggtgctcaataaatattttttcattgatggtggagatggcaggacgatggtgggggtgggagggatggtaacaggcatgagactacatcgagggagatgggagagctaggaaatgcctggggggagccaggggcaggggtgagagtgagggcagaagtgctgacctggaggcatatagagtgttggtggtt

SEQ ID NO: 32915 - DNA, 1842 bp, Macaca Mulatta
  misc_feature (1)...(1842): n = A,T,C or G
agggccctcgtttaaagcaagcagtttgaaagcagataaaaagttagaatttgttcccacaaacttgcacatacaaaggatgagagttcaagacgatggaggatcannncagatcagaactacgatatcgtcaccatcggggcgccagcagcacactgccaaggttttaagtcaggaggtctccgcaaaaagctgcacaaatttgaagagaccaagaaacaacatcatctggctgccagtccataatctacataccgcaggacgttgtcagagccaaggagatcatcgcccagatcaacaccctgaaaacccaagtcagctactatgcagagcggctgtcaagggcagccaaggacaggtctgccactggccttgagaggacactcgccatcttggcagacaagnnnnnnnnnnnnnnnnnnnnnnnnnnnnnnnnnnnnnnnnnnnnnnnnnnnnnnnnnnnnnnnnnnnnnnnnnnnnnnnnnnnnnnnnnnnnnnnnnnnnnnnnnnnnnnnnnnnnnnnnnnnnnnnnnnnnnnnnnnnnnnnnnnnnnnnnnnnnnnnnnnnnnnnnnnnnnnnnnnnnnnnnnnnnnnnnnnnnnnnnnnnnnnnnnnnnnnnnnnnnnnnnnnnnnnnnnnnnnnnnnnnnnnnnnnnnnnnnnnnnnnnnnnnnnnnnnnnnnnnnnnnnnnnnnnnnnnnnnnnnnnnnnnnnnnnnnnnnnnnnnnnnnnnnnnnnnnnnnnnnnnnnnnnnnnnnnnnnnnnnnnnnnnnnnnnnnnnnnnnnnnnnnnnnnnnnnnnnnnnnnnnnnnnnnnnnnnnnnnnnnnnnnnnnnnnnnnnnnnnnnnnnnnnnnnnnnnnnnnnnnnnnnnnnnnnnnnnnnnnnnnnnnnnnnnnnnnnnnnnnnnnnnnnnnnnnnnnnnnnnnnnnnnnnnnnnnnnnnnnnnnnnnnnnnnnnnnnnnnnnnnnnnnnnnnnnnnnnnnnnnnnnnnnnnnnnnnnnnnnnnnnnnnnnnnnnnnnnnnnnnnnnnnnnnnnnnnnnnnnnnnnnnnnnnnnnnnnnnnnnnnnnnnnnnnnnnnnnnnnnnnnnnnnnnnnnnnnnnnnnnnnnnnnnnnnnnnnnnnnnnnnnnnnnnnnnnnnnnnnnnnnnnnnnnnnnnnnnnnnnnnnnnnnnnnnnnnnnnnnnnnnnnnnnnnnnnnnnnnnnnnnngggaggagctggcaatgctggaggacatgagccttgggatcatggacttgaggaacgtgaccttcaaagtcactcaggccacttccagcgcctccgcagacatgctgcccgtcatcacaggaaatcgngcgacgggtttaacgtgcgggtccctctgccgnnnnnnnnnnnnnnnnnnnnnnnnnnnnnnnnnnnnnnnnnnnnnnnnnnnnnnnnnnnnnnnnnnnnnnnnnnnnnnnnnnnnnnnnnnnnnnnnnnnnnnnnnnnnnnnnnnnnnnnnnnnnnnnnnnnnnnnnnnnnnnnnnnnnnnnnnnnnnnnnnnnnnnnnnnnnnnnnnnnnnnnnnnnnnnnnnnnnnnnnnnnnnnnngcctgcctcggtctcgcagtcagacgtgcctgccagagctgctgcggttcctgggtcagaatgtgcacgcccggaagaataagaacgtggacattctctggcaagccgctgannnnnnnnnnnnnnnnnnnnnnnnnnnnnnnnnnnnnnnnnnnnnnnnnnnnnnnnnnnnnnnnnnnnntgacgctggagcagtgcctgatcctgcagcacgagcatggcatgttcccccaggtcttcacccaggccctggagtgcatgcgcag

SEQ ID NO: 32916 - DNA, 4174 bp, Macaca Mulatta
  misc_feature (1)...(4174): n = A,T,C or G
ggcagcgcatacactacaatggctgctggaaagaggcgtaaggaaacaatttccaggcccgccgcgtccagcccgaaatatgagaaaaaaattattagaaattccgcgggcgatgtagaggcggcggacgggccggagggaggatgttaaagccccgcggnnnnnnnnnnnnnnnnnnnnnnnnnnnnnnnnnnnnnnnnnnnnnnnnnnnnnnnnnnnnnnnnnnnnnnnnnnnnnnnnnnnnnnnnnnnnnnnnnnnnngattggccaaaatgggaaggattggattccactctcttccacgaagagtcaatgggactggctaagatcaaagtctgaggctttttccatctataatcagnnagtccctttttgctttcttttacgaccacatgaaacttgagaagccacctaaagctatatcatttagtggagttgggcagttcccaagtgtccaacaagaaggcctggtttaggctgcgatggccactgtcattcctggtgatttgtcagnnnnnnnnnnnnnnnnnnnnnnnnnnnnnnnnnnnnnnnnnnnnnnnnnnnnnnnnnnnnnnnnnnnnnnnnnnnnnnnnnnnnnnnnnnnnnnnnnnnnnnnnnnnnnnnnnnnnnnnnnnnnnnnnnnnnnnnnnnnnnnnnnnnnnnnnnnnnnnnnnnnnnnnnnnnnnnnnnnnnnnnnnnnnnnnnnnnnnnnnnnnnnnnnnnnnnnnnnnnnnnnnnnnnnnnnnnnnnnnnnnnnnnnnnnnnnnnnnnnnnnnnnnnnnnnnnnnnnnnnnnnnnnnnnnnnnnnnnnnnnnnnnnnnnnnnnnnnnnnnnnnnnnnnnnnnnnnnnnnnnnnnnnnnnnnnnnnnnnnnnnnnnnnnnnnnnnnnnnnnnnnnnnnnnnnnnnnnnnnnnnnnnnnnnnnnnnnnnnnnnnnnnnnnnnnnnnnnnnnnnnnnnnnnnnnnnnnnnnnnnnnnnnnnnnnnnnnnnnnnnnnnnnnnnnnnnnnnnnnnnnnnnnnnnnnnnnnnnnnngcaccagtgcgaacattgtgatcgccggttctacacccgaaaggatgtccggagacacatggtggtgcacactggaagaaaggacttcctctgtcagtattgtgcacagagatttgggcgaaaggatcacctgactcgacatatgaagaagagtcacaatcaagagcttctgaaggtcaaaacagaaccagtggatttccttgacccatttacctgcaatgtgtctgtgcctataaaagacgagctccttccggtgatgtccttaccttccagtgaactgttatcaaagccattcacaaacactttgcagttaaacctctacaacactccatttcagtccatgcagagctcgggatctgcccaccaaatgatcacaactttacctttgggaatgacatgcccaatagatatggacactgttcatccctctcaccacctttctttcaaatatccgttcagttctacctcatatgcaatttctattcctgaaaaagaacagccattaaagggggaaattgagagttacctgatggagttacaaagtggcgtgccctcttcatcccaagattctcaagcatcgtcatcatctaagctagggttggatcctcagattgnggtccctagatgatggtgcaggggacctctccgtatccaaaagctctatctccatcnnnnnnnnnnnnnnnnnnnnnnnnnnnnnnnnnnnnnnnnnnnnnnnnnnnnnnnnnnnnnnnnnnnnnnnnnnnnnnnnnnnnnnnnnnnnnnnnnnnnnnnnnnnnnnnnnnnnnnnnnnnnnnnnnnnnnnnnnnnnnnnnnnnnnnnnnnnnnnnnnnnnnnnnnnnnnnnnnnnnnnnnnnnnnnnnnnnnnnnnnnnnnnnnnnnnnnnnnnnnnnnnnnnnnnnnnnnnnnnnnnnnnnnnnnnnnnnnnnnnnnnnnnnnnnnnnnnnnnnnnnnnnnnnnnnnnnnnnnnnnnnnnnnnnnnnnnnnnnnnnnnnnnnnnnnnnnnnnnnnnnnnnnnnnnnnnnnnnnnnnnnnnnnnnnnnnnnnnnnnnnnnnnnnnnnnnnnnnnnnnnnnnnnnnnnnnnnnnnnnnnnnnnnnnnnnnnnnnnnnnnnnnnnnnnnnnnnnnnnnnnnnnnnnnnnnnnnnnnnnnnnnnnnnnnnnnnnnnnnnnnnnnnnnnnnnnnnnnnnnnnnnnnnnnnnnnnnnnnnnnnnnnnnnnnnnnnnnnnnnnnnnnnnnnnnnnnnnnnnnnnnnnnnnnnnnnnnnnnnnnnnnnnnnnnnnnnnnnnnnnnnnnnnnnnnnnnnnnnnnnnnnnnnnnnnnnnnnnnnnnnnnnnnnnnnnnnnnnnnnnnnnnnnnnnnnnnnnnnnnnnnnnnnnnnnnnnnnnnnnnnnnnnnnnnnnnnnnnnnnnnnnnnnnnnnnnnnnnnnnnnnnnnnnnnnnnnnnnnnnnnnnnnnnnnnnnnnnnnnnnnnnnnnnnnnnnnnnnnnnnnnnnnnnnnnnnnnnnnnnnnnnnnnnnnnnnnnnnnnnnnnnnnnnnnnnnnnnnnnnnnnnnnnnnnnnnnnnnnnnnnnnnnnnnnnnnnnnnnnnnnnnnnnnnnnnnnnnnnnnnnnnnnnnnnnnnnnnnnnnnnnnnnnnnnnnnnnnnnnnnnnnnnnnnnnnnnnnnnnnnnnnnnnnnnnnnnnnnnnnnnnnnnnnnnnnnnnnnnnnnnnnnnnnnnnnnnnnnnnnnnnnnnnnnnnnnnnnnnnnnnnnnnnnnnnnnnnnnnnnnnnnnnnnnnnnnnnnnnnnnnnnnnnnnnnnnnnnnnnnnnnnnnnnnnnnnnnnnnnnnnnnnnnnnnnnnnnnnnnnnnnnnnnnnnnnnnnnnnnnnnnnnnnnnnnnnnnnnnnnnnnnnnnnnnnnnnnnnnnnnnnnnnnnnnnnnnnnnnnnnnnnnnnnnnnnnnnnnnnnnnnnnnnnnnnnnnnnnnnnnnnnnnnnnnnnnnnnnnnnnnnnnnnnnnnnnnnnnnnnnnnnnnnnnnnnnnnnnnnnnnnnnnnnnnnnnnnnnnnnnnnnnnnnnnnnnnnnnnnnnnnnnnnnnnnnnnnnnnnnnnnnnnnnnnnnnnnnnnnnnnnnnnnnnnnnnnnnnnnnnnnnnnnnnnnnnnnnnnnnnnnnnnnnnnnnnnnnnnnnnnnnnnnnnnnnnnnnnnnnnnnnnnnnnnnnnnnnnnnnnnnnnnnnnnnnnnnnnnnnnnnnnnnnnnnnnnnnnnnnnnnnnnnnnnnnnnnnnnnnnnnnnnnnnnnnnnnnnnnnnnnnnnnnnnnnnnnnnnnnnnnnnnnnnnnnnnnnnnnnnnnnnnnnnnnnnnnnnnnnnnnnnnnnnnnnnnnnnnnnnnnnnnnnnnnnnnnnnnnnnnnnnnnnnnnnnnnnnnnnnnnnnnnnnnnnnnnnnnnnnnnnnnnnnnnnnnnnnnnnnnnnnnnnnnnnnnnnnnnnnnnnnnnnnnnnnnnnnnnnnnnnnnnnnnnnnnnnnnnnnnnnnnnnnnnnnnnnnnnnnnnnnnnnnnnnnnnnnnnnnnnnnnnnnnnnnnnnnnnnnnnnnnnnnnnnnnnnnnnnnnnnnnnnnnnnnnnnnnnnnnnnnnnnnnnnnnnnnnnnnnnnnnnnnnnnnnnnnnnnnnnnnnnnnnnnnnnnnnnnnnnnnnnnnnnnnnnnnnnnnnnnnnnnnnnnnnnnnnnnnnnnnnnnnnnnnnnnnnnnnnnnnnnnnnnnnnnnnnnnnnnnnnnnnnnnnnnnnnnnnnnnnnnnnnnnnnnnnnnnnnnnnnnnnnnnnnnnnnnnnnnnnnnnnnnnnnnnnnnnnnnnnnnnnnnnnnnnnnnnnnnnnnnnnnnnnnnnnnnnnnnnnacacatatcgcacttcatagaatcaaagttgctctctgaaggagcttgggctcctgatattttatcatgctcctatatttttttaatcctaggagcagtagtttttatacttatgtatttaaattttattatgaaaaattacatttattaaaaaagtgtgttccaaaggcattaaaattatatatgttaataaggaagtacatttttaaatttttcaaactgctcctagcttttggttaggagaatatttgatctgaaagtaggc

SEQ ID NO: 32917 - DNA, 579 bp, Macaca Mulatta
tcatcctgcccagggcttggcactctgccttcctcctggcagtggtgccaaggtacgtgctaacacagcaattggcttaacacatgatactcctcccttttgtgtcacaagaaaaagattttaatcttccctggggctttctggaaaccatgccttaatctggattctagaaaaatgcttttaatggtggtaattttggtcactaaggcacacatcaaatctcaggatgatggtatctgccgtcttagccaatgtgcagagtcaactccaggaaaccgggggaggctcaggattgaagatttaatcttcactgctgttttctaagcctgtttttatcttttgttttcaggagaggccattcccctggtactggccctgtttgcctttgttggcttcatgctgatccttgtggtcgtgccactgttcgtctggaaaatgggccggctgctccagtactcctgttgccctgtggtggtcctcccagacaccttggtaatagagtagttctttattcctttcagtgtaacactgaccagatgtagcttggaccttagctgggcatggacacatgtttccatg

SEQ ID NO: 32918 - DNA, 776 bp, Macaca Mulatta
ggagacagggtactaatttttatactgtttttttataaaaatatttatattgttggtgctcaaatcaccaatttctagctagatcattttgcaaccttcttttcagcatttaataacaaagtttttaaaaatgacccatcttttagtaaacttgacatgttattccaccaaaaaaaatcacaagttatctggcctttgagatctttttggaattggacctggttgaataaggacctcataaaagggaaaaataaattttgcagtcagcttcttcataacattgtcaaggaaattctaggcaatcattcctgtcacccaagaactagaattttggttgactggaactagtgagctgtgtccctggtgtgtcatgaaggatggaccccagcaagtaacgtgagccactgggcagatcccagggaccagtacttgctgcaggatctagtctgtgtgtaatagtcttggccatggctctgctgaaagcaagccattcagtttcttgttttgtaccttaaacacccaaaaagataaacactgaaatccagccgctttgtccatggtcagttgacctcccttttgctgtggctgcatccatactgcattgtggggtagagtaacttccccgaaaaaaaagaaaagcctgcagtggtttggatgaacttttctgccaaatacagcttaactgaaaggtgaaattcttgtgcaggcaggccatgcccaaaattcttgccgccttttgttttgcccaaaactaaaaatgcaagggaaatgcaaat

SEQ ID NO: 32919 - DNA, 665 bp, Macaca Mulatta
  misc_feature (1)...(665): n = A,T,C or G
ttagtcagttggtttatattcttctttctcctcgtatcttacatggtcatcttgatgatgctgaggtctcacactggggaaggcaggaggaaagccatctccacctgcacctcccacatcactgtggtgaccctgcatttcgtgccctgcatctatgtctatgcccggcccttcactgccctccccacagacaccgccatctctgtcaccttcactgtcatctctcctttgctcaatcctgtaatctacacgctgaggaatcaggaaatgaagttggccatgaggaaactaaagaaacggctaggacaatcagaaagagttttaactcaacaaggatgagatagtacccatattttaaaatagacattaaatttcgctttctcaaaatgggaaaagagcatgttcatgcccaaaataaagagatacctatggctaccatcgagtcctaaaagaagttgttcgatagtatgggctggggaccacgtggatgatactactttaagacaaaatccgttcaagtctttccctactcactttcaattattcattccacaaatttttatagaacatacactatatgcctganagtactgggattcagattgctgcaaaaagattacatgtagtcaccttgctggaggcataacccaaaatactttttaaan

SEQ ID NO: 32920 - DNA, 779 bp, Macaca Mulatta
ggatcccacccaggctgatcattcagatatgggacaatgacaagttttctctggatgactacttgggtttcctagaacttgacttgcatcacactatcattcctgcaaaatcaccagagaaatgcagtttggacatgattccggacctcaaagccatggacccccttaaagccaagacagcctccctctttgagcagaagtccatgaaaggatggtggccgtgctacgcagagaaagatggcgcccgcgtgatggctgggaaagtggagatgacattggaaatcctcaacgagaaggaggccgacgagaggccagccgggaaggggcgggacgaacccaacatgaaccccaagctggacttaccaaatcgaccagaaacctccttcctctggttcaccaacccatgcaagaccatgaagttcatcgtgtggcgccgctttaagtgggtcatcatcggcttgctgttcctgctcattctgctgctcttcgtggccgtgctcctctactcgttgccgaactatttgtcaatgaagattgtaaagccaaatgcgtaacaaaagcaaaggcttcatttcaagagtcatccagcaatgagagaatcctgcctctgtggaccaatatccagtgtgattttgtgtctgagaccacaccccagtagcaggtttcactacgtcaccgagccccattgattcccagagggtcttagtcctgggaagtcaggccaacaagcaacatttgcatcatgttgtcctctaagtattaaaaggttgtattttcta

SEQ ID NO: 32921 - DNA, 467 bp, Macaca Mulatta
actcggggagagttacttttctgttccctttaacccccagcgggccctgcctccctgggagattggggggcgagactcaggggccctggggccaggtgagcctgcagtcactgccaggtccctggagcccctgggtgggtgccccaggaactccaggaaggctcagagctcgagccggctccgcccagcattgatggggcaatcgtaggcctccaggtgaccgagcccttgtccctcctctccgttagggtgcctggaggggggtacacttggggcttgcctggccccaggttcccagtccttaatgctccttaacccactgtgatgacttcctaggccttgaggaaagggaaggagaggggaggctgccggtggcttaccaagatgccggaaaccccggaatcctcagggtgagcctcttggggtcatgtccccaagctcctgtccttggggtcaggagatgccac

SEQ ID NO: 32922 - DNA, 773 bp, Macaca Mulatta
  misc_feature (1)...(773): n = A,T,C or G
ggtataaaccagctataaaccatattatactacttttctttgcccacctcatagatagttatcagtaaaactaatcaaaatgtttaacagccagaatgacagtcattgaccagtccaaatagtacttgacctagagaggccctagccataaataagtagagccataagatgtgaaccagtgaatagcaaactcgattgttgtgagaatgaaataacgtgtatgagttataaaaaggtttagcacagtacttaccacatattaagggctaaatgtttattatgatcagcaaaatggtggtatatgtagataatagcagtaatctaaaatcttttgataagactaaggcagtgacttttaacagggattgggaggcggtacatgttagggatgggggagagaaggaatttgaggataaaggcaatatgatctgaaaactcactttcagcatagctattcttacagaattaataggggaaataaagcttaaacttttgactgggaatacaccagaagagaataaaagtatttgtgggcattgtttggggtgagaaaaaagttgataaaacctgaagggaatataggaagctcaaaaattaaatttggtttttcttaatttttccaaggtatggcctccattctggaaaccaccaagaactggcttccttaaaaaaatgcacaaggcgccctaaatcccttgaaaaatttatggtttcccctaaaccccaacttttgaaagattaatttgnnnnnnnnnnnnnnnnnnnnnnnnnnn

SEQ ID NO: 32923 - DNA, 185 bp, Macaca Mulatta
gtctggggagaatgtaatcattctttccacaactgctgcatgtccctgtgggtgaaacagaacaatcgctgccctctctgccagcaggactgggtggtccaaagaatcggcaaatgagagtggttagacggcttcttagtgcggttgttcagagccctggtggatcttgtaatccagtgccctac

SEQ ID NO: 32924 - DNA, 1365 bp, Macaca Mulatta
  misc_feature (1)...(1365): n = A,T,C or G
ncttcaattagtggagacacaggggttatccacgtagtagagagagaagaggacctacagtgggtattgactgatggccccaaccccccttacatggttctgctggagagcaagctttttaccagnnnnnnnnnnnnnnnnnnnnnnnnnnnnnnnnnnnnnnnnnnnnnnnnnnnnnnnnnnnnnnnnnnnnnnnnnnnnnnnnnnnnnnnnnnnnnnnnnnnnnnnnnnnnnnnnnnnnnnnnnnnnnnnnnnnnnnnnnnnnnnnnnnnnnnnnnnnnnnnnnnnnnnnnnnnnnnnnnnnnnnnnnnnnnnnnnnnnnnnnnnnnnnnnnnnnnnnnnnnnnnnnnnnnnnnnnnnnnnnnnnnnnnnnnnnnnnnnnnnnnnnnnnnnnnnnnnnnnnnnnnnnnnnnnnnnnnnnnnnnnnnnnnnnnnnnnnnnnnnnnnnnnnnnnnnnnnnnnnnnnnnnnnnnnnnnnnnnnnnnnnnnnnnnnnnnnnnnnnnnnnnnnnnnnnnnnnnnnnnnnnnnnnnnnnnnnnnnnnnnnnnnnnnnnnnnnnnnnnnnnnnnnnnnnnnnnnnnnnnnnnnnnnnnnnnnnnnnnnnnnnnnnnnnnnnnnnnnnnnnnnnnnnnnnnnnnnnnnnnnnnnnnnnnnnnnnnnnnnnnnnnnnnnnnnnnnnnnnnnnnnnnnnnnnnnnnnnnnnnnnnnnnnnnnnnnnnnnnnnnnnnnnnnnnnnnnnnnnnnnnnnnnnnnnnnnnnnnnnnnnnnnnnnnnnnnnnnnnnnnnnnnnnnnnnnnnnnnnnnnggaaacttttgactacattggcagctcgaggatggtctacgatatggagaagggcaagtttcctgtgcagttagagaatgtggactcatttgtggagctgggacaggnnnnnnnnnnnnnnnnnnnnnnnnnnnnnnnnnnnnnnnnnnnnnnnnnnnnnnnnnnnnnnnnnnnnnnnnnnnnnnnnnnnnnnnnnnnnnnnnnnnnnnnnnnnnnnnnnnnnnnnnnnnnnnnnnnnnnnnnnnnnnnnnnnnnnnnnnnnnnnnnnnnnnnnnnnnnnnnnnnnnnnnnnnnnnnnnnnnnnnnnnnnnnnnnnnnnnnnnnnnnnnnnnnnnnnnnnnnnnnnnnnnnnnnnntattaccagagtatttacgacactgctgagaacattaatgtgagctatcccgaatggctgagccctgaagaggacctgaactttgtaacagacactgccaaggnaggccctggcagatgtggccacgttgctgggacgtgctctgtatgagcttgcaggaggaaccaacttcagcgacacagttcaggctgatccccaaacggt

SEQ ID NO: 32925 - DNA, 2509 bp, Macaca Mulatta
  misc_feature (1)...(2509): n = A,T,C or G
gtttaatacaattttttagtaaaatgaagaagtggatggacatgtcaaatctaccacaagaatttcgtgaacgtatagaaaggctagagagaaattttgaggtgtctactgtaatattcaaaaaatatgagccaatttttttagatatatttcaaaatccatatgaagaaccaccaaagttactgcgaagccggaagcagaggnnnnnnnnnnnnnnnnnnnnnnnnnnnnnnnnnnnnnnnnnnnnnnnnnnnnnnnnnnnnnnnnnnnnnnnnnnnnnnnnnnnnnnnnnnnnnnnnnnnnnnnnnnnnnnnnnnnnnnnnnnnnnnnnnnnnnnnnnnnnnnnnnnnnnnnnnnnnnnnnnnnnnnnnnnnnnnnnnnnnnnnnnnnnnnnaggtttaccgtctgattttcatactgctgactttagggcttctgaagagccgccctgcatcattgctgtactgtgtgaactgcatgatggacttctagtagaagcaaaaggaataaaggagcactactttaagccatatatttcaaaactctttgacaggaannnnnnnnnnnnnnnnnnnnnnnnnnnnnnnnnnnnnnnnnnnnnnnnnnnnnnnnnnnnnnnnnnnnnnnnnnnnnnnnnnnnnnnnnnnnnnnnnnnnnnnnnnnnnnnnnnnnnnnnnnnnnnnnnnnnnnnnnnnnnnnnnnnnnnnnnnnnnnnnnnnnnnnnnnnnnnnnnnnnnnnnnnnnnnnnnnnnnnnnnnnnnnnnnnnnnnnnnnnnnnnnnnnnnnnnnnnnnnnnnnnnnnnngcaccttctacccctctgacaggacggagatatttacgagaaaaagaagcagtcattactcctgttgcatcagccacccaaagtgtcagccggttacagagtattgtggctggtctgaaaaatgcaccaagtgaccaacttacaaatatttttgannnnnnnnnnnnnnnnnnnnnnnnnnnnnnnnnnnnnnnnnnnnnnnnnnnnnnnnnnnnnnnnnnnnnnnnnnnnnnnnnnnnnnnnnnnnnnnnnnnnnnnnnnnnnnnnnnnnnnnnnnnnnnnnnnnnnnnnnnnnnnnnnnnnnnnnnnnnnnnnnnnnnnnnnnnnnnnnnnnnnnnnnnnnnngaagacttcatggaatggacatgtcnnnnnnnnnnnnnnnnnnnnnnnnnnnnnnnnnnnnnnnnnnnnnnnnnnnnnnnnnnnnnnnnnnnnnnnnnnnnnnnnnnnnnnnnnnnnnnnnnnnnnnnnnnnnnnnnnnnnnnnnnnnnnnnnnnnnnnnnnnnnnnnnnnnnnnnnnnnnnnnnnnnnnnnnnnnnnnnnnnnnnnnnnnnnnnnnnnnnnnnnnnnnnnnnnnnnnnnnnnnnnnnnnnnnnnnnnnnnnnnnnnnnnnnnnnnnnnnnnnnnnnnnnnnnnnnnnnnnnnnnnnnnnnnnnnnnnnnnnnnnnnnnnnnnnnnnnnnnnnnnnnnnnnnnnnnnnnnnnnnnnnnnnnnnnnnnnnnnnnnnnnnnnnnnnnnnnnnnnnnnnnnnnnnnnnnnnnnnnnnnnnnnnnnnnnnnnnnnnnnnnnnnnnnnnnnnnnnnnnnnnnnnnnnnnnnnnnnnnnnnnnnnnnnnnnnnnnnnnnnnnnnnnnnnnnnnnnnnnnnnnnnnnnnnnnnnnnnnnnnnnnnnnnnnnnnnnnnnnnnnnnnnnnnnnnnnnnnnnnnnnnnnnnnnnnnnnnnnnnnnnnnnnnnnnnnnnnnnnnnnnnnnnnnnnnnnnnnnnnnnnnnnnnnnnnnnnnnnnnnnnnnnnnnnnnnnnnnnnnnnnnnnnnnnnnnnnnnnnnnnnnnnnnnnnnnnnnnnnnnnnnnnnnnnnnnnnnnnnnnnnnnnnnnnnnnnnnnnnnnnnnnnnnnnnnnnnnnnnnnnnnnnnnnnnnnnnnnnnnnnnnnnnnnnnnnnnnnnnnnnnnnnnnnnnnnnnnnnnnnnnnnnnnnnnnnnnnnnnnnnnnnnnnnnnnnnnnnnnnnnnnnnnnnnnnnnnnnnnnnnnnnnnnnnnnnnnnnnnnnnnnnnnnnnnnnnnnnnnnnnnnnnnnnnnnnnnnnnnnnnnnnnnnnnnnnnnnnnnnnnnnnnnnnnnnnnnnnnnnnnnnnnnnnnnnnnnnnnnnnnnnnnnnnnnnnnnnnnnnnnnnnnnnnnnnnnnnnnnnnnnnnnnnnnnnnnnnnnnnnnnnnnnnnnnnnnnnnnnnnnnnnnnnnnnnnnnnnnnnnnnnnnnnnnnnnnnnnnnnnnnnnnnnnnnnnnnnnnnnnnnnnnnnnnnnnnnnnnnnnnnnnnnnnnnnnnnnnnnnnnnnnnnnnnnnnnnnnnnnnnnnnnnnnnnnnnnnnnnnnnnnnnnnnnnnnnnnnnnnnnnnnnnnnnnnnnnnnacttggaagatgctacaaaaacacctgacagttccagtggaccagtgaaagaggaaagaggtgatcttataaaattttac

SEQ ID NO: 32926 - DNA, 191 bp, Macaca Mulatta
tttttcccaggtcatgagtctcgggcttcagaagctctgtgctgggcagaaggacagcgactctttagtgctggactcaatggcgagattatggagtatgatttacaggcattaaacatcaagtatgctgtggatgtctttggaggacctatttggagcatggctgtcagccccagtggctctcaactttt

SEQ ID NO: 32927 - DNA, 831 bp, Macaca Mulatta
  misc_feature (1)...(831): n = A,T,C or G
aagaccgtagtgctttagccatgtggctgaatcacttggaggaccgcacgtcaaccagctttggtggccagaaccgaggccgctcagactctgtggattatggacagacacactattatcaccaaagacagaactccgacgacaagctcaatgggtggcagaactctcgggattctgggatttgcatcaatgcctccaactggcaggacaaaagcatggggtgtgagaatggtcatgtgcccctctactcctcctcatctgtccccaccacaatcaatacgattggaaccagcacaagtacatgttccagcctggctaaaaagcctccgcctgcacaaatatgctgcgcttttctcccagatgacctatgaggagatgatggccctcaccgagtgccagctggaggcgcagnnnnnnnnnnnnnnnnnnnnnnnnnnnnnnnnnnnnnnnnnnnnnnnnnnnnnnnnnnnnnnnnnnnnnnnnnnnnnnnnnnnnnnggacatcatcgaggggggcagcctgcgcgtcccgctccaggaactacaccagatgatcctgactcccatcaaggcctacggctccccgagcaccacgcccgaggctcgcccccgggagccccaggccccgcgccagccctcactgatgggccctgagagccagagccccgactgcaaagatggggccacagccactggcgccatggccaccccctcggccggggccagtggggggctccagccgcaccagctgagcagctgcgatggggagctggccgtcgcccccctgccggagggggacctccccgggcagttcacacgcgtcatggggaaa

SEQ ID NO: 32928 - DNA, 91 bp, Macaca Mulatta
agggaacaaacaaaccatgctatcacataatgctatggtgaagcagagaaaacagcaagcaacagccatcatgaaggaagttcatggaaat

SEQ ID NO: 32929 - DNA, 93 bp, Macaca Mulatta
tatattcatcagttacactttcactgttcccgcaaagtcaagcaaatatatggctatttgaagacactgttttaattactggaaaattagctg

SEQ ID NO: 32930 - DNA, 111 bp, Macaca Mulatta
gagctgctcaacctggagaagcgcaggaccgtgagtctccagatcgacgggaataagagcaagcagcagaagaggaaagagaagctcaaaggcaagtgcgtgatcatgtga

SEQ ID NO: 32931 - DNA, 3019 bp, Macaca Mulatta
  misc_feature (1)...(3019): n = A,T,C or G
tggtcggtttggtaatcagatgggacagtatgccacgctgctggctctggcccagctcaatggccgccgggccttcatcctgcctgccatgcatgccgccctggcgccggtattccgcatcaccctgcccgtgctggccccagaagtggacagccgcacaccgtggcgggagctgcagcttcacgactggatgtcggaggagtatgcggacttgagggatcctttcctgaagctctctggcttcccctgctcttggactttcttccaccatctacgggaacagatccgcagggagttcaccctgcacgaccaccttcgggaagaggcgcagagcgtgctgggtcagctccgcctgggcctcacgggggaccgcccgcgcacctttgtgggcgtccacgtgcgccgtggggactatctgcaggttatgcctcagcgctggaagggtgtggtgggcgacagcgcctacctccggcaggccatggactggttccgggcacggcacgaagccccggtttttgtggttaccagcaacggcatggagtggtgtaaagaaaacatcgacacctcccagggcgacgtgacgtttgctggcgatggacaggaggctacaccgtggaaagactttgccctgctcacacagtgcaaccacaccattatgaccattggcaccttcggcttctgggctgcctacctggctggcggagacactgtctacctggccaacttcaccctgccagactctgnnnnnnnnnnnnnnnnnnnnnnnnnnnnnnnnnnnnnnnnnnnnnnnnnnnnnttaatgcagacttgtctccactctggacattggctgagccttgagagccttttgaccctttctgaaatagcctgatctttctagagccagcagtacatggctctaggcctggcatcttctggagaagtctgtggtgttcctgaagcaaatgggtgcccgtttccagagcgattctagttgggagagttggagagaagggggacctttctggaactgtccgaacattctagaactagcaaaacatcttttcctgatggctggcaggcagttctagaagccacagtgcccaactgctcttcccagcccatatctacagtacttccagatggctgcccccaggaataggaaactctccctctggtctattctagaagaggggttacttctcccttgggtcctccaaagactgaaggaaaatatgattttccagagcaaacattcaccaagtccccttctgtgtttctggagtgattctagagggagacttcttctagagagggccagatttgatgcctgtaaagaaccctgcagggcccttagagacaggatggggttctggannnnnnnnnnnnnnnnnnnnnnnnnnnnnnnnnnnnnnnnnnnnnnnnnnnnnnnnnnnnnnnnnnnnnnnnnnnnnnnnnnnnnnnnnnnnnnnnnnnnnnnnnnnnnnnnnnnnnnnnnnnnnnnnnnnnnnnnnnnnnnnnnnnnnnnnnnnnnnnnnnnnnnnnnnnnnnnnnnnnnnnnnnnnnnnnnnnnnnnnnnnnnnnnnnnnnnnnnnnnnnnnnnnnnnnnnnnnnnnnnnnnnnnnnnnnnnnnnnnnnnnnnnnnnnnnnnnnnnnnnnnnnnnnnnnnnnnnnnnnnnnnnnnnnnnnnnnnnnnnnnnnnnnnnnnnnnnnnnnnnnnnnnnnnnnnnnnnnnnnnnnnnnnnnnnnnnnnnnnnnnnnnnnnnnnnnnnnnnnnnnnnnnnnnnnnnnnnnnnnnnnnnnnnnnnnnnnnnnnnnnnnnnnnnnnnnnnnnnnnnnnnnnnnnnnnnnnnnnnnnnnnnnnnnnnnnnnnnnnnnnnnnnnnnnnnnnnnnnnnnnnnnnnnnnnnnnnnnnnnnnnnnnnnnnnnnnnnnnnnnnnnnnnnnnnnnnnnnnnnnnnnnnnnnnnnnnnnnnnnnnnnnnnnnnnnnnnnnnnnnnnnnnnnnnnnnnnnnnnnnnnnnnnnnnnnnnnnnnnnnnnnnnnnnnnnnnnnnnnnnnnnnnnnnnnnnnnnnnnnnnnnnnnnnnnnnnnnnnnnnnnnnnnnnnnnnnnnnnnnnnnnnnnnnnnnnnnnnnnnnnnnnnnnnnnnnnnnnnnnnnnnnnnnnnnnnnnnnnnnnnnnnnnnnnnnnnnnnnnnnnnnnnnnnnnnnnnnnnnnnnnnnnnnnnnnnnnnnnnnnnnnnnnnnnnnnnnnnnnnnnnnnnnnnnnnnnnnnnnnnnnnnnnnnnnnnnnnnnnnnnnnnnnnnnnnnnnnnnnnnnnnnnnnnnnnnnnnnnnnnnnnnnnnnnnnnnnnnnnnnnnnnnnnnnnnnnnnnnnnnnnnnnnnnnnnnnnnnnnnnnnnnnnnnnnnnnnnnnnnnnnnnnnnnnnnnnnnnnnnnnnnnnnnnnnnnnnnnnnnnnnnnnnnnnnnnnnnnnnnnnnnnnnnnnnnnnnnnnnnnnnnnnnnnnnnnnnnnnnnnnnnnnnnnnnnnnnnnnnnnnnnnnnnnnnnnnnnnnnnnnnnnnnnnnnnnnnnnnnnnnnnnnnnnnnnnnnnnnnnnnnnttttctggaagtgtggaggcataaacaccccctctgtttttgtgacaagctggtaagcactgtgctcattgctaaccattgtctgcccctgaacacccagaaccatttcatctggctttgggcaggtctgagataaaaggatctaaaggcctgcagacactggacccagcctcaaatccaggcaggagcacgaggtctggccaaggtggacaggattgtcgagatctcaggagtcccttgcttttttttggagggtgaaagaagaaatcttaaacttagtcaactctgatcacatcccctatctactcatccaggatcccatgcctccaagcttatcagggagttacacatacagtacaattgttacagttacagcactgttcccaactcagctgccgcaggtaagagagcaggaggtatgaattaaaagtctacagca

SEQ ID NO: 32932 - DNA, 3396 bp, Macaca Mulatta
  misc_feature (1)...(3396): n = A,T,C or G
gagtggactcactcctctccatctggtagcacaggaaggccacgttccagtggcagacgtgctgatcaaacacggcgtcatggtggatgccaccacccggnnnnnnnnnnnnnnnnnnnnnnnnnnnnnnnnnnnnnnnnnnnnnnnnnnnnnnnnnnnnnnnnnnnnnnnnnnnnnnnnnnnnnnnnnnnnnnnnnnnnnnnnnnnnnnnnnnnnnnnnnnnnnnnnnnnnnnnnnnnnnnnnnnnnnnnnnnnnnnnnnnnnnnnnnnnnnnnnnnnnnnnnnnnnnnnnnnnnnnnnnnnnnnnnnnnnnnnnnnnnnnnnnnnnnnnnnnnnnnnnnnnnnnnnnnnnnnnnnnnnnnnnnnnnnnnnnnnnnnnnnnnnnnnnnnnnnnnnnnnnnnnnnnnnnnnnnnnnnnnnnnnnnnnnnnnnnnnnnnnnnnnnnnnnnnnnnnnnnnnnnnnnnnnnnnnnnnnnnnnnnnnnnnnnnnnnnnnnnnnnnnnnnnnnnnnnnnnnnnnnnnnnnnnnnnnnnnnnnnnnnnnnnnnnnnnnnnnnnnnnnnnnnnnnnnnnnnnnnnnnnnnnnnnnnnnnnnnnnnnnnnnnnnnnnnnnnnnnnnnnnnnnnnnnnnnnnnnnnnnnnnnnnnnnnnnnnnnnnnnnnnnnnnnnnnnnnnnnnnnnnnnnnnnnnnnnnnnnnnnnnnnnnnnnnnnnnnnnnnnnnnnnnnnnnnnnnnnnnnnnnnnnnnnnnnnnnnnnnnnnnnnnnnnnnnnnnnnnnnnnnnnnnnnnnnnnnnnnnnnnnnnnnnnnnnnnnnnnnnnnnnnnnnnnnnnnnnnnnnnnnnnnnnnnnnnnnnnnnnnnnnnnnnnnnnnnnnnnnnnnnnnnnnnnnnnnnnnnnnnnnnnnnnnnnnnnnnnnnnnnnnnnnnnnnnnnnnnnnnnnnnnnnnnnnnnnnnnnnnnnnnnnnnnnnnnnnnnnnnnnnnnnnnnnnnnnnnnnnnnnnnnnnnnnnnnnnnnnnnnnnnnnnnnnnnnnnnnnnnnnnnnnnnnnnnnnnnnnnnnnnnnnnnnnnnnnnnnnnnnnnnnnnnnnnnnnnnnnnnnnnnnnnnnnnnnnnnnnnnnnnnnnnnnnnnnnnnnnnnnnnnnnnnnnnnnnnnnnnnnnnnnnnnnnnnnnnnnnnnnnnnnnnnnnnnnnnnnnnnnnnnnnnnnnnnnnnnnnnnnnnnnnnnnnnnnnnnnnnnnnnnnnnnnnnnnnnnnnnnnnnnnnnnnnnnnnnnnnnnnnnnnnnnnnnnnnnnnnnnnnnnnnnnnnnnnnnnnnnnnnnnnnnnnnnnnnnnnnnnnnnnnnnnnnnnnnnnnnnnnnnnnnnnnnnnnnnnnnnnnnnnnnnnnnnnnnnnnnnnnnnnnnnnnnnnnnnnnnnnnnnnnnnnnnnnnnnnnnnnnnnnnnnnnnnnnnnnnnnnnnnnnnnnnnnnnnnnnnnnnnnnnnnnnnnnnnnnnnnnnnnnnnnnnnnnnnnnnnnnnnnnnnnnnnnnnnnnnnnnnnnnnnnnnnnnnnnnnnnnnnnnnnnnnnnnnnnnnnnnnnnnnnnnnnnnnnnnnnnnnnnnnnnnnnnnnnnnnnnnnnnnnnnnnnnnnnnnnnnnnnnnnnnnnnnnnnnnnnnnnnnnnnnnnnnnnnnnnnnnnnnnnnnnnnnnnnnnnnnnnnnnnnnnnnnnnnnnnnnnnnnnnnnnnnnnnnnnnnnnnnnnnnnnnnnnnnnnnnnnnnnnnnnnnnnnnnnnnnnnnnnnnnnnnnnnnnnnnnnnnnnnnnnnnnnnnnnnnnnnnnnnnnnnnnnnnnnnnnnnnnnnnnnnnnnnnnnnnnnnnnnnnnnnnnnnnnnnnnnnnnnnnnnnnnnnnnnnnnnnnnnnnnnnnnnnnnnnnnnnnnnnnnnnnnnnnnnnnnnnnnnnnnnnnnnnnnnnnnnnnnnnnnnnnnnnnnnnnnnnnnnnnnnnnnnnnnnnnnnnnnnnnnnnnnnnnnnnnnnnnnnnnnnnnnnnnnnnnnnnnnnnnnnnnnnnnnnnnnnnnnnnnnnnnnnnnnnnnnnnnnnnnnnnnnnnnnnnnnnnnnnnnnnnnnnnnnnnnnnnnnnnnnnnnnnnnnnnnnnnnnnnnnnnnnnnnnnnnnnnnnnnnnnnnnnnnnnnnnnnnnnnnnnnnnnnnnnnnnnnnnnnnnnnnnnnnnnnnnnnnnnnnnnnnnnnnnnnnnnnnnnnnnnnnnnnnnnnnnnnnnnnnnnnnnnnnnnnnnnnnnnnnnnnnnnnnnnnnnnnnnnnnnnnnnnnnnnnnnnnnnnnnnnnnnnnnnnnnnnnnnnnnnnnnnnnnnnnnnnnnnnnnnnnnnnnnnnnnnnnnnnnnnnnnnnnnnntggaaaatctgtgcacagccctgcagagcatcgaccgtggcgagatcgtgaacatgctggagggttctggccgacagagccgcaacttgaagccagacaggcggcacacggaccgcgactactcgctgtcaccctcccagatgaatggnnnnnnnnnnnnnnnnnnnnnnnnnnnnnnnnnnnnnnnnnnnnnnnnnnnnnnnnnnnnnnnnnnnnnnnnnnnnnnnnnnnnnnnnnnnnnnnnnnnnnnnnnnnnnnnnnnnnnnnnnnnnnnnnnnnnnnnnnnnnnnnnnnnnnnnnnnnnnnnnnnnnnnnnnnnnnnnnnnnnnnnnnnnnnnnnnnnnnnnnnnnnnnnnnnnnnnnnnnnnnnnnnnnnnnnnnnnnnnnnnnnnnnnnnnnnnnnnnnnnnnnnnnnnnnnnnnnnnnnnnnnnnnnnnnnnnnnnnnnnnnnnnnnnnnnnnnnnnnnnnnnnnnnnnnnnnnnnnnnnnnnnnnnnnnnnnnnnnnnnnnnnnnnnnnnnnnnnnnnnnnnnnnnnnnnnnnnnnnnnnnnnnnnnnnnnnnnnnnnnnnnnnnnnnnnnnnnnnnnnnnnnnnnnnnnnnnnnnnnnnnnnnnnnnnnnnnnnnnnnnnnnnnnnnnnnnnnnnnnnnnnnnnnnnnnnnnnnnnnnnnnnnnnnnnnnnnnnnnnnnnnnnnnnnnnnnncagactgcaggactgggatccagacggctccattgtctcatacctgcaagatgctgcacaaggttcctggcgagaggaggtcacgcaagacccacacttattccagagaacgagcaccacgaccgaagggctagagcccagtggatctcaggagtccgagaacgtcctggtgtctgtaagcgagcacacacggacagaacagcccgaggctgagagctcccaggccgatagggaccagaggcagcaaggtcaaggagagcaggtgcaggaggccaggaacaccttcacccaggtggtgcag

SEQ ID NO: 32933 - DNA, 1836 bp, Macaca Mulatta
  misc_feature (1)...(1836): n = A,T,C or G
gcaggtgattccctgaatgtggtggaagtgttcgaccccatcgccaatcactgggagaggtgccgtcccatgacaacagcccgcagccgtgttggcgtggctgtggtgaacgggcttctctatgccattggaggatatgacggccagctacggctgagcactgtggaggcgtacaacccggagacagacacgtggaccagagtggggagcatgaatagcaagnnnnnnnnnnnnnnnnnnnnnnnnnnnnnnnnnnnnnnnnnnnnnnnnnnnnnnnnnnnnnnnnnnnnnnnnnnnnnnnnnnnnnnnnnnnnnnnnnnnnnnnnnnnnnnggacagtggtgaccccaatgagctcgaatcgcagtgctgctggggttacggtctttgagggcaggatatatgtgtcaggcggccacgatggtttgcagatcttcagcagtgtgnnnnnnnnnnnnnnnnnnnnnnnnnnnnnnnnnnnnnnnnnnnnnnnnnnnnnnnnnnnnnnnnnnnnnnnnnnnnnnnnnnnnnnnnnnnnnnnnnnnnnnnnnnnnnnnnnnnnnnnnnnnnnnnnnnnnnnnnnnnnnnnnnnnnnnnnnnnnnnnnnnnnnnnnnnnnnnnnnnnnnnnnnnnnnnnnnnnnnnnnnnnnnnnnnnnnnnnnnnnnnnnnnnnnnnnnnnnnnnnnnnnnnnnnnnnnnnnnnnnnnnnnnnnnnnnnnnnnnnnnnnnnnnnnnnnnnnnnnnnnnnnnnnnnnnnnnnnnnnnnnnnnnnnnnnnnnnnnnnnnnnnnnnnnnnnnnnnnnnnnnnnnnnnnnnnnnnnnnnnnnnnnnnnnnnnnnnnnnnnnnnnnnnnnnnnnnnnnnnnnnnnnnnnnnnnnnnnnnnnnnnnnnnnnnnnnnnnnnnnnnnnnnnnnnnnnnnnnnnnnnnnnnnnnnnnnnnnnnnnnnnnnnnnnnnnnnnnnnnnnnnnnnnnnnnnnnnnnnnnctgtgccacccttgtgaccttcaggcctgggtcatcaagatgcacagcatggaaaacaagctcctctggatcccgcagctggtgacgtggaactgtnttctggtccacacgaacacaggctccatccaggcccagctcctacccaccgcctctctgtgggcccgctgttcacagaagaccttccatctgatgctccccttcgcctgcttgttctccagccgagttctggccactttgccatggggagactgcaatgtccaagcctgctggaaactgggatgtagttgggggtgaaaggacagacccaagtgtcctccgtgcctgagatggtgtggccacagcagtggagggctgcacacaggcacgttccttcttccacagtggggcaccaaggattctgtcctcattgctgggtaagcagggagaagagaagttttccccatgtctaattttgggatttcagtgaggccttttccatctgtccaggagaacagaagggaaaaaaagatacttgaaagatactgaaggaaatttaaacaaagaaacacttgaaagaaactggaaagaaaaataatttttttttatgtgaacaaacttttgcaggaagaaaaaagcgtaaaagacactaagggcaaatctgtgtttaaatggaaaaccgtctaactggagaagggcggtatccaccccacattcggatcccagggtcctgaggcctcgcatcaagctgggggttccctctgagccccagtgtgtgtggaatcagtacactcttgactgggcctgtagtaaggtatgcatggggtttgtcttcacacccactgtcagaggacttaagaatcataggtgtagaga

SEQ ID NO: 32934 - DNA, 1089 bp, Macaca Mulatta
  misc_feature (1)...(1089): n = A,T,C or G
aatatttccacgttttttcataatttcgaagcaatgctccgctagttgtgcagcgattgagatacccaagccagaggagaagcggtttctcctggaagagcccctgcccttcttttacctcaagtgttgtaaaactcgctactgcaatttacaggggccggctatcaacacatcatcgttcaaagaatatgctgggagtgtgggtgacagctgtggtgggctggggctggccgtcctcctgctgctggtctccattgcagccggccttagcctgccttgagccacgggactgtcatggactgagccttctgaagcatggactcgctccagactattgtcacctgttgcattaaacttgttttctgttgattacctcttggtttgacttcccagggtcttgggatgggagagtggggatcagggtgaagttggctcttaaccctcaagggttcttcagctcacattgagaggaagtccagatctcctgggtagtgattttggtgacagggttttctgtttgaaatcaaaccttgtaactcatnnnnnnnnnnnnnnnnnnnnnnnnnnnnnnnnnnnnnnnnnnnnnnnnnnnnnnnnnnnnnnnnnnnnnnnnnnnnnnnnnnnnnnnnnnnnnnnnnnnnnnnnnnnnnnnnnnnnnnnnnnnnnnnnnnnnnnnnnnnnnnnnnnnnnnnnnnnnnnnnnnnnnnnnnnnnnnnnnnnnnnnnnnnnnnnnnnnnnnnnnnnnnnnnnnnnnnnnnnnnnnnnnnnnnnnnnnnnnnnnnnnnnnnnnnnnnnnnnnnnnnnnnnnnnnnnnnnnnnnnnnnnnnnnnnnnnnnnnnnnnnnnnnnnnnnnnnnnnnnnnnnnnnnnnnnnnnnnnnnnnnnnnnnnnnnnnnnnnnnnnnnnnnnnnnnnnnnnnnnnnnnnnnnnnnnnnnnnnnnnnnnnnnnnnnnnnnnnnnnnnnnnnnnnnnnnnnnnnnnnnnnnnnnnnnnnnnnnnnnnnnnnnnnnnnnnnnnagaaatcagactcagagttccacctgaaacaaatacaaggggacttcaaaagttcacagaaaaattgaactaa

SEQ ID NO: 32935 - DNA, 646 bp, Macaca Mulatta
aagtattgtatattcatagatctgaagcactgatccactggccacaggtaggcatgtggagtcaactcaagaaaaagctgagtgaacagcattatttagggctaaagccaatggcatttatcttcccttgtcttcctgctttgcatctgcctctgccatctacgaaagccatataagtgcatggacattttgtttcagagaaacagaaaaatcttggggcttccaattgacccatctatctgccaccatgttgccccatcaggagctcagttctgtggagttttccctttgctgagcaagcatgaggttgcattgggtggcccaggatgacaatgcacagcacagatgccatcatttccctttcccctctgcatggcagacatcaataatcaatctggaatgtttttcttccaaatctgaatggaattttcaaatggtcagcacagccactgccaacagatatgatgtaaagtgaaacctggttgccatcttctgccatgctgaggagcagtccatccccgcccgagcatgtatcggcaacatgggcagcctgtggtcaggtctggggcaaggccaggggccatcaaaaacaggctggttaccaaagtcagtgtcaccctgggtacccaccagcgctgtcctgtgt

SEQ ID NO: 32936 - DNA, 240 bp, Macaca Mulatta
caacaaggccaggcctgtggggacatgcctcactggtcttgacgcccagcctagggtgtagtcaggggaaggagtgagactccaacttcaacatctgtgacctcaagggggagacagagtctgggttcggggggctgctgcctcctggctaataatctccagccagctgcagggaggaagggcaggctggggccacctagcctttccctgctgcccaactgggtggaaaataaaagcttc

SEQ ID NO: 32937 - DNA, 1618 bp, Macaca Mulatta
  misc_feature (1)...(1618): n = A,T,C or G
gtgctccagtgaaccacccggggaatgacgaggtggcaagtgaggacgaagccacagtaaagcggcttcgtcgggaggagacacacgtctgtgagaaatgctgtgcagagttcttcagcgtctctgagttcctggaacataagaaaaattgcactaaaaatccacctgtcctcatcatgaatgacagcgaggggccggtgccttcagaagacttctccagagctgtactgagccaccagcctgccagccccagcagtaaggacggtcacagggagaatggcggcagctcagaggacnnnnnnnnnnnnnnnnnnnnnnnnnnnnnnnnnnnccgcccacccccaggacataaactattaaccaaaggcaaagtggccaacactaacgtgacctggcaggcaatacggggcaccaagtggcggtgaatcagcggagcgcggatgcactccctgcccccgtncctgncgccaacagcatcccgtgggtcctcgagcagatcttgtgtctgcagcagcagcagctacagcagatccagctcaccgagcagatccgcatccaggtgaacatgtgggcctcccacgccctccactcgagtggggcaggggctgacactctgaagaccttgggcagccacatgtctcagcaggtttctgcagctgtggctttgctcagccagaaagctggaagccaaggtctgtctctggatgccttgaaacaagccaagctacctcatgccaacatcccttctgccaccagctccctgtccccagggctggcgcccttcgctctgaagccggatgggacccgggtactcccgaacgtcatgtcccgcctcccgagtgctttgcttcctcaggccccgggctcggtgctcttccagagccctttctccactgtgacgctagacacatccaagaaagggaaggggaagcccccgaacatctccgcggtggatgtcaaacccaaagatgaggcggtcctctacaagcacaagtgtaagtactgtagcaaggtttttgggactgatagctccttgcagatccacctccgctcccacactggagagagacccttcgtgtgctctgtctgtggtcatcgcttcaccaccaagggcaacctcaaggtgcactttcaccgacatccccaggtgaaggcaaacccccagctgtttgccgagttccaggacaaagtggcggctggcaatggcatctcctaggaaatctctgtacctgaccccatagatgaatcgagtctttccttagacagcaaacctgtccttgtaaccacctctgtagggctacctcagaatctctcttcggggactaatcccaaggacctcacgggtggccccttgcccggtgacctgcagcctgggccttctccagaaagtgagggtggacccacactccctggggtgggaccaaaccataattccccaagggctggtggcttccaagggagtgggacccctgagccagggtcagagactctgaaattgcagcagctggtggagaacattgacaaggccaccactgatcccaacgaatgtctcattagccaccgagtcttaagctgccagagctccctcaagatgcattatcgcacccacaccggggag

SEQ ID NO: 32938 - DNA, 627 bp, Macaca Mulatta
  misc_feature (1)...(627): n = A,T,C or G
aacagatctttgaaacctcagcattctgtggtgcaactttaatgttttcttgtttctcagggtgctgctataaaactattttcagttcatnnnnnnnnnnnnnnnnnnnnnnnnnnnnnnnnnnnnnnnnnnnnnnnnnnnnnnnnnnnnnnnnnnnnnnnnnnnnnnnnnnnnnnnnnnnnnnnnnnnnnnnnnnnnnnnnnnnnnnnnnnnnnnnnnnnnnnnnnnnnnnnnnnnnnnnnnnnnnnnnnnnnnnnnnnnnnnnnnnnnnnnnnnnnnnnnnnnnnnnnnnnnnnnnnnnnnnnnnnnnnnnnnnnnnnnnnnnnnnnnnnnnnnnnnnnnnnnnnnnnnnnnnnnnnnnnnnnnnnnnnnnnnnnnnnnnnnnnnnnnnnnnnnnnnnnnnnnnnnnnnnnnnnnnnnnnnnnnnnnnnnnnnnnnnnnnnnnnnnnnnnnnnnnnnnnnnnnnnnnnnnnnnnnnnnnnnnnnnnnnnnnnnnnnnnnnnnnnnnnnnnnnnnnnnnnnnnnnnnnnnnnnnnnnnnnnnnnnnnnnnnnnnnnnnnnnnnnnnnnnnnnnnnnnnnnnnnnnnnnnnnnnnnnnnnnnnnnnnnnnnnnnnnnnnnnnnnnnn

SEQ ID NO: 32939 - DNA, 148 bp, Macaca Mulatta
gcagagcccacagtgcggactgagctgatggaacagattcctcctattgccatttttttacaagaaaacagatcagattttccagtggtgctctctgaatatctcatacctattgtagtgaggtacctcacagatccaaacaatcagg

SEQ ID NO: 32940 - DNA, 134 bp, Macaca Mulatta
  misc_feature (1)...(134): n = A,T,C or G
acatattaaaaactctcctttnccacaatggtgacctacatgtacaatgggagaatccacagaattttattagcagatgcttattttatgaagtagaagtcaataacagccaaaccgagacacataatgttttc

SEQ ID NO: 32941 - DNA, 630 bp, Macaca Mulatta
gcataaagcacaatgctgtcttcatcagaaaacagttggcataagaattaaacatatgaacatcacaaaacaatttataaaaacttcttaaatatacgctttgggctagttgcaaagactatgctaatagcacttccaatgagagtgatatatttaagtgtactggatctggaatggtgttttggtttggggggaatttttttttcctggcaaatcacatgtgttgttgatgtgagtatctgatgaaaaaacaatgtcagaataaccaacatgaaaattttttaggataacttggtgcctacctgaaaaatgtattgtgtattagactcttgatttcaaaaggttccacagaacttgtctgcgcttaccttacccatgtatatatatagctgtcctacagggagcttttatttagaaaatgtctgcataatgttagattcttctcctgtctacattatgcactacataattggacttcattatgcttttgaaatgcttatctgcctgtcacataagttaaactattcaattagttttgactgttttggattgctacacaatacaatattcctaaatttaggcatgagggttacaaagcactagtatatacttttatccttgtcatcgcac

SEQ ID NO: 32942 - DNA, 253 bp, Macaca Mulatta
ggctctacggtttctccagaagaattcctctaagtttcatttcagacgcgccaggatgttaccggttagtggtgcattccacacccgcctcatggagccagctgtggagcccctgacgcaagttttaaaggcaattgacattaagaagcctctggtttctgtctactccaatgtccacgggcatagatacatgcatcccagccacatccagaagctgctggctcagcaggtggtctccccggtgaagtgggag

SEQ ID NO: 32943 - DNA, 686 bp, Macaca Mulatta
  misc_feature (1)...(686): n = A,T,C or G
gatataacccaagagttccgggaaaaggcaaggctttgttccaggtaagtcttttgttaaaaatttggtctgcttatttcattttgcttggtattaacttcaagttaagagcctttttcaactgaaatacagggaagatagtcctagttagtagtttttcttcacccatacatttcattctgcactgtttaaagctatgattaagtaaagctacacagtgaatcagttctagtggtgtataagatgttagaggtagctaacaaatttttcaaggagtatagctactgatatagatgggagtgactgtacaagtttcgatttaagatttttaaaaaacgtcaataaagaggaaattgtggctgggcacnnnnnnnnnnnnnnnnnnnnntagcacttttaagagaccgaggtgnnnnnnnnnnnnnnacnnnnnnnnnnnnnnnnnnnnnnnnnngcagagtgaaaccctgtctttaaaaaatataaaaaattagccagacgtggtgacatgttcctgtggtcctgnnnnnnnnnnnnnnnnnnnatgtnnnnnnnnnnnnnnnnnnnnnnnnnnnnnnnnnnnnnnnataaacactgcactctagcctgggcaacagaataagactgtgtctcanaaaagagaacaaaacagtttaaatatatattaatttgttgaaaaagagatg

SEQ ID NO: 32944 - DNA, 445 bp, Macaca Mulatta
gagggagtcgagcagctgctacagcacagtagacatgactgggatccctaccttggacaacctccagaagggagtccaatttgctctcaagtaccagtcgctgggccagtgtgtctacgtgcattgtaaggctgggcgctccaggagtgccactatggtggcagcatacctgactcttcacgggtgcacagatggagtccagaggaggctgtaagagccatcgccaagatccggtcttacatccagatcaggcctggccagctggatgtttttaaagagttccacaagcaggttactgcaggggcagcaaaggatgggacttttgacacttcaaagacatgatgtatgtggattagaaagaactcaagacattcccgcttgatacagaatacaaaaagcttaacgggacccacagggcttaagcccagacttgacataaccacaa

SEQ ID NO: 32945 - DNA, 1521 bp, Macaca Mulatta
  misc_feature (1)...(1521): n = A,T,C or G
atcatgctaattgtctccactagagctggagaacgccatccaaaatgaagagagaaaggggagccctgtccagagcctccagggccctgcacctcgctccttttgtctaccttcttctgatccagacagnacagaccccctggagggggtgaacatcaccagccctgtgcgtctgatccacggcaccgtggggaagtcggctctgctttctgtgcagtacagcagtaccagcagtgacaggcctgtagtgaagtggcagctgaagcgggacaagccagtgaccgtggtgcagtccattggcacggaggtcatcggcaccctgcggcctgactatcgagatcgtatccggctctttgaaaatggctccctgcttctcagcgacctgcagctggctgatgagggcacctatgaggttgagatctccatcaccgacgacaccttcactggggaaaagaccatcaaccttactgtagatgngtgcccatttcgaggccacaggtgttggtggcttcaaccactgtgctggaactcagcgaggccttcaccttgaactgctcacacgagaatggcaccaagcccagctacacctgggctgaaggacggcaagcccctcctcaatgactcgagaatgctcctgtccccggaccaaaaggtgctcaccatcacccgcgtgcttatggaggacgacgacctgtacagctgcgtggtagagaaccccatcagccagggccgcagcctgcctgtcaagatcaccgtatacagngaagaagttccctttacatcatcttgtctacaggaggcatcttcctccttgtgaccttggtgacagtctgtgcctgctggaaaccttccaaaaggnnnaggactccccggagcccgaggagaacccgtccccggagcctcgaagcgcgacggagcccggcccgcccggctactccgtgtcgcccgcagtgcccggccgctcgccagggctgcccatccgctccgcccgccgctacccgcgctccccagcgcgctccccagccaccggccggacgcacacgtcgccgccccgggccccgagctcgcccggccgctcgcgcagcgcctcgcgcacactgcggactgcgggcgtgcacataatccgcgagcaagacgaggccggcccggtggagatcagcgcctgagccgcctcgggaccccctgagaggcgcccgcggtctgcggccagcggcccggggggagggctggggctgggaagccggggcgcggcgcactaggggataggggaggtcccggcggggcgcgggtgtctcgggtgtggacgcgtatgagcatgcgcagacggaggcgggtgcgcggaggcggcagtgttgaggtggtgaaaccagggagcatttgcttccgatttacaggctgtgttctcacttggtataggttgtgccctattaggaccacatagattattaaatttctggcccaacacccaaaagcgttttatggaaactaacatcagtaacctaacccgcccgtgactatcct

SEQ ID NO: 32946 - DNA, 4136 bp, Macaca Mulatta
  misc_feature (1)...(4136): n = A,T,C or G
gaattcttccacatgcccccatcacactcatccctttaccaaaagtccctaccccatggggtgggtcaggcaggcctcaacacaggcccgtatcagggggacgcctcttccctcaggggctgccctctgggatcaccacccccgccctctttggtttcctgcttcctatctggctgcagcttttcaggcccattgtgtatttccccatggtctgtgcccactcgcatcccctctctgcaaaccttgcctactgggcctgtacctggcaaatccatgctcagcacagacagggatggagacctctcaatacaactgtctcctgccaatccctgccccagcagcctgaggcccagcctgcaaccagggagctgctctcctttctcctctcctcccttgacctcgcccctcagaccatgccaattctacctcctaaacctcccaggccagcccctcccccagctcccagtgacagtgtcctcaagagctcctgtccttaggtacctgagctcagctcttggtgataccagaagtactgccaggggctgcagcaggcctcctgcagaggctgagtcccacatcgcagggaacagccatgccactgctagcagacaagtaagagaatggccacctggggctgagtgctcttggtcacccaccagaaacaaagtgtcaaggagaagctgcccaaagcccatgggacaaaccactggggattggaacaccagtaattccgcattgggagggggcaccaagagatgtgcttctcagagcctgaggctgcacatggatgttgagcagtgcgaccggctaccagacaaactcatcagttccagtggcctcctggccaccaccaggaccaagcagggtgggtagcagagggccacctggaggtgatgacagatgagatcccgctgggcaggaggcctgagtgagctgagtcaggcttccccttcctgccacaggggtcctctcacctgctgccatgcttcccatctctcatcctccttgacaagatgaggggataccctttaagtaatcttttttcttgtttcactgatcttgagtactagaaagtcatggatgaataattacgtctgtggttttctatggaggttccatgtcagataaagatccttccgacgcctgcaccacaccacccgccccccgccttgcccggggttgtgggcaccgtgctgctgcacatataaggcgggaggctgttgccgactcttcagagccccacgaaggaccagaacaagacagagtgcctcccaccaatccaaacatgagccgcctgcccgtcctgctcctgctccatctcctggtcagccccggactccaagctcccatgacccagacaacgtccttgaagacaagctgggctaagtgctctaacatgatcgatgaaattataacacacttaaaccagccacctttgccttcaccggtgagtagctgggataagactggcctgcagcagggaggggtggtggctgcctcagccaacagcctcatgggcctctctctcccttcaccccataggacttcaacaacctcaatgaggaagaccaaaccattctggtggtaagagctcagcccctggatcccaatccacttcctgcctgggtgacttcagccatgtcattccatcttgcctagccttgctttcttcatctgtaaaatagggttaatagcgcctgtctcagtgggactgttatgacagtcaaatgacacaatgtgcataacgttctggcccagcatctggcacttaagggttcaatacgtggccacagccatggctataagaatgaaaatgacttttaaattagaaaatgaaaaggcagttctaggtgaggaatactaagggccttaaggtcagtttttggtaggacagactctggactgacagacggaaatttcccccacagatgtgccagcttctttttccctttaaaaagtgagtttgtgttttccaccctcattggttgtggcattatcatttacagttatttttcatggttccagttggttgcaatggttctctctcacgtttgcatgacatttcttgggtcaaacaagaagtggaagcctttgctgagttcctgggccatctgtatttggggcactcactgctcacatgctgcacccacttccatgttgcggtctctgtgattttcttcttgatttctaggagactttaattcagtcagggcatgaacgctgttatcagcctttgagctacaaatacttcccatggaagaccccctgccttttgtagagtttctttttggagatatgttctaccccaagtgcagaaagatccacctaggtcccccctnnnnnnnnnnnnnnnnnnnnnnnnnnnnnnnnnnnannnnnnnnnnnnnnnnnnnnnnnnnnnnnncnnnnnnnnnnnnnnnntnnnnnnnnnnnnnnagttcaagccnnnnnnnnnnnnnnnnnnnnnnnnnnnnnnnnnnnnnnnnnatgcaccaccactcccnnnnnnnnnnnnnnnnnnnnntcgggctttcaccatattggtnnnnnnnnnnnnnnnnnngacctcaggttatctgcctgcctcggcttcccaaaatgctaggattacaggcttgagtcaccgcacccggcccacctaggcccttcaggcagctcacatggagccagagactgggggcttgaggaaaccaggtcctgcctgccactcacttctaggcctgtgctcttgggcagggacccacctgaggcaagaatgggactaggagggaacccgagagtgggcttgggaaaccctgggggtgacttccagctgcttgtgggagggatactccgtaacctttcccccgtaagtgtattctctgccctgttaggaaaaaaaccttcgaaggtcaaacctggaggcattcagtaaggctgtcaagagtttacagaacgcatcagcaatcgagagcattcttaaggtatgtgaagctgttgagggtttgggatccctgtgttggccctgccctgcctctggggaggatgacagcagggcccactccctttccaagggaatctctgaccatctgctttgatctctttccacagaatctcccaccatgcctgcccatggccacggccgcacccacggtaagctgtcccccaagatgcccgtgtcgtggcttgctcctcagttggtcatcaccattatagcctggactcacctaatcccaccttcttggtttctttatagcgacctccaatccgtatcacgaacggtgaccggaatgacttccggaggaaactgaagttctatctgaaaacccttgagaatgagcaggctcaatagacgactctgagcctcgagatctcttgagtccaacgtccagctcgttctctgggtcttctcaccacagagcttcaggacattgaaaacttctgaaacctctggctcatctctcacacagtccaggaccagaagcatttcaccttttcctgcggcatcagacgaattgtcaattatctaatttctgaaatgtgcagctcccatttggccttgtgcagttgtgttctcatttttatcccattgagactatttatttatgnnnnnnnnnnnnnnnnnnnnnnnngctttctggaatgtgaagtgtatttatttcagcaaaggagccatgtcctgctgcttctgcaaaaaactcacagtagggtgggaagcatgttcatttgtacctcgagttttaaactagttcctagggatgtgtgagaataaatcagactctgaacaactgctttgttaccagtgtttcaatttgattcgggacttagtgaccattttagaggagactggtgtgccacgaatcctgggtggcttgatcctgccacgtggatgttgtctgtgtgagcttgttctcacactgccctcctgccacccccatttccagaaaggtgatgataaccctagcaatcttgaatatccacagaactgctaccaggtaccaggagccattctcagcactttacctgtgctacctaacttactcctcacaccaaccaagagtatgttttctccgtttcatgggaaactgaagttcagcgtagctgagcaactgcctaaggtcacacagctgataatggcccagctgtggcttgaattc

SEQ ID NO: 32947 - DNA, 172 bp, Macaca Mulatta
  misc_feature (1)...(172): n = A,T,C or G
ggctcgagaattacaagctcgggtactaaaacgtgttctgatggaacagccagatgcagttcctgcacagaaacatttagcagctgaaatttgtgcagagatgcaaaacattctgttgctcagcgagactatgaanaagcattnangttttatagagaggctctggttcact

SEQ ID NO: 32948 - DNA, 958 bp, Macaca Mulatta
  misc_feature (1)...(958): n = A,T,C or G
ggggggacagcgctggcgcggggactgcttccggattccaggtacctcgagtggcggcagctagccccagacttctgtcttttcagccgcagtgagggctcggggctgcagaattgcaaccttgccaatggacctgatcggttttggttatgcagccctcgtgacatttggaagcatttttggatataagcggagaggtggtgttgtatctatctttgattgctggtctttttgttggatgtttggctggctatggagcttaccgtgtctccaatgactaacgagatgtaaaagtgtcactgtttacagctttcttcctggctaccataatgggtgtgagattttagaggtccaagaaaataatgcctgctggtctggttgcaggtttgagcctcatgatgatcctgaagacttgctgcttgttgctgctctgagcatctggagggacataaaaactaatttcatgtcatccctgctgcaatggcgcagagcatatcttttttgtatttaaaagataaacctttcatattggaatgcttaagaacacaattagcactgttcaccttcttatatgaaacattaattttggggaaggttttttttcctaaatgcaaaagtttttaacctggtgttcttaatttgtcgaagcggctgttttttctttaaaagtgttctaaatggaatcatggaatccccccctttcccaattgtgggggggtcctttttttcataaaaattttggggaatattttttggaaaattccaaaaactccggttcccaggaaacctaaaaccaaaaatcttgccccaaaaaaaagtttttttatggggagttcccaaaagaggcaaggggcccctttttgcctttgggggtttttttgaaannnnnnnnnnnnnnnnnnntcccccttttaagagggagggggcgcgcaggggattttttttcttataaaaaaat

SEQ ID NO: 32949 - DNA, 637 bp, Macaca Mulatta
ctccatccagaaggtggtgtttctatgatgtcacccaacgagaccctgtttttggaaagtaccaacaagatttataaggatgacatttccaatagctcctttgtgaatttccagatatgggattttcctgggcaaatggacttttttgacccaacctttgactatgagatgatcttcaggggaacaggagcattgatatacgtcattgacgcacaggatgactacatggaggctttaacaagacttcacattactgtttctaaagcctacaaagttaacccagacatgaattttgaggtttttattcacaaagttgatggtctgtctgatgatcacaaaatagaaacacagagggatattcatcaaagggccaatgatgaccttgcagatgctgggctagaaaaactccatcttagcttttatctgactagtatctatgaccattcaatatttgaagcctttagtaaggtggtacagaaactcattccgcaactgccgaccttggaaaacctattaaatatctttatatcaaattcaggtattgaaaaagcttttctctttgatgtcgtcagcaaaatctacattgcaacagacagttcccctgtggatttgcggtcttaccaactttgctgtgaca

SEQ ID NO: 32950 - DNA, 745 bp, Macaca Mulatta
tggctcctctgacagttatcttgttccaggcatgacctacagtaaagggaaaatctaccctttgggctacttcaccaaagataaccctgtgaaaggctctccaggggtcccttcctttgcagctgggccccccatctctgagggcaaatacttctccagcaaccccatcatccccagccagtcgggagcttcctcagtcattgcgttccagccagtggggactggtggggtccagctctgtggaggcggctccacaggctccaagggaccctgctctcccttcagttctcgagtccacagcagttctagcatttccagcagctccggttcaccctaccatccctgcggcagcacttcccagagcccctgctccccgccaggcaccggctccttcagcagcagctccagttcccaatccagtggcaaaatcatccttcagccttgtggcagcaagtccagctcttctggtcacccttgcatgtctgtctcctccttgacactgactggggaccccgatggctctccccatcccgatccctccgctggtgccaagccctgtggctccggcagtgctggaaagatcccctgccgctccatccgggatatcctagcgcaagtgaagcctctggggccccagctagctgaccctgaggttttcctaccccagggagagttactggacagtccataagtctacttttgtgtgtgtgcatgccttgggcacaaacaagcacatacactatat

SEQ ID NO: 32951 - DNA, 1574 bp, Macaca Mulatta
  misc_feature (1)...(1574): n = A,T,C or G
gtcattcctgtattccatcaaccagacaatctgcttgcggctggatagcattgaagccaagttgcaggccctggaggccacttgtaaatccttagaggaaaagctggatctggtcacgaacaagcagcacagccccatccaggttcccatggtggccggctcccctcttggggcannnnnnnnnnnnnnnnnnnnnnnnnnnnnnnnnnnnnnnnnnnnnnnnnnnnnnnnnnnnnnnnnnnnnnnnnnnnnnnnnnnnnnnnnnnnnnnnnnnnnnnnnnnnnnnnnnnnnnnnnnnnnnnnnnnnnnnnnnnnnnnnnnnnnnnnnnnnnnnnnnnnnnnnnnnnnnnnnnnnnnnnnnnnnnnnnnnnnnnnnnnnnnnnnnnnnnnnnnnnnnnnnnnnnnnnnnnnnnnnnnnnnnnnnnnnnnnnnnnnnnnnnnnnnnnnnnnnnnnnnnnnnnnnnnnnnnnnnnnnnnnnnnnnnnnnnnnnnnnnnnnnnnnnnnnnnnnnnnnnnnnnnnnnnnnnnnnnnnnnnnnnnnnnnnnnnnnnnnnnnnnnnnnnnnnnnnnnnnnnnnnnnnnnnnnnnnnnnnnnnnnnnnnnnnnnnnnnnnnnnntcaccttttctataaatttggcatcacggaatccgactggtaccgaatcaagcnnnnnnnnnnnnnnnnnnnnnnnnnnnnnnnnnnnnnnnnnnnnnnnnnnnnnnnnnnnnnnnnnnnnnnnnnnnnnnnnnnnnnnnnnnnnnnnnnnnnnnnnnnnnnnnnnnnnnnnnnnnnnnnnnnnnnnnnnnnnnnnnnnnnnnnnnnnnnnnnnnnnnnnnnnnnnnnnnnnnnnnnnnnnnnnnnnnnnnnnnnnnnnnnnnnnnnnnnnnnnnnnnnnnnnnnnnnnnnnnnnnnnnnnnnnnnnnnnnnnnnnnnnnnnnnnnnnnnnnnnnnnnnnnnnnnnnnnnnnnnnnnnnnnnnnnnnnnnnnnnnnnnnnnnnnnnnnnnnnnnnnnnnnnnnnnnnnnnnnnnnnnnnnnnnnnnnnnnnnnnnnnnnnnnnnnnnnnnnnnnnnnnnnnnnnnnnnnnnnnnnnnnnnnnnnnnnnnnnnnnnnnnnnnnnnnnnnnnnnnnnnnnnnnnnnnnnnnnnnnnnnnnnnnnnnnnnnnnnnnnnnnnnnnnnnnnnnnnnnnnnnnnnnnnnnnnnnnnnnnnnnnnnnnnnnnnnnnnnnnnnnnnnnnnnnnnnnnnnnnnnnnnnnnnnnnnnnnnnnnnnnnnnnnnnnnnnnnnnnnnnnnnnnnnnnnnnnnnnnnnnnnnnnnnnnnnnnnnnnnnnnnnnnnnnnnnnnnnnnnnnnnnnnnnnnnnnnnnnnnnnnnnnnnnnnnnnnnnnnnnnnnnnnnnnnnnnnnnnnnnnnnnnnnnnnnnnnnnnnnnnnctttcgtttgagtcatgctgttggtgtcggaggacggaggggaggcacagtgcggagagcgtcgcgtatgcgcgggaaatcaagaactatgatatttttctgtttaaacagctttttttaatttgctatggtgtttgtaac

SEQ ID NO: 32952 - DNA, 1418 bp, Macaca Mulatta
  misc_feature (1)...(1418): n = A,T,C or G
aactcacctgagctggatgaagaaggctatagcatcagacccgaggaacccggctaatcctttcnnnnnnnnnnnnnnnnnnnnnnnnnnnnnnnnnnnnnnnnnnnnnnnnnnnnnnnnnnnnnnnnnnnnnnnnnnnnnnnnnnnnnnnnnnnnnnnnnnnnnnnnnnnnnnnnnnnnnnnnnnnnnnnnnnnnnnnnnnnnnnnnnnnnnnnnnnnnnnnnnnnnnnnnnnnnnnnnnnnnnnnnnnnnnnnnnnnnnnnnnnnnnnnnnnnnnnnnnnnnnnnnnnnnnnnnngtgaagaagtggcaagacccaggcgctccacaccaactccagaacttataagnagcaaaaagcctcctgatgacactacggcccttgctcctctctttggcccaccactagaatcagcttttgatgaacagaagacagaagnnnnnnnnnnnnnnnnnnnnnnnnnnnnnnnnnnnnnnnnnnnnnnnnnnnnnnnnnnnnnnnnnnnnnnnnnnnnnnnnnnnnnnnnnnnnnnnnnnnnnnnnnnnnnnnnnnnnnnnnnnnnnnnnnnnnnnnnnnnnnnnnnnnnnnnnnnnnnnnnnnnnncaggaaatgaccagtcagccacagagatcaaaattgaaaaactaccatccatcaatgacttggacagcatttttgggccagtattgtcccccaagtctgttgctgttaatgctgaagaaaagtgggtccatttttctgatacgtccccggaacatgttactccggagttgactccaagggaaaaagtggtgtccccaccagctacaccagacaacccagctgnnnnnnnnnnnnnnnnnnnnnnnnnnnnnnnnnnnnnnnnnnnnnnnnnnnnnnnnnnngggcctcctcgcaatgtaccatcgccgctcaatttagaagaagtccagaagaaagtcgctgagcagaccttcattaaaganagaaacaatctcatctcctaaagattttgggttgggacaaagagcaactccacctcccccaccaccacccacctacaggactgtggtttcgtcccccggacctggctcgggccctggtacggggaccaccagtggtnnnnnnnnnnnnnnnnnnnnnnnnnnnnnnnnnnnnnnnnnnnnnnnnnnnnnnnnnnnnnnnnnnnnnnnnnnnnnnnnnnnnnnnnnnnnnnnnnnnnnnnnnnnnnnnnnnnnnnnnnnnnngtccagaccttttagccctcccattcattcttccagccctcctccaatagcacccttagcgcgggctgaaagcacttcttcaatatcgtcaaccaattccttgagcgcagccaccactcccacagttgngagaatgaacagccttccctcgtttggtttgacagaggaaagttttatttgacttttgaaggt

SEQ ID NO: 32953 - DNA, 85 bp, Macaca Mulatta
atctacttcactggctgctccatgaacccagcacgttcttttggccctgcagtggtcatgaatcggttcagccccgctcactggg

SEQ ID NO: 32954 - DNA, 584 bp, Macaca Mulatta
agtctcgatgtgtgatctttattttgtatttctctgtataaaaccagtgaatataactaaagtgttagtggattggattaaaagaaacttattaggcaagaacaggtaatgtagttatccatgactacttttaaccatgcagactaatgtattctggaggtttatagctcagcaccttcaccttttttcactggtatttcatgtaaggcatcaaccactgtaatttttgtcgatgctgaagcctgtccttgggaattggatgcatggcactcatattttccagcatcgtccttacttagaggagataccagcacccagccagttacttcatgcttttctgggccaccccgggtctgaatggccaggttgtcccggtcaccaggtaggagttctgtcctttgaactccatagtgacccctttttaccttgttccagatgaggacaggtgtcgggattccgatgacctcacagctcaagtacacctgggcaccagtgacattccagatgtccttggggggcgtcactatggaaggaccttgctcgcaggtgcccttgctgacctgggtgatggccttctccccgcg

SEQ ID NO: 32955 - DNA, 808 bp, Macaca Mulatta
ggtggcacctgctgcccaggcctggggcccagccctggcaatgccacaagccaggggctgccctggggggactagctgggagacactacggaaggaatacagccgaaactgccacaaattcccgcatgtgaggcagccggagagcttgggctgggacaatggctactccagaagcagagcccccaacctgggtggccccagcaggcctaggcccctgatgctgtgtgggctgtcaccaagggttctaccggtaccctctgaggcagtggggaaggaggccagctcccagcctgacatctgcatcctcaccctcgctatgatgatcgctggcatccccaccgtgcccgtcccaggcgttcgggaagaggacctgatctgggctgctcaagctttcatgatggcccatccggagccagagggtgctgtggagggggcgcggtgggagcaggcgcatgcccacacagcctctgggaagatgccgctagtgagatctaagaggggccagccttctggctcctgcttgtagatggatgaaatagcaccagatacgtagggtggcttctctgtatggttcttgggcagacagggttgggaggagggcctatggcagggatgggaatagagctggtggttgagccattctgacaaattccagtccttcatcagggaattccagaccctaaagtttctccagataccactaagacaggagataggttttgtcaggtatatacaatggaaattatgtgaggtaggggcccctgcttggagagttgaggctgcttttatgttttgaagacttgatcag

SEQ ID NO: 32956 - DNA, 217 bp, Macaca Mulatta
  misc_feature (1)...(217): n = A,T,C or G
attcagaaggaaaggcctgctcatctaatttcctagggcctcaggccagagacagccatacttacagnnnnnnnnnnnnnnnnnnnnnnatgttccatcagatcctcgttggggtcaagaagcattcacacttgatcccccttcatatttattaaatccggaggtactggagcagtgctgtatgtccagcatctggcattgttcaatcaagatgtta

SEQ ID NO: 32957 - DNA, 916 bp, Macaca Mulatta
  misc_feature (1)...(916): n = A,T,C or G
ggggcagtttgaatcgcggtgcgacgaatgagtangtggtgggatctcaccgtgggtccgattagccttttctctgccttgcttgcttgagcttcaacagaattcgaaatggctggcggtaaggctggaaacgactccggaaaggccaagacaaaggcggtttcccgctcgcagagagccggcttgcagttcccagtgggccgtattcatcgacacctgaaatctatgacgaccagtcatggacatgtgggcgcgactgccgctgtgtacagcgcagccatcctggagtaatttaccgcagacgtacttgaactggcaagacatgcataataagattagccggtagagccgtattaccccatcatcccttgcaactatgccattcgtaggagaatgaagagattggatatcctcccagcaaacgcttataatggctttggtgtgtgggtggtaatatccccagtttccgcgcaatactattgaaatgtgtaagaaagcgaacagatagcagaaaactgtacttaaatggataccatgagaattcagtttgttagtcgtcgggggaactttgagtaagagtattgaataatcctgtcaccgatggagtgtgtgtatttttctaagtgcaagtagccaggtcgcacgtagtaaaaacattcgcagatattgagccgcatatatagaagcagtgccctggcatcgcggttagagtttaggaacacgtgggaaagagacaggcggtgtggggattgattaaataaatgcttcctctgtaaatctagaaggcggggggggggggtcatatataacacgaactctaccccctgggcgttccgagagagagtataattcgcgagtttccgcagagnncagcggcgagtcagcggcggtgggggtggtgagggtcggtgtggtg

SEQ ID NO: 32958 - DNA, 237 bp, Macaca Mulatta
  misc_feature (1)...(237): n = A,T,C or G
agcccacagaattcttccagtctctgggtggggacggagaagggaacgttcagattgacatggcccatggcaccaccacgcttgccttcaagttccagcatggagtgattgtagcagtggattctcgggcctcagctgggtcctacatnnnnccttacgggtgaacaaggtgattgagattaacccttacctgcttggcaccatgtctggctgtgcagcagactgtcagtactggga

SEQ ID NO: 32959 - DNA, 129 bp, Macaca Mulatta
gagtgctcatgtaccatttagcttgtgtttttaaaatctaatggttctgccctccctatttttaactaagtgacattttaaaggttacttttccctctctatatagtttgatttaagccattagtcatt

SEQ ID NO: 32960 - DNA, 669 bp, Macaca Mulatta
  misc_feature (1)...(669): n = A,T,C or G
ctggacgcgacggcggctgggagcatgaacgcccctccagcctttgagtcgttcttgctctttgagggcgagaagaagatcaccattaacaaggacaccaaggtacccaatgcctgtttattcaccatcaacaaagaagaccacacactgggaaacatcattaaatcacaactcctaaaggacccacaggtgctatttgctggctacaaagtcccccaccccttggagcacaagatcatcatccgagtgcagaccacgccggactacagcccccaggaagccttcaccaacgccatcaccgacctcatcagcgagctgtccctgctggaggagcgcttccgggtggccatcaaagacaagcaggaaggaattgagtaggggccagaggggctctgctcagcctgtgagcccagttcctacctgcgcgtgaccctccgctccaggcactatgccgaggagagcggccattcccagccatggcccgccttgtgaccacccctcaccctgacaccgacgtatcctgtacatagattaggttttatattcctaataaaggatggcgnnnnnnnnnnnnnnnnnnnnnnnnnnnnnnnnnnnnnnnnnnnnnnnnnnnnnnnnnnnnnnnnnnnnnnnnnnnnnnnnnnnnnnnnnnnnnnnnnnnnnnnnnnn

SEQ ID NO: 32961 - DNA, 1056 bp, Macaca Mulatta
  misc_feature (1)...(1056): n = A,T,C or G
aatgtgtgaatgacaactactggtttgggagggacaaaagctgtgaatattgctttgatgaaccactgctgaaaagaacagataaataccggacatatagcaagaaacactttcggattttcagggnggaagtgggtcctaaaaactcttacattgcatacatagaagatcacagtggcaatggaacctttgtaaatacagagcttgtagggaaaggaaaacgccgtcctttgaataacaattctgaaattgcactttcactaagcagaaataaagnnnnnnnnnnnnnnnnnnnnnnnnnnnnnnnnnnnnnnnnnnnnnnnnnnnnnnnnnnnnnnnnnnnnnnnnnnnnnnnnnnnnnnnnnnnnnnnnnnnnnnnnnnnnnnnnnnnnnnnnnnnnnnnnnnnnnnnnnnnnnnnnnnnnnnnnnnnnnnnnnnnnnnnnnnnnnnnnnnnnnnnnnnnnnnnnnnnnnnnnacccagctctcaatgttgaaacagaaatagaaattttgaaaaagctaaatcatnccttgcatcatcaagattaaaaacttttttgatgcagaagattattatattgttttggaattgnnnnnnnnnnnnnnnnnnnnnnnnnnnnnnnnnnnnnnnnnnnnnnnnnnnnnnnnnnnnnnnnnnnnnnnnnnnnnnnnnnnnnnnnnnnnnnnnnnnnnnnnnnnnnnnnnnnnnnnnnnnnnnnnnnnnnnnnnnnnnnnnnnnnnnnnnnnnnnnnnnnnnnnnnnnnnnnnnnnnnnnnnnnnnnnnnnnnnnnnnnnnnnnnnnnnnnnnnnnnnnnnnnnnnnnnnnnnnnnnnnnnnnnnnnnnnnnnnnnnnnnnnnnnnnnnnnnnnnnnnnnnnnnnnnnnnnnnnnnnnnnnnnnnnnnnnnnnnnnnnnnnnnnnnnnnnnnnnnnnnnnnnnnnngccttagtgggtatccacctttctctgagcataggactcaagtgtcactgaaggatcagatcaccagtggaaaatacaacttcattcctgaagtctgggcagaggtctcagaga

SEQ ID NO: 32962 - DNA, 573 bp, Macaca Mulatta
  misc_feature (1)...(573): n = A,T,C or G
aacaggtttaatctcccncttgcacttcagntcattaggtatcanagtgcctngaatacagtgtcagggactctgagatttagcccagtttcagtggagttccataattgattggtgatttctactgtgggcatgcatgatagcacaggtgacaatcccttctaggttcttgatacttatagccctctatctatgtatctttcaccactggctgtaataacaagacagtgtgacttttttcatgtggaagcttagccatttggggtttcttttgttttagtttttttttattatactttaagttctagggtacatgtgcataatgtgcaggtttgttacctatgtatacttgtgccatgttgctgtgctgcacccatcccatttgggttttgactgtaaattatgtgtgtctatgcctgatcccccgctagtgagttccaatacacattatatgccattcatgacatagttcattttcctttccagctatttatctctttagtgtcaataactgagatgagggcagggctatctgtttgagactagtggtaagcagttaagatttagactata

SEQ ID NO: 32963 - DNA, 3222 bp, Macaca Mulatta
  misc_feature (1)...(3222): n = A,T,C or G
gatgacaactggggggaaacgacgacagtagtaacgggcacctcagagcacagcatctcccacgatgacctcacgcgcatcgccaaggacatggaggacagtgtccctctggactgctcccgtcacctgggtgtggcggcaggggccaccctggcgctgctgtctttcctcacgccgctggccttcctgctgctgcccccactgctgtggcgggaggagctggagccttgcgggacggcctgcgagggcctcttcatctctgtggccttcaagctgctcatcctgctgctgggcagctgggctctgttcttccgccggcccaaggcctcgctgccccgcgtctttgtgctgcgcgccctactcatggtgctggttttcctgctcgtggtctcctactggctcttctatggtgtgcgcatcctggatgctcgggagcgcagctaccagggcgtggtgcagttcgccgtgtcgctggtgnnnnnnnnnnnnnnnnnnnnnnnnnnnnnnnnnnnnnnnnnnnnnnnnnnnnnnnnnnnnnnnnnnnnnnnnnnnnnnnnnnnnnnnnnnnnnnnnnnnnnnnnnnnnnnnnnnnnnnnnnnnnnnnnnnnnnnnnnnnnnnnnnnnnnnnnnnnnnnnnnnnnnnnnnnnnnnnnnnnnnnnnnnnnnnnnnnnnnnnnnnnnnnnnnnnnnnnnnnnnnnnnnnnnnnnnnnnnnnnnnnnnnnnnnnnnnnnnnnnnnnnnnnnnnnnnnnnnnnnnnnnnnnnnnnnnnnnnnnnnnnnnnnnnnnnnnnnnnnnnnnnnnnnnnnnnnnnnnnnnnnnnnnnnnnnnnnnnnnnnnnnnnnnnnnnnnnnnnnnnnnnnnnnnnnnnnnnnnnnnnnnnnnnnnnnnnnnnnnnnnnnnnnnnnnnnnnnnnnnnnnnnnnnnnnnnnnnnnnnnnnnnnnnnnnnnnnnnnnnnnnnnnnnnnnnnnnnnnnnnnnnnnnnnnnnnnnnnnnnnnnnnnnnnnnnnnnnnnnnnnnnnnnnnnnnnnnnnnnnnnnnnnnnnnnnnnnnnnnnnnnnnnnnnnnnnnnnnnnnnnnnnnnnnnnnnnnnnnnnnnnnnnnnnnnnnnnnnnnnnnnnnnnnnnnnnnnnnnnnnnnnnnnnnnnnnnnnnnnnnnnnnnnnnnnnnnnnnnnnnnnnnnnnnnnnnnnnnnnnnnnnnnnnnnnnnnnnnnnnnnnnnnnnnnnnnnnnnnnnnnnnnnnnnnnnnnnnnnnnnnnnnnnnnnnnnnnnnnnnnnnnnnnnnnnnnnnnnnnnnnnnnnnnnnnnnnnnnnnnnnnnnnnnnnnnnnnnnnnnnnnnnnnnnnnnnnnnnnnnnnnnnnnnnnnnnnnnnnnnnnnnnnnnnnnnnnnnnnnnnnnnnnnnnnnnnnnnnnnnnnnnnnnnnnnnnnnnnnnnnnnnnnnnnnnnnnnnnnnnnnnnnnnnnnnnnnnnnnnnnnnnnnnnnnnnnnnnnnnnnnnnnnnnnnnnnnnnnnnnnnnnnnnnnnnnnnnnnnnnnnnnnnnnnnnnnnnnnnnnnnnnnnnnnnnnnnnnnnnnnnnnnnnnnnnnnnnnnnnnnnnnnnnnnnnnnnnnnnnnnnnnnnnnnnnnnnnnnnnnnnnnnnnnnnnnnnnnnnnnnnnnnnnnnnnnnnnnnnnnnnnnnnnnnnnnnnnnnnnnnnnnnnnnnnnnnnnnnnnnnnnnnnnnnnnnnnnnnnnnnnnnnnnnnnnnnnnnnnnnnnnnnnnnnnnnnnnnnnnnnnnnnnnnnnnnnnnnnnnnnnnnnnnnnnnnnnnnnnnnnnnnnnnnnnnnnnnnnnnnnnnnnnnnnnnnnnnnnnnnnnnnnnnnnnnnnnnnnnnnnnnnnnnnnnnnnnnnnnnnnnnnnnnnnnnnnnnnnnnnnnnnnnnnnnnnnnnnnnnnnnnnnnnnnnnnnnnnnnnnnnnnnnnnnnnnnnnnnnnnnnnnnnnnnnnnnnnnnnnnnnnnnnnnnnnnnnnnnnnnnnnnnnnnnnnnnnnnnnnnnnnnnnnnnnnnnnnnnnnnnnnnnnnnnnnnnnnnnnnnnnnnnnnnnnnnnnnnnnnnnnnnnnnnnnnnnnnnnnnnnnnnnnnnnnnnnnnnnnnnnnnnnnnnnnnnnnnnnnnnnnnnnnnnnnnnnnnnnnnnnnnnnnnnnnnnnnnnnnnnnnnnnnnnnnnnnnnnnnnnnnnnnnnnnnnnnnnnnnnnnnnnnnnnnnnnnnnnnnnnnnnnnnnnnnnnnnnnnnnnnnnnnnnnnnnnnnnnnnnnnnnnnnnnnnnnnnnnnnnnnnnnnnnnnttttatttttgtcatcagccacccctgtcctgctgtcttctctcaactccagagacctgttgcctcatctcttttggggaagagctggcagctcctcctcatcccctgccttaagtccagttctttgcctcaggggtctggtttccttggccttccagggtccctaccccttttctccctgcctgattctctgagctctgggctccctctgtactgggttgagggacaaggatcactgccttttgtaggtacttcacccctcaccccgttttagcttccatagtctttgcaccaaatccaaattcttgataatttagatctcattttgagcaaaatttgctggtcctctagtaaatcttttcaatataaatctgagcctttgactcagacatttttgccaaggaaaatagaattaggaagtacccatatacatctagccaggatccacatggaggacctttccaatggctgcaatgactaggccattcctctgagtaactcacagtgtccctttgtaggcccttcttctccctggaagactcgtcggtacttaccttgcagagcacgtcctgggataagatcctcagggtctcacctgggaggccccctctctgtgtagtgccagccctgggaacgatggagcctagtgatcggggtttctcctgctgtcctttctgcaaaagttcacctgttcacccaccacatgccagagaggggctcattggccaatgcctaccttgccccccaaaggggtgggttgtggagctcacttaggcatgacctctggctggggccagggttacgagataggcctgtatgaaatacgtcctgttctgggggtctgtctcttttcttctcttcaaaatcctcgtgtcagaggagtcccttcttagtcac

SEQ ID NO: 32964 - DNA, 810 bp, Macaca Mulatta
ggaaataaagttctctccaaagaatttcatctgaatgagagtggtgatccatcttcaaagtccaccgaaatcaaatggaaatctggaaaggatttgacgaaacgttcaagtcaaacgcctttataaagtactgcaagaaatggcaggatgaggatggcaagaagcagctggagaaggacttcagcagcatgaagaagtactgccaagtcatccgtgtcattgcccacacccagatgcgcctgcttcctctgcgccagaagaaggcccacctgatggagatccaggtgaacggaggcaccgtggccgagaagctggactgggcccgcgagaggctcgagcagcaggtacctgtgaaccaagtgtttgggcaggatgagatgatcgacgtcatcggggtcaccaagggcaaaggctacaaaggggtcaccagtcgttggcacaccaagaagctgccccgcaagacccaccgaggcctgcgcaaggtggcctgtattggggcatggcatcctgctcgtgtggccttctctgtggcacgtgctgggcagaatggcgtacaataggtagtactgtgatcaataagaagatctataagattgggccagggctaccttaatcaaggatggcaaagctgatccaagaacaatgccttccactggactatggacccttgtctgaacaagaaactttcacacccttcttgggttgggcttttgtttccactaatggggggaaagtgggacccaaatggaaccttttggtcacaaggcctaaaaaaagggccctagtgttagggtgggggaaaaaaccaaa

SEQ ID NO: 32965 - DNA, 103 bp, Macaca Mulatta
aaggaaatttcaacagttccctcggctcagatgggtacatgctctcggccctgacctgtgggatggctccagtaacttctattactgaggggctccagcaggt

SEQ ID NO: 32966 - DNA, 791 bp, Macaca Mulatta
  misc_feature (1)...(791): n = A,T,C or G
agggccagatctactgcggcctcatgacctgccctgaaccaggctgccctgcacccctcccactgccagactcctgctgccaagcctgcaaagnnnnnnnnnnnnnnnnnnnnnnnnnnnnnnnnnnnnnnnnnnnnnnnnnnnnnnnnnnnnnnnnnnnnnnnnnnnnnnnnnnnnnnnnnnnnnnnnnnnnnnnnnnnnnnnnnnnnnnnnnnnnnnnnnnnnnnnnnnnnnnnnnnnnnnnnnnnnnnnnnnnnnnnnnnnnnnnnnnnnnnnnnnnnnnnnnnnnnnnnnnnnnnnnnnnnnnnnnnnnnnnnnnnnnnnnnnnnnnnnnnnnnnnnnnnnnnnnnnnnnnnnngcatggcgggaagacgtactcccacggggaggtgtggcacccggcctttcgtgccttcggcccccttcaaggatcctatgcacctgtgaggatggccgccaggacttaaagggtgtgacctgtcccaccgagtaccccgtcatcaccccgagaaagtnnnnnnnnnnnnnnnnnnnnnnnnnnnnnnnnnnnnnnnnnnnnnnnnnnnnnnnnnnnnnnnnnnnnnnnnnnnnnnnnnnnnnnnnnnnnnnnnnnnnnnnnnnnnnnnnnnnnnnnnnnnnnnnnnnnnnnnnnnnnnnnnnnnnnnnnnnnnnnnnnnnnnnnnnnnnnnnnnnnnnnnnnnnnnnnnnnnnnnnnaggtcactggaacgtcttcctagcccagaccccggagctgaaggtcacggccagtccagacaaagtgaccaagaca

SEQ ID NO: 32967 - DNA, 1051 bp, Macaca Mulatta
  misc_feature (1)...(1051): n = A,T,C or G
gggatggatggaccacagtacgacgttaagtctcaagataatggatttaaactggtgtcttaaataggtttgatcacattcaaggattattatacttgtgcttcaaccaatctaaattggattctttaatgtttcaccataacacaaaaagcatgaacttgtattaatcctatataatagattgatcatgcaccatatccacaggaggttggaaaaaccatgccattttctggaatttaagggtgttgcattatttcatcaatcatttgttgnnnnnnnnnnnnnnnnnnnnnnnnnnnnnaaaatgtgaactttcaggtattgagtaacacctttatcttggtatagaactgatnnnnnnnnnnnnnnnnnnnaatatctgatattaatttggaatgaagtaaggttctgttaaagaaaatatatttgaagaccctttaaagcagtgaatctgaaacaattttcacacttttaagtggttgatatgtacctattttaggtattttgaggtatttaccataaactaaatttagaaagtttttagattcacttgaagtaaacattacaaacattggatacggtggggttttctttagattttacttgagagaaggtgagtacaaagcaatttgcagttgttgtaatgacaagaagaatactgcgcaagtgtgaatccaaacagcatagcttttaaattttaaagcatttggtaaactatcgctgagtttttttctgttgccaatagtaaactgcttttccattaatggagaattcatgcctttcaagcattttgaatatgacaatatttataaatgtatggtttggaggaattgtttaaattctttcctaattttctttctcttcaagatagattctttcaacaagtaatttgtagtaatgactgtgttgactttaattttggagtgtagtagctatgttaaaagattaactatttggtctcattgaaagccacacagaactttgctgctgtgtttttttcttcgtgataaataaaatactttacgannnnnaaaananannnaaaaaaaac

SEQ ID NO: 32968 - DNA, 779 bp, Macaca Mulatta
  misc_feature (1)...(779): n = A,T,C or G
caggtgccaagaggagtgccccttcgggaccttcggcttccagtgctcacagcgctgtgactgctacaatggtgggcagtgttcacccaccacgggtgcctgcgagtgtgagcctggctacaagggcccgcgctgccaggagcgactgtgcccagagggccttcatggcccaggctgcaccctgccctgcccctgtgatgctgacaacaccatcagnnnnnnnnnnnnnnnnnnnnnnnnnnnnnnnnnnnnnnnnnnnnnnnnnnnnnnnnnnnnnnnnnnnnnnnnnnnnnnnnnnnnnnnnnnnnnnnnnnnnnnnnnnnnnnnnnnnnnnnnnnnnnnnnnnnnnnnnnnnnnnnnnnnnnnnnnnnnnnnnnnnnnnnnnnnnnnnnnnnnnnnnnnnnnnnnnnnnnnnnnnnnnnnnnnnnnnnnnnnnnnnnnnnnnnnnnnnnnnnnnnnnnnnnnnnnnnnnnnnnnnnnnnnnnnnnnnnnnnnnnnnnnnnnnnnnnnnnnnnnnnnnnnnnnnnnnnnnnnnnnnnnnnnnnnnnnnnnnnnnnnnnnnnnnnnnnnnnnnnnnnnnnnnnnnnnnnnnnnnnnnnnnnnnnnnnnnnnnnnnnnnnnnnnnnnnnnnnnnnnnnnnnnnnnnnnnnnnnnnnnnnnnnnnnnnnnnnnnnngatggcacatttgggctgaactgcgatgaatactgtgactgcagacatgctgatggatgcgaccctgacacaggacactggtgctgcctggacggatggacagg

SEQ ID NO: 32969 - DNA, 1045 bp, Macaca Mulatta
  misc_feature (1)...(1045): n = A,T,C or G
ggaagaggaagtagtcccacctcgtcctccacttccttggtcctatgactttacagagcagcctcccataatcccccctctgcccagtgatagcagctccttgctctgttatagcaggggcccagttcatctgcctgaagaaaagaagatgtatcaagttcaaggatatccaagaaatggatctcactgtgnnnnnnnnnnnnnnnnnnnnnnnnnnnnnnnnnnnnnnnnnnnnnnnnnnnnnnnnnnnnnnnnnnnnnnnnnnnnnnnnnnnnnnnnnnnnnnnnnnnnnnnnnnnnnnnnnnnnnnnnnnnnnnnnnnnnnnnnnnnnnnnnnnnnnnnnnnnnnnnnnnnnnnnnnnnnnnnnnnnnnnnnnnnnnnnnnnnnnnnnnnnnnnnnnnnnnnnnnnnnnnnnnnnnnnnnnnnnnnnnnnnnnccaagaagtgcggtggtacagctctgtttggctgaaagtactcgacctaggatgacggtggaagagcaaatggaaagaataagaagacatcaacaagcgtgcctgagggaaaagaaaaaaggattaaatgttattggtgcttcagaccagtcacccttacaaagcccttcaaatttaagggataatccatttaggactactcagnnnnnnnnnnnnnnnnnnnnnnnnnnnnnnnnnnnnnnnnnnnnnnnnnnnnnnnnnnnnnnnnnnnnnnnnnnnnnnnnnnnnnnnnnnnnnnnnnnnnnnnnnnnnnnnnnnnnnnnnnnnnnnnnnnnnnnnnnnnnnnnnnnnnnnnnnnnnnnnnnnnnnnnnnnnnnnnnnnnnnnnnnnnnnnnnnnnnnnnnnnnnnnnnnnnnnnnnnnnnnnnnnnnnnnnnnnnnnnnnnnnnnnnnnnnnnnnntcagccctcaagatgaaacacagatcacaaatcataaaccagaagaccatcctgaagaaaatacaaagaacaatgctgacgaacaggaagaaactgttatttcttacgaatcaactcctgaggtttctagaggaaatcaaacaatggca

SEQ ID NO: 32970 - DNA, 141 bp, Macaca Mulatta
aggaagacaattattgaccaacatgagaaagagattcactatctacaagatatcttcatggccatggagcagaactatatagattctgagtatgaaagcaagctggagttccagagcatgtggaatgatctcaaaaacatg

SEQ ID NO: 32971 - DNA, 382 bp, Macaca Mulatta
  misc_feature (1)...(382): n = A,T,C or G
atcgctgtatctatggtaaccccacggcaggctggtcagagcccagtgaccccctggagctggtggtgacaggnaggagcctacagaaaacccaccctctcagccctgcccagccctgtggtggcctcaggagggaacgtgaccctccagtgtgactcacgggtggcacttgacggcttcattctgtgtaaggaaggagaagatgaacacccacaatgcctgaactcccagccccgtacccgtgggtcatcccgggccgtcttctccgtgggccccgtgagcccgagtcgcaggtggtcgtaccggtgctatggttatgactcacgctctccctatgtgtggtctttacccagtgatctcctggagctcctggtcccaggtg

SEQ ID NO: 32972 - DNA, 380 bp, Macaca Mulatta
tctactctgttttccctttttccttccgctccatttggggccctgggggtttcagtcatctccccatttggtcccctggactgtctttgttgattctaacttgtaaataaagaaaatattattcaagttttgagttaccttaatatttgtttttgtagtgtttcaaaaggaacatcataagaattgtcttgataattttgaagaaaatattcttgcaatgagaaaaggcaatagctaccctgtaattggattgttttaatttttaaaccagtaggcttttgctgtgtttttaataaatccatctcacttttgtaaactgagtgcttagaactaatctttagaaggacaatttgctcttgtttaaatgaaaaatagttctg

SEQ ID NO: 32973 - DNA, 676 bp, Macaca Mulatta
tgaccccaaacagtggactgtttcctgcacccaagtggtcctgaaacttagtgtttactcagaactcaccattcaggaaagctagtcattctgtcttatttggtaaatggaaagaggaagggagcagaaatgatgatctggtaggtgccgtggtttgccctcagagatcaggccagaaataatttttgtctgaggctgttcagagtgactgctgtcactgattctgatggtagctggataaggcattttttctcatcatactcgggatcccggctaacaattgtgtattttcttttgtaacaggttgtttctcccaaagaagagaacaaagcagcaggtaatttcctgttctgatgttttggtttttagttttatgtgtttatatgcaaaactttaaattcttagccaacattgtttcttttcagatctaaattggccttaaatcttaactttagagctcatctaaaacttccatcagcattgtctttctgttcatcacgtgatcatagattttaaaattgtgctcttacgaagctatcaatacagaaaacattactggcaataaaaatgtactcagtaacatatataaaaatataattatgggtgtaggagaactgttgctgcaattttagttttacagatgagttacccccatcacagcagcaagagtcctctc

SEQ ID NO: 32974 - DNA, 183 bp, Macaca Mulatta
gccaaatatgacctgttacaaagaggagatttttggtccagttcttgtggttctggagacagaaacattggatgaagccatccagattgtaaataacaacccatatggaaatggaactgccatcttcaccaccaatggagctactgctcggaaatatgcccacttggtggatgtcggacaggt

SEQ ID NO: 32975 - DNA, 1133 bp, Macaca Mulatta
  misc_feature (1)...(1133): n = A,T,C or G
ttggggaggaaagccgggttcagccacccttatccattgatccagccgcactttccctgcttgtgtgtgtttcacttccaggcccccttcccccaggccacgcaacgtaattccttctgttcatcatgttactcaacagagctctgtttctagtgtctcaaagatacagttaacttagtggacaccttctgtaccataacaactctgttctttcctcntgacaggtgacagagctgaatgagccactgtcgaatgaggaacgaaaccttctctctgtggcntacaagaacgttgtgggggcacgccgctcttcctggagggtcatcagtagcattgagcagaagacatctgcggacggcaacgagaagaagatagagatggtccgtgcgtaccgggagaagatagagaaggagttggaggcggtgtgccaggatgtgctgagcctgctggataactacctgatcaagaattgcagcgagacccagtacgagagcaaagtgttctacctgaagatgaaaggggactactaccgctacctggccgaagtggccactggagagaaaagggcgacggtggtggagtcctctgagaaggcctacagcgaagcccacgagatcagcaaagagcacatgcaacccacccaccccatccgattaggcctggctcttaactactctgtcttctactacgagatccagaacgccccggagcaagcgtgccacttggccaagaccgcgttcgatgacgccatcgccgagctcgacaccctcaacgaggactcctacaaggactccacgctcatcatgcagctcctccgcgataacctcacgctctggacgagcgaccagcaggacgacgacggcggcgaaggcaacaattaaggccccagggggactggcagcgcacgcggatgctactactgcagtctttatttttttcccatgagttgggggtcgggtgggggagggaaagggagggatgaccttcccagggagaaacccacgacctgtcctgtctttgatcgcctctttgacatttttgccaaaagaccactagtggaaagtcaggctagctgtgctggtattaagtagcagcctcacactggcgtctggactgttctgtagattcatgca

SEQ ID NO: 32976 - DNA, 97 bp, Macaca Mulatta
gggcttgcagtttccaaaccagacatgatatctcatttggagaatgggaaagaaccatgggtgacaatgagagaaatttcaagaattccctatcctg

SEQ ID NO: 32977 - DNA, 663 bp, Macaca Mulatta
  misc_feature (1)...(663): n = A,T,C or G
acgagggagcagcggagcgatgggacctctggcttacgagcagtcatgtttctccagtattacctcaacgaggagggagatcgggtctatacgctgaagaaatttgacccgatgggacaacagacctgctcagcccatcctgctcggttctccccagatgacaaatactctcgacaccgaatcaccatcaagaaacgcttcaaggtgctcatgacccagcaaccgcgccctgtcctctgaaggtcccttaaactgatgtctattctgcggcctgttacccctcggagactccgtaaccaaactcctcagtctgtgagccctgatgcctttttgccagccatactctgtggcatccagtctcatcctggtgattgagcatgcttgtgtgaggcagtcatggtggcatcacccataaagggaacacgtttgactttttttttcgtattttaagttactaccagattattaaagataaaatgatttgaaaagnnnnnnnnnnnnnnnnnnnnnnnnnnnnnnnnnnnnnnnnnnnnnnnnnnnnnnnnnnnnnnnnnnnnnnnnnnnnnnnnnnnnnnnnnnnnnnnnnnnnnnnnnnnnnnnnnnnnnnnnnnnnnnnnnnnnnnnnnnnnnnnnnnnnnnnnnnnnnnnnnnnnnnnnnnnnnn

SEQ ID NO: 32978 - DNA, 921 bp, Macaca Mulatta
  misc_feature (1)...(921): n = A,T,C or G
acaacaatgctacccccttcctgctgactggtttcctgggctcagaggcaattcaccactggatctctattcccttctttgtcatctacttctgcatcctttttagaaatggcacacttcttgtcctcatttggaatgaccacagcctccatgatcccatgtactacttcctggctatgctggcaggcacggaccttgggatgacactcactaagatgcccactgtcctgggtgtcctgctgctagaccagagggagattgcccaggctgcctgtttcactcagtccttcttcattcattcactggccatagtagaatcaggtatcttgctttttatggcctatgaccatttcattgccatccacacaccactgaggtacaactccattcttaccaatttccgagtgatgaacataggactgggggtactgatgagaggttttatgtccattttgcccctaattctttcactctactgctacccatagtgtggttcccgtgttctcttgcgcacattttgccttcaccaagagtcataaaannnnnnnnnnnnnnnnnnnnnnnnnnnnnnnnnnnnnnnnnnnnnnnnnnnnnnnnnnnnnnnnnnnnnnnnnnnnnnnnnnnnnnnnnnnnntatatactaatccttaagaagtgatgggcattgcgtctggacaagagcaagctaaagctctcaacactcgtgtctcccatattgactgtcctagtatttcacatcactgtgatgggactgtcagtcattcacaggtttggaaacatgcacctcatatggtcctcattaccatgagctatgtccattttctctttcctccattcatgaatcctatcatttacagcatcaagaccaagcaaattcaaagaagcattgttcgcctatgttctgggcagagtagggcttga

SEQ ID NO: 32979 - DNA, 802 bp, Macaca Mulatta
ggggcagttcggcggtcccgcgggtctgtctcttgcttcaacagtgtttggacggaacagatccggggactctttcttccagcctccgagcgccctccgatttcctctccacttgcaacctccgggaccatcttctcggccatctcctgcttctgggacctgccagcaccgtttttgtggttagctccgtcttgccgaccaaccatgagctcccagattcgtcagaattattccaccgacgtggaggcagccgtcaacagcctggtcaatatgtacctgcagggctcctacacctacctctctctgggcttctatttcgaccgcgatgatgtggctctggaaggcgtgaggcacttcttccgcgaattggccgaggagaagcgcgagggctgcgagcgtctggtgaagatgcaaaccgaggtggcggccgcgctgtttttgaggaacgcgagaagccgcctgaagatgaatgggggtaagccccggatgccatggaagccggccatgggccgggggagaaaaacttggatccggccggtttgggaatgtgatggcgcgagggatcatgggcggacggagtccccatcgcccgagaaggagggggagaactgcggtgccggaggggagggaaaatgggaccctcgcgccgggcagagaggggtggaacacggggtgggcgaggcgtgagaaagagatgacagccggacaccgaaggacggggagagagaagcgaaaaggaggccgacggagggaagaacaccgaggccgaaggaagacgcgaaagaaagaagaggagcgcagt

SEQ ID NO: 32980 - DNA, 205 bp, Macaca Mulatta
atgaacaagcacggcatctgtgtggtggacgacttcctcggcaaggagaccggacagcagatcggcgacgaggtgcgcgccctgcacgacaccgggaagttcacggacgggcagctggtcagccagaagagcgactcgtccaaggatatccgaggcgataagatcacctggatcgagggcaaggagcccggctgcgaaaccattg

SEQ ID NO: 32981 - DNA, 3924 bp, Macaca Mulatta
  misc_feature (1)...(3924): n = A,T,C or G
acgcttggcgacgttgaaggttcgtccacagctaaggaaacttttgcagccggagaggttccgaaacacacatggggctgggtccgcgctctccacacaaggtggggcgccggttcccagctggtggcaaacggggacgcggggccaaggggtcggggcgccccttaccccgcagtaagcggcaaccctggccgcctccggatnnnnnnnnnnnnnnnnnnnnnnnnnnnnnnnnnnnnnnnnnnnnnnnnnnnnnnnnnnnnnnnnnnnnnnnnnnnnnnnnnnnnnnnnnnnnnnnnnnnnnnnnnnnnnnnnnnnnnnnnnnnnnnnnnnnnnnnnnnnnnnnnnnnnnnnnnnnnnnnnnnnnnnnnnnnnnnnnnnnnnnnnnnnnnnnnnnnnnnnnnnnnnnnnnnnnnnnnnnnnnnnnnnnnnnnnnnnnnnnnnnnnnnnnnnntctgcgctccaacttgcgcactgtggcctgtcaccgatgcggggtccatgtattgcaaagtgctttgctacagctccctcgattgctggggagtgctgcnnnnnnnnnnnnnnnnnnnnnnnnnnnnnnnnnnntggtcccacggagaccctggaggagctggtcctgggactagccgctgaggtgtgtgatgattttcttttctactgtggagacacacatggcagcttcgtggtcagaactctgcttcaggtgttaggagggactattctggagtctgagagagccaggccccgtggtttccaatcatctgnnnnnnnnnnnnnnnnnnnnnnnnnnnnnnnnnnnnnnnnnnnnnnnnnnnnnnnnnnnnnnnnnnnnnnnnnnnnnnnnnnnnnnnnnnnnnnnnnnnnnnnnnnnnnnnnnnnnnnnnnnnnnnnnnnnnnnnnnnnnnnnnnnnnnnnnnnnnnnnnnnnnnnnnnnnnnnnnnnnnnnnnnnnnnnnnnnnnnnnnnnnnnnnnnnnnnnnnnnnnnnnnnnnnnnnnnnnnnnnnnnnnnnnnnncagtcccctactgctatttctccgagatcagacgagctccagactcctggagcaggtcctgctggtgttggagcccccaaggctccagagcctctttgaggagcacttgcaggggcagctgcagaccctggctgcacatcccattgccaacttccctttgcagcgcttactggatgcagtcactacccctgagctnnnnnnnnnnnnnnnnnnnnnnnnnnnnnnnnnnnnnnnnnnnnnnnnnnnnnnnnnnnnnnnnnnnnnnnnnnnnnnnnnnnnnnnnnnnnnnnnnnnnnnnnnnnnnnnnnnnnnnnnnnnnnnnnnnnnnnnnnnnnnnnnnnnnnnnnnnnnnnnnnnnnnnnnnnnnnnnnnnnnnnnnnnnnnnnnnnnnnnnnnnnnnnnnnnnnnnnnnnnnnnnnnnnnnnnnnnnnnnnnnnnnnnnnnnnnnnnnnnnnnnnnnnnnnnnnnnnnnnnnnnnnnnnnnnnnnnnnnnnnnnnnnnnnnnnnnnnnnnnnnnnnnnnnnnnnnnnnnnnnnnnnnnnnnnnnnnnnnnnnnnnnnnnnnnnnnnnnnnnnnnnnnnnnnnnnnnnnnnnnnnnnnnnnnnnnnnnnnnnnnnnnnnnnnnnnnnnnnnnnnnnnnnnnnnnnnnnnnnnnnnnnnnnnnnnnnnnnnnnnnnnnnnnnnnnnnnnnnnnnnnnnnnnnnnnnnnnnnnnnnnnnnnnnnnnnnnnnnnnnnnnnnnnnnnnnnnnnnnnnnnnnnnnnnnnnnnnnnnnnnnnnnnnnnnnnnnnnnnnnnnnnnnnnnnnnnnnnnnnnnnnnnnnnnnnnnnnnnnnnnnnnnnnnnnnnnnnnnnnnnnnnnnnnnnnnnnnnnnnnnnnnnnnnnnnnnnnnnnnnnnnnnnnnnnnnnnnnnnnnnnnnnnnnnnnnnnnnnnnnnnnnnnnnnnnnnnnnnnnnnnnnnnnnnnnnnnnnnnnnnnnnnnnnnnnnnnnnnnnnnnnnnnnnnnnnnnnnnnnnnnnnnnnnnnnnnnnnnnnnnnnnnnnnnnnnnnnnnnnnnnnnnnnnnnnnnnnnnnnnnntattggaaatgtttttgttagtttgtggtggaggattttaagacatctcagggtaaagtcagagggctgtcatcagtgtgctggggagtttagggacaggaggcattgttaggggttagatgtagcagcaatcaggctgggatcaagatgcctggggnnnnnnnnnnnnnnnnnnnnnnnnnnnnnnnnnnnnnnnnnnnnnnnnnnnnnnnnnnnnnnnnnnnnnnnnnnnnnnnnnnnnnnnnnnnnnnnnnnnnnnnnnnnnnnnnnnnnnnnnnnnnnnnnnnnnnnnnnnnnnnnnnnnnnnnnnnnnnnnnnnnnnnnnnnnnnnnnnnnnnnnnnnnnnnnnnnnnnnnnnnnnnnnnnnnnnnnnnnnnnnnnnnnnnnnnnnnnnnnnnnnnnnnnnnnnnnnnnnnnnnnnnnnnnnnnnnnnnnnnnnnnnnnnnnnnnnnnnnnnnnnnnnnnnnnnnnnnnnnnnnnnnnnnnnnnnnnnnnnnnnnnnnnnnnnnnnnnnnnnnnnnnnnnnnnnnnnnnnnnnnnnnnnnnnnnnnnnnnnnnnnnnnnnnnnnnnnnnnnnnnnnnnnnnnnnnnnnnnnnnnnnnnnnnnnnnnnnnnnnnnnnnnnnnnnnnnnnnnnnnnnnnnnnnnnnnnnnnnnnnnnnnnnnnnnnnnnnnnnnnnnnnnnnnnnnnnnnnnnnnnnnnnnnnnnnnnnnnnnnnnnnnnnnnnnnnnnnnnnnnnnnnnnnnnnnnnnnnnnnnnnnnnnnnnnnnnnnnnnnnnnnnnnnnnnnnnnnnnnnnnnnnnnnnnnnnnnnnnnnnnnnnnnnnnnnnnnnnnnnnnnnnnnnnnnnnnnnnnnnnnnnnnnnnnnnnnnnnnnnnnnnnnnnnnnnnnnnnnnnnnnnnnnnnnnnnnnnnnnnnnnnnnnnnnnnnnnnnnnnnnnnnnnnnnnnnnnnnnnnnnnnnnnnnnnnnnactaatctccatcggcaccgtgtcagactctccctcgcttaggctttctgtccactgtgtgacatccttaacaattctacaactccccctgcacctggtccccaggatcagggttaagctagagaggaagcccgggaaagctctaaaggacgggcagtggaagcagccccagtataggcctcttacccttgcggggctccagctctgaccagactccaacaccatcaggcacgtgtcatcctccagcagctggaagaagtcctcactgtccactgcagttccatcctcctctagcaccagggttagcactccattcagcagtagggtctccaatgcctgcccaatggcaagaagcaagaaggaaggtatcccatgccccttccctctttagctgcccaacatccatcagttggctctagacattggtcgatgtcccaccttgactttccggcactttgatacctcctaaaggctgcagctctccgtgttcttcaggttttgggggatcctagctagaggctgagctttttcctctttgctcctaccatgtcattggcatctccccttgctcccctccaagtcactcctggtttggaattggaaagcaagccaggttctcatgaagtccacccttctgtcttatctacaatgctgcacctcacttcccacaccctcagagttctccagaagtgttttcagtaatagtgtttaacctttttgagtccttactctgtgccgggtatgaggactttacctacattatcctcttactcctttcaacaaccctaggaggtgatgtgttattattgcctttttatagatgaagaaactgaggttttgataggttgaacaacttccc

SEQ ID NO: 32982 - DNA, 709 bp, Macaca Mulatta
  misc_feature (1)...(709): n = A,T,C or G
gttgtccgaacagacagcctgaaggggcggcggggccggctaccttcaaaacccaagcagcctccagatgcctcccctgccaatctcctcacttccctggtccgtgcacacctggactcagggcccagcactgccaaactggactactccaagnnnnnnnnnnnnnnnnnnnnnnnnnnnnnnnnnnnnnnnnnnnnnnnnnnnnnnnnnnnnnnnnnnnnnnnnnnnnnnnnnnnnnnnnnnnnnnnnnnnnnnnnnnnnnnnnnnnnnnnnnnnnnnnnnnnnnnnnnnnnnnnnnnnnnnnnnnnnnnnnnnnnnnnnnnnnnnnnnnnnnnnnnnnnnnnnnnnnnnnnnnnnnnnnnnnnnnnnnnnnnnnnnnnnnnnnnnnnnnnnnnnnnnnnnnnnnnnnnnnnnnnnnnnnnnnnnnnnnnnnnnnnnnnnnnnnnnnnnnnnnnnnnnnnnnnnnnnnnnnnnnnnnnnnnnnnnnnnnnnnnnnnnnnnnnnnnnnnnnnnnnnnnnnnnnnnnnnnnnnnngaccggcatgggctgcaggagccgcggcgggtggaggagctgcagaaccgcatcgccagctgcttgaaggagcacgtggcagctgtggcgggcgagccccagccggccagctgcctgtcacgtctgttgggcaaactgcccgagctccggaccctgtgcacccagggcctgcagc

SEQ ID NO: 32983 - DNA, 521 bp, Macaca Mulatta
  misc_feature (1)...(521): n = A,T,C or G
agttcacctgcagaggaggctccagaaagcagcatgtcccccttgctctttggggctgggctggtcattctgaatctagtgacgtctgccaggagccagaagacagaacctctaagtggctctggggaccagccactcttccgtggagctgatcgacatgactttgccatcatgatccctccaggaggcacggaatgcttttggcaatttgcccaccagactggatacttctatttcagttacgaggnnnnnnnnnnnnnnnnnnnnnnnnnnnnnnnnnnnnnnnnnnnnnnnnnnnnnnnnnnnnnnnnnnnnnnnnnnnnnnnnnnnnnnnnnnnnnnnnnnnnnnnnnnnnnnnnnnnnnnnnnacaggtttttatcagctttgtctaaataatcagcataatcacttcggttctgtgcaagtgtacctcaactttggagtcttctatgaggggcctgagactgatcacaaacagaaggaaagaaaacaactgaacgatattctggatgcaatagag

SEQ ID NO: 32984 - DNA, 1729 bp, Macaca Mulatta
  misc_feature (1)...(1729): n = A,T,C or G
aggtttttggtgtgaagcagaaaatgaggaggcaccttctgagcagagtgtttctgtaggagtgtcacaggtcaggactgctgagccaggtctcttccagaaagcacacccatgtgagatgtgtgacccactcttgaaagacattttgcacctggccgaacaccaggaatcacaccctacacagaaactgtgcacacgtgggccgtgtaggagaagattctcatccagtgcagacttttaccagcaccagaagcaacataatagagagaattgcttcagaggggatgatggaggggcctcatttgtgaagagctgtacagtttgcatgttagggagatcctttacctgcagggaggaagggatggacttaccggacagctctggcctcttccagcaccagaccacttacaatagggtgagtccctgcagaaggactgaatacatggagtctttcccacacagctccagtctcgggcaacaccagggagactatgatggacagatgctcctcagttgtggtgaggaaggaaaagccttcctggacacctttactcttcttgacagccagataactcatcctgaggtgagaccctttagatgcctaccatgtggaaatggtacaaggagaaatcagctcttannnnnnnnnnnnnnnnnnnnnnnnnnnnnnnnnnnnnnnnnnnnnnnnnnnnnnnnnnnnnnnnnnnnnnnnnnnnnnnnnnnnnnnnnnnnnnnnnnnnnnnnnnnnnnnnnnnnnnnnnnnnnnnnnnnnnnnnnnnnnnnnnnnnnnnnnnnnnnnnnnnnnnnnnnnnnnnnnnnnnnnnnnnnnnnnnnnnnnnnnnnnnnnnnnnnnnnnnnnnnnnnnnnnnnnnnnnnnnnnnnnnnnnnnnnnnnnnnnnnnnnnnnnnnnnnnnnnnnnnnnnnnnnnataagtgcaatgaatgtgggaaagcctttagccgtaaagacacacttgttcagcaccagagatttcatactggggaaaggccttacgagtgcagtgaatgtggaaaattctttagccaaagctcccaccttattgaacactggagaattcatactggggcaaggccttatgaatgcatagaatgcggaaaattctttagccataactctagcctcattaaacatcggagagtccacacaggagcaaggtcctatgtgtgcagcaaatgtgggaaggcctttggctgcaaagacacacttgttcagcaccagataattcacactggagcaaggccttatgagtgcagtgaatgcgggaaggccttcagccgtaaagacacacttgtgcaacaccaaaaaatccacactggagaaaggccttatgagtgtggtgaatgtggcaaattctttagccatagctccaaccttattgtacaccagagaattcacactggagcaaagccttatgagtgcaatgaatgtgggaaatgctttagccacaactccagccttattctgcaccagagagttcacacaggagcaaggccctatgtgtgcagcgaatgtgggaaggcttacattagcagctcccaccttgttcaacacaagaaagttcacactggagcaagaccttatgagtgcagcgaatgtgggaaattctttagccgcaactctggcctcattctacaccagagggttcacactggagaaaagccttatgtatgcggtgaatgtgggaaagcctacagcagaagctcccatc

SEQ ID NO: 32985 - DNA, 781 bp, Macaca Mulatta
  misc_feature (1)...(781): n = A,T,C or G
ggatattcctttaatcaaaaaggaaacacaatattttaagtatctttagcccaattaccatgacatattgaacatctttaaccagactgtattgtccttcatatgtgaagttgacactactgatttgtcattccaaatgttgggttaaagtgtttaatttttatttattttcttgttgcctcaaaagatgattgcattctaacttttgtgacctaccaaatttaagatgtgtatacgttgttctttacattgttctagaaaagagattttaatgctatagtgactttgctcacttacaccagagaaataaacaactttcaatggaagaggattttagtgctttttttttccctaaaatagacattaagctgctgttgtaaagtattgtttgcagctctttccaatgtctagagacatttttatttatgaatatttatacaaaaaggaattctgtcaagatgactgctctatatcacttgagaatggcattatttaattaaagaacaaatagcattttttggtagtgcctgtctatacctattgtcattgtttgccttgtaatcggttgttttgaattcactttgggttaatagttttttttaaggttttggtgaaggagcactttaaaacaaactgggtgtgttgttttttaagttaatcatatgtttaaaaaatgtgtgggtttttgcattcaaacacatcatataatacattgnnnnnnnnnnnnnncnnnnnnnnnnnnnnnnnntttaaattataataaaatatttattttgtaagt

SEQ ID NO: 32986 - DNA, 594 bp, Macaca Mulatta
ggtttttcacacctgaaaataacatagcaaaataagccaagatgtctgtgaatccaatgacctatgaggcccagttctttggcttcatgccacaaacgtgcatgcttcgaatttacattgcatttcaagactacctatttgaagtgatgcaggccgttgaacaggttattctgaagaagctggatggcatcccagactgtgacattagcccagtgcagattcgcaaatgcacagagaagtttctttgcttcatgaaaggacattttgataacctttttagcaaaatggagcaactgtttttgcagctgattttacgtattccctctaaacatcttgcttcctgaagataaatgtaaggagataccttatagtgaggaagatttttagcgtctccagaaagattttgaacagttacaggagaagtacaagactgaattatgtattaagcaggcccctcttgcaaaattagaagagcaaaaaattgttcaggccaaactcaaacagacgttgactttctttgatgagcttcaaaatgttgtcagagatcatgggactagtgattttagggagagtttagtgtccctggtcagaact

SEQ ID NO: 32987 - DNA, 221 bp, Macaca Mulatta
caggtggattctgaagagccagtctttgaggctgtcatcaactgggtgaagcatgccaagaaggagcgggaagaatccttgcctaacctgctacagtatgtgcgtatgcccctgctgacccccaggtatatcacggatgtaatagatgctgaggtaagtggtgcaacactctcaggatccaaaaccttgacaaactcttaccttagtgttctgtattcaaa

SEQ ID NO: 32988 - DNA, 1370 bp, Macaca Mulatta
  misc_feature (1)...(1370): n = A,T,C or G
cggacgagggtgtgcttcatctccaagttcctccgtaccaaggggctcacgagcgagcgacagctgcagaccttcagccagagcctgcaggagctgctggcagaacattataaacatcactggttcccagaaaagccatgcaagggatcgggttaccgttgtattcgcatcaaccataaaatggatcctctgattggacaggcagcacagcggattggactgagcagtcaggagctgttcaggcttctcccaagtgaactcacactctgggttgacccctacgaagtgtcctacagaattggagaggatggctccatctgtgtgctgtatgaagcctcaccagcaggaggtagcactcaaaacagcaccaacgtgcaaatggtagacagccgaatcagctgtaaggaggaacttctcttgggcagaacgagcccttccaaaaactacaatatgatgactgtatcaggttaagatatagtctgtggatggatcatcttataatgatggataaatttgatttttgctttgggtgggctcctcttggggatggattatggaatttaaaccatgtcacagctgtgaagatctggcacaagatagaatggtaaaaaaaaaattttttaagtgacagtgccatagtttggacagtacctttcaatgattaattttaatagcctgtgagtccaagtaaatgatcactttatttgctagggagggaaggtcctagggtggtttcagtttctcccagacatacctgaatttttacatcagtccctttaaagaaattctgtatttacaaaccattctctgcagtaaatctcgcagaggaatttgcagtattgaacgcttggaaattgttactgttaacctttttggcagcgcaataggaaagctgaacgttttaaacatggtagtactggaaattttacaagacttttacctaccacttatgtataaatgtccataaagacaaactagtaagcttgacctgggggaaatgggcagaccttgaatgggggttttgggccctgaaaattaccaagttgcccaaaaacttgcccagggcaaccannnnnnnnnnnnnnnnnnnnnnnnnnnnnnnnnngcctcaacctggggggggggaagacccagcccagaccctctcgggaaaatttcccacccttgtgaccctttcccagaacactgggacagaccccccttcatttttaaaaaaacggcaacggtccgggttttgaaactttctccctgggccctaaatgtgggtgaaaaaactttttttgtcggagaacacacccactcttcttgttgtgggcaacattttcctaagaccccccttttcttcggggcaaacaatttcggcgctcggc

SEQ ID NO: 32989 - DNA, 921 bp, Macaca Mulatta
catcctttgaggatagttttatttgaaaataacaaaactgctgtttgagcccaagtctggtgatgtaggtgggtaaaagtcaagtatttgggtaaaaaccctatggaattaagacatgatttcactgatatttttttcttctaggtgtcgctaatctgtgaagtagttgtagaggagacacaaaaggaattgggggtcacaaatggttctcactgacatgagtgtagacctttctactcaggtgaaatttggtgattgtctgccaggttcaagatgctgacttccaggagcttgccaccataccagagaccagcaccaatagagagtgaacacgatttatcttaaccctctcattttaggttgttgatcattatgaaaatcctagaaacgtggggtcccttgacaagacatctaaaaatgttggaactggactggtgggggctccagcatgtggtgacgtaatgaaattacagattcaagtggatgaaaaggggaaaattgtggatgctaggtttaaaacatttggctgtggttctgcaattgcctccagctcattagccactgaatgggtgaaaggaaagacggtggaggaagccttgactatcaaaaacacagatatcgccaaggagctctgcctgcctcccgtgaaactgcactgctccatgctggctgaagatgcaatcaaggccgccctggctgattacaaattgaaacaagaacccaaaaaaggagaagcagagaagaaatgagccctccctgggcgaagcctccagcaggccacacccctgtttcccacctgccgtgcaatcaccttagatgttcagaagccgctccctctccactgaagagctatgagatacgcacaatactttgctgttcacattatgactctcatgcaagcaaaatacacagttttcattg

SEQ ID NO: 32990 - DNA, 664 bp, Macaca Mulatta
caaaagaaaatagttactacttaattttgtaattttttttcagagtgaaacagatactaattgtcttaactctttccagcttcagatggaaaataacggatggatctcagttacaaataaggacagtatggatggtaaaatttgagaggcttatgggatcagatctcgggaacatcatgtgatgaagctgacattttaaaaaagcaaatgatcctttatgtttttggatattcatcaattttataaagaaaacaatattgaaattttgctctattttctgatcatgaaactgtaaagctttttgacaactaataaatgtcatggcaattgctagattctaattgtagtgtgatttaaaaatggaacattgcactagtgttctttaaaagtcaaaccaaatatcccaactgtccaaaggataatttaatccaaagaagctattttgaatatgtgttcgcctttggcatattttaccttaactgttttctttctttatcatctagatcactaatttcagcagcaaagatacagtagtctgggtgaacgcagggttttccttaaacctgtggactcttcttcaatccctctctttaccaaaggtgacaaaaatccccttgatgaccctgtcccagatcatccgtgcgagcagcaagtttgtccccta

SEQ ID NO: 32991 - DNA, 153 bp, Macaca Mulatta
agcaggtaacatctaaaggaactggtttaaatcctaatgccaaagtatggcaagaaattgctcctggaaatactgatgccaccccagtaactcatggaactgaaagctcttggcatgaaacagcagctacatcaggtgctcatcctgagggta

SEQ ID NO: 32992 - DNA, 661 bp, Macaca Mulatta
tgggtaaagcagagcctgttaaaattaggaattttaaggtgtccaactgtaagtaagctaagtgtttagatattaggatgcttgcttatttgttttcaatgttgtaatttatatagaggcaatgctttcttttttgtctacgccaacattcatagtttttctgagtgctctttgacatgaatataccctcacatacatctttttttaaatttaacagaaattgtgccatccctcatcaaccaagatacagaaaccataaatatgatgtcagaatttgttgctaatttgccacaggagctgaagttaaccctgtctgagaggcagccagcattatcagagctacaacaacatgtacatgtattaaaagattccaatcttagctttgaagaatttaagaaaattattcgcaagagacaaagtgaagccacagacagcagtccttcagaattaaaatccttaggcttggatactcattctcgaagaaagagacaactctacatgacattgtctaataaatgttgccatattggttgtaccaaaaaatctcttgctaaattttgctgagatgaagctaattgtgcacatctcatctaatattcacacatagtcttgatgacattttcactgatgcttctgtcaggttaaagcaattcttagaata

SEQ ID NO: 32993 - DNA, 245 bp, Macaca Mulatta
  misc_feature (1)...(245): n = A,T,C or G
ggggcgtgtgcatcgcccagtcggtgaagataccacgggagcccaaggcaggcgagtttgacaagatcatccgccgcctcctggagacttcgaacgccagggcagtcatcatcttcgccaatgaggatgacatcaggnggtgggcaccgggaaccatgcaggtgtgggcagagccacaggtcctgtcctgctggagaccttcccaggcgagcctgaccccaccctgggatccggagaggtgggtg

SEQ ID NO: 32994 - DNA, 297 bp, Macaca Mulatta
  misc_feature (1)...(297): n = A,T,C or G
aggacccatcgccatgggccgtgtgatccgtggacagaggaagggcgccgggtctgtgtttcgcgcgcacgtgaagcaccgtaagggcgctgcgcgcctgcgcgccgtggatttcgccgagcggcacggctacatcaagggcatcgtgaaggnaggacatcatccacgacccgggccgcggcgcgccgctcgccaaggtggtcttccgggatccgtaccggtttaagaagcggacggagctgttcattgccgccgagggcattcacacgggacagtttgtgtattgcggcaagaagg

SEQ ID NO: 32995 - DNA, 608 bp, Macaca Mulatta
  misc_feature (1)...(608): n = A,T,C or G
caggacagagtgcacagtttcctttcctctgggaaggagagttgactcttgaggaccaccaccctcctgcatcctctctttggaaggctgcatgtattgtagctgtggctgtacttgtacctaaggccctgggttcaagagagttggagaaatccctctagaaacatattggctgtcatcaaagggttctttccaggcctgaggacctaggccccagtttgtcccaaagcaggagtgacgttttccatgggataaaggacagcctggggtttttcttagctttcaactctttctgtacagtcttaaagtgtttggtaaaaggatctactatgaacttgctgctgtgataggcaagaatctcatgagacacctgtcatttagctccatggccactcactgttgtgttcatatttggaagagtaggatgcagtggatggctgggctatgggtcctacccttgagcagggaaggaacttactgtctagtataggaaaaacacatgagaacaggtgcaatatattgacctaaacttgtttagcacccatttttaagtcagtaaaagttatgaacttncagtaaaagttatgaacttctgtatgttttccaca

SEQ ID NO: 32996 - DNA, 739 bp, Macaca Mulatta
gagaaagtgagccatggagtttgcatgccccgaggttatcttgaagtgataccgaatcctaaggacagtgaaatgaatcgcataagagccacatgttttaatagtgacatagtcctaatgccagagatatcaacctttagagttttgccatgggctgatagaactgcaagagtgatatgtgatactttcactgtgactggtgagcctcttttgacttccccaaggtacattgcaaagaggcagctgagccagctgcaggcctctggcttttccctgctttctgctttcatctgtgatttctgcatttttggtgtgcccgaatttttaaattcaaagactatatcatttcctgcttcaacatttttaaataaccatgatcagcccttcatgcaggaacttgttgatggcttgtatcacactggagcaaatgtcgagagtttttcctcctctaccaggcctggtcagatggaaatctgtttcctgcctgaatttggcattagctcagctgataatgcatttaccctcagaacaggtgtcaaagaagtggcaaggaaatacaattacatttccagcttcttcattgagactggattttgtaattcagggattttgtctcatagtctctgggatgtcgataggaagaagaacatgttttgcagcacttctggaactgagcagctgacgatcactgggaaaaaatggtggcaggactctgaagcactctgccgcactcagctgc

SEQ ID NO: 32997 - DNA, 657 bp, Macaca Mulatta
  misc_feature (1)...(657): n = A,T,C or G
aggcctcagattctgcggtggatgtggccattgaaattcttgccactcgaaccccaccccggctgcaggagtgcctggcagtctacaaacannnnnnnnnnnnnnnnnnnnnnnnnnnnnnnnnnnnnnnnnnnnnnnnnnnnnnnnnnnnnnnnnnnnnnnnnnnnnnnnnnnnnnnnnnnnnnnnnnnnnnnnnnnnnnnnnnnnnnnnnnnnnnnnnnnnnnnnnnnnnnnnnnnnnnnnnnnnnnnnnnnnnnnnnnnnnnnnnnnnnnnnnnnnnnnnnnnnnnnnnnnnnnnnnnnnnnnnnnnnnnnnnnnnnnnnnnnnnnnnnnnnnnnnnnnnnnnnnnnnnnnnnnnnnnnnnnnnnnnnnnnnnnnnnnnnnnnnnnnnnnnnnnnnnnnnnnnnnnnnnnnnnnnnnnnnnnnnnnnnnnnnnnnnnnnnnnnnnnnnnnnnnnnnnnnnnnnnnnnnnnnnnnnnnnnnnnnnnnnnnnnnnnnnnnnnnnnnnnnnnnnnnnnnnnnnnnnnnnnnnnnnnnnnnnnnnnnnnnnnnnnnnnnnnnnnnnnnnnnnnnnnnnnnnnnnnnnnnnnnncaggatgcagtgaaaggggattgccagtcagccctcctggccttgtgcagggctgaagacatgtg

SEQ ID NO: 32998 - DNA, 356 bp, Macaca Mulatta
gcatcacttttactcttctggaacccacccaccactgctcaagtcacaattgaagcccagccagccaaagtttctgaggggaaggatgttcttctacttgtccagaatttgccccagaatcttattgcctacatctggtacaaagggcaaaaaacggacttccaccattacattacatcatatgtaatagatgctgaaacaattatagttgggcctgcatacagtggacgagaaacagtatattccaatgcatccctgctgatccagaatgtcaccaagaatgacacaggatcctacaccattcaaatgataaagcaaggtgataagactaaaggagtaattggacatttcacctt

SEQ ID NO: 32999 - DNA, 186 bp, Macaca Mulatta
ggaatgtaagatggcggagtagcaacgcaaagcgtttagtattgagtctctggccgacttcggttcccgtctctgcagcatccgtgatcgcttagcggagtgcttggggtagttggccaggatgccgaatatcaaaatcttcagcggcagctcccaccaggatttatctcagaaaattgctgaccg

SEQ ID NO: 33000 - DNA, 117 bp, Macaca Mulatta
  misc_feature (1)...(117): n = A,T,C or G
gcctcagaccgcagagcctgaatggatcagattatggaggagnagatattcctatcattccggatctggaggaagtacaggaagaagactttgttttgcaagtggcagcccctccca

SEQ ID NO: 33001 - DNA, 403 bp, Macaca Mulatta
gatctttattgccataaagtagagtaactgtctttgacttggaccttgtttactgtgaactctaatcaaggcaggagatgcagcagtcctacttattgccatgtggacttgtggaaaggacacgtgtgacccttaagaatccagttcggattagtgtttgaaattgaattgggaatgttgttccaggatgtggaatgcagctgtgatcacacttaccgagcttactttgacctgtttgtcaatagcatgcaaaaaaatgctttgtttgccctttgcttctgcttttttcagggaagctgccaaagaatgtcgacgtcgaaagaaagaatatgtaaaatgtctggagagccgagttgcagtgctggaagtccagaacaagaagcttatagaggaacttgaaacc

SEQ ID NO: 33002 - DNA, 2423 bp, Macaca Mulatta
  misc_feature (1)...(2423): n = A,T,C or G
tgtggaactccaacagaaaccggtgaataaagatcattgtcccagagagagaccagaggagttggagtcaggaggcgtgtaccactgccacagtggctcccaggccacagagaacagggcgaatgagcacgcctatgccaagtggaagctctgtgctgcttcagcaatatgcttcattttcatgattgcagaggtcgtgggtgnnnnnnnnnnnnnnnnnnnnnnnnnnnnnnnnnnnnnnnnnnnnnnnnnnnnnnnnnnnnnnnnnnnnnnnnnnnnnnnnnnnnnnnnnnnnnnnnnnnnnnnnnnnnnnnnnnnnnnnnnnnnnnnnnnnnnnnnnnnnnnnnnnnnnnnnnnnnnnnnnnnnnnnnnnnnnnnnnnnnnnnnnnnnnnnnnnnnnnnnnnnnnnnnnnnnnnnnnnnnnnnnnnnnnnnnnnnnnnnnnnnnnnnnnnnnnnnnnnnnnnnnnnnnnnnnnnnnnnnnnnnnnnnnnnnnnnnnnnnnnnnnnnnnnnnnnnnnnnnnnnnnnnnnnnnnnnnnnnnnnnnnnnnnnnnnnnnnnnnnnnnnnnnnnnnnnnnnnnnnnnnnnnnnnnnnnnnnnnnnnnnnnnnnnnnnnnnnnnnnnnnnnnnnnnnnnnnnnnnnnnnnnnngccagagtataaactagccgacccaatctgcacattcatcttttccatcctggttttggccagcaccatcactatcttaaaggacttctccatcttactcatggaaggtnnnggtgtgccaaagagtctgaattacaatggtgtgaaagagcttattttagcagtcgacggggtggtgtctgtgcacagcctgcacatctggtctctaacaatgaatcaagtaattctctcagctcatgttgctacagnnnacagcagccagccgggagagccaagtggttcggagagaaattgctagagccctcagcaaaagctttacggtgtactcactcaccattcagatggaatctccagtcgaccaggatccagactgccttttctgtgaagacccccgtgactagcnnnnnnnnnnnnnnnnnnnnnnnnnnnnnnnnnnnnnnnnnnnnnnnnnnnnnnnnnnnnnnnnnnnnnnnnnnnnnnnnnnnnnnnnnnnnnnnnnnnnnnnnnnnnnnnnnnnnnnnnnnnnnnnnnnnnnnnnnnnnnnnnnnnnnnnnnnnnnnnnnnnnnnnnnnnnnnnnnnnnnnnnnnnnnnnnnnnnnnnnnnnnnnnnnnnnnnnnnnnnnnnnnnnnnnnnnnnnnnnnnnnnnnnnnnnnnnnnnnnnnnnnnnnnnnnnnnnnnnnnnnnnnnnnnnnnnnnnnnnnnnnnnnnnnnnnnnnnnnnnnnnnnnnnnnnnnnnnnnnnnnnnnnnnnnnnnnnnnnnnnnnnnnnnnnnnnnnnnnnnnnnnnnnnnnnnnnnnnnnnnnnnnnnnnnnnnnnnnnnnnnnnnnnnnnnnnnnnnnnnnnnnnnnnnnnnnnnnnnnnnnnnnnnnnnnnnnnnnnnnnnnnnnnnnnnnnnnnnnnnnnnnnntttttctactctgaattggaaatatatatgaatatacagagaggcacttaaactaatttttatttacttgtcacattttggcaataaatccctcttatttctaaattctaacttgtttatttcaaaactttatgtaatccctgttcaaaagaaaatattttcacctaccagagtgcttaaacactggcaccagccaaagaatgtgattgtagagacccagcagtcttcaagaacagccgacaaaaacattggagttgaccccaccaagttgttgctacagataatttagatatttacctgcaagaaggaataaagcagatgcaaccgattcattcagtccacgagcatgatctgagcactgctttgtactagacattgggcttagcattggaactataaagaggaatcagatgcagcaagtgcttctatgtcctggtagcaactcaacactatctgtggagagtaaactaaagatatgcaggccaacattctggaaatcctatgtcaatgggtttggtttggaacctggacttctacatttttaaaagttacccagagatgcttctaaagatgagccatagtctagaagattgtcaaccacaggaggtcattgagtgggacagctagacacatacacaggcagctacagtaatatcttgaattgcaatgatgtagtggggtataaaaggaaagcgatagatattgctggatgggcatggccagtgaggtttcatgtcactgaggtgacaaccctgttggactttgaattacatatggaggttctccaggcagatgaagaagagaaggcattctagacaaaaggaagactaggcgcaaggcacacttatgtttgcctgttagcttt

SEQ ID NO: 33003 - DNA, 372 bp, Macaca Mulatta
  misc_feature (1)...(372): n = A,T,C or G
agcatgcatggagtggcagtactaacggctggtgtctcgcaccctgccctgtgaaggtacgtgaaactgaaagcctggaatggctggaaaggggtcatcaggcaggcgtcccctgctgctggggttgctggtggccgtagccactgtccacctggtcacctgtccctacaccaaagtggaggagagcttcaacctgcaggccacacatgaccnnnnnnnnnnnnnnnnnnnnnnnnncagtacgaccatctcgagttccccggagtcgtccccaggacgttcctcgggccagtggtgatcgcggcattctccagccccgcggtttacgtgctttcgctgttagaaatgtccaagttttactctcagctaata

SEQ ID NO: 33004 - DNA, 558 bp, Macaca Mulatta
aagcgtcgtaattctggagcactcctggctaatttgttctttcttctttttcagaacccagcaaacgtagtcgaggagccctggggtccatcgccctcctgggcttggtgggcacaaccgtgtgctctgctttccagcatcttggttgggttaaaagtggcttgggcagtggatccaaatgctgccattaaagaattttaggggtttaaaaactcttattcattttaaatgacttacctttatttccagttacattttttttttctaaatataataaaaacttacctggcgtcagcctcatacctaaaactcctgactcttaccactcatttccgtttgagtctgtatccgaaatcagtagctagttctactagatgagagaggagccacaagcagtgcaccctctcctcatccttccagcacatgtttctgtagtatgtgaggttgagaaaaagtctgattgtagtgatgtatgtatagtcatgccacagtggtgaaaaattaaagaaaaatattttagctctcaggatatgctgttatcacttgctacagatactt

SEQ ID NO: 33005 - DNA, 394 bp, Macaca Mulatta
tcgttacatgacatacaactgaaccctgaaggctttcaggtgaaaactttagattggaatcctaaccttacatagacttgttaataaccacttcataaacaaataaatggcttcaaaattgtatgtttccatatctcttcttatattaaaaggtgatctctaatgttattagacagaaaagcttgttagaatatattttgactgtttttttgacccactcccatttaagggtttcacagcaaacagagtgcttgcttagatggcttatatcctgggcatatgctggctgggtgctctacatagaaattctcattgtatcctcccatctgtccattgaggaagattatcaaatggatcttcatctaatggattcataaactttcctacttacttg

SEQ ID NO: 33006 - DNA, 1251 bp, Macaca Mulatta
  misc_feature (1)...(1251): n = A,T,C or G
ggcctggactgaccagactcacctgtctgaagctttctgaaggcggtttttggaggaatcgcgctagttatttttctagcccttctaactctgaacctcttcttactgagctgttaggtgaaatcaggctagctgtctcttgtgcccctcgcctgtcctgtgcaggaatcccagataggtaggggatggggaattccttctgctacactgcagnagtatactgcatgataaatacaggaacttgaatggatttagaggttaaaggagttgctgccacttctaggagccaaattcagccattctttggaagaaagaagccactacaannnnnnnnnnnnnnnnnnnnnnnnnnnnnnnnnnnnnnnnnnnnnnnnnnnaggacaatttttcatatattccacttagtacagcaaacccgccaaattcatcttctactcttggttgggtcacaccatgtcaaactccatatactcagcatcatctaaataaattggnggatcagaacatgatacctgaaaatttgccagcaccaacagacaaatataaactaaaatatcagcaatataaaacggaaatgaaagagggctataagcagtatagtcagatagatgcagagaatacaaactcaaacgttacacatcaacagtctccaagaaacaagatagatgaaaagnnnnnnnnnnnnnnnnnnnnnnnnnnnnnnnnnnnnnnnnnnnnnnnnnnnnnnnnnnnnnnnnnnnnnnnnnnnnnnnnnnnnnnnnnnnnnnnnnnnnnnnnnnnnnnnnnnnnnnnnnnnnnnnnnnnnnnnnnnnnnnnnnnnnnnnnnnnnnnnnnnnnnnnnnnnnnnnnnnnnnnnnnnnnnnnnnnnnnnnnnnnnnnnnnnnnnnnnnnnnnnnnnnnnnnnnnnnnnnnnnnnnnnnnnnnnnnnnnnnnnnnnnnnnnnnnnnnnnnnnnnnnnnnnnnnnnnnnnnnnnnnnnnnnnnnnnnnnnnnnnnnnnnnnnnnnnnnnnnnnnnnnnnnnnnnnnnnnnnnnnnnnnnnnnnnnnnnnnnnnnnnnnnnnnnnnnnnnnnnnnnnnnnnnnnnnnnnnnnnnnnnnnnnnnnnnnnnnnnnnnnnnnnnnnnnnnnnnnnnnnnnnnnnnnnnnnnnnnnnnnnnnnnnntgtgcttccttttattcaaaaaaagcatttatagtcatcaatgtggacgaagaaaaggaaaacaataccgacttggtgatttttatgttg

SEQ ID NO: 33007 - DNA, 357 bp, Macaca Mulatta
atctgggttgatagggacagtcaggagcctggaggaaccaagactttctgatgcccgactgcatgctggacccatctcctgcagctaactcaggatctcaggtaggaccccacccctagtaagcatccagcgctgacagggcaccatcacctgacaactcctgcccagcacttaggagcacttcaccgcccaagatttctgctgatcatttcagcaaactcaagacaaactttctgcaggacttgagtgttgctatttattcacatttgtctgctggaagagtttatcagctggataatgcaaatagtctccagttgaccaatgcaattggtgccccaacctcatatatgcagaagc

SEQ ID NO: 33008 - DNA, 734 bp, Macaca Mulatta
  misc_feature (1)...(734): n = A,T,C or G
ctggatggccttctgcatttcagaagccaaaaggacnnnnnnnnnnnnnnnnnnnnnnnnnnnnnnnnnnnnnnnnnnnnnnnnnnnnnnnnnnnnnnnnnnnnnnnnnnnnnnnnnnnnnnnnnnnnnnnnnnnnnnnnnnnnnnnnnnnnnnnnnnnnnnnnnnnnnnnnnnnnnnnnnnnnnnnnnnnnnnnnnnnnnnnnnnnnnnnnnnnnnnnnnnnnnnnnnnnnnnnnnnnnnnnnnnnnnnnnnnnnnnnnnnnnnnnnnnnnnnnnnnnnnnnnnnnnnnnnnnnnnnnnnnnnnnnnnnnnnnnnnnnnnnnnnnnnnnnnnnnnnnnngggcatattgatgcatttacttcaaaactttttctgctggaagaaattacttcagaagaattaaaagaaaagctttcagcactcaannnnnnnnnnnnnnnnnnnnnnnnnnnnnnnnnnnnnnnnnnnnnnntagcttgcaggagggttcctacttgttatctcatgcagcagaagattcttcactcctgatctataaggcctctgatggaaaagttactaggacagcatacaatttgtataaaacacattgcggccttcctggtgtaccttccagtctctcagttccctgggtcccattagatcccagcctgttattaccatatcatatccatcatggaagaataccttgtacttttccacctaaatcactggataccacaacacaacaaaa

SEQ ID NO: 33009 - DNA, 2208 bp, Macaca Mulatta
  misc_feature (1)...(2208): n = A,T,C or G
tgcttctttccttttctctctcatggtagggttatgagtcagttgtcaaaaggtggggacatttcctgatgcatttgcaacactgagaagttatcttaagggaggctgggccccattctactcatctggcccggaaagtgaacaccttgggggccactacggcagccctgctgggggagacgccccaacctatcttctccctgtctcctggcagctctcttggcctcctggtttctacctgatcatgtccctggcagaggccatcagcctctggaatgaaggggtgctggcagctgacaagaaggactggaagggagccctggacgccttcagtgccgtccaggacccccactcccggatttgcttcaacattggctgcatgcacactatcctgaaaaacatgactgaagcagagaagnnnnnnnnnnnnnnnnnnnnnnnnnnnnnnnnnnnnnnnnnnnnnnnnnnnnnnnnnnnnnnnnnnnnnnnnnnnnnnnnnnnnnnatttggctatcaaagaccttaaagaagccttgattcagcttcgagggaaccagctgatagactataagatcctggggctccagttcaagctgtttgcctgtgaggtnnnnnnnnnnnnnnnnnnnnnnnnnnnnnnnnnnnnnnnnnnnnnnnnnnnnnnnnnnnnnnnnnnnnnnnnnnnnnnnnnnnnnnnnnnnnnnnnnnnnnnnnnnnnnnnnnnnnnnnnnnnnnnnnnnnnnnnnnnnnnnnnnnnnnnnnnnnnnnnnnnnnnnnnnnnnnnnnnnnnnnnnnnnnnnnnnnnnnnnnnnnnnnnnnnnnnnnnnnnnnnnnnnnnnnnnnnnnnnnnnnnnnnnnnnnnnnnnnnnnnnnnnnnnnnnnnnnnnnnnnnnnnnnnnnnnnnnnnnnnnnnnnnnnnnnnnnnnnnnnnnnnnnnnnnnnnnnnnnnnnnnnnnnnnnnnnnnnnnnnnnnnnnnnnnnnnnnnnnnnnnnnnnnnnnnnnnnnnnnnnnnnnnnnnnnnnnnnnnnnnnnnnnnnnnnnnnnnnnnnnnnnnnnnnnnnnnnnnnnnnnnnnnnnnnnnnnnnnnnnnnnnnnnnnnnnnnnnnnnnnnnnnnnnnnnnnnnnnnnnnnnnnnnnnnnnnnnnnnnnnnnnnnnnnnnnnnnnnnnnnnnnnnnnnnnnnnnnnnnnnnnnnnnnnnnnnnnnnnnnnnnnnnnnnnnnnnnnnnnnnnnnnnnnnnnnnnnnnnnnnnnnnnnnnnnnnnnnnnnnnnnnnnnnnnnnnnnnnnnnnnnnnnnnnnnnnnnnnnnnnnnnnnnnnnnnnnnnnnnnnnnnnnnnnnnnnnnnnnnnnnnnnnnnnnnnnnnnnnnnnnnnnnnnnnnnnnnnnnnnnnnnnnnnnnnnnnnnnnnnnnnnnnnnnnnnnnnnnnnnnnnnnnnnnnnnnnnnnnnnnnnnnnnnnnnnnnnnnnnnnnnnnnnnnnnnnnnnnnnnnnnnnnnnnnnnnnnnnnnnnnnnnnnnnnnnnnnnnnnnnnnnnnnnnnnnnnnnnnnnnnnnnnnnnnnnnnnnnnnnnnnnnnnnnnnnnnnnnnnnnnnnnnnnnnnnnnnnnnnnnnnnnnnnnnnnnnnnnnnnnnnnnnnnnnnnnnnnnnnnnnnnnnnnnnnnnnnnnnnnnnnnnnnnnnnnnnnnnnnnnnnnnnnnnnnnnnnnnnnnnnnnnnnnnnnnnnnnnnnnnnnnnnnnnnnnnnnnnnnnnnnnnnnnnnnnnnnnnnnnnnnnnnnnnnnnnnnnnnnnnnnnnnnnnnnnnnnnnnnnnnnnnnnnnnnnnnnnnnnnnnnnnnnnnnnnnnnnnnnnnnnnnnnnnnnnnnnnnnnnnnnnnnnnnnnnnnnnnnnnntctgctgtacactatactgggacattacagtttggaagtgttaactattccctgttaaaatttaacctactagacaatgatgtgagtacctaggatgatttcctggggcacagcgggtgaggggatggggacaggtgaatggaggagttaggtgagaggaggagcggatggaagtgtctggaaagggcaccagagggtcttccaggtgctgatcctgtttcttgatctgagagctggctacccagctgcgtttccactgtaaacattcatcaagctgtacatttgattggtgtacttttctgtgtcataccgcaata

SEQ ID NO: 33010 - DNA, 1423 bp, Macaca Mulatta
  misc_feature (1)...(1423): n = A,T,C or G
aggctctgctgactacaacagcttgagtgaggaggaaagaggcagcagcagacaacggatgtggagcaaataccctctggatgtgcagaaggagtttaagtatgacagccgcccacgacctggattcagactgatcgtaatgtgatgtccnnnnnnnnnnnnnnnnnnnnnnnnnnnnnnnnnnnnnnnnnnnnnnnnnnnnnnnnnnnnnnnnnnnnnnnnnnnnnnnnnnnnnnnnnnnnnnnnnnnnnnnnnnnnnnnnnnnnnnnnnnnnnnnnnnnnnnnnnnnnnnnnnnnnnnnnnnnnnnnnnnnnnnnnnnnnnnnnnnnnnnnnnnnnnnnnnnnnnnnnnnnnnnnnnnnnnnnnnnnnnnnnnnnnnnnnnnnnnnnnnnnnnnnnnnnnnnnnnnnnnnnnnnnnnnnnnnnnnnnnnnnnnnnnnnnnnnnnnnnnnnnnnnnnnnnnnnnnnnnnnnnnnnnnnnnnnnnnnnnnnnnnnnnnnnnnnnnnnnnnnnnnnnnnnnnnnnnnnnnnnnnnnnnnnnnnnnnnnnnnnnnnnnnnnnnnnnnnnnnnnnnnnnnnnnnnnnnnnnnnnnnnnnnnnnnnnnnnnnnnnnnnnnnnnnnnnnnnnnnnnnnnnnnnnnnnnnnnnnnnnnnnnnnnnnnnnnnnnnnnnnnnnnnnnnnnnnnnnnnnnnnnnnnnnnnnnnnnnnnnnnnnnnnnnnnnnnnnnnnnnnnnnnnnnnnnnnnnnnnnnnnnnnnnnnnnnnnnnnnnnnnnnnnnnnnnnnnnnnnnnnnnnnnnnnnnnnnnnnnnnnnnnnnnnntctgaatatctaaaacggagtggtagtgagaccgaagtttcagcattgattataaataccaaggacttaaagcaaaggaggaaaaacaaagcacattctgaacttagctttccactgagtaacgtttactcttcacagcactcaccacaaaaacaaactactatcagcaggatcagttttattaccacaacttgtatctcttctaagcacactctgttcctatgcctttccaaaccatagctgccttaactgactgccttggtgtttattctagtgtaacattgtccagtagaactatctgcagtgacgctgtgttctgtgtctgcgctgtgtagtagtagacacaggtggctgctgagcacttgaaatgtgattagcgcaactgaagcgaaactgagctttagttttatttcattttaatgtaattcgctacatgtggctagtagctnnnnnnnnnnnnnnnnnnnnnnnnnnnnnnnnnncagaacattcagctagggctgtgccctcatagcctgtgagtgtctctgactcactgtcatgggggaagggaatttacacagggagatgccttcttgccgcctcttttaggatttcctaagt

SEQ ID NO: 33011 - DNA, 512 bp, Macaca Mulatta
  misc_feature (1)...(512): n = A,T,C or G
gacttggcaacaagcattttgaaaaatttattctgcccttgaacatctttgagcccgttggggtgttctccaacgcaatcagtaggnnnnnnnnnnnnnnnnnnnnnnnnnnnnnnnnnnnnnnnnnnnnnnnnnnnnnnnnnnnnnnnnnnnnnnnnnnnnnnnnnnnnnnnnnnnnnnnnnnnnnnnnnnnnnnnnnnnnnnnnnnnnnnnnnnnnnnnnnnnnnnnnnnnnnnnnnnnnnnnnnnnnnnnnnnnnnnnnnnnnnnnnnnnnnnnnnnnnnnnnnnnnnnnnnnnnnnnnnnnnnnnnnnaggccagagacctgttgtgtttttgcagcatggttagcttgcatcagccacaaactggatttccaacctgccgaacagcagccttgccttcattctggcagacgctggttatgatgtgtggctgggcaatagcagaggaaacacctgggccaggagaaacttgtactattcaccagattcagttgaattctgggctttca

SEQ ID NO: 33012 - DNA, 322 bp, Macaca Mulatta
  misc_feature (1)...(322): n = A,T,C or G
aggaagccataatggatggcacagagattgctgtttcccctcggtcactgcattcagaactcatgtgccctatctgcctggacatgctgaagaatacgatgaccaccaaggagtgcctccacagattctgctctgactgcattgtcacagccctacggagcgggnggaacaaggagtgtcctacctgccgaaagaagctggtatccaagcgatccctacggccagaccccaactttgatgccctgatctctaagatctatcctagccgggaggaatatgaggcccatcaagatcgagtgcttatccgcctgagccgcctgca

SEQ ID NO: 33013 - DNA, 166 bp, Macaca Mulatta
ttcatcctttattttctccctttaaaatgccccaacacatctattgctttgtctatctgttctaagactggatatgtagtagggcaaggccctattgttaacttcatgaaagagccattggaaattttaattgagattaaattgaatttatgggttatacatttat

SEQ ID NO: 33014 - DNA, 1866 bp, Macaca Mulatta
  misc_feature (1)...(1866): n = A,T,C or G
cctggggggcggccagcgcgagggtttctggccatcacccctcacctcccgggacttccagggtcttccccccaccccgcgcacacctccctgcctcgcccgggaggcgtcacgtggcagcgtggggcccgcctcctggtgatgtcacggcgctcgcagccgtcgcgctgaagaaaggatgctcgaggatgctgtccaggtgggcggccgcgggcgcgatgcggcactgcaggtnnnnnnnnnnnnnnnnnnnnnnnnnnnnnnnnnnnnnnnnnnnnnnnnnnnnnnnnnnnnnnnnnnnnnnnnnnnnnnnnnnnnnnnnnnnnnnnnnnnnnnnnnnnnnnnnnnnnnnnnnnnnnnnnnnnnnnnnnnnnnnnnnnnnnnnnnnnnnnnnnnnnnnnnnnnnnnnnnnnnnnnnnnnnnnnnnnnnnnnnnnnnnnnnnnnnnnnnnnnnnnnnnnnnnnnnnnnnnnnnnnnnnnnnnnnnnnnnnnnnnnnnnnnnnnnnnnnnnnnnnnnnnnnnnnnnnnnnnnnnnnnnnnnnnnnnnnnnnnnnnnnnnnnnnnnnnnnnnnnnnnnnnnnnnnnnnnnnnnnnnnnnnnnnnnnnnnnnnnnnnnnnnnnnnnnnnnnnnnnnnnnnnnnnnnnnnnnnnnnnnnnnnnnnnnnnnnnnnnnnnnnnnnnnnnnnnnnnnnnnnnnnnnnnnnnnnnnnnnnnnnnnnnnnnnnnnnnnnnnnnnnnnnnnnnnnnnnnnnnnnnnnnnnnnnnnnnnnnnnnnnnnnnnnnnnnnnnnnnnnnnnnnnnnnnnnnnnnnnnnnnnnnnnnnnnnnnnnnnnnnnnnnnnnnnnnnnnnnnnnnnnnnnnnnnnnnnnnnnnnnnnnnnnnnnnnnnnnnnnnggtctgagccttgggaaggaagggccgctagtgcacgtggcttgttgctgtggcaacttcttcagcagccttttctccaagtacagcaagaatgagggcaagaggcgggaggtnnnnnnnnnnnnnnnnnnnnnnnnnnnnnnnnnnnnnnnnnnnnnnnnnnnnnnnnnnnnnnnnnnnnnnnnnnnnnnnnnnnnnnnnnnnnnnnnnnnnnnnnnnnnnnnnnnnnnnnnnnnnnnnnnnnnnnnnnnnnnnnnnnnnnnnnnnnnnnnnnnnnnnnnnnnnnnnnnnnnnnnnnnnnnnnnnnnnnnnnnnnnnnnnnnnnnnnnnnnnnnnnnnnnnnnnnnnnnnnnnnnnnnnnnnnnnnnnnnnnnnnnnnnnnnnnnnnnnnnnnnnnnnnnnnnnnnnnnnnnnnnnnnnnnnnnnnnnnnnnnnnnnnnnnnnnnnnnnnnnnnnnnnnnnnnnnnnnnnnnnnnnnnnnnnnnnnnnnnnnnnnnnnnnnnnnnnnnnnnnnnnnnnnnnnnnnnnnnnnnnnnnnnnnnnnnnnnnnnnnnnnnnnnnnnnnnnnnnnnnnnnnnnnnnnnnnnnnnnnnnnnnnnnnnnnnnnnnnnnnnnnnnnnnnnnnnnnnnnnntccagaccggcctgctggtgttggtgtttacacggccatgtggcagctggccctggcactgatcttcaaaatcgtcgttaccatatttacctttggcatgaagnnnnnnnnnnnnnnnnnnnnnnnnnnnnnnnnnnnnnnnnnnnnnnnnnnnnnnnnnnnnnnnnnnnnnnnnnnnnnnnnnnnnnnnnnnnnnnnnnnnnnnnnnnnnnnnnnnnnnnnnnnnnnnnnnnnnnnnnnnnnnnnnnnnnnnnnnnnnnnnnnnnnnnnnnnnnnnnnnnnnnnnnnnggtggagttaccaggatgacggtagcaatggtggtcatcatgtttgaatt

SEQ ID NO: 33015 - DNA, 273 bp, Macaca Mulatta
  misc_feature (1)...(273): n = A,T,C or G
tttctctgtcctcgttaggacaatcagcctgctgctttgggcttttccaagagcctatttttcatctgctggatgcctnnnnnnnnnnnnnnnnnnnnnnngcactttgtgacatgctttaatatattgtttttatgtatccaaagaggtaatcagctttaactttcagaattcgtgaatcttggtttggtggcatgaatgaaagcttatgtaaccccaccagtaactcatttggggtgcccttgaaatattaaagtttggtcctcaataaat

SEQ ID NO: 33016 - DNA, 794 bp, Macaca Mulatta
gggagttccttcagccagatctggatgctgtgatgcctgcagtcaaaaagccctttcttcagcagttctattctcagacagtctcaaccgccagtgaactacgcaaaccaatttactggattgtggctggtaaagcccttgattatgaacagatgccgctcctcatggctaatgtgaaatgggatgtaaaagaaattatgtcacagcacaacatatatgtagatgcactattaaaggaatttgagcagtttaacaggaggctaaatgaagtttctaagagagttcgaatacccttgcctgtgtctaatatactttgggaacattgtatacgattggctaatcgaactatcgaagaaggatatgccaatgtcaaaaagtgcagtaatgagggtcgtgccctgatgcaattggattttcaacagtttttaatgaaacttgaaaaactaacagatattagacccattcctgataaagaatttgtggaaacttatattaaagcctattacctaactgaaaatgacatggaacgctggatcaaagagcacagggaatattccacgaaacagttgaccaatctggtgaatgtttgcctgggatcccatatccataagaaaagcagacaaaaacttctagccgcctatagatgatttaaaccgaccttaaagaataatgaaacactggctcttttttcctccaagggctttgaatccctcacttccacttatatgaacctgaaaagcccagtttttttaaaggcaccttctttaaaaaataatctgcataaaaaaaccttg

SEQ ID NO: 33017 - DNA, 664 bp, Macaca Mulatta
agttcaaaaatgtttcaggtggtcagctccacattctttgttaacctgacactaacagccaataatatgcttcttaactgtcaaattacagtttcccaattttatactaattgggggtgggtgacaaaacagttgatccttgtaaatacattgtacagaatatttattttttctcaaaatgcattttaactactacattggctgtgcccagatgagtcctctttgaatagaaagtgaacccagggcaatgatagccattcttgtcttagggcttatgggtcggggtatgaattgtgcacacacagcccaacaacgggcagtggtctctgtggtcctaaggcatccagcacaggttctggcaagggtacccctgctcggggtgtgggctggtctgtgcataatcccggactgtgatggcaacagcccagtgcagtctgaatttcagttgtgttgaaactactttaatagacaaagtaataaatgatgtttatctattgatacaaaccatcagttttgcatcctactgagaaatgttgttagtgattttgatatttaaatccttaaaagattgctttctttttaaaataacgcatgtccattttagaaaattagaaaatcagtcccaccacccaaagattattgtgcatgctgaaaagaatatgaa

SEQ ID NO: 33018 - DNA, 818 bp, Macaca Mulatta
  misc_feature (1)...(818): n = A,T,C or G
agctcccgaccccgcctctgcagggtgcaggctccgcccctcgtgacagatggtgctggtgtagccacggaggagggctcgctttttttgattcaggctgtcatggtggcgcccagcccgccttgccggccttttcttttccggtctcggcccggcgtggcagcggaggcaggcagcgttaggtctttcagtccctctctgtcatggcgacgccgtgcttcttcttccggccacagcctgccatggcggcatccgcagtagtccctgccggggcccgcctgctttgttgccccggctcttcctagtccaggccgccatggcggcgctcagggcttaccggaagtaaaacttcggaagtgaggcgttcctctgcccggaagtgagcgcgggcgctaggaaagatggcggcagcggcggcggtgggcaacgcggtgccctgcggggtccggccttgcgnnnnnnnnnnnnnnnnnnnnnnnnnnnnnnnnnnnnnnnnnnnnnnnnnnnnnnnnnnnnnnnnnnnnnnnnnnnnnnnnnnnnnnnnnnngcatcgtgctgcccctggcccggggctccccaagggcactggccctggagcacgcactgtgcctcacaggcgacggcttggcccacctgcaggccaccgacccccagcagctgctccgcctcatcccccacgtgcaggtgttcgcccgcgtggcccccaagcagaaggnaggagtttgtcatcaccagcctgaaggagctgggctacgtgaccctcatgtgtggggatggcaccaacgatgtgggcgctctgaagcacgctgatgtgggtg

SEQ ID NO: 33019 - DNA, 439 bp, Macaca Mulatta
tacctttctgggtcctaatgtcatagatcactttctgtgtgatctaaaccctctgctcaatcttgcctgcactaatacccacactctaggactcttcgtagctgccaacagtgggttcatatgcctgttaaactttctcttgctcctagtctcctacgtggtcatactgtactccttaaggacccacagcttagaggcaaggcagaaagccctctctacctgtgtctcccacatcacagttgtcatcttattctttgtgccctgcatatttgtgtacacgagacctccagctactttacccattgataaagcagttgctgtattttacactatgataactcctatgttaaaccccttaatctacaccttgaggaatgctcagatgaaaaatgccattaggaaattgtgtagtaggaaagttatttcaagtgtcaaataa

SEQ ID NO: 33020 - DNA, 111 bp, Macaca Mulatta
caggttcctttagcaaatttgtgaatgtgatatcagccaggacggccattggccacgaccggaaagggcagctggtgctctttcatgcggacggccaaacggagcagcgtg

SEQ ID NO: 33021 - DNA, 432 bp, Macaca Mulatta
  misc_feature (1)...(432): n = A,T,C or G
gaataaggggcattcctaaattttaagttcttatatgtaggtcaactattgtcatggagtaatgtgactggtaaataattcattttttcttgaatttatttatagacctgatagcaagaactggcagtaccaagaaactatcaagaaaggagatctgctactaaacagagttcagaaactttccagagtaatcaatatgtaaagccatgtaacaaaggatttcctttagagataattatttggaatttttatagcttacttcactatgtgcccaggtcacctgtataaaataaatatgcattgttgtttctttccacttattttttcttaaacacatatgccttgtagaatgnggtccacttatgttaaaatactgtcacttgaattattcattatttaaagtctggtttatagtgttaagattgcagctgg

SEQ ID NO: 33022 - DNA, 401 bp, Macaca Mulatta
ggggtagcagggacccaggcactgtgcccatcccccctgccatgtgggaactgcggtcagcctccttttggagggccatattcgctgagttctttgccaccctcttctatgtcttcttcgggctggggtcctcactgcgttgggctcctggacccctgcatgttctgcaggtggctatggcatttggcttggccctggctacactggtgcagtctgtgggccacatcagtggagcccacgtcaatcctgcagtcacttttgctttccttgtgggctcccagatgtccctgctccgtgccttctgctatatggcagcccagctcctgggagctgtggctggggctgctgtgctgtatagcgttaccccgcctgccgtccgaggaaacctagcactcaacacg

SEQ ID NO: 33023 - DNA, 802 bp, Macaca Mulatta
  misc_feature (1)...(802): n = A,T,C or G
gctgctctttggcgtaaattgcaatcgattagggatcgtttctcaaaatcaagttagaagtgagagttcagataagtgaggccgccattgctgctttgaacacctcagaaggggagaatggatttatcaggagtgaaaaagaagagcttgctaggagtcaaagaaaataataaaaagtccagcactaggnagggctccttcacccaccaaacgcaaggaccgctcagatgagaagtccaaggatcgctcaaaagataaaggggccaccaaggagtcaagtgagaaggatcgcggcagggacaaaacccgaaagaggcgcagnnnnnnnnnnnnnnnnnnnnnnnnnnnnnnnnnnnnnnnnnnnnnnnnnnnnnnnnnnnnnnnnnnnnnnnnnnnnnnnnnnnnnnnnnnnnnnnnnnnnnnnnnnnnnnnnnnnnnnnnnnnnnnnnnnnnnnnnnnnnnnnnnnnnnnnnnnnnnnnnnnnnnnnnnnnnnnnnnnnnnnnnnnnnnnnnnnnnnnnnnnnnnnnnnnnnnnnnnnnatccaaaccacctaaaagagatgaaaaggagaggaaaaggcggagcccatctcctaagcccaccaaagtgcatattgggagactcaccaggaatgtgacaaaggnaggatcacatcatggagatattttccacctatgggaaaattaaaatgattgacatgcccgtggaaaggatgcatccccatctgtccaaaggctatgcatacgtagagtttgagaatccagatgaagctgagaaggcgctgaagcacatggatggagg

SEQ ID NO: 33024 - DNA, 613 bp, Macaca Mulatta
gacctgagtatttataactgtgtggtgttcatctagcattaggcagataggccacaggaagaaggtgtggagaacccacctgaaccagattgagactcaatccatctttgggggtggaaggacttgacatgaaaagaagccagtcccatgactttggatgacaaactgcctcctggcttggagggatctttgggctcatggatgaatggagagccacctgttgtcagctgccccaagcctctgggatatgtggattcggggagagccgaggcccagaggggacacttgacccagtctaaagtgggtgctattcacggaggagagggagggttggagagttcaaccagacaaaggagcacaaggaaaccaagcagcagaggccccatcggcacagagggcctcgttccaagaacttagagtttgactgcccaagggacaacacgactgactcacatgtttcagacaggcctccatgactacagagagaaggctggaggagacacaatggatggtgcatgttctggcctagcaagaactaccaagaactttgggtgaagaaagcagatgacactgaagacgagtaatgttccgaatcatgtttttgaaaaatcaa

SEQ ID NO: 33025 - DNA, 512 bp, Macaca Mulatta
  misc_feature (1)...(512): n = A,T,C or G
ccattgagacccagagcagcagttctgaagagatagtgcccagccctccctcgccgccccctctaccccgcatctacaagccttgctttgtctgtcaggacaagtcctcaggctaccactatggggtcagcgcctgtgagggctgcaagnnnnnnnnnnnnnnnnnnnnnnnnnnnnnnnnnnnnnnnnnnnnnnnnnnnnnnnnnnnnnnnnnnnnnnnnnnnnnnnnnnnnnnnnnnnnnnnnnnnnnnnnnnnnnnnnnnnnnnnnnnnnnnnnnnnnnnnnnnnnnctgtgagaaatgaccgaaacaagaagaagaaggaggtgcccaagcccgagtgctccgagagctacacgctgacgccggaggtgggggagctcattgagaaggtgcgcaaagcgcaccaggaaaccttccctgccctctgccagctgggcaaatacactacgnnnacagctcagaacacgtgtctctctggacattgactctgggacaagttcagtgaactct

SEQ ID NO: 33026 - DNA, 376 bp, Macaca Mulatta
  misc_feature (1)...(376): n = A,T,C or G
tgtgggaattttgctgtcctcgtggatcttcatatcttgccgcaaggttcaaacaaagatacaagctggttttctgaacagaagaaagagnnnnnnnnnnnnnnnnnnnnnnnnnnnnnnnnnnnnnnnnnnnnnnnnnnnnnnnnnnnnnnnnnnnnnnnnnnnnnnnnnnnnnnnnnnnnnnnnnnnnnnnnnnnnnnnnnnnnnnnnnnnnnnnnnnnnnnnnnnnnnnnnnnnnnnnnnnnnnnnnnnnnnnnnnnnnnnnnnnnnnnnnnnnnnnnnnnnnnnnnnnnnngtattccctgacagatttgtggtttgtgtcagtcagcttgcattcagtcgtgatcttttagcaaatcagaatgaaggtttg

SEQ ID NO: 33027 - DNA, 709 bp, Macaca Mulatta
  misc_feature (1)...(709): n = A,T,C or G
gcccacccgtgngccaagcaggaactccaggtgcagggtgggccagaagccttctcatcggcccacagctggctggcccagggctcctggtgggggctcttgcatggtgagagtaggggcccccccaggagccatgctggacccaggagcctcgttggggcctcttccccaggcagctgacgggccccggacaagccttggtggggagcagaacctctgcatcatgtagttctatgacataaggagacctcctacttgagctgtctgtaccccagaatcaaacccagaacctcagaaccagatgtaggacctcagaatcctgcactcaaggtggcaggacccaatttctgttttatatgttcatgaactttaaacctggaaacatatccttactaggtgttttatcaaaaaaaaagttttcatatttatctctatccctaaccccccccaaaataggatgtcttattattgaagatatttttaaagnnnnnnnnnnnnnnnnnnnnnnnnnnnnnnnnnnnnnnnnnnnnnnnnnnnnnnnnnnnnnnnnnnnnnnnnnnnnnnnnnnnnnnnnnnnnnnnnnnnnnnnnnnnnnnnnnnnnnnnnnnnnnnnnnnnnnnnnnnnnnnnnnnnnnnnnnnnnnnnnnnnnnnnnnnnnnnnnnnnnnnnnnnnnnnnnnnnnnnnnnnnnnnnnnnnnnnnnnnnnnnn

SEQ ID NO: 33028 - DNA, 436 bp, Macaca Mulatta
  misc_feature (1)...(436): n = A,T,C or G
ctgacggcagccatggcgagtggcagtggggacagcgtcacccgccggagtgtggcatcacagtttttcactcaagaggaggggccgggaatcgatggcatgaccacctcagagagggtnnnnnnnnnnnnnnnnnnnnnnnnnnnnnnnnnnnnnnnnnnnnnnnnnnnnnnnnnnnnncaggtccaggagctgatcatcaacaaagaccccacactactggacaacttcctggnnnnnnnnnnnnnnnnnnnnnnnnnnnnnnnnnnnnnnnnnnnnnnnnnnnnnnnnnnnnnnnnnnnnnnnnnngcaagcgagacattgagttgctgctgaaactcattgcaaacctcaacatgctcttgagggacgagaatgtgaacgtggtgaagaaggccatcctcaccatgacccaactttacaaggtggccctgca

SEQ ID NO: 33029 - DNA, 844 bp, Macaca Mulatta
  misc_feature (1)...(844): n = A,T,C or G
ggctgggaattcttgctgaaggaactgtagaaaacctgttgctggcaaaattttacacgttccagacgtaaagggaagtttaagcgctttgtaaaacaannnnnnnnntatttaattaagcaattgcagttatctgggatttttgggtcagaattttaaattctgcttgattctccatattccagtgaataaaatacaaaagcattgtgtttttaagattgtgtcaatattcacctaaaaacttgtgccaaaagcacctggattggtaattatatttcacttgaagggtaaatttgacaatatcctgataatctaaagtgcaatttttttcttcaaaatgttttctccagcatcacagatcctgcagnnnnnnnnnnnnnnnnnnnnnnnnnnnnnnnnaaataattcttattcacaaaatatatttctgataaacattaagatattaaatctgatgcacaaannnnnnnnnnnnnnnnnnnnnnnnnnnnnnnnnnnnnnnnnnnnnnnnnnnnnnnnnnnnnnnnnnnnnnnnnnnnnnacacatgcttcaatacttccttgttaagaattcttaataactactaaactgattgtaatagttgctgatatatatttggtttgtttgggtatacttttcaaaaccatttttgaatgtctgaacatctgattgaaagtttctgtttatctttctgaccaaaggagcaagaggtataatggatatggcattcattaaaattgttactagtacaaaaacagtaatatttacagcatcagtaaatatttttaagtggtacttctaaatcataaaagttggagaaagagacctttaaattcttgtggt

SEQ ID NO: 33030 - DNA, 307 bp, Macaca Mulatta
tatgtaacctccctgatcttcttttagtctctctattaaaggaaaaggtctttatgttaattatttacatattcctgcaggcctttcctctgcctgctggggtcctcctattctttatgccttaatttaaatatgtcacctcctaagagaaaccataacagaccactctacctaaaatgaatcttctagaccgggtgtggtggctcatgcctgtaatcccagtactttaggaggccaaggtggggagatcacttgaggtcaggagttcaagaccagcctggccaacttggtgaaaccctgtctttac

SEQ ID NO: 33031 - DNA, 283 bp, Macaca Mulatta
  misc_feature (1)...(283): n = A,T,C or G
gtgcagctcggtggcggctgacccggcagcgggccgcctcaggcagccctggccgggccgcccgggtccccggcagcggggtaggatggcgctaaagcggatccagaagnnnnnnnnnnnnnnnnnnnnnnnnnnnnnnnnnnnnnnnnnnnnnnnnnnnnnnnnnnnnnnnnnnnnnnnnnnnnnnnnnnnnnnnnnnnnnngaatgacagtccttaccaaggaggtgttttcttcctgaccatccactttcctacggattacccgttcaagcccccaaagg

SEQ ID NO: 33032 - DNA, 2954 bp, Macaca Mulatta
  misc_feature (1)...(2954): n = A,T,C or G
aggtgaaaggaaagcaagccaggatggatatttacgacactcaaaccttgggagttgtggtctttggaggatttatggttgtttctgccattggcatcttcctggtgtcgactttctccatgaaggaaacgtcgtatgaagaagccctagccaaccagcgcaaggagatggcgaaaactcaccaccagaaagtnnnnnnnnnnnnnnnnnnnnnnnnnnnnnnnnnnnnnnnnnnnnnnnnnnnnnnnnnnnnnnnnctaatgggaagatacctgatcacgatccggcgcccaatgtgactgtcctcctccgagaaccagtgcgggctcctgctgtggctgtggctccaaccccagtccagccccccattatcattgctcctgtcgccacagttccagccacaccccaggagaagctggcctcctctcccaaggacaaaaagaagaaggagaaaaaagtggcaaaagtggaaccagctgtcagctctgtagtgaattccatccaggttctcacttcgaaggctgccatcttagaaactgctcccaaggaggnnnnnnnnnnnnnnnnnnnnnnnnnnnnnnnnnnnnnnnnnnnnnnnnnnnnnnnnnnnnnnnnnnnnnnnnnnnnnnnnnnnnnnnnnnnnnnnnnnnnnnnnnnnnnnnnnnnnnnnnnnnnnnnnnnnnnnnnnnnnnnnnnnnnnnnnnnnnnnnnnnnnnnnnnnnnnnnnnnnnnnnnnnnnnnnnnnnnnnnnnnnnnnnnnnnnnnnnnnnnnnnnnnnnnnnnnnnnnnnnnnnnnnnnnnnnnnnnnnnnnnnnnnnnnnnnnnnnnnnnnnnnnnnnnnnnnnnnnnnnnnnnnnnnnnnnnnnnnnnnnnnnnnnnnnnnnnnnnnnnnnnnnnnnnnnnnnnnnnnnnnnnnnnnnnnnnnnnnnnnnnnnnnnnnnnnnnnnnnnnnnnnnnnnnnnnnnnnnnnnnnnnnnnnnnnnnnnnnnnnnnnnnnnnnnnnnnnnnnnnnnnnnnnnnnnnnnnnnnnnnnnnnnnnnnnnnnnnnnnnnnnnnnnnnnnnnnnnnnnnnnnnnnnnnnnnnnnnnnnnnnnnnnnnnnnnnnnnnnnnnnnnnnnnnnnnnnnnnnnnnnnnnnnnnnnnnnnnnnnnnnnnnnnnnnnnnnnnnnnnnnnnnnnnnnnnnnnnnnnnnnnnnnnnnnnnnnnnnnnnnnnnnnnnnnnnnnnnnnnnnnnnnnnnnnnnnnnnnnnnnnnnnnnnnnnnnnnnnnnnnnnnnnnnnnnnnnnnnnnnnnnnnnnnnnnnnnnnnnnnnnnnnnnnnnnnnnnnnnnnnnnnnnnnnnnnnnnnnnnnnnnnnnnnnnnnnnnnnnnnnnnnnnnnnnnnnnnnnnnnnnnnnnnnnnnnnnnnnnnnnnnnnnnnnnnnnnnnnnnnnnnnnnnnnnnnnnnnnnnnnnnnnnnnnnnnnnnnnnnnnnnnnnnnnnnnnnnnnnnnnnnnnnnnnnnnnnnnnnnnnnnnnnnnnnnnnnnnnnnnnnnnnnnnnnnnnnnnnnnnnnnnnnnnnnnnnnnnnnnnnnnnnnnnnnnnnnnnnnnnnnnnnnnnnnnnnnnnnnnnnnnnnnnnnnnnnnnnnnnnnnnnnnnnnnnnnnnnnnnnnnnnnnnnnnnnnnnnnnnnnnnnnnnnnnnnnnnnnnnnnnnnnnnnnnnnnnnnnnnnnnnnnnnnnnnnnnnnnnnnnnnnnnnnnnnnnnnnnnnnnnnnnnnnnnnnnnnnnnnnnnnnnnnnnnnnnnnnnnnnnnnnnnnnnnnnnnnnnnnnnnnnnnnnnnnnnnnnnnnnnnnnnnnnnnnnnnnnnnnnnnnnnnnnnnnnnnnnnnnnnnnnnnnnnnnnnnnnnnnnnnnnnnnnnnnnnnnnnnnnnnnnnnnnnnnnnnnnnnnnnnnnnnnnnnnnnnnnnnnnnnnnnnnnnnnnnnnnnnnnnnnnnnnnnnnnnnnnnnnnnnnnnnnnnnnnnnnnnnnnnnnnnnnnnnnnnnnnnnnnnnnnnnnnnnnnnnnnnnnnnnnnnnnnnnnnnnnnnnnnnnnnnnnnnnnnnnnnnnnnnnnnnnnnnnnnnnnnnnnnnnnnnnnnnnnnnnnnnnnnnnnnngagggcatgctcagagacctgcagaagagcgtggaggaggaggagcaggtgtggagggccaaggtgggcgccgcggaggaggagctccagaagnagtcacgggtcacagtgaaacatctcgaagagattgtagagaagctaaaaggagaacttgaaagttcggaccaggtnnnnnnnnnnnnnnnnnnnnnnnnnnnnnnnnnnnnnnnnnnnnnnnnnnnnnnnnnnnnnnnnnnnnnnnnnnnnnnnnnnnnnnnnnnnnnctgaggcaacttctcctagaatctcaatctcagctcgatgcagcctagagcgaagcccagaaacagagtgatgagcttgccctggtnnnnnnnnnnnnnnnnnnnnnnnnnnnnnnnnnnnnnnnnnnnnnnnnnnnnnnnnnnnnnnnnnnnnnnnnnnnnnnnnnnnnnnnnnnnnnnnnnnnnnnnagctgaagacgcaactggagcggacagaagccatcctggaggatgagcagacgcagcggcagaagctcacggccgagtttgaggaggnnggctcagacctcggcgtgccggttacaagaagagttggagaagctccgcacagccggccccctggagtcttcagaaacagaggaggcctcccagctgannnnnnnnnnnnnnnnnnnnnnnnnnnnnnnnnnnnnggagagactagaaaaagagaagaagttaacaagtgacctgggacgcgctgccaccaaactgcaggagcttctgaagacgacccaggagcagctggcaagggagaaggacacagtgaagaagctgcaggaacagctggaaaag

SEQ ID NO: 33033 - DNA, 625 bp, Macaca Mulatta
cctacctcctaaccatggtggccaacacactcatcatcctgctgtctgtgctggaccccaggctccactctccaatgtactttttcctctccaacctctcgttcttggacctctgcttcaccacgacttgtgtcccccagatgctggttaacctctggggcccaaagaagaccatcagcttcctgggctgctctgtccagctcttcatcttcctgtccctggggaccactgagtgcatcctcttgacagtgatggcttttgatcgctacgtggctgtctgccagcctctccattatgccaccatcatccacccccgcctgtgctggcagctggcatctgtggcctgggtcattgggctggtggagtcagtggtccagacaccatccaccctgcgcctgcccttctgcccccatcggcaagtggatgattttgtctgtgaggtcccagctctaattcgactctcctgtggggacacctcctacaatgagatccagatggctgttgccagtgtcttcatcttggttgtgcctctcagcctcatccttgtctcttatggagccattacccgggcagtgctgaggattaactctgcaaaagggcgaaggaaagcttttgggacctgctc

SEQ ID NO: 33034 - DNA, 644 bp, Macaca Mulatta
ctgtttactttccccacactaagtcttctccatgttttgtggccttcggttgtaataaacttggcttctttatacatctgtaactgtgcctgtgtccttcattcactcatctataacagggatagggaatgatacagacatctgaaacccttaagtccgctattccacaggaattcatttcctcggaaaacaagaaccaaatcatttgtagatttattggaaagactggtcctttgtatggggagagaatctaggaactatgtaaagagatttcacaggaggggaggggatcttccagaaaatgtgacttcctctagtccagctccatctgcagctacccccatcccttggctctgacagccccctttcctgcttctctcctcccagctttcaaacatctctgttgttgcctttgcccctgactacctttgttacatttctcagacttttttagtccctggtccttccatcgggggccctctcaccaatacgttgtcctcagcactccagtcccagggcctggtcttgcagctgtgaccaagcagagccttggatctcagttacacccatatcagaccaccaagaaaatggataatctccaaccacccccagctataccacctcatcagcacctccgtaactac

SEQ ID NO: 33035 - DNA, 861 bp, Macaca Mulatta
  misc_feature (1)...(861): n = A,T,C or G
cttataatgaatggagtacatctgacagcccaggatgagcggggatgcactcctttacatcttgctgcaactcacggacattcttttactttacaaataatgctccgaagtggagtggnnnnnnnnnnnnnnnnnnnnnnnnnnnnnnnnnnnnnnnnnnnnnnnnnnnnnnnnnnnnnnnnnnnnnnnnnnnnnnnnnnnnnnnnnnnnnnnnnnnnnnnnnnnnnnnnnnnnnnnnnnnnnnnnnnnnnnnnnnnnnnnnnnnnnnnnnnnnnnnnnnnnnnnnnnnnnnnnnnnnnnnnnnnnnnnnnnnnnnnnnnnnnnnnnnnnnnnnnnnnnnnnnnnnnnnnnnnnnnnnnnnnnnnnnnnnnnnnnnnnnnnnnnnnnnnnnnnnnnnnnnnnnnnnnnnnnnnnnnnnnnnnnnnnnnnnnnnnnnnnnnnnnnnnnnnnnnnnnnnnnnnnnnnnnnnnnnnnnnnnnnnnnnnnnnnnnnnnnnnnnnnnnnnnnnnnnnnnnnnnnnnnnnnnnnnnnnnnnnnnnnnnnnnnnnnnnnnnnnnnnnnnnnnnnnnnnnnnnnnnnnnnnnnnnnnnnnnnnnnnnnnnnnnnnnnnnnnnnnnnnnnnnnnnnnnnnnnnnnnnnnnnnnnnnnnnnnnnnnnnnnnnnnnnnnnnnnnnnnnnnnnnnnaggtttgcccatttggcagcagtgaagctgttagaggagctacnnnnnnnnnnnnnnnnnnnnnnnnnnnnnnnnnnnnnnnnnnnnnnnnnnnnnttataagacatggtgttgagggaagcactgatgccaaggatgatttatgtctgagtgacttggataaaacagatgccagaa

SEQ ID NO: 33036 - DNA, 4462 bp, Macaca Mulatta
  misc_feature (1)...(4462): n = A,T,C or G
gggagtccctaaatcgtccttcctgaccgaggagaagagagccaggctgaagaccaaccctgtgaaggtgcactttgctgaagaagtgctcatcagtggacacagccagnnnnnnnnnnnnnnnnnnnnnnnnnnnnnnnnnnnnnnnnnnnnnnnnnnnnnnnnnnnnnnnnnnnnnnnnnnnnnnnnnnnnnnnnnnnnnnnnnnnnnnnnnnnnnnnnnnnnnnnnnnnnnnnnnnnnnnnnnnnnnnnnnnnnnnnnnnnnnnnnnnnnnnnnnnnnnnnnnnnnnnnnnnnnnnnnnnnnnnnnnnnnnnnnnnnnnnnnngcaggtggtagaaagggaggagtcacatgactaccgctgcctcttcagggtctgttttgttcccaaggaccccctggacctcctgaaagaagaccccgtggcctttgaatacctctatctgcagnnnnnnnnnnnnnnnnnnnnnnnnnnnnnnnnnnnnnnnnnnnnnnnnnnnnnnnnnnnnnnnnnnnnnnnnnnnnnnnnnnnnnnnnnnnnnnnnnnnnnnnnnnnnnnnnnnnnnnnnnnnnnnnnnnnnnnnnnnnnnnnnnnnnnnnnnnnnnnnnnnnnnnnnnnnnnnnnnnnnnnnnnnnnnnnnnnnnnnnnnnnnnnnnnnnnnnnnnnnnnnnnnnnnnnnnnnnnnnnnnnnnnnnnnnnnnnnnnnnnnnnnnnnnnnnnnnnnnnnnnnnnnnnnnnnnnnnnnnnnnnnnnnnnnnnnnnnnnnnnnnnnnnnnnnnnnnnnnnnnnnnnnnnnnnnnnnnnnnnnnnnnnnnnnnnnnnnnnnnnnnnnnnnnnnnnnnnnnnnnnnnnnnnnnnnnnnnnnnnnnnnnnnnnnnnnnnnnnnnnnnnnnnnnnnnnnnnnnnnnnnnnnnnnnnnnnnnnnnnnnnnnnnnnnnnnnnnnnnnnnnnnnnnnnnnnnnnnnnnnnnnnnnnnnnnnnnnnnnnnnnnnnnnnnnnnnnnnnnnnnnnnnnnnnnnnnnnnnnnnnnnnnnnnnnnnnnnnnnnnnnnnnnnnnnnnnnnnnnnnnnnnnnnnnnnnnnnnnnnnnnnnnnnnnnnnnnnnnnnnnnnnnnnnnnnnnnnnnnnnnnnnnnnnnnnnnnnnnnnnnnnnnnnnnnnnnnnnnnnnnnnnnnnnnnnnnnnnnnnnnnnnnnnnnnnnnnnnnnnnnnnnnnnnnnnnnnnnnnnnnnnnnnnnnnnnnnnnnnnnnnnnnnnnnnnnnnnnnnnnnnnnnnnnnnnnnnnnnnnnnnnnnnnnnnnnnnnnnnnnnnnnnnnnnnnnnnnnnnnnnnnnnnnnnnnnnnnnnnnnnnnnnnnnnnnnnnnnnnnnnnnnnnnnnnnnnnnnnnnnnnnnnnnnnnnnnnnnnnnnnnnnnnnnnnnnnnnnnnnnnnnnnnnnnnnnnnnnnnnnnnnnnnnnnnnnnnnnnnnnnnnnnnnnnnnnnnnnnnnnnnnnnnnnnnnnnnnnnnnnnnnnnnnnnnnnnnnnnnnnnnnnnnnnnnnnnnnnnnnnnnnnnnnnnnnnnnnnnnnnnnnnnnnnnnnnnnnnnnnnnnnnnnnnnnnnnnnnnnnnnnnnnnnnnnnnnnnnnnnnnnnnnnnnnnnnnnnnnnnnnnnnnnnnnnnnnnnnnnnnnnnnnnnnnnnnnnnnnnnnnnnnnnnnnnnnnnnnnnnnnnnnnnnnnnnnnnnnnnnnnnnnnnnnnnnnnnnnnnnnnnnnnnnnnnnnnnnnnnnnnnnnnnnnnnnnnnnnnnnnnnnnnnnnnnnnnnnnnnnnnnnnnnnnnnnnnnnnnnnnnnnnnnnnnnnnnnnnnnnnnnnnnnnnnnnnnnnnnnnnnnnnnnnnnnnnnnnnnnnnnnnnnnnnnnnnnnnnnnnnnnnnnnnnnnnnnnnnnnnnnnnnnnnnnnnnnnnnnnnnnnnnnnnnnnnnnnnnnnnnnnnnnnnnnnnnnnnnnnnnnnnnnnnnnnnnnnnnnnnnnnnnnnnnnnnnnnnnnnnnnnnnnnnnnnnnnnnnnnnnnnnnnnnnnnnnnnnnnnnnnnnnnnnnnnnnnnnnnnnnnnnnnnnnnnnnnnnnnnnnnnnnnnnnnnnnnnnnnnnnnnnnnnnnnnnnnnnnnnnnnnnnnnnnnnnnnnnnnnnnnnnnnnnnnnnnnnnnnnnnnnnnnnnnnnnnnnnnnnnnnnnnnnnnnnnnnnnnnnnnnnnnnnnnnnnnnnnnnnnnnnnnnnnnnnnnnnnnnnnnnnnnnnnnnnnnnnnnnnnnnnnnnnnnnnnnnnnnnnnnnnnnnnnnnnnnnnnnnnnnnnnnnnnnnnnnnnnnnnnnnnnnnnnnnnnnnnnnnnnnnnnnnnnnnnnnnnnnnnnnnnnnnnnnnnnnnnnnnnnnnnnnnnnnnnnnnnnnnnnnnnnnnnnnnnnnnnnnnnnnnnnnnnnnnnnnnnnnnnnnnnnnnnnnnnnnnnnnnnnnnnnnnnnnnnnnnnnnnnnnnnnnnnnnnnnnnnnnnnnnnnnnnnnnnnnnnnnnnnnnnnnaaatcttacctctatctcaagacctggatggcactgcccccaaagaacccaccatagagcatggggacagctccttctccctctccagtggcgaccctaacccagacagagtctgcctggccagcaacccagggctacataatgtctctcaaggagacacactagagctccagttggagccccatgtccagttggaaatgggattggaatctttttgtacaaatcatatacaagaaactgcccccaaatacacagagcctttgttgtctcctggagatgagcctagaagtgatgaatgtggaataaatccaggagagaagatagcttctatccctacaaaggaagagcaacaaggacaactatctttggaaagagacagagaagttacaaacaaaaatggcaccaagatatttcaggaggaatctaggaaggattcaggtgactccctgggtgatgtgtcagataatgtttcacagactcttgatattaattctccagctggtaaaatagtaacctccctttctttagatgctcctgtaacagggactgagcagatcccaccacttgcccctcgagaccctcaaggacagagcagagaacccccagggcaagcctgccaggctcaagaacaaaaactattcgtagagttggatttagaccctgatttctttcttgggaagcagacaatttcatcagccctccctccagaggggatcaaggcagagacacctaaccatgtgacagggaaagatacagcccatagggacagccctgagtgggnnnnnnnnnnnnnnnnnnnnnnnnnnnnnnnnnnnnnnnnnnnnnnnnnnnnnnnnnnnnnnnnnnnnnnnnnnnnnnnnnnnnnnnnnnnnnnnnnnnnnnnnnnnnnnnnnnnnnnnnnnnnnnnnnnnnnnnnnnnnnnnnnnnnnnnnnnnnnnnnnnnnnnnnnnnnnnnnnnnnnnnnnnnnnnnnnnnnnnnnnnnnnnnnnnnnnnnnnnnnnnnnnnnnnnnnnnnnnnnnnnnnnnnnnnnnnnnnnnnnnnnnnnnnnnnnnnnnnnnnnnnnnnnnnnnnnnnnnnnnnnnnnnnnnnnnnnnnnnnnnnnnnnnnnnnnnnnnnnnnnnnnnnnnnnnnnnnnnnnnnnnnnnnnnnnnnnnnnnnnnnnnnnnnnnnnnnnnnnnnnnnnnnnnnnnnnnnnnnnnnnnnnnnnnnnnnnnnnnnnnnnnnnnnnnnnnnnnnnnnnnnnnnnnnnnnnngggcactgagacagctgaaagccacccccgccagcacccctgagggcttcatccagctcatggagagcttgctggagctacaagacattttagaaacttcctgggggattggaaacaaacatcccccagagaagtgcacctggcactttaccgaaagccggagccgcctctgcatgggctcccagaagctcctgtcgagctgtcagcatgtgatcagaatggaccagtcccccgaagagatgcagggggccgtgcgtgacaccttccagcacctggtccaactggctggcctgtgctttcagttcacggactgtagccgctgctccacccggcacagggaggcagcggggaacctgagggatgtggtgtacacctaccatcagtttgtagaggctgctaaatcgacctgcgagaggggctaccatgacctgagtgtgaaactcctggcccgtcagtgcacggccctcacagcagccgtgttctgtttgacccagaagttccgggcatccacggccctgtaagcaggtcaatggcccaagggcctcctgccctttcttgccttggacacttccctgagaagccccttccactttcccatccaccctcttcaaatgtttactatatagagtattcaaataaactgctgcttaatctt

SEQ ID NO: 33037 - DNA, 861 bp, Macaca Mulatta
gggcctttctaactccgctgcggccatggctccagtgaaaaaacttgtggcgaaggggggcaaaaaaaaagaagcaggttctgaagttcactcttgattgcacccaccctgtagaagatggaatcatggatgctgccaattttgagcagtttttgcaagaaaggatcaaagtgaacggaaaagctgggaaccttggtggaggggtggtgaccatcgaaaggagcaagagcaagatcaccgtgacatctgaggtgcctttctccaaaaggcatttgaaatatctcaccaaaaaatatttgaagaagaataatctacgtgactggttgcgcgtagttgctaacagcaaagagagttacgaatttacgttacttccagattaaccaggacgaataataggaggaagatgaggattaaatttttcttttatccggaaaattttggatgaattcttgaataaaacttgggaacccttaaaaagaaaattaaaaataaaaataatacattggtcggccgccttgggccctccaaaaaccttttcaaaaacaattcgttttggcccgccggggccccaataaggtaaattgaaaatggttcttacctggtttcctaaggaaaatcctgggctataaacaaagtggcttggaaattctcaccataaaaaaaaatgccccgggttggcttaccataaccttttctgaacaaaatcccaaaatggaaattctcggaggacccttttcctgggattcctacccaaaacgggaattcccaagccaaagactctcaaatatcacatattcaagcccccgaaccttgtcaccaattatctgcagaaaaaggggtagttaattcctcataaaaccc

SEQ ID NO: 33038 - DNA, 1847 bp, Macaca Mulatta
  misc_feature (1)...(1847): n = A,T,C or G
ggatttgttaaggattccaagtaactcttacttgnnnnnnnnnnnnnnnnnnnnnnnnnnnnnnnnnnnnnnnnnnnnnnnnnnnnnnnnnnnnnnnnnnnnnnnnnnnnnnnnnnnnnnnnnnnnnnnnnnnnnnnnnnnnnnnnnnnnnnnnnnnnnnnnnncccagggttaaaagttggagaaatttcacagtacatcatccaaaagaggagtccatgatggaggcagaggtaaacttggagaggnnnnnnnnnnnnnnnnnnnnnnnnnnnnnnnnnnnnnnnnnnnnnnnnnnnnnnnnnnnnnnnnnnnnnnnnnnnnnnnnnnnnnnnnnnnnnnnnnnnnnnnnnnnnnnnnnnnnnnnnnnnnnnnnnnnnnnnnnnnnnnnnnnnnnnnnnnnnnnnnnnnnnnnnnnnnnnnnnnnnnnnnnnnnnnnnnnnnnnnnnnnnnnnnnnnnnnnnnnnnnnnnnnnnnnnnnnnnnnnnnnnnnnnnnnnnnnnnnnnnnnnnnnnnnnnnnnnnnnnnnnnnnnnnnnnnnnnnnnnnnnnnnnnnnnnnnnnnnnnnnnnnnnnnnnnnnnnnnnnnnnnnnnnnnnnnnnnnnnnnnnnnnnnnnnnnnnnnnnnnnnnnnnnnnnnnnnnnnnnnnnnnnnnnnnnnnnnnnnnnnnnnnnnnnnnnnnnnnnnnnnnnnnnnnnnnnnnnnnnnnnnnnnnnnnnnnnnnnnnnnnnnnnnnnnnnnnnnnnnnnnnnnnnnnnnnnnnnnnnnnnnnnnnnnnnnnnnnnnnnnnnnnnnnnnnnnnnnnnnnnnnnnnnnnnnnnnnnnnnnnnnnnnnnnnnnnnnnnnnnnnnnnnnnnnnnnnnnnnnnnnnnnnnnnnnnnnnnnnnnnnnnnnnnnnnnnnnnnnnnnnnnnnnnnnnnnnnnnnnnnnnnnnnnnnnnnnnnnnnnnnnnnnnnnnnnnnnnnnnnnnnnnnnnnnnnnnnnnnnnnnnnnnnnnnnnnnnnnnnnnnnnnnnnnnnnnnnnnnnnnnnnnnnnnnnnnnnnnnnnnnnnnnnnnnnnnnnnnnnnnnnnnnnnnnnnnnnnnnnnnnnnnnnnnnnnnnnnnnnnnnnnnnnnnnnnnnnnnnnnnnnnnnnnnnnnnnnnnnnnnnnnnnnnnnnnnnnnnnnnnnncagtctgcatggattcagaaggaaaagatacagcctgggccaggctgagtatgggcggctgggccttggggagggtgctgaggagaagagcatacccaccctcatctccaggctgcctgctgtctcctcagtggcttgtggggcctctgtggggtatgctgtgaccaaggatggttgtgttttcgcctggggcatgggcaccaactaccagctgggcacagggcaggatgaggacagctggagccctgtggagatgaggggcaaacaactggagaaccatgtggtcttatctgtgtccagcgggggccagcatacagtcttattagtcaaggacaaggaacagagctgatgaagcctctgagggcctggcttctgtcccactcaacctccctcacagaacagggaagcagtgacagctgcagatggcagcgggcctctcctcagccctgagcactatgtcagctcctgccttttcccatcagcagaacagaatccttttcctatttttcttcctcctctttggaattctcctgggacctacagaataaaggaggggatggacaggggattttcagaaggaacatggctcgctccagagctatatggttagacgtttctccccttttccttaccttccatggtcctggttggcccgggctttacctactagaaaacc

SEQ ID NO: 33039 - DNA, 152 bp, Macaca Mulatta
gatcctccaaatgtacatattattggaaatctgccttttagtgtttcaactccactgattatcaagtggcttgaaaatatttcctgtagagatggaccttttgtttatggcagaactcagatgactttgacttttcaaaaggaagtggcaga

SEQ ID NO: 33040 - DNA, 1593 bp, Macaca Mulatta
  misc_feature (1)...(1593): n = A,T,C or G
tgcaactccagtagtaccttctcgggcagcaactccaagatcagtaagaaataagtctcatgaaggaattacaaattctgtaatgcctgaatgtaagaatcctttcaagttaatgattggatcatcaaatgccgtgggaaggctatatgtacaagaactgcctggaagccaacaacaagaactccaccctgtctacccccgacagagattgggcagcagtgaacatggacagaaatctccattccgtggcagccatggaggcctgcctagcccagcgtcatcaggttcccagnnnnnnnnnnnnnnnnnnnnnnnnnnnnnnnnnnnnnnnnnnnnnnnnnnnnnnnnnnnnnnnnnnnnnnnnnnnnnnnnnnnnnnnnnnnnnnnnnnnnnnnnnnnnnnnnnnnnnnnnnnnnnnnnnnnnnnnnnnnnnnnnnnnnnnnnnnnnnnnnnnnnnnnnnnnnnnnnnnnnnnnnnnnnnnnnnnnnnnnnnnnnnnnnnnnnnnnnnnnnnnnnnnnnnnnnnnnnnnnnnnnnnnnnnnnnnnnnnnnnnnnnnnnnnnnnnnnnnnnnnnnnnnnnnnnnnnnnnnnnnnnnnnnnnnnnnnnnnnnnnnnnnnnnnnnnnnnnnnnnnnnnnnnnnnnnnnnnnnnnnnnnnnnnnnnnnnnnnnnnnnnnnnnnnnnnnnnnnnnnnnnnnnnnnnnnnnnnnnnnnnnnnnnnnnnnnnnnnnnnnnnnnnnnnnnnnnnnnnnnnnnnnnnnnntcaggtacctatgatgaatgtaagcatgcctcctgctgttgttcctttgccaagtaatctcccattgccaactgtaaaacctggccacatgaatcatgggagtcatgtacaaagagttcagcattcagcttcaacctccctgtccccttctccagtgacatccccagtgcacatgatggggactggaattggaaggattgaggcatcgccccaaagatcacgctcatcttccacatcatcagatcatggaaatttcatgatgccacctgtaggaccccaggccacttgtagtggtattaaggttccacccaggtcaccaaggtcaacaatagggtccccaaggccatcaatgccatcaagcccttctaccaagtccgatggacatcatcagtacaaggatatccctaacccattaattgctggaataagtaatgtactaaataccccaagcagtgcagcttttcctactgcatctgccggaagtggttctgtaaagagtcagcctggtttgctgggaatgcctttaaatcagatcttgaaccagcacaatgctgcctcctttccagcaagtagtttactctcagcagcagccaaagcacagctagcaaatcaaaacaaacttgctggtaacaacagtagcagcagtagcaattctggagctgttgccggcagtggcaacactgaaggacatagcactttaaacaccatgttccctcctactgccaacatgcttctcccaacaggtgaagggcaaagtggtcgagcaacagtaagagataagctgatgtctcagcaaaaagactcactacggaaaagaaaacaaccacctac

SEQ ID NO: 33041 - DNA, 78 bp, Macaca Mulatta
gtatttgccggctgccagattccataccccaaacgagaattccttaatgaagatgatcctgaagaaaaaggtgacaag

SEQ ID NO: 33042 - DNA, 79 bp, Macaca Mulatta
accactctgaaacatcatccacactgtgaacgtgcccctgcagacggccctggggactttggaggagattgcctgctga

SEQ ID NO: 33043 - DNA, 3660 bp, Macaca Mulatta
  misc_feature (1)...(3660): n = A,T,C or G
ggactgcatggaagaaataaacttgtttagtgaaaacaagttacagttaaagcagatgggtgaccagctgatcaaggccagcaacaaatcgagaacagctgagatcgatgacaagctcaacaaaattaacgatcgttggcaacatctttttgatgtcatcggatcaaggnnnnnnnnnnnnnnnnnnnnnnnnnnnnnnnnnnnnnnnnnnnnnnnnnnnnnnnnnnnnnnnnnnnnnnnnnnnnnnnnnnnnnnnnnnnnnnnnnnnnnnnnnnnnnnnnnnnnnnnnnnnnnnnnnnnnnnnnnnnnnnnnnnnnnnnnnnnnnnnaggatctacagcgagatattgaacaacacagcgcaggggtggagtctgtgtttaacatctgtgacgttctactgcacgactccgatgcctgtgcaaatgagactgagtgcgactcgatccagcagaccaccaggagcctggacagacgctggaggaacatttgtgccatgtccatggagcggcgcatgaannnnnnnnnnnnnnnnnnnnnnnnnnnnnnnnnnnnnnnnnnnnnnnnnnnnnnnnnnnnnnnnnnnnnnnnnnnnnnnnnnnnnnnnnnnnnnnnnnnnnnnnnnnnnnnnnnnnnnnnnnnnnnnnnnnnnnnnnnnnnnnnnnnnnnnnnnnnnnnnnnnnnnnnnnnnnnnnnnnnnnnnnnnnnnnnnnnnnnnnnnnnnnnnnnnnnnnnnnnnnnnnnnnnnnnnnnnnnnnnnnnnnnnnnnnnnnnnnnnnnnnnnnnnnnnnnnnnnnnnnnnnnnnnnnnnnnnnnnnnnnnnnnnnnnnnnnnnnnnnnnnnnnnnnnnnnnnnnnnnnnnnnnnnnnnnnnnnnnnnnnnnnnnnnnnnnnnnnnnnnnnnnnnnnnnnnnnnnnnnnnnnnnnnnnnnnnnnnnnnnnnnnnnnnnnnnnnnnnnnnnnnnnnnnnnnnnnnnnnnnnnnnnnnnnnnnnnnnnnnnnnnnnnnnnnnnnnnnnnnnnnnnnnnnnnnnnnnnnnnnnnnnnnnnnnnnnnnnnnnnnnnnnnnnnnnnnnnnnnnnnnnnnnnnnnnnnnnnnnnnnnnnnnnnnnnnnnnnnnnnnnnnnnnnnnnnnnnnnnnnnnnnnnnnnnnnnnnnnnnnnnnnnnnnnnnnnnnnnnnnnnnnnnnnnnnnnnnnnnnnnnnnnnnnnnnnnnnnnnnnnnnnnnnnnnnnnnnnnnnnnnnnnnnnnnnnnnnnnnnnnnnnnnnnnnnnnnnnnnnnnnnnnnnnnnnnnnnnnnnnnnnnnnnnnnnnnnnnnnnnnnnnnnnnnnnnnnnnnnnnnnnnnnnnnnnnnnnnnnnnnnnnnnnnnnnnnnnnnnnnnnnnnnnnnnnnnnnnnnnnnnnnnnnnnnnnnnnnnnnnnnnnnnnnnnnnnnnnnnnnnnnnnnnnnnnnnnnnnnnnnnnnnnnnnnnnnnnnnnnnnnnnnnnnnnnnnnnnnnnnnnnnnnnnnnnnnnnnnnnnnnnnnnnnnnnnnnnnnnnnnnnnnnnnnnnnnnnnnnnnnnnnnnnnnnnnnnnnnnnnnnnnnnnnnnnnnnnnnnnnnnnnnnnnnnnnnnnnnnnnnnnnnnnnnnnnnnnnnnnnnnnnnnnnnnnnnnnnnnnnnnnnnnnnnnnnnnnnnnnnnnnnnnnnnnnnnnnnnnnnnnnnnnnnnnnnnnnnnnnnnnnnnnnnnnnnnnnnnnnnnnnnnnnnnnnnnnnnnnnnnnnnnnnnnnnnnnnnnnnnnnnnnnnnnnnnnnnnnnnnnnnnnnnnnnnnnnnnnnnnnnnnnnnnnnnnnnnnnnnnnnnnnnnnnnnnnnnnnnnnnnnnnnnnnnnnnnnnnnnnnnnnnnnnnnnnnnnnnnnnnnnnnnnnnnnnnnnnnnnnnnnnnnnnnnnnnnnnnnnnnnnnnnnnnnnnnnnnnnnnnnnnnnnnnnnnnnnnnnnnnnnnnnnnnnnnnnnnnnnnnnnnnnnnnnnnnnnnnnnnnnnnnnnnnnnnnnnnnnnnnnnnnnnnnnnnnnnnnnnnnnnnnnnnnnnnnnnnnnnnnnnnnnnnnnnnnnnnnnnnnnnnnnnnnnnnnnnnnnnnnnnnnnnnnnnnnnnnnnnnnnnnnnnnnnnnnnnnnnnnnnnnnnnnnnnnnnnnnnnnnnnnnnnnnnnnnnnnnnnnnnnnnnnnnnnnnnnnnnnnnnnnnnnnnnnnnnnnnnnnnnnnnnnnnnnnnnnnnnnnnnnnnnnnnnnnnnnnnnnnnnnnnnnnnnnnnnnnnnnnnnnnnnnnnnnnnnnnnnnnnnnnnnnnnnnnnnnnnnnnnnnnnnnnnnnnnnnnnnnnnnnnnnnnnnnnnnnnnnnnnnnnnnnnnnnnnnnnnnnnnnnnnnnnnnnnnnnnnnnnnnnnnnnnnnnnnnnnnnnnnnnnnnnnnnnnnnnnnnnnnnnnnnnnnnnnnnnnnnnnnnnnnnnnnnnnnnnnnnnnnnnnnnnnnnnnnnnnnnnnnnnnnnnnnnnnnnnnnnnnnnnnnnnnnnnnnnnnnnnnnnnnnnnnnnnnnnnnnnnnnnnnnnnnnnnnnnnnngttgagagcagcgagaactacagaaggcgaggaggagacagagagcaggnnnnnnnnnnnnnnnnnnnnnnnnnnnnnnnnnnnnnnnnnnnnnnnnnnnnnnnnnnnnnnnnnnnnnnnnnnnnnnnnnnnnnnnnnnnnnnnnnnnnnnnnnnnnnnnnnnnnnnnnnnnnnnnnnnnnnnnnnnnnnnnnnnnnnnnnnnnnnnnnnnnnnnnnnnnnnnnnnnnnnnnnnnnnnnnnnnnnnnnnnnnnnnnnnnnnnnnnnnnnnnnnnnnnnnnnnnnnnnnnnnnnnnnnnnnnnnnnnnnnnnnnnnnnnnnnnnnnnnnnnnnnnnnnnnnnnnnnnnnnnnnnnnnnnnnnnnnnnnnnnnnnnnnnnnnnnnnnnnnnnnnnnnnnnnnnnnnnnnnnnnnnnnnnnnnnnnnnnnnnnnnnnnnnnnnnnnnnnnnnnnnnnnnnnnnnnnnnnnnnnnnnnnnnnnnnnnnnnnnnnnnnnnnnnnnnnnnnnnnnnnnnnnnnnnnnnnnnnnnnnnnnnnnnnnnnnnnnnnnnnnnnnnnnnnnnnnnnnnnnnnnnnnnnnnnnnnnnnnnnnnnnnnnnnnnnnnnnnnnnnnnnnnnnnnnnnnnnnnnnnnnnnnnnnnnnnnnnnnnnnnnnnnnnnnnnnnnnnnnnnnnnnnaggcacccttagctgatggaaacaatcacatttaatatgtttagaatcagttttactccaatcagctggcaattttgagctaccagttatacaccaaaatgttctgttcagtacctagctctgctcttttatattgctttaaattttttaagaaattatattgcatggatgtggttatttgtgcatattttttaacaatgcccaatctgtatgaataatgtaaacttcgatttttttaaaaaatcagattttagctggagcttttgactaatgtacagtaaatgccaaactaccgacttgatagagatgtttttataaaaaaaattttctaagactttttcacatccaaagtgatgctttgggttttaaccgtttggccacggcagggg

SEQ ID NO: 33044 - DNA, 238 bp, Macaca Mulatta
ccgagtccgcgccctcgtcgccggccaccgccccgctgcaggcccccacgctccgaggccccgagcctgcacgcgagacccccgccaagctggagcccaagcccatcaaccccaaagccgagcccagggccaaggcccgtaagactgaggcccgaggcctgaccaaggccggggccaagaagaaggcacggaaggaggcagcgctggcggcagaggcggaggtggaggtggaagaggt

SEQ ID NO: 33045 - DNA, 3069 bp, Macaca Mulatta
  misc_feature (1)...(3069): n = A,T,C or G
gtcccccacccctgggcttccaggtgggcatgaagctggaggctgttgaccgcatgaacccctcccttgtctgcgtgggcagtgtgaccgatgtggtgnnnnnnnnnnnnnngatccactttgatggctggagtcatggctatgatttctggatcgacgctgaacacccannnnnnnnnnnnnnnnnnnnnnnnnnnnnnnnnnnnnnnnnnnnnnnnnnnnnnnnnnnnnnnnnnnnnnnnnnnnnnnnnnnnnnnnnnnnnnnnnnnnnnnnnnnnnnnnnnnnnnnnnnnnnnnnnnnnnnnnnnnnnnnnnnnnnnnnnnnnnnnnnnnnnnnnnnnnnnnnnnnnnnnnnnnnnnnnnnnnnnnnnnnngttcacagctcaccattgcctctcaggctgcccgctggctgagaggaaccagagccggctgaaagcagagctgtctgactcagaggcctcagctcgcaagaagaacctctcaggcttctccccaaggaagaagcctcgccatcatggccgngaattggacgccctccgaagtatcgaaagattccgcaggaagatttccagannnnnnnnnnnnnnnnnnnnnnnnnnnnnnnnnnnnnnnnnnnnnnnnnnnnnnnnnnnnnnnnnnnnnnnnnnnnnnnnnnnnnnnnnnnnnnnnnnnnnnnnnnnnnnnnnnnnnnnnnnnnnnnnnnnnnnnnnnnnnnnnnnnnnnnnnnnnggtcttcggctttgttcagaccctgacaggttgtgaggaccaagcacgcctcttcaaagacgagngatgattgacggcgaggccttccttttgctgacacaggcggacattgtgaagatcatgagcgtcaagctgggcccagccttgaagatctataacgccattctcatgttcaaaaacgccgatgacaccttaaagtgactggcccagggctgggccctcctgcggcccctgcttggtctccctctccagctgatgctttcttcctgacctgagttcctcatacccccacgtccccatgttccacctgtatctgaccagggctagtccttcttagagggtacatgggagccgaggagccctggggagggtaggcacccagccccaagtcctagagctcattcgccaccaggcatgtcagtgagggtgtgattggcaggggcattactcatggagtcagtgggactgtggcaaccccacagctccagtggacttttattttattaccaaagggtctttttcttagcggttgaggagagtctagtagagcagcagtccttcaatctgaggcccctttcccttttttggtatctctgtgtgcttttctcttcttggctcctttcctcctgccaagaatgaccctgccacaaacgtatttactcctggaggcacctcctccctttctgtctgctggttttgctgccctcattctgctgcttcgtttcctgggcagtgcccccagccagaccccactggctcttccccctgagatatgtgaacctcagaaacatgttttcataagatcccttggaagtctctagctgcctttctctcttttgcccggaattgagagattctgagctaagatgccttcctgaacttnnnnnnnnnnnnnnnnnnnnnnnnnnnnnnnnnnnnnnnnnnnnnnnnnnnnnnnnnnnnnnnnnnnnnnnnnnnnnnnnnnnnnnnnnnnnnnnnnnnnnnnnnnnnnnnnnnnnnnnnnnnnnnnnnnnnnnnnnnnnnnnnnnnnnnnnnnnnnnnnnnnnnnnnnnnnnnnnnnnnnnnnnnnnnnnnnnnnnnnnnnnnnnnnnnnnnnnnnnnnnnnnnnnnnnnnnnnnnnnnnnnnnnnnnnnnnnnnnnnnnnnnnnnnnnnnnnnnnnnnnnnnnnnnnnnnnnnnnnnnnnnnnnnnnnnnnnnnnnnnnnnnnnnnnnnnnnnnnnnnnnnnnnnnnnnnnnnnnnnnnnnnnnnnnnnnnnnnnnnnnnnnnnnnnnnnnnnnnnnnnnnnnnnnnnnnnnnnnnnnnnnnnnnnnnnnnnnnnnnnnnnnnnnnnnnnnnnnnnnnnnnnnnnnnnnnnnnnnnnnnnnnnnnnnnnnnnnnnnnnnnnnnnnnnnnnnnnnnnnnnnnnnnnnnnnnnnnnnnnnnnnnnnnnnnnnnnnnnnnnnnnnnnnnnnnnnnnnnnnnnnnnnnnnnnnnnnnnnnnnnnnnnnnnnnnnnnnnnnnnnnnnnnnnnnnnnnnnnnnnnnnnnnnnnnnnnnnnnnnnnnnnnnnnnnnnnnnnnnnnnnnnnnnnnnnnnnnnnnnnnctgccaacctcccgtgcccaggtgctgttgtgggcctgcagagtgtggggccggtgccttctcccagaccccttnnnnnnnnnnnnnnnnnnnnnnnnnnnnnnnnnnnnnnnnnnnnnnnnnngcactctcagaagtgtttgacagggtgcagatgtgaggctcagtgttgggaaaatgccaagggctattattaaaatttgaagctttatttttaccttagaagtggaaaacccagagctctgttgatttcctaccacaacccagtaggggcccctctctcccatgggctggacagctttttgaggaagccattcagctcccacagttgagctcccagagggcttcaggtgtcccttccctttcaactgcttagaggcagctttgagcacagccttcctgggaggaagctaggcaagccctgccacacagcaaaggttgggtttacaagggtgacattggtacccccttggccaagagtaaagtagaacgagtctaagccctgcttttatcttggttttctgggtggtggcagagctcatcagctccttatcctcagtcggcttctctaaaagacgagaggtgttcactgactttgtgcagtgagaaggcagcaagtactcatggctggtgctgtgggacctcacagcttctaaggagaggggctaggagggcctttgccctcggatctgcgtaatgcttgcctgtggtaaaggcatgatggaccgagggcctggaaaaaagggctcccagg

SEQ ID NO: 33046 - DNA, 967 bp, Macaca Mulatta
gggatgtctcaccaatgccctttgaaggagattccatgctcctggctgaaatggtgctttttgtaaggatagctataggctttcaagagagcccaggcattgctctatagtgacccagtagtcctaattttccagccaggccacccccctgccacttcgttagtttggttgctcatgtaaatttgttcctattcaagatctgattcatgactgtaagacaagtctcccaaaacatttaacctaaatctatcatgctatagattgctttccaggaagacccaactcttacatcacctttagccagtcagctgaaattgaagtcccaatgtttaaaaaaatgagtcctgtctgtaaacccccgggctctgccttgctggaaagaaatcagaatatttaagctcatattgtacatgtatagaaatcaataagaaatcaaaccccctttgtttctaccctggaggtcctagaactcacgaagaacattgtggctgataacagagtccagttccatgtgatgactgcctttgatcccctccccatcagcccttatgatgacaaggccttgggctaccagctgctccgccagaccatacagtccgtcttcccggaagtcaatattactatcccaggtaatgacttcatcagctgtggctggagggaggagggggctggaactgtttcctatccaatgtctacttccccacccctaccccagatgttcagcctgtaaacagctggctgcttcccctcctgatgagactagaactgtattttcccttcagagtggaagtgaaaacgcaaacaggaaaggagcagaaacaataaattaggtcagtcaagcctgggtccttgcttaacctaggccagccactctggcatagaggggagaattggcttagactactccctcctctctaagagtcacagaaggggccaagattttcccagagtctggttctgatccatc

SEQ ID NO: 33047 - DNA, 507 bp, Macaca Mulatta
caacttcctgggttttctcattgtctttttgcatcaggactttgtattgggatattaaagagatttaacttgggtaacatggccttggacctttgggaatcggtctatttgggatcttgtgtgaggattctaggcagctcttgggagtgtgcccacacctgtcccagctaccttcaacagtgacatctgggcggtgcatcccagcaggtagttccctggagtacagaatgggctgggagctctggttgctgggggcctgtgacatcctccttcctgagccatgccccagagtcctagtgtcggtgggtctgagactgcaggtagcaggtgtgagccccactcgtcctggggcctgtggcttggctgatgggtcagggagggaaccatggccctggccctgacctcagcaatggagcctccgagctattcttctaaggggaggaggactggcctcaagcctgtgccaagacctccagtctgcccgccttgtttttcacaagaggaaat

SEQ ID NO: 33048 - DNA, 1484 bp, Macaca Mulatta
  misc_feature (1)...(1484): n = A,T,C or G
agcttactgtggcctttctgcaggctgctgaactgcctgccctggacatgggcgtcacctcagacccttatgtcaaagtcttcctccttcctgacaagaagaagaaatatgagaccaaagtccatcggaagacactgaaccctgccttcaatgaaaccttcaccttcaaggtgcnaggtgccataccaggagctcgggggcaaaactctggtgatggccatctatgactttgaccgcttctccaaacatgacatcattggagaggtaaaggtgcctatgaacacagtggacctcggccagcccattgaggagtggagagacctgcaaggcggggaaaaggaggagnnnnnnnnnnnnnnnnnnnnnnnnnnnnnnnnnnnnnnnnnnnnnnnnnnnnnnnnnnnnnnnnnnnnnnnnnnnnnnnnnnnnnnnnnnnnnnnnnnnnnnnnnnnnnnnnnnnagacccctatgtgaagatccacctgatgcagaatggcaagcggctcaagaagaagaagacaaccgtgaagaagaagaccctgaacccatacttcaacgagtccttcagctttgagatccccttcgagcagattcagnnnnnnnnnnnnnnnnnnnnnnnnnnnnnnnnnnnnnnnnnnnnnnnnnnnnnnnnnnnnnnnnnnnnnnnnnnnnnnnnnnnnnnnnnnnnnnnnnnnnnnnnnnnnnnnnnnnnnnnnnnnnnnnnnnnnnnnnnnnnnnnnnnnnnnnnnnnnnnnnnnnnnnnnnnnnnnnnnnnnnnnnnnnnnnnnnnnnnnnnnnnnnnnnnnnnnnnnnnnnnnnnnnnnnnnnnnnnnnnnnnnnnnnnnnnnnnnnnnnnnnnnnnnnnnnnnnnnnnnnnnnnnnnnnnnnnnnnnnnnnnnnnnnnnnnnnnnnnnnnnnnnnnnnnnnnnnnnnnnnnnnnnnnnnnnnnnnnnnnnnnnnnnnnnnnnnnnnnnnnnnnnnnnnnnnnnnnnnnnnnnnnnnnnnnnnnnnnnnnnnnnnnnnnnnnnnnnnnnnnnnnnnnnnnnnnnnnnnnnnnnnnnnnnnnnnnnnnnnnnnnnnnnnnnnnnnnnnnnnnnnnnnnnnnnnnnnnnnnnnnnnnnnnnnnnnnnnnagcacttcctgttttttcagtcttttggaccaacaaaatggcagcacatcctgcttccttcaaggaaggcatcacagtggctaatgatcnnnnnnnnnnnnnnnnnnnnnnnnnnnnnnnnnnnnnnnnnnnnnnnnnnnnnnnnnnnnnnnnnnnntttgagcatctctcttcattcctggaatgnnnnnnnnnnnnnnnnntttgagcatctctcttcattcctggaatgagccatggacagtaaagttgtgtgggaaaagaaggctctttggggaccctgacatgaagaagtctactaagtgggagatcttctctcatctatggcaaagtctcaggatcctgttcagat

SEQ ID NO: 33049 - DNA, 740 bp, Macaca Mulatta
aatgtgtagttcgatagggtttacactataaacattattaagtaatgtcaagtcagtggagaaaactttgtgaaattatgcttgcagtttaatatgctgtgcgttatatggttttcagttcagcattcctagttttgggtggtattttttctttcaggagaaagctttgcagaattcagatctgcaggaactgatgatggtttcaccgattttaaaacagccgatagtgtatcaccactagagccaccaacaaaagacaaaacttttccaccatccttcccctcaggaaccacacaacagaaacaacaaacacaagtgaaaaatcctctgaacttagcagacctagatatgttttcctcagttaattgcagcagcgagaaaccattgtctttttcagctgcatttagcacatcaaaatcagtttccacaccacagtcaacaggttctgctgctgctacgacagcattggcgtcaacgaaaacttctagtttggctgatgagtttggagaattcaacctttttggggaatattctggtctaccacctgttggggagcaggatgactttgcagattttatggctttcagtaatagctctatttcatctgagcaaaagccggatgacaaatatgatgcccttaaagaggaagccagtcccgttcctctaaccagcaacatgggcagcacagtgaagggtggacaaaacctaactgctgtgtctaccaagtatgatgtcttcag

SEQ ID NO: 33050 - DNA, 207 bp, Macaca Mulatta
  misc_feature (1)...(207): n = A,T,C or G
ataccaccaggccccgaaagagccatgagaaggaaggagtggaatatcactttgtgtctaagcaagcatttgaggccgacttacatcacaacaagtngttcctggaacatggtgaatataaggaaaatttctatggaaccagcctggaggccattcaggctgttatggccaaaaacaaagtttgtttggtggatgtggagccggaag

SEQ ID NO: 33051 - DNA, 120 bp, Macaca Mulatta
tgttgttgtctcccaaattctccttatccaccattcacgtacgactgacagccaaaggattgcttcgaaaccttcgacttccttcagggtttaggagaagcactgttgttttccacacag

SEQ ID NO: 33052 - DNA, 929 bp, Macaca Mulatta
gctggcggtggttgtaattctgtttgcccttttatggatgccctacaggactcttgtggttgtcaactcatttctctccagtcctttccaagaaaattggtttttgctcttttgcagaatttgcatttatctcaacagtgccatcaacccggtgatttacaatctcatgtcccagaagttccgtgcagccttcagaaagctctgcaactgcaagcagaagccaacagagaaacctgctaactacagtgtggccctaaattacagtgtcatcaaggagtcagaccatttcagcacagagcttgatgatatcactgtcactgacacttacctgtctgccacaaaagtgtcttttgatgacacctgcttggcttctgaggtatcctttagccaaagttgattcatgaattagaagaaaatggaccacaaagaaaatgagaatctgtacagccatcagcaaaagggagaacatggccaatagtcatatgtgaagacagagcagatcagtctttgtcgatgctctaacaagtcctgaccctagatactgtaacccatgaagatgattcagactttccttcttacaaactagtatcactaaaaatggagcagatctgtgaaatagctaaatgatggaaacttaaagtttagcccttttcgtttaacttaagaaattcactatattttctgggcttacagagtttgaataaaatctagacatcaatctacattattcatagtaaccatatcaaatgtcacttttcaaccccccaggttatttatacattcgataatttgacaaggcacagatttttaaatgtttgcatttagtattcattttaacatagtacagggctagttcatgaatatctgaaagtaaaggggaaaatattacagaaacattgtattgagtaaaaataagattttggacatac

SEQ ID NO: 33053 - DNA, 658 bp, Macaca Mulatta
ggttctatgcccgggactcaggcctgctcaagtttgagatccaggcggggttattgggccgccccatcaaccacacagtgcgacgccttgttgccttcacctttcacccttttgagccttttgctatttctgtgcagaggactaatgctgagtatgtcgtcaacttccatatgcgacactgctgcacgtaggtgcctcaccagagccaagtatatggtcttccaagactttgccacccacttatctcagtggactccaaagcaaaaactcctgactactagctctgttagttccagcctgctatacctcagatgggagagagccagagagaagagtgagggtggctcaacctaaaggaatttttaaattgtatacaatactgctactgattgatataatatcctcttacattttccctgtgggaatgcccagcattaagtaagtccatttcatttttgctttactttgcatttgattgctatgaagatgaaagcattagacttttacccccttcgtgtcacttctttggcattatggtttgcatctgaaagcagttaaatcttgtttactcatgagaacgatgtacatcctttccatttaacccataagcacgactatctttttaagagaaaaataaagccatggtattttcatactt

SEQ ID NO: 33054 - DNA, 157 bp, Macaca Mulatta
agagcagagcctctagcctcccctggagctccggcctgcccagcacgacagaggccagagccagcctgctggcctcagctccgggtcgggctgagatggctgtgccccaactctcattcaccccccacggacccaataataaacctggctccacccc

SEQ ID NO: 33055 - DNA, 2810 bp, Macaca Mulatta
  misc_feature (1)...(2810): n = A,T,C or G
ggtaaaccaggggaacatgccagggcttcaaagcaccttcctagccatggacnnnnnnnnnnnnnnnnnnnnnnnnnnnnnnnnnnnnnnnnnnnnnnnnnnnnnnnnnnnnnnnnnnnnnnnnnnnnnnnnnnnnnnnnnnnnnnnnnnnnnnnnnnnnnnnnnnnnnnnnnnnnnnnnnnnnnnnnnnnnnnnnnnnnnnnnnnnnnnnnnnnnnnnnnnnnnnnnnnnnnnnnnnnnnnnnnnnnnnnnnnnnnnnnnnnnnnnnnnnnnnnnnnnnnnnnnnnnnnnnnnnnnnnnnnnnnnnnnnnnnnnnnnnnnnnnnnnnnnnnnnnnnnnnnnnnnnnnnnnnnnnnnnnnnnnnnnnnnnnnnnnnnnnnnnnnnnnnnnnnnnnnnnnnnnnnnnnnnnnnnnnnnnnnnnnnnnnnnnnnnnnnnnnnnnnnnnnnnnnnnnnnnnnnnnnnnnnnnnnnnnnnnnnnnnnnnnnnnnnnnnnnnnnnnnnnnnnnnnnnnnnnnnnnnnnnnnnnnnnnnnnnnnnnnnnnnnnnnnnnnnnnnnnnnnnnnnnnnnnnnnnnnnnnnnnnnnnnnnnnnnnnnnnnnnnnnnnnnnnnnnnnnnnnnnnnnnnnnnnnnnnnnnnnnnnnnnnnnnnnnnnnnnnnnnnnnnnnnnnnnnnnnnnnnnnnnnnnnnnnnnnnnnnnnnnnnnnnnnnnnnnnnnnnnnnnnnnnnnnnnnnnnnnnnnnnnnnnnnnnnnnnnnnnnnnnnnnnnnnnnnnnnnnnnnnnnnnnnnnnnnnnnnnnnnnnnnnnnnnnnnnnnnnnnnnnnnnnnnnnnnnnnnnnnnnnnnnnnnnnnnnnnnnnnnnnnnnnnnnnnnnnnnnnnnnnnnnnnnnnnnnnnnnnnnnnnnnnnnnnnnnnnnnnnnnnnnnnnnnnnnnnnnnnnnnnnnnnnnnnnnnnnnnnnnnnnnnnnnnnnnnnnnnnnnnnnnnnnnnnnnnnnnnnnnnnnnnnnnnnnnnnnnnnnnnnnnnnnnnnnnnnnnnnnnnnnnnnnnnnnnnnnnnnnnnnnnnnnnnnnnnnnnnnnnnnnnnnnnnnnnnnnnnnnnnnnnnnnnnnnnnnnnnnnnnnnnnnnnnnnnnnnnnnnnnnnnnnnnnnnnnnnnnnnnnnnnnnnnnnnnnnnnnnnnnnnnnnnnnnnnnnnnnnnnnnnnnnnnnnnnnnnnnnnnnnnnnnnnnnnnnnnnnnnnnnnnnnnnnnnnnnnnnnnnnnnnnnnnnnnnnnnnnnnnnnnnnnnnnnnnnnnnnnnnnnnnnnnnnnnnnnnnnnnnnnnnnnnnnnnnnnnnnnnnnnnnnnnnnnnnnnnnnnnnnnnnnnnnnnnnnnnnnnnnnnnnnnnnnnnnnnnnnnnnnnnnnnnnnnnnnnnnnnnnnnnnnnnnnnnnnnnnnnnnnnnnnnnnnnnnnnnnnnnnnnnnnnnnnnnnnnnnnnnnnnnnnnnnnnnnnnnnnnnnnnnnnnnnnnnnnnnnnnnnnnnnnnnnnnnnnnnnnnnnnnnnnnnnnnnnnnnnnnnnnnnnnnnnnnnnnnnnnnnnnnnnnnnnnnnnnnnnnnnnnnnnnnnnnnnnnnnnnnnnnnnnnnnnnnnnnnnnnnnnnnnnnnnnnnnnnnnnnnnnnnnnnnnnnnnnnnnnnnnnnnnnnnnnnnnnnnnnnnnnnnnnnnnnnnnnnnnnnnnnnnnnnnnnnnnnnnnnnnnnnnnnnnnnnnnnnnnnnnnnnnnnnnnnnnnnnnnnnnnnnnnnnnnnnnnnnnnnnnnnnnnnnnnnnnnnnnnnnnnnnnnnnnnnnnnnnnnnnnnnnnnnnnnnnnnnnnnnnnnnnnnnnnnnnnnnnnnnnnnnnnnnnnnnnnnnnnnnnnnnnnnnnnnnnnnnnnnnnnnnnnnnnnnnnnnnnnnnnnnnnnnnnnnnnnnnnnnnnnnnnnnnnnnnnnnnnnnnnnnnnnnnnnnnnnnnnnnnnnnnnnnnnnnnnnnnnnnnnnnnnnnnnnnnnnnnnnnnnnnnnnnnnnnnnnnnnnnnnnnnnnnnnnnnnnnnnnnnnnnnnnnnnnnnnnnnnnnnnnnnnnnnnnnnnnnnnnnnnnnnnnnnnnnnnnnnnnnnnnnnnnnnnnnnnnnnnnnnnnnnnnnnnnnnnnnnnnnnnnnnnnnnnnnnnnnnnnnnnnnnnnnnnnnnnnnnnnnnntgcagcccctctacagatctcctctggccactgcagcccctccaacgggctttttctctcctgcattccctggcctggaggggtcagggcccccacatcctctctgctcctcagattcacaccccctccatgttacctcccgcacctcctccctggggcagctgctccctgggcctctgaggatgtcagctcctggctccctgcctctctcccactgcattcctggctcagtcttagaggtttctatgcccccatagattctacccctgccttcctggcctcttgattcttggcttgcctctcctccaattccaaacttagtgaaatggccttaaacattttaaattgtatgtataaatttagcacaatcatgcctttttaaaagcatttcaaatgtcaaaccaggaaggcacaccactgtattagttctatactgctgctgtaaaatttaccacaaacttagtggcttagaacaacacaaatgtattgcaattctgtaggctggaagtctgactacaggtctcactggactagaaagaaggctggcaggctgccttccttcctggaggttctagaagggactctgtctcc

SEQ ID NO: 33056 - DNA, 147 bp, Macaca Mulatta
agcctgagacagcaggagccccgcctggcccgatgccatttccgccgcagcaggcagaggggctgaacaggcactatcagccaacgtggggttctggaagacaccccctccaggcacccaagtgcccctcctcagggctcagtctga

SEQ ID NO: 33057 - DNA, 200 bp, Macaca Mulatta
ggcccgggcgcgacaatcggggggcatcctgcagcaaggggaccctgtggggcttggaacgaaagactggggtctttccgtgggaactgagctagctgccgggcaagagacgcgcggctggcccacttggatcctggccaactcgggattgagttcgcgcctggtctcggaaggccggttttgcttcagggaggagcttg

SEQ ID NO: 33058 - DNA, 1598 bp, Macaca Mulatta
  misc_feature (1)...(1598): n = A,T,C or G
gactgagccgactgcatctgggcaagcggcgctttgcctctctcgcgtctttgtctgctcttcctgcaaggctacggcgcctggagcagggtctgcagcggccgccgcagcaacacgagccaagtcgtgcnnnnnnnnnnnnnnnnnnnnnnnnnnnnnnnnnnnnnnnnnnnnnnnnnnnnnnnnnnnnnnnnnnnnnnnnnnnnnnnnnnnnnnnnnnnnnnnnnnnnnnnnnnnnnnnnnnnnnnnnnnnnnnnnnnnnnnnnnnnnnnnnnnnnnnnnnnnnnnnnnnnnnnnnnnnnnnnnnnnnnnnnnnnnnnnnnnnnnnnnnnnnnnnnnnnnnnnnnnnnnnnnnnnnnnnnnnnnnnnnnnnnnnnnnnnnnnnnnnnnnnnnnnnnnnnnnnnnnnnnnnnnnnnnnnnnnnnnnnnnnnnnnnnnnnnnnnnnnnnnnnnnnnnnnnnnnnnnnnnnnnnnnnnnnnnnnnnnnnnnnnnnnnnnnnnnnnnnnnnnnnnnnnnnnnnnnnnnnnnnnnnnnnnnnnnnnnnnnnnnnnnnnnnnnnnnnnnnnnnnnnnnnnnnnnnnnnnnnnnnnnnnnnnnnnnnnnnnnnnnnnnnnnnnnnnnnnnnnnnnnnnnnnnnnnnnnnnnnnnnnnnnnnnnnnnnnnnnnnnnnnnnnnnnnnnnnnnnnnnnnnnnnnnnnnnnnnnnnnnnnnnnnnnnnnnnnnnnnnnnnnnnnnnnnnnnnnnnnnnnnnnnnnnnnnnnnnnnnnnnnnnnnnnnnnnnnnnnnnnnnnnnnnnnnnnnnnnnnnnnnnnnnnnnnnnnnnnnnnnnnnnnnnnnnnnnnnnnnnnnnnnnnnnnnnnnnnnnnnnnnnnnnnnnnnnnnnnnnnnnnnnnnnnnnnnnnnnnnnnnnnnnnnnnnnnnnnnnnnnnnnnnnnnnnnnnnnnnnnnnnnnnnnnnnnnnnnnnnnnnnnnnnnnnnnnnnnnnnnnnnnnnnnnnnnnnnnnnnnnnnnnnnnnnnnnnnnnnnnnnnnnnnnnnnnnnnnnnnnnnnnnnnnnnnnnnntggcatccaatcatgagacagcccacaatgtgatatgtaaaacatccgtgttggatgaacatgctggcagaccattcctcaatgctgccaacgatgctgacctttgtaacctcactaaaaaaactaccgattatgccatgctggtcaccatgtttggctggttcaccatggtgatctcatatgtggtatattatgtgaggcaaaatcaggaggatgcccggagacacctcgaatacttgaaatccctgccaagcaggcaaaagaaatctgatgaacctgatgatattagcactgtggtatagtgtccaaactgactggcattgagaaagaaagtagtttgcgattgcagtagaaataagtggtttacttcacccatccattgtaaacatttaaaactttgtatttcaatttcttttgaattatgccactgctgaacttttaacaaacactacaacataacaaataattttagtttaggtgatccaccccttaactgtacccccggtggtatatttctgagtaagctactatctga

SEQ ID NO: 33059 - DNA, 1942 bp, Macaca Mulatta
  misc_feature (1)...(1942): n = A,T,C or G
cagacaaggcacctaaaggtcctgcaggtgaaggacccctgggtacagggaaagaccctggccctccagacccaaagaaaactcccgatccacccaccctgaagaaagatgccaaagcccctgccccagagaaaggggatggtaccctggcccaaccctcaactagcagccaaggccccgagggagagggtgacaggggcggggggcctgcggagggcagtgctgggcccccggcagccctgccccagcagactgcaacgccagagaccagtgtcaagaagcccaaggctgaagagggagcctcaggcagccaggatcctggagagcccagggtgggcaagaaggcagcagagggccaagcagcagccaggaggggctcacccgcctttctgcatagccccagctgtcccgccatcatctccanagttctgagaagctgctggccaagaagcccctaagtgaggcatcagagctcacctttgaaggggtgcccatgacccatggcaccacagatcccaggccagccaaggcagaannnnnnnnnnnnnnnnnnnnnnnnnnnnnnnnnnnnnnnnnnnnnnnnnnnnnnnnnnnnnnnnnnnnnnnnnnnnnnnnnnnnnnnnnnnnnnnnnnnnnnnnnnnnnnnnnnnnnnnnnnnnnnnnnnnnnnnnnnnnnnnnnnnnnnnnnnnnnnnnnnnnnnnnnnnnnnnnnnnnnnnnnnnnnnnnnnnnnnnnnnnnnnnnnnnnnnnnnnnnnnnnnnnnnnnnnnnnnnnnnnnnnnnnnnnnnnnnnnnnnnnnnnnnnnnnnnnnnnnnnnnnnnnnnnnnnnnnnnnnnnnnnnnnnnnnnnnnnnnnnnnnnnnnnnnnnnnnnnnnnnnnnnnnnnnnnnnnnnnnnnnnnnnnnnnnnnnnnnnnnnnnnnnnnnnnnnnnnnnnnnnnnnnnnnnnnnnnnnnnnnnnnnnnnnnnnnnnnnnnnnnnnnnnnnnnnnnnnnnnnnnnnnnnnnnnnnnnnnnnnnnnnnnnnnnnnnnnnnnnnnnnnnnnnnnnnnnnnnnnnnnnnnnnnnnnnnnnnnnnnnnnnnnnnnnnnnnnnnnnnnnnnnnnnnnnnnnnnnnnnnnnnnnnnnnnnnnnnnnnnnnnnnnnnnnnnnnnnnnnnnnnnnnnnnnnnnnnnnnnnnnnnnnnnnnnnnnnnnnnnnnnnnnnnnnnnnnnnnnnnnnnnnnnnnnnnnnnnnnnnnnnnnnnnnnnnnnnnnnnnnnnnnnnnnnnnnnnnnnnnnnnnnnnnnnnnnnnnnnnnnnnnnnnnnnnnnnnnnnnnnnnnnnnnnnnnnnnnnnnnnnnnnnnnnnnnnnnnnnnnnnnnnnnnnnnnnnnnnnnnnnnnnnnnnnnnnnnnnnnnnnnnnnnnnnnnnnnnnnnnnnnnnnnnnnnnnnnnnnnnnnnnnnnnnnnnnnnnnnnnnnnnnnnnnnnnnnnnnnnnnnnnnnnnnnnnnnnnnnnnnnnnnnnnnnnnnnnnnnnnnnnnnnnnnnnnnnnnnnnnnnnnnnnnnnnnnnnnnnnnnnnnnnnnnnnnnnnnnnnnnnnnnnnnnnnnnnnnnnnnnnnnnnnnnnnnnnnnnnnnnnnnnnnnnnnnnnnnnnnnnnnnnnnnnnnnnnnnnnnnnnnngaaaaacttcattgctgtcagcgctgccaaccgcttcaagaagatcagcagctcaggggcactgatggctctgggggtctgagccctgggcacagctgaggcctggacgcagccacactgtggccggggctgaggccacacagcccagaaggccagagaaggcagccagatacccagggcaggctcgccaggacaaggctgtgccaggctgggaggctcggggctccccatgcccccgcgcagtgaccgcttccccgatgtgagccgcctcggagtgtggcc

SEQ ID NO: 33060 - DNA, 70 bp, Macaca Mulatta
cttccagagagcaatatggctggttccccaacatgcttcaccttcatctatatcctttggcagctcacag

SEQ ID NO: 33061 - DNA, 294 bp, Macaca Mulatta
  misc_feature (1)...(294): n = A,T,C or G
atgaagggaccagtaattctctatctacttgtacaaaatctggtccatctcccctttcctctccaaatgggaagttaacagtagcaagtcctaagcgtgggcaaaagagggaagaaggatggaaagaagttgtaagaaggtntcaaagaaagtatctgttccatcaactgtgatatccagagtgattggaagaggaggctgtaatatcaacgctattcgggagtttactggtgcacacatagatatcgataaacagaaagacaagactggagaccggataatcactataaggca

SEQ ID NO: 33062 - DNA, 561 bp, Macaca Mulatta
aaaagaaaaactccttaccattgagaccagtgaggaactcttgcctccaccagttcaaactctaattaaaggccatgcctctgctccatacttcggaaaggaagaaccctcagtggctcccagcagcactggtaaaacctttcagccaggatcctgggtgccacaagatggcaagagccacagtcaatgaatgcattatggtcaaatcttttcatgtatatggatgtgactattttaacaaataaaagaagtcaaaacttaattaccttgtattttctgaatgtacaatagtttcctattccattaatcttaagagttcatttttagtatgcacaagaaatgtgagattatgtactatagaaacctaactacttttagattaaaatccttcatttgacttagtcattgttatttatgaatttgcttagatttgtttttccttctttggattaatcccttgagaaggatcctgtagctgtgaatgcttagtacattttggatctttatgatcatttgggaaccactcatagatataactgggtacaaataatgagggtaaaa

SEQ ID NO: 33063 - DNA, 1024 bp, Macaca Mulatta
tcatctgcctccacccagcctcagttcattaacactgttcctgagctcatggacatcaattatagaccccacaacgtgtgtcctgaagacagaatgtgccagaccagagctattgtcttgagaaccctctccttggctttcctgctgagtctccgaggagctggggccatcaaggcagaccatgtatcaacttatgccgcgtttgtacagacacatagaccaacaggggagtttatgtttgagtttgatgaagatgagcagttctatgtggatctggacaagaaggagaccgtctggcatctggaggagtttggccgagccttttcctttgaggctcagggcgggctggctaacattgctatattgaacaacaacttgaatatcacgatccagcgttccaactacactcaggccgccaatgatccccctgaggtgaccgtgtttcccaaggagcctgtggagctgggccaacccaacatcctcatctgccacattgacaagttcttccctccagtgctcaacgtcacgtggctgtgcaacgggcagccggccactgagggtgtcgctgagagcctcttcctgcccagaacagactacagcttccacaagttccattacttgacctttgtgccctcagccgaggactactatgattgcagggtggagcactggggcttggaccagccgctcctcaaacactgggaggcccaagagccaatccagatgcctgagacaacggagactgtgctctgtgccctgggcctggtgctgggcctagtgggcatcatcgtgggaactgtcctcatcataaagtctctgcgatctggccgtgatccccgggcccaggggcccctgtgaagtactgtaaaggtgggaatgtaaagaggaggctctaggattcgtagaatgtaaggaagggaggaaaaattcaatctgataattgtccattgatcttctaatgggttaaaagcattcagccgcataacaacaacaacattgataactaacagtagttaatatgctc

SEQ ID NO: 33064 - DNA, 430 bp, Macaca Mulatta
tgggagagaggccaggacccctcagctctctgccaccatttatgtgcctcccttaccccccagctttctttctgcaaatggtgctactcttggtctcccacaggaaaaggcctcccccttcttagccccatttactccctttgtggaaggcactgcttgctctgtttcatcagggggtggcctatccagattggtgctatggggggggtgtgacccctacctcctccctctggaggtgatgtggatcctcaatggagggaattgtgctgggctagggaaaggggagggactagaccggacacactggctttgaaactcaccaatctctataccaccataaaaacctcaccttggtaggcaccagaactctgtgtgttgactcatcttttggatctcctctgggagtgtgggtgcactggcggctgagtgt

SEQ ID NO: 33065 - DNA, 835 bp, Macaca Mulatta
  misc_feature (1)...(835): n = A,T,C or G
aaatacaacacgctgaagaatttcttatcaaacccgaatccaaagttgctaagttggacacgtctcagtggccccttctgctaaagnagaattttgataagctgaatgtaaggacaacacactatacacctcttgcatgtggttcnnnnnnnnnnnnnnnnnnnnnnnnnnnnnnnnnnnnnnnnnnnnnnnnnnnnnnnnnnnnnnnnnnnnnnnnnnnnnnnnnnnnnnnnnnnnnnnnnnnnnnnnnnnnnnnnnnnnnnnnnnnnnnnnnnnnnnnnnnnnnnnnnnnnnnnnnnnnnnnnnnnnnnnnnnnnnnnnnnnnnnnnnnnnnnnnnnnnnnnnnnnnnnnnnnnnnnnnnnnnnnnnnnnnnnnnnnnnnnnnnnnnnnnnnnnnnnnnnnnnnnnnnnnnnnnnnnnnnnnnnnnnnggccctagaaactctgacaggtgccctattccagcgacccccacttattgctgcagtaaagaggcagctccgagtgaggaccatctacgagagcaaaatgattgaatacgatcctgaaagaagattagnnnnnnnnnnnnnnnnnnnnnnnnnnnnnnnnnnnnnnnnnnnnnnnnnnnnnnnnnnnnnnnnnnnnnnnnnnnnnnnnnnnnnnnnnnnnnnnnnnnnnnnnnnnnnnnnnnnnnnnnnnnnnnnnaggaccacatggtgacaatgcacgatgtgcttgatgctcagtggctatatgataaccacaaggatgagagttacctgcggcgagttgtttaccctttggaaaagttgttgacatctcataaacggctggttatgaaagacagtgcagta

SEQ ID NO: 33066 - DNA, 4188 bp, Macaca Mulatta
  misc_feature (1)...(4188): n = A,T,C or G
atggcggctgagtgggcttctcgtttctggctttgggctgtgctgctgattcctgtggccgcggtctacgaagaccaagtgggcaagtttgattgnnnnnnnnnnnnnnnnnnnnnnnnnnnttgcctccttggaattttcccctggatctaagaagttggttgtagccacagagaagaatgtgattgcagcattaaattccagaactggggagatctntgtggcgccatgttcacaagggcacggcagaaggggctgtggatgccatgctgcttcacggacaggnnnnntcactgtgtccagtggaggccgaatcatgcgttcctgggagactaacatcgggggcctgaattgggagataaccttggacagtggcagnnnnnnnnnnnnnnnnnnnnnnnnnnnnnnnnnnnnnnnnnnnnnnnnnnnnnnnnnnnnnnnnnnnnnnnnnnnnnnnnnnnnnnnnnnnnnnnnnnnnnnnnnnnnnnnnnnnnnnnnnnnnnnnnnnnnnnnnnnnnnnnnnnnnnnnnnnnnnnnnnnnnnnnnnnnnnnnnnnnnnnnnnnnnnnnnnnnnnnnnnnnnnnnnnnnnnnnnnnnnnnnnnnnnnnnnnnnnnnnnnnnnnnnnnnnnnnnnnnnnnnnnnnnnnnnnnnnnnnnnnnnnnnnnnnnnnnnnnnnnnnnnnnnnnnnnnnnnnnnnnnnnnnnnnnnnnnnnnnnnnnnnnnnnnnnnnnnnnnnnnnnnnnnnnnnnnnnnnnnnnnnnnnnnnnnnnnnnnnnnnnnagtctctcgacttagaatttggaagtggattccaaccccgggtcctgcccacccagcccaacccagtggacgcttcccgggcccagttcttcctgcacttgtccccaagccactatgctctgctgcagtaccattacggcaccctgagtttgcttaaaaacttcccacagnnnnnnnnnnnnnnnnnnnnnnnnnnnnnnnnnnnnnnnnnnnnnnnnnnnnnnnnnnnnnnnnnnnnnnnnnnnnnnnnnnnnnnnnnnnnnnnnnnnnnnnnnnnnnnnnnnnnnnnnnnnnnnnnnnnnnnnnnnnnnnnnnnnnnnnnnnnnnnnnnnnnnnnnnnnnnnnnnnnnnnnnnnnnnnnnnnnnnnnnnnnnnnnnnnnnnnnnnnnnnnnnnnnnnnnnnnnnnnnnnnnnnnnnnnnnnnnnngctgtatatccaggtgttcttgaagaaggatgactcagtgggctaccgggctttggtgcagacggaggatcatctgctacttttcctgcagcagttggcagggaaggtggtactgtggagccgtgaggagtccctggcagaagtggtgtgcctagagatggtggacctccccctgactggggcacaggccgagctggaaggagaatttggcaaaaaggcannnnnnnnnnnnnnnnnnnnnnnnnnnnnnnnnnnnnnnnnnnnnnnnnnnnnnnnnnnnnnnnnnnnnnnnnnnnnnnnnnnnnnnnnnnnnnnnnnnnnnnnnnnnnnnnnnnnnnnnnnnnnnnnnnnnnnnnnnnnnnnnnnnnnnnnnnnnnnnnnnnnnnnnnnnnnnnnnnnnnnnnnnnnnnnnnnnnnnnnnnnnnnnnnnnnnnnnnnnnnnnnnnnnnnnnnnnnnnnnnnnnnnnnnnnnnnnnnnnnnnnnnnnnnnnnnnnnnnnnnnnnnnnnnnnnnnnnnnnnnnnnnnnnnnnnnnnnnnnnnnnnnnnnnnnnnnnnnnnnnnnnnnnnnnnnnnnnnnnnnnnnnnnnnnnnnnnnnnnnnnnnnnnnnnnnnnnnnnnnnnnnnnnnnnnnnnnnnnnnnnnnnnnnnnnnnnnnnnnnnnnnnnnnnnnnnnnnnnnnnnnnnnnnnnnnnnnnnnnnnnnnnnnnnnnnnnnnnnnnnnnnnnnncaaggtcacagcttttccagccactcggaatgtcttgcgacagctacacgagcttgccccttccattttcttctatttggtggatgcggagcagggacggctatgtggatatcggcttcgaaagnnnnnnnnnnnnnnnnnnnnnnnnnnnnnnnnnnnnnnnnnnnnnnnnnnnnnnnnnnnnnnnnnnnnnnnnnnnnnnnnnnnnnnnnnnnnnnnnnnnnnnnnnnnnnnnnnnnnnnnnnnnnnnnnnnnnnnnnnnnnnnnnnnnnnnnnnnnnnnnnnnnnnnnnnnnnnnnnnnnnnnnnnnnnnnnnnnnnnnnnnnnnnnnnnnnnnnnnnnnnnnnnnnnnnnnnnnnnnnnnnnnnnnnnnnnnnnnnnnnnnnnnnnnnnnnnnnnnnnnnnnnnnnnnnnnnnnnnnnnnnnnnnnnnnnnnnnnnnnnnnnnnnnnnnnnnnnnnnnnnnnnnnnnnnnnnnnnnnnnnnnnnnnnnnnnnnnnnnnnnnnnnnnnnnnnnnnnnnnnnnnnnnnnnnnnnnnnnnnnnnnnnnnnnnnnnnnnnnnnnnnnnnnnnnnnnnnnnnnnnnnnnnnnnnnnnnnnnnnnnnnnnnnnnnnnnnnnnnnnnnnnnnnnnnnnnnnnnnnnnnnnnnnnnnnnnnnnnnnnnnnnnnnnnnnnnnnnnnnnnnnnnnnnnnnnnnnnnnnnnnnnnnnnnnnnnnnnnnnnnnnnnnnnnnnnnnnnnnnnnnnnnnnnnnnnnnnnnnnnnnnnnnnnnnnnnnnnnnnnnnnnnnnnnnnnnnnnnnnnnnnnnnnnnnnnnnnnnnnnnnnnnnnnnnnnnnnnnnnnnnnnnnnnnnnnnnnnnnnnnnnnnnnnnnnnnnnnnnnnnnnnnnnnnnnnnnnnnnnnnnnnnnnnnnnnnnnnnnnnnnnnnnnnnnnnnnnnnnnnnnnnnnnnnnnnnnnnnnnnnnnnnnnnnnnnnnnnnnnnnnnnnnnnnnnnnnnnnnnnnnnnnnnnnnnnnnnnnnnnnnnnnnnnnnnnnnnnnnnnnnnnnnnnnnnnnnnnnnnnnnnnnnnnnnnnnnnnnnnnnnnnnnnnnnnnnnnnnnnnnnnnnnnnnnnnnnnnnnnnnnnnnnnnnnnnnnnnnnnnnnnnnnnnnnnnnnnnnnnnnnnnnnnnnnnnnnnnnnnnnnnnnnnnnnnnnnnnnnnnnnnnnnnnnnnnnnnnnnnnnnnnnnnnnnnnnnnnnnnnnnnnnnnnnnnnnnnnnnnnnnnnnnnnnnnnnnnnnnnnnnnnnnnnnnnnnnnnnnnnnnnnnnnnnnnnnnnnnnnnnnnnnnnnnnnnnnnnnnnnnnnnnnnnnnnnnnnnnnnnnnnnnnnnnnnnnnnnnnnnnnnnnnnnnnnnnnnnnnnnnnnnnnnnnnnnnnnnnnnnnnnnnnnnnnnnnnnnnnnnnnnnnnnnnnnnnnnnnnnnnnnnnnnnnnnnnnnnnnnnnnnnnnnnnnnnnnnnnnnnnnnnnnnnnnnnnnnnnnnnnnnnnnnnnnnnnnnnnnnnnnnnnnnnnnnnnnnnnnnnnnnnnnnnnnnnnnnnnnnnnnnnnnnnnnnnnnnnnnnnnnnnnnnnnnnnnnnnnnnnnnnnnnnnnnnnnnnnnnnnnnnnnnnnnnnnnnnnnnnnnnnnnnnnnnnnnnnnnnnnnnnnnnnnnnnnnnnnnnnnnnnnnnnnnnnnnnnnnnnnnnnnnnnnnnnnnnnnnnnnnnnnnnnnnnnnnnnnnnnnnnnnnnnnnnnnnnnnnnnnnnnnnnnnnnnnnnnnnnnnnnnnnnnnnnnnnnnnnnnnnnnnnnnnnnnnnnnnnnnnnnnnnnnnnnnnnnnnnnnnnnnnnnnnnnnnnnnnnnnnnnnnnnnnnnnnnnnnnnnnnnnnnnnnnnnnnnnnnnnnnnnnnnnnnnnnnnnnnnnnnnnnnnnnnnnnnnnnnnnnnnnnnnnnnnnnnnnnnnnnnnnnnnnnnnnnnnnnnnnnnnnnnnnnnnnnnnnnnnnnnnnnnnnnnnnnngtgggaaactggcatactgtttatagcactgccgattggctaagccactgtgtctctgctacaaataaagaaagcctaaaagttttccttggtcatagagttggggaatgacagaatttttctttactgtgaaatgtatgtacagagtagaccacctctagccctgtggcgaaagaggtacactcgaatgtctgaataaagcaagtgacgaatgac

SEQ ID NO: 33067 - DNA, 330 bp, Macaca Mulatta
cagtctcagctgacgcagccggcctcagtgtccaagggcttgagacagacggccacgctcacctgcactggaaacagcaacaatgttggcaaccagggagcagcttggctgcagcagcaccagggccaccctcccaaactgctgtcctacaggactaacgaccggccctcggggatctcagagagattctctgcatccaggtcaggaaacacagcctccctgaccatcgccggactccagcctgaggatgaggctgactattactgcgcagatgtggacagcagtctcagtgctcgggtgttcggcggagggacccggctgaccgtccta

SEQ ID NO: 33068 - DNA, 385 bp, Macaca Mulatta
atggccgacagcgccagtgcgggcagctcgggcccctggtggaaatcgctcacaaacagcaggaagaaaagcaaggaagctgcagtgggggtgcagcctccagcccagcccgctccaggggagcccacgccacttgcgccgcccagcccggactgcaccagcagctccagggagaatcagcaccccaatctcctcgggggcgccggcgaaccccccaaaccagacaagttatatggggacaaatccggcagcagccgccgcaatttgaagatctcgcgctccggccgctttaaggagaagaggaaagtgcgcgccacgctgctcccggaggcgggcaggtccccggaggaggcgggcttccctggtgacccccacgaggacaagc

SEQ ID NO: 33069 - DNA, 2387 bp, Macaca Mulatta
  misc_feature (1)...(2387): n = A,T,C or G
ctatacagagattcacggatccatccgggtggtccgggcaccactggcgcccctctgcggcgattcccccgttccattttctgaagccacaggtcagaagccgctgtagaacgctttgccaaactccagaagggaacgtaagctgcagctacctgccgcgcaggcgcaagcctttctttccgcacaaagaccgtgggaggaggggtcggctcaagcgctcggtgtnnnnnnnnnnnnnnnnnnnnnnnnnnnnnnnnnnnnnnnnnnnnnnnnnnnnnnnnnnnnnnnnnnnnnnnnnnnnnnnnnnnnnnnnnnnnnnnnnnnnnnnnnnnnnnnnnnnnnnnnnnnnnnnnnnnnnnnnnnnnnnnnnnnnnnnnnnnnnnnnnnnnnnnnnnnnnnnnnnnnnnnnnnnnnnnnnnnnnnnnnnnnnnnnnnnnnnnnnnnnnnnnnnnnnnnnnnnnnnnnnnnnnnnnnnnnnnnnnnnnnnnnnnnnnnnnnnnnnnnnnnnnnnnnnnnnnnnnnnnnnnnnnnnnnnnnnnnnnnnnnnnnnnnnnnnnnnnnnnnnnnnnnnnnnnnnnnnnnnnnnnnnnnnnnnnnnnnnnnnnnnnnnnnnnnnnnnnnnnnnnnnnnnnnnnnnnnnnnnnnnnnnnnnnnnnnnnnnnnnnnnnnnnnnnnnnnnnnnnnnnnnnnnnnnnnnnnnnnnnnnnnnnnnnnnnnnnnnnnnnnnnnnnnnnnnnnnnnnnnnnnnnnnnnnnnnnnnnnnnnnnnnnnnnnnnnnnnnnnnnnnnnnnnnnnnnnnnnnnnnnnnnnnnnnnnnnnnnnnnnnnnnnnnnnnnnnnnnnnnnnnnnnnnnnnnnnnnnnnnnnnnnnnnnnnnnnnnnnnnnnnnnnnnnnnnnnnnnnnnnnnnnnnnnnnnnnnnnnnnnnnnnnnnnnnnnnnnnnnnnnnnnnnnnnnnnnnnnnnnnnnnnnnnnnnnnnnnnnnnnnnnnnnnnnnnnnnnnnnnnnnnnnnnnnnnnnnnnnnnnnnnnnnnnnnnnnnnnnnnnnnnnnnnnnnnnnnnnnnnnnnnnnnnnnnnnnnnnnnnnnnnnnnnnnnnnnnnnnnnnnnnnnnnnnnnnnnnnnnnnnnnnnnnnnnnnnnnnnnnnnnnnnnnnnnnnnnnnnnnnnnnnnnnnnnnnnnnnnnnnnnnnnnnnnnnnnnnnnnnnnnnnnnnnnnnnnnnnnnnnnnnnnnnnnnnnnnnnnnnnnnnnnnnnnnnnnnnnnnnnnnnnnnnnnnnnnnnnnnnnnnnnnnnnnnnnnnnnnnnnnnnnnnnnnnnnnnnnnnnnnnnnnnnnnnnnnnnnnnnnnnnnnnnnnnnnnnnnnnnnnnnnnnnnnnnnnnnnnnnnnnnnnnnnnnnnnnnnnnnnnnnnnnnnnnnnnnnnnnnnnnnnnnnnnnnnnnnnnnnnnnnnnnnnnnnnnnnnnnnnnnnnnnnnnnnnnnnnnnnnnnnnnnnnnnnnnnnnnnnnnnnnnnnnnnnnnnnnnnnnnnnnnnnnnnnnnnnnnnnnnnnnnnnnnnnnnnnnnnnnnnnnnnnnnnnnnnnnnnnnnnnnnnnnnnnnnnnnnnnnnnnnnnnnnnnnnnnnnnnnnnnnnnnnnnnnnnnnnnnnnnnnnnnnnnnnnnnnnnnnnnnnnnnnnnnnnnnnnnnnnnnnnnnnnnnnnnnnnnnnnnnnnnnnnnnnnnnnnnnnnnnnnnnnnnnnnnaggtttggtcccaagcagtaaatctccgaaaaggcaattggaaccgactctaaagccattgtaggaccctcaagtgaaggaccctcatgtaaaagagagaccaggcttgctgggtgtgtacatagttatttaaacaagaaactctcagaatgtgtttggaagaggaggagggagaactactgatttatctggatgctactacttactacaggacagatagaatttctggaagcgatgctccaaaggcttgctcccagctgtattatggacctgccttctcatctttatagtgccacaatttatacagtcctgtgtctgacctgtcatttcatagcctgcagttcttgccattggcacacttagtttgtcttcacccaccagcttcgttccagcctatgaaggggaaagatttgcagttttgccaaatctgaatcagttcccacttccccctgtggttttttagaggggtttatcctctcgctaatgtcagttaaataacttactctgccccacttgatttcactggtaagagaagaatgagaatgaaacacttcaaggttttatttgaggggacttagctgccatatgatggagaaacatgtagtgtaaaaggtttttctctaggatcgtttgtcagaattctccagg

SEQ ID NO: 33070 - DNA, 3555 bp, Macaca Mulatta
  misc_feature (1)...(3555): n = A,T,C or G
caaaaacagggggatggagggagcagcagcagtagcaacatcatcattaacagcagataatgattttaaacctatgggtattggtctaccccattcagaaaacaaccaagataaaggcctgcctcggccagataatagagataatagattagaaggcaatagaggcagtagctcatcttacagaggtcctgggcaaagcagaatagaagacacacgggataaaggtctagtaaacagaggtcgcggccaggcaatcagtcgaggcccaggattggtcaagcaagaagactttcgggataagatgatgggtagaagagaagacagtagagagaagatgaacagaggagaaggtagccgggacagagggttggtgagacctggaagcagtcgggagaaagtgccaggtggtctgcaagggagccaggacaggggtggagctggcagtcgagaaaggggaccacctcggagggctggcagtcaggagagaggacctcttcgaagggctgggagtagagagagagtaccaccccgaagagctgggagcagggagagaggaccacctcgagggcctggcagtcgagaaaggggactgggaagatcagagtttggtcgtgatagaggtccattcagaccagaaccaggagatggtggggaaaaaatgtatccatatcaccgagatgagcctcctagggctccatggaaccatggagaagagcgagggcatgaagnnnnnnnnnnnnnnnnnnnnnnnnnnnnnnnnnnnnnnnnnnnnnnnnnnnnnnnnnnnnnnnnnnnnnnnnnnnnnnnnnnnnnnnnnnnnnnnnnnnnnnnnnnnnnnnnnnnnnnnnnnnnnnnnnnnnnnnnnnnnnnnnnnnnnnnnnnnnnnnnnnnnnnnnnnnnnnnnnnnnnnnnnnnnnnnnnnnnnnnnnnnnnnnnnnnnnnnnnnnnnnnnnnnnnnnnnnnnnnnnnnnnnnnnnnnnnnnnnnnnnnnnnnnnnnnnnnnnnnnnnnnnnnnnnnnnnnnnnnnnnnnnnnnnnnnnnnnnnnnnnnnnnnnnnnnnnnnnnnnnnnnnnnnnnnnnnnnnnnnnnnnnnnnnnnnnnnnnnnnnnnnnnnnnnnnnnnnnnnnnnnnnnnnnnnnnnnnnnnnnnnnnnnnnnnnnnnnnnnnnnnnnnnnnnnnnnnnnnnnnnnnnnnnnnnnnnnnnnnnnnnnnnnnnnnnnnnnnnnnnnnnnnnnnnnnnnnnnnnnnnnnnnnnnnnnnnnnnnnnnnnnnnnnnnnnnnnnnnnnnnnnnnnnnnnnnnnnnnnnnnnnnnnnnnnnnnnnnnnnnnnnnnnnnnnnnnnnnnnnnnnnnnnnnnnnnnnnnnnnnnnnnnnnnnnnnnnnnnnnnnnnnnnnnnnnnnnnnnnnnnnnnnnnnnnnnnnnnnnnnnnnnnnnnnnnnnnnnnnnnnnnnnnnnnnnnnnnnnnnnnnnnnnnnnnnnnnnnnnnnnnnnnnnnnnnnnnnnnnnnnnnnnnnnnnnnnnnnnnnnnnnnnnnnnnnnnnnnnnnnnnnnnnnnnnnnnnnnnnnnnnnnnnnnnnnnnnnnnnnnnnnnnnnnnnnnnnnnnnnnnnnnnnnnnnnnnnnnnnnnnnnnnnnnnnnnnnnnnnnnnnnnnnnnnnnnnnnnnnnnnnnnnnnnnnnnnnnnnnnnnnnnnnnnnnnnnnnnnnnnnnnnnnnnnnnnnnnnnnnnnnnnnnnnnnnnnnnnnnnnnnnnnnnnnnnnnnnnnnnnnnnnnnnnnnnnnnnnnnnnnnnnnnnnnnnnnnnnnnnnnnnnnnnnnnnnnnnnnnnnnnnnnnnnnnnnnnnnnnnnnnnnnnnnnnnnnnnnnnnnnnnnnnnnnnnnnnnnnnnnnnnnnnnnnnnnnnnnnnnnnnnnnnnnnnnnnnnnnnnnnnnnnnnnnnnnnnnnnnnnnnnnnnnnnnnnnnnnnnnnnnnnnnnnnnnnnnnnnnnnnnnnnnnnnnnnnnnnnnnnnnnnnnnnnnnnnnnnnnnnnnnnnnnnnnnnnnnnnnnnnnnnnnnnnnnnnnnnnnnnnnnnnnnnnnnnnnnnnnnnnnnnnnnnnnnnnnnnnnnnnnnnnnnnnnnnnnnnnnnnnnnnnnnnnnnnnnnnnnnnnnnnnnnnnnnnnnnnnnnnnnnnnnnnnnnnnnnnnnnnnnnnnnnnnnnnnnnnnnnnnnnnnnnnnnnnnnnnnnnnnnnnnnnnnnnnnnnnnnnnnnnnnnnnnnnnnnnnnnnnnnnnnnnnnnnnnnnnnnnnnnnnnnnnnnnnnnnnnnnnnnnnnnnnnnnnnnnnnnnnnnnnnnnnnnnnnnnnnnnnnnnnnnnnnnnnnnnnnnnnnnnnnnnnnnnnnnnnnnnnnnnnnnnnnnnnnnnnnnnnnnnnnnnnnnnnnnnnnnnnnnnnnnnnnnnnnnnnnnnnnnnnnnnnnnnnnnnnnnnnnnnnnnnnnnnnnnnnnnnnnnnnnnnnnnnnnnnnnnnnnnnnnnnnnnnnnnnnnnnnnnnnnnnnnnnnnnnnnnnnnnnnnnnnnnnnnnnnnnnnnnnnnnnnnnnnnnnnnnnnnnnnnnnnnnnnnnnnnnnnnnnnnnnnnnnnnnnnnnnnnnnnnnnnnnnnnnnnnnnnnnnnnnnnnnnnnnnnnnnnnnnnnnnnnnnnnnnnnnnnnnnnnnnnnnnnnnnnnnnnnnnnnnnnnnnnnnnnnnnnnnnnnnnnnnnnnnnnnnnnnnnnnnnnnnnnnnnnnnnnnnnnnnnnnnnnnnnnnnnnnnnnnnnnnnnnnnnnnnnnnnnnnnnnnnnnnnnnnnnnnnnnnnnnnnnnnnnnnnnnnnnnnnnnnnnnnnnnnnnnnnnnnnnnnnnnnnnnnnnnnnnnnnnnnnnnnnnnnnnnnnnnnnnnnnnnnnnnnnnnnnnnnnnnnnnnnnnnnnnnnnnnnnnnnnnnnnnnnnnnnnnnnnnnnnnnaggtatatttggctgaaatgagtgcagataaccagacttgtggcaagagaaatattcatggaagaaagcttaaagaaataaataannnnnnnnnnnnnnnnnnnnnnnnnnnnnnnnnnnnnnnnnnnnnnnnnnnnnnnnnnnnnnnnnnnnnnnnnnnnnnnnnnnnnnnnnnnnnnnnnnnnnnnnnnnnnnnnnnnnnnnnnnnnnnnnnnnnnnnnnnnnnnnnnnnnnnnnnnnnnnnnnnnnnnnnnnnnnnnnnnnnnnnnnnnnnnnnnnnnnnnnnnnnnnnnnnnnnnnnnnnnnnnnnnnnnnnnnnnnnnnnnnnnnnnnnnnnnnnnnnnnnnnnnnnnnnnnnnnnnnnnnnnnnnnnnnnnnnnnnnnnnnnnnnnnnnnnnnnnnnnnnnnnnnnnnnnnnnnnnnnnnnnnnnngccaaggcctcacggagcttctttgtgtgtcaccttgcttccacgtttcagttattgttttgtttctactgctttagaaaaaataaagttctccagtgtccccaagaggtattagaatcttgctgtgcccaagcaagacgtta

SEQ ID NO: 33071 - DNA, 834 bp, Macaca Mulatta
  misc_feature (1)...(834): n = A,T,C or G
ggatacttggtaatttcagatgccgcagtatagcaaagggtgaacatgttttcaaccctttaattttttaagatatttgaagaccaactaactactccttaatatttatcaatggattaagaagtttaagattttgcagatttatcaatttgggtttttgtattgaggttgtcttgcggttttataagtgtccctttatatttaaatttgaaagttttaagcactgatgttaatgtgattgatcagcatgggcatatgtaaaatgtccttttctggttgcctctctgtgccattgtgttcagatacttataccataattaaacagtaaggtatagatcttgctgagtttggcatagatagtgcactcatttaatctgtgcctctcaaaacttcagaatattagaatattaccacaaataatttttggtgaaactattgagatattaaaatttttgaaatcactgctgttacctgttatagaaaatagtgtgggcttagtctagtctctgtgtaactggttacattttgatggttgtctatactcaactggatatgtatatgtaaattagaaaatacatacctatccagacataaatgttaagtaaccctttttttctttcctccactacataaatttgtaagctcatcattctttcccttaatcccttttcctaaccttggttgcaacccagtttggaaccttccccaaattattttattggttttggggacattaaatgggcttccgaaaataacaataattttgaaaacaatcaccaagaggtgggnnnnnnnnnnnnnnnnnnnnnnnngttggaaaatataaatttaatc

SEQ ID NO: 33072 - DNA, 659 bp, Macaca Mulatta
cccttgcctgtccccagccaactcttgaagaactggtggggggttggagaaaaatgtttggtcatctggttcgagagtcagggtgtaagccctaaggtccagccagaattaaggtccaagagcaagagatgtgttcctgccccttgccggcagccccacacccaaaccccctccatttcagatcctgaatttaagccctaaagagaaagggagggggttagaaagctatttttaggtgcctttttgaagctcttgccataccggtgtgctctggggggtttccctatgcccggggtcgccctgaaggtgtgggagcaggctggggcaaggggagctggccaggcctatggtcttgattcttgtgatgcaacagaatgtagagtctaaacttggatgagatgcacgaagccactcagagaagaaagttctctgctctccaaagcaccaccaataaacatgtcatctaagcaaaaagtcctctgctctatccatgaggcttcagaaatagcccttgtctacccaccaaccatccattccaagctgctcctgtgaaaagaaggcatgatgtcccagggacagtgtggggactcctggcccaggtctggaataatgctatccagggggctaagacagagcatctccagcaatggtaagggggt

SEQ ID NO: 33073 - DNA, 705 bp, Macaca Mulatta
  misc_feature (1)...(705): n = A,T,C or G
gtgtggcggtcagatgtccagtttgcctggaagcacctcttgtgtccagatgngtctctttcagacgtctggggctcttgatcctggcactgctggccctcctcaccctactgggtgttgttctggccctcacctgccggcgcccacagtcaggnnnnnnnnnnnnnnnnnnnnnnnnnnnnnnnnnnnnnnnnnnnnnnnnnnnnnnnnnnnnnnnnnnnnnnnnnnnnnnnnnnnnnnnnnnnnnnnnnnnnnnnnnnnnnnnnnnnnnnnnngtggacctgtgggaggggaggcacgtggcgcgcgtgggcccactgccgtggctctgggccgcgcgggcgcgcgtagcgcgggagcagggcacggtgctgctgctgtggagcagcgcctgccttcgcccgnnnnnnnnnnnnnnnnnnnnnnnnnnnnnnnnnnnnnnnnnnnnnnnnnnnnnnnnnnnnnnnnnntgctgctcgcttacttcagtcgcctctgcaccaagggcgacatccccccgccgctgcgcgccctgcctcgctaccgcctgttgcgcgacctgccgcgcctgctgcgggcgctggaagcgcggccttccgcagaggccaccagctggggccgcctcggtgcgcagcagcgcagacggagtcgcctagagctgtgcagcctgctggaacgagaggccgcccgactagacctaggttg

SEQ ID NO: 33074 - DNA, 719 bp, Macaca Mulatta
caccttacagaacagtgcccttcgtaaatgtctggtgagttgaggaatgagaactaattctccttcccctcctggtctgtttaggttctaggagcagccgttgtgaaccagccactctccatacaggtgatattttcaaaccccctctcggagcaggttgaggactgtgtgctgaccgtggaaggaagtggcctcttcaagaaacagcagaaagtcctgtaagtgctgcaagtgctcagccttctcttctgttttcccctccgtgagattagcactatccttctccctggacatgggctcctgggccgactcacgacactggggaagggaaagcggaagcactccctcgcactcaggaagctgggtggaaaagggctctggggtcatcatcatgcctgtggttttctggcatgccgcattctctgttgcagccttggagtcctcaaaccccaacatcgagcgagcatcattctggagaccgtccccttcaagagtggccaaaggcagatccaagctaatatgagaagcaacaagtttaaggacatcaagggttacaggaacgtttatgtagactttgcattataaattctggagcaacgtgccggacgtgtgcctttcaagcttcaggaaaaggagcaagttcaaatgcgagctgcgccattccccaccacgacagaggcttcacagggctccagcgagagcagcagaggggatgacgt

SEQ ID NO: 33075 - DNA, 2267 bp, Macaca Mulatta
  misc_feature (1)...(2267): n = A,T,C or G
aagagggaagtagtggttgtcgcgggggagccggaaagatggtggttaccagatccgcacgggctaaggccagcatccaagccgcgtcggctgaaagttccgggcnnnnnnnnnnnnnnnnnnnnnnnnnnnnnnnnnnnnnnnnnnnnnnnnnnnnnnnnnnnnnnnnnnnnnnnnnnnnnnnnnnnnnnnnnnnnnnnnnnnnnnnnnnnnnnnnnnnnnnnnnnnnnnnnnnnnnnnnnnnnnnnnnnnnnnnnnnnnnnnnnnnnnnnnnnnnnnnnnnnnnnnnnnnnnnnnnnnnnnnnnnnnnnnnnnnnnnnnnnnnnnnnnnnnnnnnnnnnnnnnnnnnnnnnnnnnnnnnnnnnnnnnnnnnnnnnnnnnnnnnnnnnnnnnnnnnnnnnnnnnnnnnnnnnnnnnnnnnnnnnnnnnnnnnnnnnnnnnnnnnnnnnnnnnnnnnnnnnnnnnnnnnnnnnnnnnnnnnnnnnnnnnnnnnnnnnnnnnnnnnnnnnnnnnnnnnnnnnnnnnnnnnnnnnnnnnnnnnnnnnnnnnnnnnnnnnnnnnnnnnnnnnnnnnnnnnnnnnnnnnnnnnnnnnnnnnnnnnnnnnnnnnnnnnnnnnnnnnnnnnnnnnnnnnnnnnnnnnnnnnnnnnnnnnnnnnnnnnnnnnnnnnnnnnnnnnnnnnnnnnnnnnnnnnnnnnnnnnnnnnnnnnnnnnnnnnnnnnnnnnnnnnnnnnnnnnnnnnnnnnnnnnnnnnnnnnnnnnnnnnnnnnnnnnnnnnnnnnnnnnnnnnnnnnnnnnnnnnnnnnnnnnnnnnnnnnnnnnnnnnnnnnnnnnnnnnnnnnnnnnnnnnnnnnnnnnnnnnnnnnnnnnnnnnnnnnnnnnnnnnnnnnnnnnnnnnnnnnnnnnnnnnnnnnnnnnnnnttgtaaggatttgaatgaagatgccaatggaataaccgttgaggggaaagaaattaatgagaaaagttctcagctgaagaatctttctgaacttcaggacactagccttcaacagttactttctcagcgacattcaaccccccaaaataaaaatgctgtatcagtgcactctaatctgaactctgaggctgtaatgaaatcattaactcaaacatttgcaactgtggaagtaggcagatggaatgacaagaaaaaaagtcccataaaagcaagtgacctgacagagtttggtgattgtggtggtagtgatgatgaagaagagtccacagttataagtgtcagtgaagacatgaacagtgaagggaatgtcgattttgaatgtgataccagactatacacnnnnnnnnnnnnnnnnnnnnnnnnnnnnnnnnnnnnnnnnnnnnagttctcagcagtgatgaaagccaacagtctgaaaacagtgagaatgaagaggatactttatgttttgttgaaaatagtggcgaaagggagtcattaagtggagacacagaaagtctgtcatgtgacaatgcattgtttgtaattgacacaactcctggaatgagtgctgataaaaatttttacttggaagaggaagacaaagcaagtgaggttgccactgaggaaaacaaagaagaggaagagggtgaaaaaagtgaagaagattcatcagaccatgacgaaaatgaagatgagtgtagtgatgaagaagacttactaaatagcacaaaggctaaacttctaaagttgacaagcagcagcatagaccctggtctgagtatcaagcagttgggtggtttggtatattaatttcaatgcagataaactacagtctaacaagagaaccctaacacagatcaaggagaaaaagaaaaatgagcttctgcagaaagctgtcattacacctgattttgaaaaaaaccactgtgttccaccatatagtgaatcaaagtatgaacttcagaaaaaacgcagagaagaacaacaaaaaacagcaggggatggctggtttggtatgaaagctccagaaatgacaaatgaactgaaaaatgatctcaaagcactgaagatgagagccagcatggacccgaaaaggttttacaagaaaaatgatagagatggcttccccaaatagttccaaattggaaccattgttgacaatccagctgattactgccattcacgaattcccaagaagcataggaaaagaactattgtggaagaactgctggctgattctgagttcagaannnnnnnnnnnnnnnnnnagatacagccgaaggaagtacttagagatcatggctg

SEQ ID NO: 33076 - DNA, 85 bp, Macaca Mulatta
agaaacattccccatcacttcagatgccaccaagctcaaacacctgtgggtgacaaacctggtttctctggaaaatgtaaacaag

SEQ ID NO: 33077 - DNA, 149 bp, Macaca Mulatta
  misc_feature (1)...(149): n = A,T,C or G
naccaccaccatcaccaccccccgccggctacctaccagacttccgggaacctgggggtgtcctactcccactcgagttgtggtccaagctatggctcacagaacttcagtgcgccttacagcccctacgcgttaaatcaggaagcaga

SEQ ID NO: 33078 - DNA, 419 bp, Macaca Mulatta
acgagtccctcacccacatctgcctcaagagctttaaactgcatttccctctcatgcgcttcctgctggagtccggagccgcctacaactgctccctgcatggcgcgtcctgctggtctggctttcacatcatctttgagaggctctgttcccacccaggctgcacagaagacgagagccatgcggacctcctgcgcaaagccgagaccgtcctggatctcatggtgaccaactctcagaaactccagctgcccgaaaacttcgatatccaccctgtgggcagcctggcggaaaagatccaggccctccacttctccttgaggcagctggagagctatcccccgcccctcaaacacctgtgccgtgtgtccatccggctctaccttcagccgtggcctgtggatggaaggtcaaagccc

SEQ ID NO: 33079 - DNA, 170 bp, Macaca Mulatta
gtgcccttcctggtggccctggcgctcctgagctccatcctggtgggccttgtcctggtccccggcctcctgcaggggccgctggcgctgaggaacatctccgacacctgcttcaagctgctgctgctgggtctggtcaccttcaacttcgtgggggccttcatgctgga

SEQ ID NO: 33080 - DNA, 471 bp, Macaca Mulatta
ttcctgctgtgccagaaacccttaagaaaaagtgaaggaatttcacagagctgaaggtcaagcacctgagaaagaagtttgcccaaaagatgcttttaaaggcaaggagaaagcttatctatgaaaaagcaaagcactatcacaaggaatataggcagatggacagagctgaaattcaaatggttagaatggcaagaaaagctggtaacccctgtgtacttgcagaacccaaattggcatttgtcatcaggatcacaggtatccatgatgtgagcccaaaggtccaaaaggtgttgcagcttctttgccttcatcaaatcttcaatggaacatttgtggagctcaacaaggcttcagttaacatgctgaggattgtataaccatatatcacatagagtacccaaatctgaagtcagtaaatgaattaatctacaagcatggtatagcaaaaggagtaagaagcaaattgct

SEQ ID NO: 33081 - DNA, 97 bp, Macaca Mulatta
gctctaaattatcttggtattcagcccacaaaggaacaacaccaagccctgagacagcaagtacaagcagactcaaaagggacagtgtcttttggag

SEQ ID NO: 33082 - DNA, 459 bp, Macaca Mulatta
  misc_feature (1)...(459): n = A,T,C or G
ngaatggaactctgaagatcatcgaccgtaaaaagaacattttcaagcttgcccaaggagaatacattgcgccagagaagatagaaaatatctacaacaggagcagaccagtgttacaaatttttgtacatggggagagcttacgnnnnnnnnnnnnnnnnnnnnnnnnnnnnnnnnnnnnnnnnnnnnnnnnnnnnnnnnnnnnnnnnnnnnnnnnnnnnnnnnnnnnnnnnnnnnnnnnnnnnnnnnnnnnnnnnnnnnnnnnnnnnnnnnnnnnnnnnnnnnnnnnnnnnnnnnnnnnnnnnnnnnnnnnnnncaggtcaaagccgtttttcttcatccagaaccattttccattgaaaatgggctcttgacaccaacattgaaagcaaagcgaggagagctttccaaatactttcggacccaaattgacagtctgtatgagcacatccaggatta

SEQ ID NO: 33083 - DNA, 601 bp, Macaca Mulatta
agagaatagcttccagctgcctctttgacacccactccagccctcagccccagttttctcctcctcactaggctgtggcttcagtagttcctttggttgtaactatgggacgggatccacgcatagggaactagttgtttcatagctcccagccaagaaaaaagtgtgagaagttgatgggcagcaaacctgctgtttaacatcagggtgaccacactgagtccagtatgccagttggcaccagatgatatggacttggaatgaggccaacagggttcatcaggatgtaagaggagagaggaatccacaggaccaccagagaggagagggaaccagatctgcaggtcagagatagaggaagtggaaccagagaactgggagggaccaaggttgtaagggtggctaagtcccaccataacatccaagggaacctgggaaatgatggctcatttccacccaaccccaggatttccagagcacacagccacaggcctggacctgggacaaagatgaatgaagaacatggactcatgtgggatgtggtttggctcaggtgtctctgcagttggcaaggagtcagtactcagtccctgagtgtggg

SEQ ID NO: 33084 - DNA, 1417 bp, Macaca Mulatta
  misc_feature (1)...(1417): n = A,T,C or G
aggaaaaaattagaagatcaaaatggaaaatatgctactttggttgatatttttcacacccgggtggaccctcatcgatggatctgaaatgcaacgggattttacctggcacttgagaaaggtaccccggattgtcagtgaaaggactttccatctcaccagccccacatttgaggcagatgctaagatgatggtaaatacagtgtgcggcatcgaatgccagaaagaactcccaactcccagcctttctgaattggaggattatctttcctatgagactgnnnnnnnnnnnnnnnnnnnnnnnnnnnnnnnnnnnnnnnnnnnnnnnnnnnnnnnnnnnnnnnnnnnnnnnnnnnnnnnnnnnnnnnnnnnnnnnnnnnnnnnnnnnnnnnnnnnnnnnnnnnnnnnnnnnnnnnnnnnnnnnnnnnnnnnnnnnnnnnnnnnnnnnnnnnnnnnnnnnnnnnnnnnnnnnnnnnnnnnnnnnnnnnnnnnnnnnnnnnnnnnnnnnnnnnnnnnnnnnnnnnnnnnnnnnnnnnnnnnnnnnnnnnnnnnnnnnnnnnnnnnnnnnnnnnnnnnnnnnnnnnnnnnnnnnnnnnnnnnnnnnnnnnnnnnnnnnnnnnnnnnnnnnnnnnnnnnnnnnnnnnnnnnnnnnnnnnnnnnnnnnnnnnnnnnnnnnnnnnnnnnnnnnnnnnnnnnnnnnnnnnnnnnnnnnnnnnnnnnnnnnnnnnnnnnnnnnnnnnnnnnnnnnncgaagggaggccttccttccggtggacccgggtcaagaatacccacattccgaagggctgggcacgaggaggcatgggggacgctgccttggactatgactatgctcttctggagctgaagcgtgctcacaaaaaaaaatacatggaactcggaatcagcccaacaatcaagaaaatgcctggtggaatgatccacttctcaggatttgataacgatagggctgatcagttagtctatcggttttgcagtgtgtccgacgaatccaatgatctcctttaccaatactgcgatgctgagtcgggctccaccggttccggggtctatctgcgtctgaaagatccagacaaaaagaattggaagcgcaaaatcattgcagtctactcaggccaccagtgggtggatgtccacggggttcagaaggactacaatgttgctgttcgcatcactcccctcaaatacgcccagatttgcctctggattcacgggaacgatgccaattgtgcttatggctaacagagacctaaaacagggcggtggatcatctaaatcacagagaaaaccagctctgattattgtagtgagatcacttcataggttatgcctggacttgaaccctattaatagcatttcaacgttttttcaaaatcaggagatactcatccattta

SEQ ID NO: 33085 - DNA, 393 bp, Macaca Mulatta
gagcggggccatggagggggagacgcttcacacattctacacccagctggtgttgatgcccaaggtgatgcactatgcccagtacgtcctcctggcgctgggctgcgtcctgctgctggtccctgtcatctgccaaatccggagcaaagtaggtgctggccagagtgtggcccgggctgacagctattcgcttgcctgctgggggaagggggcctcagatcggaccctctggccaaccgctttctgtagcccacctccagcagcagtcctgcttctgtgctggagtgggagcggacaccgctgggggctgcgctgcaggcttgcgtcttttgcatgccgcgttgccactactctgcctgttctggaaggcctgggaccctcccttggaggggg

SEQ ID NO: 33086 - DNA, 804 bp, Macaca Mulatta
  misc_feature (1)...(804): n = A,T,C or G
gggaattgggagctatggctaaacatcatcctgatttgatcttttgccgcaagcaggctggtgttgccatcggaagactgtgtgaaaaatgtgatggcaagtgtgtgatttgtgactcctatgtgcgtccctgcactctggtgcgcatatgtgatgagtgtaactatggatcttaccagggacgctgtgtgatctgtggaggccctggggtctctgatgcgtattattgtaaggagtgcgccatccaggagaaggatagagatggctgcccaaagattgtcaatctggggagctctaaaacagacctcttctatgaacgcaaaaaatacggcttcaagaagaggtgattggtgggtggnnccttcctcccccccacctcnnnctgctgcncctgcccgaanaccctgcctctactacctgccgaaagggagcagagaccatatcatgcccctaagtgcctgcctacgtaatggcaagcttgtgacccccctccctgttccttcgcccagaacgtggcacggcgatggaaaaggggactcctcccggaaaacccccctggctacaccgatatccagaagagcacctgcccctgaacaccttatcgcaccgttgtcttggccgtccgatcaacccgcaatagctcggtttccccgcacggcggtcatggctgggccggcgggagcacgcggagcgctttgaataccgggcgcggatagatggctcgccgccgcaccccggcgtcggggtgagatctgccgatgagggaatccgcctgcgaaagcaggcaggcagagttggacggag

SEQ ID NO: 33087 - DNA, 2635 bp, Macaca Mulatta
  misc_feature (1)...(2635): n = A,T,C or G
ngagccggctgtgcgctgggactcctatgagaacttcaaccggcaccacgaggacagtgtggatgnnnnnnnnnnnnnnnnnnnnnnnnnnnnnnnnnnnnnnnnnnnnnnnnnnnnnnnnnnnnnnnnnnnnnnnnnnnnnnnnnnnnnnnnnnnnnnnnnnnnnnnnnnnnnnnnnnnnnnnnnnnnnnnnnnnnnnnnnnnnnnnnnnnnnnnnnnnnnnnnnnnnnnnnnnnnnnnnnnnnnnnnnnnnnnnnnnnnnnnnnnnnnnnnnnnnnnnnnnnnnnnnnnnnnnnnnnnnnnnnnnnnnnnnnnnnnnnnnnnnnnnnnnnnnnnnnnnnnnnnnnnnnnnnnnnnnnnnnnnnnnnnnnnnnnnnnnnnnnnnnnnnnnnnnnnnnnnnnnnnnnnnnnnnnnnnnnnnnnnnnnnnnnnnnnnnnnnnnnnnnnnnnnnnnnnnnnnnnnnnnnnnnnnnnnnnnnnnnnnnnnnnnnnnnnnnnnnnnnnnnnnnnnnnnnnnnnnnnnnnnnnnnnnnnnnnnnnnnnnnnnnnnnnnnnnnnnnnnnnnnnnnnnnnnnnnnnnnnnnnnnnnnnnnnnnnnnnnnnnnnnnnnnnnnnnnnnnnnnnnnnnnnnnnnnnnnnnnnnnnnnnnnnnnnnnnnnnnnnnnnnccccaggctaccgggaggtggtcatcctggaggaccctgggctgcctgccctatacccatgcccagcctgcgaggagaagctggcgctgcctacagcagccttgtatggactgcggctggagagggaggctggagaagggtgggcaactgaggctggcaagcctctcctgcactcagtgcggcctgggcacccgctgcctctgctcttgcctgcctgtgggcatcaccatgccccgatgcctgactacagctgcctgaagtcacccaaggcaggcgaggaagggcacgagggctgctcctacactatgtgcgccgaagacaggtactgggcatccagggtaccctgcactgctgacatccagctatggaggagcagttcccatttactacccatgcatatgaccgcgtgcctcatagctgtggctctccaggagagggcagagggtattccagccctggtgcccactccccacgggctggatccatttctccgggcagaccgccctatccacaatctaggaagctgacctacgagatccctacggaggagggagggaacaggtacccattgcctgggcacctagcctcagcaggacccttggcatctgcannnnnnnnnnnnnnnnnnnnnnnnnnnnnnnnnnnnnnnnnnnnnnnnnnnnnnnnnnnnnnnnnnnnnnnnnnnnnnnnnnnnttcgtcagagttgtctggtccctccacgcccctgtcataccagcagcccagtccagggcaaggaaagnagcacccggcgacaggacaccaggtcccccacctcagcgcccactcagagactgagtcctggcgaggccttgtcccctgtttcccaggcaggcaccggaaaggcccctgagctgccttcgggaagtgggcctgagcctccggcccctagccccgtctctccgacctttcctcccagctcgcccagtgactggcctcaggaaaggagtccagggggcctctcagacggcgccagtcctcggagccctgtgcctaccacacttcctggcctccgccacgccccctggcaaggccctcgaggccccccagacagcccagatgggtctcccctcactcctgtgccttcccagatgccctggcttgtagccagcccagagccgcctcagagctcacccacacctgctttccccctggctgcctcctatgacaccaatggccttacccagcccccacttcctgagaaacgccacctgcccgggccggggcaacagccaggaccctggggcccagagcgggcatcatcgccagccagaggcatcagtcaccatgtcaccttcgcacctctgctctcggataatgtcccccaacccccagnagagcctcctacacaagagagccaaagcaatgtcaagtttgtccaggatacatccaagttctggtacaagccacacctgtcccgtgaccaagnnnnnnnnnnnnnnnnnnnnnnnnnnnnnnnnnnnnnnnnnnnnnnnnnnnnnnnnnnnnnnnnnnnnnnnnnnnnnnnnnnnnnnnnnnnnnnnnnnnnnnnnnnnnnnnnnnnnnnnnnnnnnnnnnnnnnnnnnnnnnnnnnnnnnnnnnnnnnnnnnnnnnnnnnnnnnnnnnnnnnnnnnnnnnnnnnnnnnnnnnnnnnnnnnnnnnnnnnnnnnnnnnnnnnnnnnnnnnnnnnnnnnnnnnnnnnnnnnnnnnnnnnnnnnnnnnnnnnnnnnnnnnnnnnnnnnnnnnnnnnnnnnnnnnnnnnnnnnnnnnnnnnnnnnnnnnnnnnnnnnnnnnnnnnnnnnnnnnnnnnnnnnnnnnnnnnngcctgcagcgtgctctacttgacctcagtggagacagagtcactgacaggcccccaagccgtggcccgggccagctctgcagctctgagctgcagcccccgcccaacaccagcagttgtacacttcaaggtgtccgcccagggcatt

SEQ ID NO: 33088 - DNA, 408 bp, Macaca Mulatta
ggaaaatcctcgtcttattgcctcctctttggttgctggagagaaacttaatcaggagaacacacaaagtgttatttacacagtttttacgtccctgtatggcaattgcatcatgcaagaagatgaaagctacctccttcaggttttgcgatacttgattgaatttgaacttaaagaaagtgacaaccctaggcgacttttgaggagaggaacttgtgccttcagcatcttatttaaacttttttctgaaggactgttttctgccaaacttttcctcacagccactttacatgagccaattatgcaactccttgttgaagatgaagatcacctggaaacagatccaaacaagctaattgagaggttctcccaaagtcagcaggaaaaactctttggagagaagggctc

SEQ ID NO: 33089 - DNA, 167 bp, Macaca Mulatta
gtcctcgttcacctgggactcctgaccaaggaatctggatttaagattgcagagacagctttcagtggtggccctcttggtgaattagttcagtggagtgatttaattacatctctgtacttactgggccatgacattaggatttcagcttcactggctgagctcaa

SEQ ID NO: 33090 - DNA, 715 bp, Macaca Mulatta
ggggagacacaataaccttcagcttcaatgttaacaccttgatgggaaaggtgtctcatggaatgttttcttatcctttgaacactcttcatttcagaagctttgcttctgttgcaaccaaacatgacacttagcgtgctcagcaggaaggacaaggaaagagtaattcgcagactgttattacaggcacctccaggggaatttgtaaatgcctttgatgatctctgtctgcttatccgtgatgaaaaacttatgcaccatcaaggtgagtgtgcaggccaccaacactgccaaaaatattctgtaccactctgcatcgatggaaatccagtactcttgtctcaccacaatgtaatgggcgactaccgattttttgaccatcaaagcaaactttctttcagatatgacctgcttcaaaatcagctgaaagacatccaaagtcacggtatcattcggaatgagacagaatatctgagagttgttgttctgtgcgccttaaaactgtttgtgaatgaccactatccaaaaggaaattgcacgtgctgaggaaaactgtcaaaataaggagtacttgatagcttgcattgagatcacactatgaaacagagatgctggatgactttgaaatctaatgatttcaagtaccccttctaccagtacagaaaattttggcaactcctctcaggtgcacttctattaattccagactgaaaac

SEQ ID NO: 33091 - DNA, 245 bp, Macaca Mulatta
  misc_feature (1)...(245): n = A,T,C or G
agttgctgtggaatgactctgttttcaagaagacagagggagccaatacatctactttcattaagaagctgaaattaaatttgaatttccttctttccaaagnnnnnnnnnnnnnnnnnnnnnnngattgctgtgattggagctgtaattagcgaactgggtgccattaagtgctgcttagatgaagatctggagcccacctgctntgaaagatatgatgatattggaggtctctggaaatttca

SEQ ID NO: 33092 - DNA, 787 bp, Macaca Mulatta
  misc_feature (1)...(787): n = A,T,C or G
gggattattttccaaagaagaaaaactcacagataacaacagattttactgcagtcattgcagagctcgacgagattctctaaaaaagatagaaatctggaagttaccacctgtacttttagtgcatctgaaacgtttttcctacgatggcaggtggaaacaaaaattacagacatctgtggacttcccgttagaaaaccttgacttgtcacagtatgttattggtccaaagaacaatttgaagaaatataatttgttttctgtttcaaatcactacggcggactggatggaggccactacacagcctattgtaaaaatgcagcaagacaacggtggtttaagtttgatgatcatgaagtttctgatatctccgtttcttctgtgaaatcgtcagcagcttacatcctcttttatacttcactgggaccacgagtaactgatgtagccacataaggagacataggttataaactagttatcttttaaaggctcagcaacacaactcttgaaatgcttatcaagataatggtagctatagctgaccgattagaggaattctaggacagtgggagctgtgttactagcactatataattccggtcagtgctgacaaataacatttaacaagtattgcagtaagcatcacttacaggtaccatttatttcaaaacactttttttagtctgctcccaaatttaaaaatattaactagctaagccattattattctactggtcctaaaaaccattgnnnnnnnnnnnnnnnnnnnnncacctggtatgggcc

SEQ ID NO: 33093 - DNA, 766 bp, Macaca Mulatta
  misc_feature (1)...(766): n = A,T,C or G
agatttattatctaggatagatttggatgaactaatgaaaaaagatgaacctcctcttgattttcctgataccctggagggatttgaatatgcttttaatgaaagggacagttaagacacataaaaactggggaaccatttgtttttaactaccgggaagatttgcacagatggaaccagaaaagatacgaggctctaggagannnnnnnnnnnnnnnnnnnnnnnnnnnnnnnnnnnnnnnnnnnnnnnnnnnnnnnnnnnnnnnnnnnnnnnnnnnnnnnnnnnnnnnnnnnnnnnnnnnnnnnnnnnnnnnnnnnnnnnnnnnnnnnnnnnnnnnnnnnnnnnnnnnnnnnnnnnnnnnnnnnnnnnnnnnnnnnnnnnnnnnnnnnnnnnnnnnnnnnnnnnnnnnnnnnnnnnnnnnnnnnnnnnnnnnnnnnnnnnnnnnnnnnnnnnnnnnnnngaaggatatggagttatagtactaaatcccaatgaaaactatattgaagtagaaaagccgaagatacatgtacagtcatcatctgatagttcagatgaaccagcagaaaaacgggaaagaaaagataaagtttctaaagaaacaaagaagcgacgtgatttctatgagaagtatcgtaacccccaaagagaaaaagaaatgatgcaattgtatatcagagtgagtgagaccactactttcctttactattttctttaccttgtgtacattttattttatatagattgttttgtttttcttaaaga

SEQ ID NO: 33094 - DNA, 282 bp, Macaca Mulatta
  misc_feature (1)...(282): n = A,T,C or G
gagatccttcaggaagaaattggcaaggccagcagcgggtatggaggttagggggatggaagatgcaaactccgtcaggggctcaacctctcannnnnnnnnnnnnnnnnnnnnnnnnnnnnnnnnnnnnnnnnnnnnnnnnnnnnnnnnnnnnnnnnnnnnnnnnnnnnnnnnnnnnnnnnnnnnnnnnnnnnnnnnnnnnnnnnnnnnnnnaggcctcaggacccacaggaagaggaggccaccggctgtgagtactccgagatcaagatgcccgagtga

SEQ ID NO: 33095 - DNA, 571 bp, Macaca Mulatta
tttgccagtatttgtgttcttcttctgccagatctattttgtacaagaactgtgcaaatatcagtaactcttgggtaggtattgattattaagaaaataattaggtgtattatctggggggaaaaaaaaacttttactaaattcttttgaaacatgctcaaagctttttaaatcaatatttagaaattaatgatttactattatacgtgccagtgatatttatgtgatatttataaatgaaaataaatgcaaaattataacaacttgttaataatgtattggtatttttgaacccctaatctattttttcaggaaataaggcagcattatgattaataacaatttttggaagcgtggatataatttgctaaagtaagactgttgatgtagataaagtagcagcataaaacacacatatattcaagtaggtgtcatagttggaaaatattctttgaaattattctaggcagttgaagttacttatactggctaaggaatctattcttcatttaaattaacccccttaaggataagtttttccactggtaaggtttttagggactaggaagac

SEQ ID NO: 33096 - DNA, 1527 bp, Macaca Mulatta
  misc_feature (1)...(1527): n = A,T,C or G
ttcgccccgcacttcttcgacaacggggtcggcagccccaacggaaacatnnnnnnnnnnnnnnnnnnnnnnnnnnnnnnnnggctctcatgtatacaccctgaacgggacagacccagagggagaccccatctcctaccacatcagctttgacccctttgctagaagtgtcttttctgttgaccccacttttggaaacatcaccctggttgaagagctggacagagagnagagggaagatgagattgaagccatcatcagcatttctgacggcctgaatctggtgnggtggccgaaaaagtcgtgatcctggtgaccgatgccaatgacgaggcgcccaggttcttccaggagccttatgttgccctggttcctgaggnaggacatacctgctgggagcttcttctttaaggtccatgcagtggacagggacacaggctctggagggagtgtcacctacttcctgcagnnnnnnnnnnnnnnnnnnnnnnnnnnnnnnnnnnnnnnnnnnnnnnnnnnnnnnnnnnnnnnnnnnnnnnnnnnnnnnnnnnnnnnnnnnnnnnnnnnnnnnnnnnnnnnnnnnnnnnnnnnnnnnnnnnnnnnnnnnnnnnnnnnnnnnnnnnnnnnnnnnnnnnnnnnnnnnnnnnnnnnnnnnnnnnnnnnnnnnnnnnnnnnnnnnnnnnnnnnnnnnnnnnnnnnnnnnnnnnnnnnnnnnnnnnnnnnnnnnnnnnnnnnnnnnnnnnnnnnnnnnnnnnnnnnnnnnnnnnnnnnnnnnnnnnnnnnnnnnnnnnnnnnnnnnnnnnnnnnnnnnnnnnnnnnnnnnnnnnnnnnnnnnnnnnnnnnnnnnnnnnnnnnnnnnnnnnnnnnnnnnnnnnnnnnnnnnnnnnnnnnnnnnnnnnnnnnnnnnnnnnnnnnnnnnnnnnnnnnnnnnnnnnnnnnnnnnnnnnnnnnnnnnnnnnnnnnnnnnnnnnnnnnnnnnnnnnnnnnnnnnnnnnnnnnnnnnnnnnnnnnnnnnnnnnnnnnnnnnnnnnnnnnnnnnnnnnnnnnnnnnnnnnnnnnnnnnnnnnnnnnnnnnnnnnnnnnnnnnnnnnnnnnnnnnnnnnnnnnnnngggagccaatgccaaattcaacttgcagctggtggggcccaggggcatcttccgagtggttccacagacagtcctgaatgaagcccaagtcacaatcattgtggagaactcagctgccattgactttgaaaagtctaaagtattaaccttcaagnagctcctggctgttgaagtgaacaccccggagaagttcagttccacagcggatgttgtgatccagctcctggacaccaatgacaatgtccccaagttcgactccctctactacgttgccaggattcctgagaatgccccagggggttccagcgtggtggctgtcacagtgggntggggctctttctcttccaggctgtggatccagacacaggaccctggggtgaagtgaaatattccatctacgggactggggcagacctn

SEQ ID NO: 33097 - DNA, 915 bp, Macaca Mulatta
  misc_feature (1)...(915): n = A,T,C or G
gggctctctcctcccgccgcccaagatgccgaaaggaaagaaggccaagggaaagaaggtggctccggcccctgctgtcgtgaaaaagcaggaggccaagaaagtggtgaatcccctgtttgagaaaagacctaagaattttggcattggacaggacatccagcccaaaagagacctcacccgctttgtgaaatggcctcgctatatcaggttgcagcggcagagagccatcctctataagcggctgaaagtgcctcctgctattaaccagtttcacccaaggccctggaccgcccaaacagctaactccgctggcttaagctgggccccccaagttccggacccgaaaaaccaaaacccagaagaataaaaccccaaaggctgttttggcccccgggnnnnnnnnnnnnnnnnnnnnnccttgtggnnnnnnnnnnnnnnnggnnnnnnnnnnnnnnataaaaagaaaccccccctggtgtctctttaagagagggaatttaaaaacccccccccacactcttgtnnnnnnnnnnnnnnnnnnnnnnncccggggggagaagaaacagtggttgtcggaggggaagagannnnnnnnnnnttnntntnnnnncntngatgatannacanaatctcaccatattagtaccctggcgggggggggtgtgttatactccgacttcgcaccactatggtggtgggaccaaataacaagagggggggcggggtccccctataataatgcggttattatcacccagagagaagagaaaaagagcactaacaagtgtgcgggtgcgctcttatttttttctctcacacggaggaatgaggtggcgtatgacatacaaaatgatggcgggtattcctttctcgataagaagaagagagttcgatcaagatctatataaaaaa

SEQ ID NO: 33098 - DNA, 441 bp, Macaca Mulatta
  misc_feature (1)...(441): n = A,T,C or G
atgcaggaacgacttctggcagtgaaggtaaaggaggaagaggaggaacattcctgtgggccagaatcaggcctgtcaagaaataaccctcataccagagagatctttcgtagacgcttcagacagttctgctatcaggagacccctgggccccgggaggctcttcgaagactccaggagctctgccatcagtggctgagaccagagatgcacaccaaggagcagatcctagagctgctggtgctggagcagttcctgagtatcctgcccgaggagctccaggcctgggtcnggtcctgagccatgctcatgaacaggaagagtttgtaaaggagaaggcaactccaggagcagctcaggagtcatcaaatgaccaattccaaaccttggaagagcaacttcggtataatttgcgagaggtgtgcccagttcaggagattg

SEQ ID NO: 33099 - DNA, 746 bp, Macaca Mulatta
agtttgagaccatgtttcatcatcctgtagctacatccggtcttccttgtgtgctaggggactgcagatagctcaggggtatcagccttagccactcggacaagggaagggggtaccgcaggagctcagggacccccacccccatccctggcctgggtgatgacagcgtctggccctgccaggtccttggcctgcacgaagtcagtgaccgcgggtgaaatgcccagctgggtgcctgcctggagcgggtgtggggcagtgagcccctgtgggtgtgggcttgggagttgccgtggcaggtggtgagcagggcaggggcaggcagacagccctcagaaggcctcatggcccccggtgagctgtaggaagaggtcttcatccagctcctccccacgggcccgctcccgcgtcgacaggaaaatgtaacccccgatgtactcgtgtacgattcggcagctggcagacacgcagctgaaggccacattgatgtgctcatcaaactcgatggccacctgaagggcagagagtcagagaggcaaatgggggtgggatatgggagcagcccctgccccaccctggctggatacagctccagcctggcacctgtcccccatccataccatgggtctgggcccacctgccggatgtcccagttgacattccactggcgcatgttgctgaaacgccagtaaggaccacgtcgcccacagccaagtcgatgcggatcagacggttgttggcgatgc

SEQ ID NO: 33100 - DNA, 156 bp, Macaca Mulatta
aggtgttctaccagcgcgcagacatggccatcggctcccttaccatcaacgaggagcgctccgagatcgtggacttctccgtccccttcgtggagaaaaggcatcagcgtcatggtggcgcgcagcaatggcacggtgtccccctcggccttcctc

SEQ ID NO: 33101 - DNA, 2838 bp, Macaca Mulatta
  misc_feature (1)...(2838): n = A,T,C or G
ggcatgtttacatatcacaaggattcacactgccattggtttagcagctttaaatgtgataactattctgaattccgattggttggaatnnnnnnnnnnnnnnnnnnnnnnnnnnnnnnnnnnnnnnnnnnnnnnnnnnnnnnnnnnnnnnnnnnnnnnnnnnnnnnnnnnnnnnnnnnnnnnnnnnnnnnnnnnnnnnnnnnnnnnnnnnnnnnnnnnnnnnnnnnnnnnnnnnnnnnnnnnnnnnnnnnnnnnnnnnnnnnnnnnnnnnnnnnnnnnnnnnnnnnnnnnnnnnnnnnnnnnnnnnnnnnnnnnnnnnnnnnnnnnnnnnnnnnnnnnnnnnnnnnnnnnnnnnnnnnnnnnnnnnnnnnnnnnnnnnnnnnnnnnnnnnnnnnnnnnnnnnnnnnnnnnnnnnnnnnnnnnnnnnnnnnnnnnnnnnnnnnnnnnnnnnnnnnnnnnnnnnnnnnnnnnnnnnnnnnnnnnnnnnnnnnnnnnnnnnnnnnnnnnnnnnnnnnnnnnnnnnnnnnnnnnnnnnnnnnnnnnnnnnnnnnnnnnnnnnnnnnnnnnnnnnnnnnnnnnnnnnnnnnnnnnnnnnnnnnnnnnnnnnnnnnnnnnnnnnnnnnnnnnnnnnnnnnnnnnnnnnnnnnnnnnnnnnnnnnnnnnnnnnnnnnnnnnnnnnnnnnnnnnnnnnnnnnnnnnnnnnnnnnnnnnnnnnnnnnnnnnnnnnnnnnnnnnnnnnnnnnnnnnnnnnnnnnnnnnnnnnnnnnnnnnnnnnnnnnnnnnnnnnnnnnnnnnnnnnnnnnnnnnnnnnnnnnnnnnnnnnnnnnnnnnnnnnnnnnnnnnnnnnnnnnnnnnnnnnnnnnnnnnnnnnnnnnnnnnnnnnnnnnnnnnnnnnnnnnnnnnnnnnnnnnnnnnnnnnnnnnnnnnnnnnnnnnnnnnnnnnnnnnnnnnnnnnnnnnnnnnnnnnnnnnnnnnnnnnnnnnnnnnnnnnnnnnnnnnnnnnnnnnnnnnnnnnnnnnnnnnnnnnnnnnnnnnnnnnnnnnnnnnnnnnnnnnnnnnnnnnnnnnnnnnnnnnnnnnnnnnnnnnnnnnnnnnnnnnnnnnnnnnnnnnnnnnnnnnnnnnnnnnnnnnnnnnnnnnnnnnnnnnnnnnnnnnnnnnnnnnnnnnnnnnnnnnnnnnnnnnnnnnnnnnnnnnnnnnnnnnnnnnnnnnnnnnnnnnnnnnnnnnnnnnnnnnnnnnnnnnnnnnnnnnnnnnnnnnnnnnnnnnnnnnnnnnnnnnnnnnnnnnnnnnnnnnnnnnnnnnnnnnnnnnnnnnnnnnnnnnnnnnnnnnnnnnnnnnnnnnnnnnnnnnnnnnnnnnnnnnnnnnnnnnnnnnnnnnnnnnnnnnnnnnnnnnnnnnnnnnnnnnnnnnnnnnnnnnnnnnnnnnnnnnnnnnnnnnnnnnnnnnnnnnnnnnnnnnnnnnnnnnnnnnnnnnnnnnnnnnnnnnnnnnnnnnnnnnnnnnnnnnnnnnnnnnnnnnnnnnnnnnnnnnnnnnnnnnnnnnnnnnnnnnnnnnnnnnnnnnnnnnnnnnnnnnnnnnnnnnnnnnnnnnnnnnnnnnnnnnnnnnnnnnnnnnnnnnnnnnnnnnnnnnnnnnnnnncatgcacatggccagtaaactagttacttgtgtactctgtaatatttgtataatgatcatttcttcttaaggctcaagatattagaaaagaaatcagacctaaataatcattgatgaagtatgtcagttacaagcacaaaagaatataactgcttttataaattttttgaatgatgtacaagacttatatctacattttttgatcaccagttgtaccaaaacactaatttttgaaaaaggtaggttaaagtatttgacaaaagtgaatacaataataacatttgtgtcaaaatgatatagcttaatatacaaataaaattcaacgttttggccaaaatgtttgtttttcactggattctgaatatagtaaattcgaagtacccttttttttaagagtttctaataaagtagtatgtaaaaagaaaccgcattttaagtcagacagtaaatnnnnnnnnnaaccgcattttaagtcagacagtaaatgttttttgttctttatttacagcaaatgaagcagttttattagcatgtaacaaatattgccaaacgaagacttctctaccatactttgacagctttccttcagaaaactctgaagttatatttgcaataataatgaaaccagcagttagtaccagcatatggttcatgtgcaaataattctttccccaaaatctttctgggctaggctattttcttgctatgcttcctgcacccaaccagcagaattcttccagggtggaggaactaatcagcttattctccaacagttctgaatccaacccacaaatctttgagaaaaaggggttactttgtttactgttctctttgagatggaagtgattctgcttttccatttgggtatattatttcaagggtatttcttcttaaaaatcttggaaagcctaagtaagagagttaaaggcatcctggttgtgtttcattttgctctgttttaaatccatatgcaaataaaactgcttctctcttacactgcttgaactagaaaatcagctttttaatgtaggttaccacttataagcacaaaagaaacatgtataagaaaccagatttaagtgttttaaataaaatataaacagtttttatttggtagagatgactcatngganaattgtgttggcttggtctgcatgttttatgatgtgcttgtatatcgattgctgtgtcacttttaa

SEQ ID NO: 33102 - DNA, 589 bp, Macaca Mulatta
caggacagcctgtggctgtgtgagaagacctgtgagacaggaatgctctcttctcctcagtattctccatgggaactgacagaactgtggaaactgaaggaacggtgcggtgatccttgtcggtgtgaagcaagataacagggacttgaattagcagcatctaaaatcagggcaggcaaacgataatctgagtgcaagtctgaggtgtcccagggcttagcagtagactgtatggtctttcaagagacttccagactggcactttcacccagaaccaatgcggtatttcttaatgtttgcacaaattttcttcttaaaaatcaactggtactgtagcataagaaaagtttatatattggaatattatcagaaaaataccaagttattttataaaaaaaaaaatatttctaaatcctgatgcattgtggctaattagtaatcaccattacctgtaatttttggttaaaacttggcccagttcagaatctgtagtagtaactgagagtttgaatttcaacctggattgcaggatagctctgtagagtttaatgaggataattatcagacaaagagaactcacaggaatgct

SEQ ID NO: 33103 - DNA, 3128 bp, Macaca Mulatta
  misc_feature (1)...(3128): n = A,T,C or G
taaggacagtcctgtgtgaaggtggagtaccacagaggccagttgtttttgtcacaaggaagaagctggtgaatgcaattcagcagaagctctccaaattgaagggtgaaccaggatgggtcaccatacatggaatggcaggctgtggaaagtctgtattagctgcagaagctgttagagatcattccctcttagaaggttgtttcccagggggagtgcattgggtttcagttgggaaacaagacaaatctggacttctgatgaaactgcagaatctttgcacacgattgggnnnnnnnnnnnnnnnnnnnnnnnnnnnnnnnnnnnnnnnnnnnnnnnnnnnnnnnnnnnnnnnnnnnnnnnnnnnnnnnnnnnnnnnnnnnnnnnnnnnnnnnnnnnnnnnnnnnnnnnnnnnnnnnnnnnnnnnnnnnnnnnnnnnnnnnnnnnnnnnnnnnnnnnnnnnnnnnnnnnnnnnnnnnnnnnnnnnnnnnnnnnnnnnnnnnnnnnnnnnnnnnnnnnnnnnnnnnnnnnnnnnnnnnnnnnnnnnnnnnnnnnnnnnnnnnnnnnnnnnnnnnnnnnnnnnnnnnnnnnnnnnnnnnnnnnnnnnnnnnnnnnnnnnnnnnnnnnnnnnnnnnnnnnnnnnnnnnnnnnnnnnnnnnnnnnnnnnnnnnnnnnnnnnnnnnnnnnnnnnnnnnnnnnnnnnnnnnnnnnnnnnnnnnnnnnnnnnnnnnnnnnnnnnnnnnnnnnnnnnnnnnnnnnnnnnnnnnnnnnnnnnnnnnnnnnnnnnnnnnnnnnnnnnnnnnnnnnnnnnnnnnnnnnnnnnnnnnnnnnnnnnnnnnnnnnnnnnnnnnnnnnnnnnnnnnnnnnnnnnnnnnnnnnnnnnnnnnnnnnnnnnnnnnnnnnnnnnnnnnnnnnnnnnnnnnnnnnnnnnnnnnnnnnnnnnnnnnnnnnnnnnnnnnnnnnnnnnnnnnnnnnnnnnnnnnnnnnnnnnnnnnnnnnnnnnnnnnnnnnnnnnnnnnnnnnnnnnnnnnnnnnnnnnnnnnnnnnnnnnnnnnnnnnnnnnnnnnnnnnnnnnnnnnnnnnnnnnnnnnnnnnnnnnnnnnnnnnnnnnnnnnnnnnnnnnnnnnnnnnnnnnnnnnnnnnnnnnnnnnnnnnnnnnnnnnnnnnnnnnnnnnnnnnnnnnnnnnnnnnnnnnnnnnnnnnnnnnnnnnnnnnnnnnnnnnnnnnnnnnnnnnnnnnnnnnnnnnnnnnnnnnnnnnnnnnnnnnnnnnnnnnnnnnnnnnnnnnnnnnnnnnnnnnnnnnnnnnnnnnnnnnnnnnnnnnnnnnnnnnnnnnnnnnnnnnnnnnnnnnnnnnnnnnnnnnnnnnnnnnnnnnnnnnnnnnnnnnnnnnnnnnnnnnnnnnnnnnnnnnnnnnnnnnnnnnnnnnnnnnnnnnnnnnnnnnnnnnnnnnnnnnnnnnnnnnnnnnnnnnnnnnnnnnnnnnnnnnnnnnnnnnnnnnnnnnnnnnnnnnnnnnnnnnnnnnnnnnnnnnnnnnnnnnnnnnnnnnnnnnnnnnnnnnnnnnnnnnnnnnnnnnnnnnnnnnnnnnnnnnnnnnnnnnnnnnnnnnnnnnnnnnnnnnnnnnnnnnnnnnnnnnnnnnnnnnnnnnnnnnnnnnnnnnnnnnnnnnnnnnnnnnnnnnnnnnnnnnnnnnnnnnnnnnnnnnnnnnnnnnnnnnnnnnnnnnnnnnnnnnnnnnnnnnnnnnnnnnnnnnnnnnnnnnnnnnnnnnnnnnnnnnnnnnnnnnnnnnnnnnnnnnnnnnnnnnnnnnnnnnnnnnnnnnnnnnnnnnnnnnnnnnnnnnnnnnnnnnnnnnnnnnnnnnnnnnnnnnnnnnnnnnnnnnnnnnnnnnnnnnnnnnnnnnnnnnnnnnnnnnnnnnnnnnnnnnnnnnnnnnnnnnnnnnnnnnnnnnnnnnnnnnnnnnnnnnnnnnnnnnnnnnnnnnnnnnnnnnnnnnnnnnnnnnnnnnnnnnnnnnnnnnnnnnnnnnnnnnnnnnnnnnnnnnnnnnnnnnnnnnnnnnnnnnnnnnnnnnnnnnnnnnnnnnnnnnnnnnnnnnnnnnnnnnnnnnnnnnnnnnnnnnnnnnnnnnnnnnnnnnnnnnnnnnnnnnnnnnnnnnnnnnnnnnnnnnnnnnnnnnnnnnnnnnnnnnnnnnnnnnnnnnnnnnnnnnnnnnnnnnnnnnnnnnnnnnnnnnnnnnnnnnnnnnnnnnnnnnnnnnnnnnnnnnnnnnnnnnnnnnnnnnnnnnnnnnnnnnnnnnnnnnnnnnnnnnnnnnnnnnnnnnnnnnnnnnnnnnnnnnnnnnnnnnnnnnnnnnnnnnnnnnnnnnnnnnnnnnnnnnnnnnnnnnnnnnnnnnnnnnnnnnnnnnnnnnnnnnnnnnnnnnnnnnnnnnnnnnnnnnnnnnnnnnnnnnnnnnnnnnnnnnnnnnnnnnnnnnnnnnnnnnnnnnnnnnnnnnnnnnnnnnnnnnnnnnnnnnnnnnnnnnnnnnnnnnnnnnnnnnnnnnnnnnnnnnnnnnnnnnnnnnnnnnnnnnnnnnnnnnnnnnnnnnnnnnnnnnnnnnnnnnnnnnnnnnnnnnnnnnnnnnnnnnnnnnnnnnnnnnnnnnnnnnnnnnnnnnnnnnnnnnnnnnnnnnnnnnnnnnnnnnnnnnnnnnnnnnnnnnnnnnnnnnnnnnnnnnnnnnnnnnnnnnnnnnnnnnnnnnnnnnnnnnnnnnnnnnnnnnnnnnnnnnnnnnnnnnnnnnnnnnnnnnnnnnnnnnnnnnnnnnnnnnnnnnnnnnnnnnnnnnnnnnnnnnnnnnnnnnnnnnnnnnnnnnnnnnnnnnnnnnnnnnnnnnnnnnnnnnnnnnnnnnnnnnnnnnnnnnnnnnnnnnnnnnnnnnnnnnnnnnnnnnnnnnnnnnnnnnnnnnnnnnnnnnnnnnnnnnnnnnnnnnnnnnnnnnnnnnnnnnnnnnnnnnnnnnnnnnnnnnnnnnnnagatctggagttttgatctccttttgccacttcatgaattgaggggccacaacggctgtgtgcgctgctctgccttctctgtggacagtaccctgctggcaacgggagatgacaatggagaaatcag

SEQ ID NO: 33104 - DNA, 220 bp, Macaca Mulatta
gattataccagctgcttcctttacagatagctgctgcaatgacaactcaattttagcatctcttctctgcctgggcattttgaggatcttaaaaaagtaatcccttgatgtatttagactctgattcctgcatttttcctcagatcaagacggacagccaggtttaaacacagtttcacagtaatggccattggatcagatttacatcggtggacgtcaa

SEQ ID NO: 33105 - DNA, 5205 bp, Macaca Mulatta
  misc_feature (1)...(5205): n = A,T,C or G
ggggaaatatcagaagcatcaatcctttgaagcagaggtgcaaacaaaatcaagagtcatgtctgaactggaaaaaacaagggaagaacgatttactatgggtcattctgcccacgaagaaacaaaggnnnnnnnnnnnnnnnnnnnnnnnnnnnnnnnnnnnnnnnnnnnnnnnnnnnnnnnnnnnnnnnnnnnnnnnnnnnnnnnnnnnnnnnnnnnnnnnnnnnnnnnnnnnnnnnnnnnnnnnnnnnnnnnnnnnnnnnnnnnnnnnnnnnnnnnnnnnnnnnnnnnnnnnnnnnnnnnnnnnnnnnnnnnnnnnnnnnnnnnnnnnnnnnnnnnnnnnnnnnnnnnnnnnnnnnnnnnnnnnnnnnnnnnnnnnnnnnnnnnnnnnnnnnnnnnnnnnnnnnnnnnnnnnnnnnnnnnnnnnnnnnnnnnnnnnnnnnnnnnnnnnnnnnnnnnnnnnnnnnnnnnnnnnnnnnnnnnnnnnnnnnnnnnnnnnnnnnnnnnnnnnnnnnnnnnnnnnnnnnnnnnnnnnnnnnnnnnnnnnnnnnnnnnnnnnnnnnnnnnnnnnnnnnnnnnnnnnnnnnnnnnnnnnnnnnnnnnnnnnnnnnnnnnnnnnnnnnnnnnnnnnnnnnnnnnnnnnnnnnnnnnnnnnnnnnnnnnnnnnnnnnnnnnnnnnnnnnnnnnnnnnnaggtgaaggagttatgtgcgaaagcagagaagctgacactttcccatccttcagatgcacctcagatccaggagatgaaagaagatctggtctccaactgggagcacattcgtgccctggccaccagcagatacgaaaaactgcaggcaacttattggtnnnnnnnnnnnnnnnnnnnnnnnnnnnnnnnnnnnnnnnnnnnnnnnnnnnnnnnnnnnnnnnnnnnnnnnnnnnnnnnnnnnnnnnnnnnnnnnnnnnnnnnnnnnnnnnnnnnnnnnnnnnnnnnnnnnnnnnnnnnnnnnnnnnnnnnnnnnnnnnnnnnnnnnnnnnnnnnnnnnnnnnnnnnnnnnnnnnnnnnnnnnnnnnnnnnnnnnnnnnnnnnnnnnnnnnnnnnnnnnnnnnnnnnnnnnnnnnnnnnnnnnnnnnnnnnnnnnnnnnnnnnnnnnnnnnnnnnnnnnnnnnnnnnnnnnnnnnnnnnnnnnnnnnnnnnnnnnnnnnnnnnnnnnnnnnnnnnnnnnnnnnnnnnnnnnnnnnnnnnnnnnnnnnnnnnnnnnnnnnnnnnnnnnnnnnnnnnnnnnnnnnnnnnnnnnnnnnnnnnnnnnnnnnnnnnnnnnnnnnnnnnnnnnnnnnnnnnnnnnnnnnnnnnnnnnnnnnnnnnnnnnnnnnnnnnnnnnnnnnnnnnnnnnnnnnnnnnnnnnnnnnnnnnnnnnnnnnnnnnnnnnnnnnnnnnnnnnnnnnnnnnnnnnnnnnnnnnnnnnnnnnnnnnnnnnnnnnnnnnnnnnnnnnnnnnnnnnnnnnnnnnnnnnnnnnnnnnnnnnnnnnnnnnnnnnnnnnnnnnnnnnnnnnnnnnnnnnnnnnnnnnnnnnnnnnnnnnnnnnnnnnnnnnnnnnnnnnnnnnnnnnnnnnnnnnnnnnnnnnnnnnnnnnnnnnnnnnnnnnnnnnnnnnnnnnnnnnnnnnnnnnnnnnnnnnnnnnnnnnnnnnnnnnnnnnnnnnnnnnnnnnnnnnnnnnnnnnnnnnnnnnnnnnnnnnnnnnnnnnnnnnnnnnnnnnnnnnnnnnnnnnnnnnnnnnnnnnnnnnnnnngggacccagttggatgaggccaaccagcgtttgcaatttgaaaataatgcagaagatttgcagcgctggctggaggaggtggagtggcaagtcgcctctgaggattatgggaaaggcctggccgacgtgcagaatcgactcaggaaacacggcctcctggagtcggctgtggctgctcgtcaggnnnnnnnnnnnnnnnnnnnnnnnnnnnnnnnnnnnnnnnnnnnnnnnnnnnnnnnnnnnnnnnnnnnnnnnnnnnnnnnnnnnnnnnnnnnnnnnnnnnnnnnnnnnnnnnnnnnnnnnnnnnnnnnnnnnnnnnnnnnnnnnnnnnnnnnnnnnnnnnnnnnnnnnnnnnnnnnnnnnnnnnnnnnnnnnnnnnnnnnnnnnnnnnnnnnnnnnnnnnnnnnnnnnnnnnnnnnnnnnnnnnnnnnnnnnnnnnnnnnnnnnnnnnnnnnnnnnnnnnnnnnnnnnnnnnnnnngagaacattgccagccatgaaccacgcattcaagtgataacagaaaggggatacaaaatggtagaggaaggnnnnnnnnnnnnnnnnnnnnnnnnnnnnnnnnnnnnnnnnnnnnnnnnnnnnnnnnnnnnnnnnnnnnnnnnnnnnnnnnnnnnnnnnnnnnnnnnnnnnnnnnnnnnnnnnnnnnnnnnnnnnnnnnnnnnnnnnnnnnnnnnnnnnnnnnnnnnnnnnnnnnnnnnnnnnnnnnnnnnnnnnnnnnnnnnnnnnnnnnnnnnnnnnnnnnnnnnnnnnnnnnnnnnnnnnnnnnnnnnnnnnnnnnnnnnnnnnnnnnnnnnnnnnnnnnnnnnnnnnnnnnnnnnnnnnnnnnnnnnnnnnnnnagcaacaacaggctgcaccagtggagggagctgctggagaacaaagggtcatggctttatatgacttccaggcccgcagcccccgagaggtcaccatgaagaaaggtgatgtcttaacgctgctcagttccatcaataaggnnnnnnnnnnnnnnnnnnnnnnnnnnnnnnnnnnnnnnnnnnnnnnnnnnnnnnnnnnnnnnnnnnnnnnnnnnnnnnnnnnnnnnnnnnnnnnnnnnnnnnnnnnnnnnnnnnnnnnnnnnnnnnnnnnnnnnnnnnnnnnnnnnnnnnnnnnnnnnnnnnnnnnnnnnnnnnnnnnnnnnnnnnnnnnnnnnnnnnnnnnnnnnnnnnnnnnnnnnnnnnnnnnnnnnnnnnnnnnnnnnnnnnnnnnnnnnnnnnnnnnnnnnnnnnnnnnnnnnnnnnnnnnnnnnnnnnnnnnnnnnnnnnnnnnnnnnnnnnnnnnnnnnnnnnnnnnnnnnnnnnnnnnnnnnnnnnnnnnnnnnnnnnnnnnnnnnnnnnnnnnnnnnnnnnnnnnnnnnnnnnnnnnnnnnnnnnnnnnnnnnnnnnnnnnnnnnnnnnnnnnnnnnnnnnnnnnnnnnnnnnnnnnnnnnnnnnnnnnnnnnnnnnnnnnnnnnnnnnnnnnnnnnnnnnnnnnnnnnnnnnnnnnnnnnnnnnnnnnnnnnnnnnnnnnnnnnnnnnnnnnnnnnnnnnnnnnnnnnnnnnnnnnnnnnnnnnnnnnnnnnnnnnnnnnnnnnnnnnnnnnnnnnnnnnnnnnnnnnnnnnnnnnnnnnnnnnnnnnnnnnnnnnnnnnnnnnnnnnnnnnnnnnnnnnnnnnnnnnnnnnnnnnnnnnnnnnnnnnnnnnnnnnnnnnnnnnnnnnnnnnnnnnnnnnnnnnnnnnnnnnnnnnnnnnnnnnnnnnnnnnnnnnnnnnnnnnnnnnnnnnnnnnnnnnnnnnnnnnnnnnnnnnnnnnnnnnnnnnnnnnnnnnnnnnnnnnnnnnnnnnnnnnnnnnnnnnnnnnnnnnnnnnnnnnnnnnnnnnnnnnnnnnnnnnnnnnnnnnnnnnnnnnnnnnnnnnnnnnnnnnnnnnnnnnnnnnnnnnnnnnnnnnnnnnnnnnnnnnnnnnnnnnnnnnnnnnnnnnnnnnnnnnnnnnnnnnnnnnnnnnnnnnnnnnnnnnnnnnnnnnnnnnnnnnnnnnnnnnnnnnnnnnnnnnnnnnnnnnnnnnnnnnnnnnnnnnnnnnnnnnnnnnnnnnnnnnnnnnnnnnnnnnnnnnnnnnnnnnnnnnnnnnnnnnnnnnnnnnnnnnnnnnnnnnnnnnnnnnnnnnnnnnnnnnnnnnnnnnnnnnnnnnnnnnnnnnnnnnnnnnnnnnnnnnnnnnnnnnnnnnnnnnnnnnnnnnnnnnnnnnnnnnnnnnnnnnnnnnnnnnnnnnnnnnnnnnnnnnnnnnnnnnnnnnnnnnnnnnnnnnnnnnnnnnnnnnnnnnnnnnnnnnnnnnnnnnnnnnnnnnnnnnnnnnnnnnnnnnnnnnnnnnnnnnnnnnnnnnnnnnnnnnnnnnnnnnnnnnnnnnnnnnnnnnnnnnnnnnnnnnnnnnnnnnnnnnnnnnnnnnnnnnnnnnnnnnnnnnnnnnnnnnnnnnnnnnnnnnnnnnnnnnnnnnnnnnnnnnnnnnnnnnnnnnnnnnnnnnnnnnnnnnnnnnnnnnnnnnnnnnnnnnnnnnnnnnnnnnnnnnnnnnnnnnnnnnnnnnnnnnnnnnnnnnnnnnnnnnnnnnnnnnnnnnnnnnnnnnnnnnnnnnnnnnnnnnnnnnnnnnnnnnnnnnnnnnnnnnnnnnnnnnnnnnnnnnnnnnnnnnnnnnnnnnnnnnnnnnnnnnnnnnnnnnnnnnnnnnnnnnnnnnnnnnnnnnnnnnnnnnnnnnnnnnnnnnnnnnnnnnnnnnnnnnnnnnnnnnnnnnnnnnnnnnnnnnnnnnnnnnnnnnnnnnnnnnnnnnnnnnnnnnnnnnnnnnnnnnnnnnnnnnnnnnnnnnnnnnnnnnnnnnnnnnnnnnnnnnnnnnggccagggacttgccttcagcaggaaacctactcaagaaacatcagctattggacacttagatgttggctcgagaggnnnnnnnnnnnnnnnnnnnnnnnnnnnnnnnnnnnnnnnnnnnnnnnnnnnnnnnnnnnnnnnnnnnnnnnnnnnnnnnnnnnnnnnnnnnnnnnnnnnnnnnnnnnnnnnnnnnnnnnnnnnnnnnnnnnnnnnnnnnnnnnnnnnnnnnnnnnnnnnnnnnnnnnnnnnnnnnnnnnnnnnnnnnnnnnnnnnnnnnnnnnnnnnnnnnnnnnnnnnnnnnnnnnnnnnnnnnnnnnnnnnnnnnnnnnnnnnnnnnnnnnnnnnnnnnnnnnnnnnnnnnnnnnnnnnnnnnnnnnnnnnnnnnnnnnnnnnnnnnnnnnnnncagaatgtgctggatatggcagagaagctgaaagacaaggctgctgtgggggaagaggagatccagttgcggctggctcagtttgttgaacattgggagaagctcaaagagttggccaaggcccgngg

SEQ ID NO: 33106 - DNA, 478 bp, Macaca Mulatta
accccacagaaatacaatggactatagagaaggaaaataatggaatgcaaagttataactatactatgtagaagaaatatctaattgaaattcttcatgtgattaagtctcctgctaattaacagctttttattttctaattgtaatatttttgagctccaaattattacagaaaaattatgccctaaactccaacttttctcctatcttttttcggatgttctgacataatgacagactgaggcaagacgtcaagctctatgtcatctgccagtctgtttataggtgtaccctcaattcttgaatgttctaacttctggcagcagaacaacaaaaggcaaccctggtcttggccagctcaaacaggaagaaagcaaagtgctaagtacccagccagcataggctcaggctgtgaaaggcaaggccatgctagaggaggagagagaagatagacctggtctggaggcctaaccagcag

SEQ ID NO: 33107 - DNA, 2054 bp, Macaca Mulatta
  misc_feature (1)...(2054): n = A,T,C or G
tgtttccgctgcatccagacttcctcaggcgccggccggcggctgcgcatctggggctttaaacatacaaagggattgccaggaccnnnnnnnnnnnnnnnnnnnnnnnnnnnnnnnnnnnnnnnnnnnaccatgagccgctgagccgggcaaaacccaggccaccgagccagcggaccctcggagcgcagccctgagccgcagagcaggctccaaccaggcggcgacgcggccacacgcacggagccagcgacccccgggcgacgcacggggcccgggagcgctgcgatggaggcgctaatggcccggggcgcgctcacgggtcccctgagggcgctctgcctcctgggctgcctgctcttcatggccgccgccgcgccgtcgcccatcatcaagttccccgacggtgtgcccccaaaacggacaaagnnnnnnnnnnnnnnnnnnnnnnnnnnnnnnnnnnnnnnnnnnnnnnnnnnnnnnnnnnnnnnnnnnnnnnnnnnnnnnnnnnnnnnnnnnnnnnnnnnnnnnnnnnnnnnnnnnnnnnnnnnnnnnnnnnnnnnnnnnnnnnnnnnnnnnnnnnnnnnnnnnnnnnnnnnnnnnnnnnnnnnnnnnnnnnnnnnnnnnnnnnnnnnnnnnnnnnnnnnnnnnnnnnnnnnnnnnnnnnnnnnnnnnnnnnnnnnnnnnnnnnnnnnnnnnnnnnnnnnnnnnnnnnnnnnnnnnnnnnnnnnnnnnnnnnnnnnnnnnnnnnnnnnnnnnnnnnnnnnnnnnnnnnnnnnnnnnnnnnnnnnnnnnnnnnnnnnnnnnnnnnnnnnnnnnnnnnnnnnnnnnnnnnnnnnnnnnnnnnnnnnnnnnnnnnnnnnnnnnnnnnnnnnnnnnnnnnnnnnnnnnnnnnnnnnnnnnnnnnnnnnnnnnnnnnnnnnnnnnnnnnnnnnnnnnnnnnnnnnnnnnnnnnnnnnnnnnnnnnnnnnnnnnnnnnnnnnnnnnnnnnnnnnnnnnnnnnnnnnnnnnnnnnnnnnnnnnnnnnnnnnnnnnnnnnnnnnnnnnnnnnnnnnnnnnnnnnnnnnnnnnnnnnnnnnnnnnnnnnnnnnnnnnnnnnnnnnnnnnnnnnnnnnnnnnnnnnnnnnnnnnnnnnnnnnnnnnnnnnnnnnnnnnnnnnnnnnnnnnnnnnnnnnnnnnnnnnnnnnnnnnnnnnnnnnnnnnnnnnnnnnnnnnnnnnnnnnnnnnnnnnnnnnnnnnnnnnnnnnnnnnnnnnnnnnnnnnnnnnnnnnnnnnnnnnnnnnnnnnnnnnnnnnnnnnnnnnnnnnnnnnnnnnnnnnnnnnnnnnnnnnnnnnnnnnnnnnnnnnnnnnnnnnnnnnnnnnnnnnnnnnnnnnnnnnnnnnnnnnnnnnnnnnnnnnnnnnnnnnnnnnnnnnnnnnnnnnnnnnnnnnnnnnnnnnnnnnnnnnnnnnnnnnnnnnnnnnnnnnnnnnnnnnnnnnnnnnnnnnnnnnnnnnnnnnnnnnnnnnnnnnnnnnnnnnnnnnnnnnnnnnnnnnnnnnnnnnnnnnnnnnnnnnnnnnnnnnnnnnnnnnnnnnnnnnnnnnnnnnnnnnnnnnnnnnnnnnnnnnnnnnnnnnnnnnnnnnnnnnnnnnnnnnnnnnnnnnnnnnnnnnnnnnnnnnnnnnnnnnnnnnnnnnnnnnnnnnnnnnnnnnnnnnnnnnnnnnnnnnnnnnnnnnnnnnnnnnnnnnnnnnnnnnnnnnnnnnnnnnnnnnnnnnnnnnnnnnnnnnnnnnnnnnnnnnnnnnnnnnnnnnnnnnnnnnnnnnnnnnnnnnnnnnnnnnnnnnnnnnnnnnnnnnnnnnnnnnnnnnnnnnnnnnnnnnnnnnnnnnnnnnnnnnnnnnnnnnnnnnnnnnnngggaatgaatactggatctactcagccagcaccctggagcgagggtaccccaagccactgaccagcctgggactgccccctgatgtccagcgagtggatgccgcctttaactggagcaaaaacaagaagacatacatctttgccggagacaaattctggag

SEQ ID NO: 33108 - DNA, 770 bp, Macaca Mulatta
  misc_feature (1)...(770): n = A,T,C or G
gggtcttttgatgcacatttctattgatctctgttggtgtatacatatatgtatatagatatagaaaagtcattnggaaaaatatgtaaatagaaatctaggtgactgttgggtttctttttatctatacttttcctatttaaaaaaattgcaattaaaacagttcattggtgatacagtttggttgtgtccccacccaaatctcatcttgaactgtagctcccataatccccacgtgtcatgggagggacacagtgggaggtaattgaatcataggggcgtgtttttcccatgctgttctcatgatagtgaataagtctcacaagatttgatggttttataaatgggagttcttctgcttatgctcccttgcctgctgccatgtaagatatccctttgctcttcctttgtcatctgccatgattgtgagatctccccagccatatggagctgtgagtccactaaacctctttcctttataaatcttgggtatgtcttcattaatagcatgagaacagactaatacaattggcatccaataatatttgctatgaaggcttatttagaagcagcaatggtacagtggctaaccaaacagccaaagaagctggggatgctacattttgaatcaatggctccaaataagtgaacctttgggcagggttttctggaacttccttttgttccctgtcatcctggtaaaaattggggaaattattaattaaatggattaaggaagcaaagcctttcctaaaattttgtttggtaac

SEQ ID NO: 33109 - DNA, 578 bp, Macaca Mulatta
gcctacagctctaagctccgcacttgcgcctcgggcgtcctcctggtgaatctgtcgctggcccttctgctgctggccgcgctggacatgcccttcacgctgcttggtgtgatgcgcgggcggccaccgtcggcgcccggcgcgtgccaagccatcggcttcctggacaccttcctggcgtccaacgcggcgctgagcgtggcggcgctcagcgcagaccagtggctggccgttggcttcccgctgcgctacgctggacgcctgcgaccgcgcgatgccggcctgctgctgggctgtgcctggggacagtcgctggtcttctcggtcgctgctcttggttgctcgtggctcggctacagcagcgccttcgcgtcatgctcgctgcgcctgccacccgagcctgagcgcccgcgcttcacagccttcaccgccacactccatgccatgggcttcgcgctgccgctggcggtgctctgcctcacctcgctccgggtgcaccgggtggcgcgcagccactgccagcgcatggatatcgttaccatgaaggcgctcatgctgcttgccgacctgcaccccag

SEQ ID NO: 33110 - DNA, 475 bp, Macaca Mulatta
ggataaaataaaaaacccaagcattgatctgtgtacgtgtcctcgaggatcccggatcatcagcacaattgtgaaacttgttactacacaataaagagcagtcttagagagtgcttgctactcacctgcttctagctcacctgggaaataacagcagaacctctacctccaactaaagacctgttggggctggccctggtggaggagcccagggcaggcagcccaaggcagctgaggcagtgcatatacccttagggccatttctaacaaagccttggccactcccagcacaatttggagtgtcaagggtgagagcctaaaacccagcttgcctgtctttgtctctgtgactattccggagtgaattaagttcacctgataacacaaaagtgaatgtataatataattctgttttaatctgtgtattctttttctcctactttttactggggtgagacaggggcatgaggagaaa

SEQ ID NO: 33111 - DNA, 850 bp, Macaca Mulatta
  misc_feature (1)...(850): n = A,T,C or G
gggcttttccggcggtgacgacctacccacacgagaacatgcctctcgcaaaggatctccttcatccctccccagaagaggagaagaggaaacacaagaagaaacgcctggtgcagagccccaattcctacttcatggatgtgaaatgcccaggatgctataaaatcaccacggtctttagccatgcacaaacggtagttttgtgtgttggctgctccactgtcctctgccagcctacaggaggaaaagcaaggcttacagaaggatgttcctttaggaggaagcagcactaaaggcactctgaatcaagatgagtgggaaaccatctcaataaacacattttggataanaaacatnaaaaaccaacattaacaacaatccatcttccagctgaatctagtaatataaataaaaaatttggttggccgccctgggcccttgagaaaatttttctaaaccatttctttgtgccccgggggccccatagggtaagggaaaatgggtcatagcgtgtttcttaaggaaaaccggtgtccaggaaataggggtgttggattnnnnnnnnnnnnnnnnnnnnnnngggggggaaaacagaattgttttgaaacaaaatccaaatagggtgtttttgaagggtccttacgtgggtttctttccaaggggggttttccaaggtgagcccttaaaatttcaaaatttagcccccgcggccgggtgtcaatttcttcgaaaaaaatgggtgggtaaactccatttaatcattttccgcccggaatgtggtaaaccccctcctacaaaaggtgccttgatattaacccttggaacgccccacccggcgacatatcattat

SEQ ID NO: 33112 - DNA, 242 bp, Macaca Mulatta
ggagctgcgatcccgggaagaggagctgactcgggcggctctgcagcagaagtctcaggaggagctgctaaagcggcgggagcagcagctggcagagcgcgagatcgacgtgctggagcgggaacttaacattctgatattccagctgaaccaggagaagcccaaagtgaagaagaggaaggggaagtttaagagaagtcgtttaaagctcaaagatggacatcgaatcagtttaccttcag

SEQ ID NO: 33113 - DNA, 91 bp, Macaca Mulatta
taaagattatagttcccaacagcacagcaggtctgataatagggaagggaggtgctactgtgaacgctataatggagcagtcaggggcttg

SEQ ID NO: 33114 - DNA, 781 bp, Macaca Mulatta
  misc_feature (1)...(781): n = A,T,C or G
gccatccactgaaggctacattgcagttgtgttacccaaatttgaagaaagtaaaagcataacagaagggttactgacacaaaaacaatatgaagaagtcatggtgaaacgcattaatgccacaactacgtcatgaggattgacatggaataaaaagtgaagcgggattcttgttacctggcctaaaccatcagggcactaaaggagaagaaccagtatatgtaaagcatacctaacagccagccatatgcaggggaggcctagtgcttcacttagttttccctctctgtcttgcataatgagccttggttcccatttgtctacagcctgccagatctggcctgcccatgtactcaccctgttctcttgtatctctctaacaactggtatgcaagggatgtttttctgattaaaaacaaagctctttgatgaaaatttagaaaatacagaaaatttttaagtagccaagtaaaaataatttacccatcatcccataatccaaaagtaaatgcatttgacccttgaacaacatgggtttgaactgccagggtccacttatgcacgcactgttttcaactatcaatgaatcaaaaataaatcattaaccaaacatgaaacccacttatagagcaggttcatatactcagttccgaagggccaactgcaggacttgagtactcatgtatggatttggtaaatngtgggaaaggtcctggaaccagtcccctatgtaaaccaagggataactactacattttaacctacttctgtttgaacatat

SEQ ID NO: 33115 - DNA, 707 bp, Macaca Mulatta
tggccactgtaacagtggacgaactcgccacggatccgcaagccaagtgcagaagcaaagaagcgctggcagtttcaaacgtaatagcattaagaagatcgtgtgaagcttgcttgctttcttttttaaagtcaacttaacatgggctcttcactagtgaccccttccctgtccttgccccatccccccatgttgtaatgctgcacttcctgttttataatgaacctatccagtttgccatgttgccagatgatcaacttttggaagcattgcctaaatttaatgctgccttttctttaactttttttcttctacttttggcgtgtatctggtatgtgtgagtgttcagaacaactgcaaagaaagtgggaggtcaggaaactttaactgagatcatctcaattgtaagagaggataaattcttgaatactgctactactggccagcaacgaaagccatttgcacagagctctgccttctgtggttttcccttcttcatcctacagagtaaagtgttagtcctatttatacacttttcaagatacaagtttatgagagaaatagtattataactccagtatgtttaatcttttagctgtggactttttttttaaccttacaaaactgaaagaaccataaaggtcaagcctcagtgacatgacaccataaagccacagacaaggtacttggcaggggagggcagggaa

SEQ ID NO: 33116 - DNA, 416 bp, Macaca Mulatta
ggggcctggcagccggccgctccccaaacaggaatcccagccctgtctccgcgggccgccgacccctcttcgcccagcgcgctctctgcgccctggctggggtcttctcactccaagatggtttttggggtttgtttaggagggtgggtggggaaggctgagcgaagggggagcagctacagacaggtgaaggtgttctcggagagggtacgcggcctgggttctcatttcccacctctggatccctcttccagcctcacccagccccctttccaaaaggccgggaattcatgagaattcagaggctgcgacagcagcgcaggctcctgcggctccttagctgtgctcatccggctctcagtggatggcaggataatccgagagtcttttctgtgtctccccatcccccacttttt

SEQ ID NO: 33117 - DNA, 1501 bp, Macaca Mulatta
  misc_feature (1)...(1501): n = A,T,C or G
ggtcgcagaaccctagctgtaatcactaaacttgatctcatggatgcgggtaccgatgccatggatgtattgatgggaagggttattccagtcaaacttggaataattggagtagttaacagnnnnnnnnnnnnnnnnnnnnnnnnnnnnnnnnnnnnnnnnnnnnnnnnnnnnnnnnnnnnnnnnnnnnnnnnnnnnnnnnnnnnnnnnnnnnnnnnnnnnnnnnnnnnnnnnnnnnnnnnnnnnnnnnnnnnnnnnnnnnnnnnnnnnnnnnnnnnnnnnnnnnnnnnnnnnnnnnnnnnnnnnnnnnnnnnnnnnnnnnnnnnnnnnnnnnnnnnnnnnnnnnnnnnnnnnnnnnnnnnnnnnnnnnnnnnnnnnnnnnnnnnnnnnnnnnnnnnnnnnnnnnnnnnnnnnnnnnnnnnnnnnnnnnnnnnnnnnnnnnnnnnnnnnnnnnnnnnnnnnnnnnnnnnnnnnnnnnnnnnnnnnnnnnnnnnnnnnnnnnnnnnnnnnnnnnnnnnnnnnnnnnnnnnnnnnnnnnnnnnnnnnnnnnnnnnnnnnnnnnnnnnnnnnnnnnnnnnnnnnnnnnnnnnnnnnnnnnnnnnnnnnnnnnnnnnnnnnnnnnnnnnnnnnnnnnnnnnnnnnnnnnnnnnnnnnnnnnnnnnnnnnnnnnnnnnnnnnnnnnnnnnnnnnnnnnnnnnnnnnnnnnnnnnnnnnnnnnnnnnnnnnnnnnnnnnnnnnnnnnnnnnnnnnnnnnnnnnnnnnnnnnnnnnnnnnnnnnnnnnnnnnnnnnnnnnnnnnnnnnnnnnnnnnnnnnnnnnnnnnnnnnnnnnnnnnnnnnnnnnnnnnnnnnnnnnnnnnnnnnnnnnnnnnnnnnnnnnnnnnnnnnnnnnnnnnnnnnnnnnnnnnnnnnnnnnnnnnggaacaaaggagaaacaggctagccagagaattaccttcagctgtatcacgagacaagnnnnnnnnnnnnnnnnnnnnnnnnnnnnnnnnnnnnnnnnnnnnnnnnnnnnnnnnnnnnnnnnnnnnnnnnnnnnnnnnnnnnnnnnnnnnnnnnnnnnnnnnnnnnnnnnnnnnnnnnnnnnnnnnnnnnnnnnnnnnnnnnnnnnnnnnnnnnnnnnnnnnnnnnnnnnnnnnnnnnnnnnnnnnnnnnnnnnnnnnnnnnnnnnnnnnnnnnnnnnnnnnnnnnnnnnnnnnnnnnnnnnnnnnnnnnnnnnnnnnnnnnnnnnnnnnnnnnnnnnnnnnnnnnnnnnnnnnnnnnnnnnnnnnnnnnnnnnnnnnnnnnnnnnnnnnnnnnnnnnnnnnnnnnnnnnnnnnnnnnnncagtgtgccaaaggcagtaatgcattttttggttaatcatgtgaaagacactcttcagagtgagctagtaggccagctttataaatcatccttattggatgatcttctgactgaatctgaggacatggcacagcgcaggaaagaagcagctgatatgctaaag

SEQ ID NO: 33118 - DNA, 616 bp, Macaca Mulatta
  misc_feature (1)...(616): n = A,T,C or G
agtgtaaatgctatttaaataactgttatatggcatttttattggtattattgtaatattttttctaatatttttgatctgcaattggtttaatccacagatgcagagtacatggatacagagggccaactgtgttttgtaacaggtacttcaaatagcactacagtacatctttgacaaaatttttacaatattccaactttcaatatgaaacagcttaaaaaggcatgggtcaaaaataaagtatagtagtatcacttacgcaaataaagtctcataatcatacaagcacaacactgttaggactctccctgtttaggttgggaaaaacattatataaaacatttccttcaaataaaattacataaattgcttacaaaaatgccaaaatcaataatttcaaacatattaaggagaaaaccttgaacattattggaaaatataaactagttattccttgcttttgtgtaacagatgagttcttgtaaagttttgtgtaaagcaaattctgtaaccattatcttgcttgcactggaggaacatatctcaaggaacctaagagaaagtgttctttaaagcatgtgattcacctgttttttcntggatgtctgtatct

SEQ ID NO: 33119 - DNA, 263 bp, Macaca Mulatta
ttggcagagcccagtgaggagagatgaccgggccaccattaggacccctgtctgccagcagccaagcccgagcgtgggtggcccggggcctctgggcagacacatcttggggctcagggatgccgggggcaggtggccggggcagatgcccctctggctgccctgcccagcccctggcggtgcccacagagcacgtggtggccctgatgcccgaggtgggcagcccacagcatgcgcgggtgctgcagtaccgagagctgctg

SEQ ID NO: 33120 - DNA, 160 bp, Macaca Mulatta
aggtggagcagatgttcgccctgacacccatggacctggcggggaacatcgactacaagtcactgtgctacatcatcacccatggagacgagaaagaggaatgaggggcagggccaggcccacaagagggtacctcaataaactctgttgccaaattgga

SEQ ID NO: 33121 - DNA, 330 bp, Macaca Mulatta
  misc_feature (1)...(330): n = A,T,C or G
ggatgttttatatactgtctgcaaccctgttggcaaagtgcagcgtattgttatattcaaaagaaatgggatacaagcaatgnnnnnnnnnnnnnnnnnnnnnnnnnnnnnnnnnnnnnnnnnnnnnnnnnnnnnnnnnnnnnnnnnnnnnnnnnnnnnnnnnnnnnnnnnnnnnnnnnnnnnnnnnnnnnnnnnnnnnnnnnnnnnnnnnnnnnnnnnnnnnnnnnnnnnnnnnnnnnnnnnnnnnnnnnnnnnagatagaggaaagggtcgccagagacaagccattttgggagaacacccttcttcgtttagacatgatggctatgg

SEQ ID NO: 33122 - DNA, 558 bp, Macaca Mulatta
caccaggtccgtgtcctcgtcctcctaccgcaggatgttcggcggcccgggcaccgcgagccggccgagctccagccggagctacgtgactacgtccacccgcacctacagcctgggcagcgcgctgcgccccagcaccagccgcagcctctacgcctcgtccccgggcggcgtgtatgccacgcgctcctctgcggtgcgcctgcggagcagcgtgcccggggtgcggctcctccaggactcggtggacttctcgctggccgacgccatcaacaccgagttcaagaatacccgcaccaacgagaaggtggagctgcaggagctgaatgaccgcttcgccaactacatcgacaaggtgcgcttcctggagcagcagaataagatcctgctggccgagctcgagcagctcaagggccagggcaagtcgcgcctgggggacctctacgaggaggagatgcgggagctgcgccggcaggtggaccagctaaccaacgacaaagcccgcgtcgaggtggagcgcgacaacctgaccgaggacatcatgcgcctccgggagaa

SEQ ID NO: 33123 - DNA, 324 bp, Macaca Mulatta
  misc_feature (1)...(324): n = A,T,C or G
ggtatgtccccccagaccaagtcaaggggcccgcttataccaaaggcagtgcctccacccctgtgcagggctccatcccagaaggaaagccccttcggacacttctgggtgatcctgcaccgtctctctcagttgctgcctccacctcgagccagnagcccgtcagtcagtctcacgctcggacatcccaggcccggagcactcagccacctccccactcctctgtcaaaaaagccagtactgacctgctggctgacattggtggagacccctttgctgcaccccagacggcaccagcttttgctgcattccctgccttggggg

SEQ ID NO: 33124 - DNA, 416 bp, Macaca Mulatta
ttcgctcattctcctgatcttgccaccgtcccatgtggtcgcctgcatttctccgtgcgtcctccctgcactcatgcccccacccacccgcccaaatgtccgatccccgaccttcttcgtaccgtcctcccccccgcctcaccgggcgccctggccgcagacacgctcgacgaggcggagcgccagtggaaggccgagttccaccgctggagctcctacatggtgcactggaagaaccagttcgaccactacagcaagcaggatcgctgctcagacctgtgaccccggcgggacccccaagtcccccgctccgcccggcctcctagctgtatatactagttatatcagggctgggctataacacagaggagccccagaccctacccatccacaccgcgaaccccgacgtcccccgg

SEQ ID NO: 33125 - DNA, 120 bp, Macaca Mulatta
aggacagtccggggctcagagctgcctgttttggagcggatttgccaggaacttacagctgctgctcaacccttccggaggctagaggcttcacgggatcagcttcgccagctgttcaag

SEQ ID NO: 33126 - DNA, 1061 bp, Macaca Mulatta
gggggttttgctcaagtgtttgggtgtcttcgcggccgctgaagatgaaccgactcttcgggaaagcgaaacccaaggctccgccgcccagcctgactgactgcattggcacggtggacagcagggcagaatccattgacaagaagatttctcgattggatgctgagctagtgaagtataaggatcagatcaagaagatgagagagggtcctgcaaagaatatggtcaagcagaaagccttgcgagttttaaagcaaaagcggatgtatgagcagcagcgggacaatctcgcccaacagtcattcaacatggaacaagccaattataccatccagtcattgaaggacaccaagaccacggttgatgctatgaaactgggagtaaaggaaatgaagaaggcatacaagcaagtgaagatcgaccagattgaggatttacaagaccagctagaggatatgatggaagatgcaaatgaaatccaagaagcactgagtcgcagttatggcaccccagaactggatgaagatgatttagaagcagagttggatgcactgggtgatgagcttctggctgatgaagacagttcttatttggatgaggcagcatctgcacctgcaattccagaaggtgttcccactgacacaaaaaacaaggatggagttctggtggatgaatttggattgccacagatccctgcttcatagatttgcatcattcaagtatatcttgtaaaacaaacacgtattacgggactaggaaatatttatctttccaaatttaccataacagatgtaggtttctttcctttctttgaaggaaagtttaattacattgctcttttattttttccattaagagactcattgcttgggaaatgctttctttgtactaaaatttgattcctttttttcttaaagaaaacaaactcagttttaaagtatctttagctcgtatgacttgttttcattcagtaataataatttgaaataaaactaaaggaaagggaaacgtaaaaatctatgaccgtggtaactctacaggtctcaaaatgaacctgatta

SEQ ID NO: 33127 - DNA, 112 bp, Macaca Mulatta
aaggtacagcagggaagaactggaaattcagagaaagaaacagcccttccatctacaaaagctgagtttacttctcctccctctttattcaagactgggctcccaccgagca

SEQ ID NO: 33128 - DNA, 885 bp, Macaca Mulatta
  misc_feature (1)...(885): n = A,T,C or G
ggagaaactcagccttaatctggatcataagtctcggatctttcagaacctcaacggggctttannnnnnnnnnnnnnnnnnnnnnnnnnnnnnnnnnnnnnnnnnnnnnnnnnnnnnnnnnnnnnnnnnnnnnnnnnnnnnnnnnnnnnnnnnnnnnnnnnnnnnnnnnnnnnnnnnnnnnnnnnnnnnnnnnnnnnnnnnnnnnnnnnnnnnnnnnnnnnnnnnnnnnnnnnnnnnnnnnnnnnnnnnnnnnnnnnnnnnnnnnnnnnnnnnnnnnnnnnnnnnnnnnnnnnnnnnnnnnnnnnnnnnnnnnnnnnnnnnnnnnnnnnnnnnnnnnnnnnnnnnnnnnnnnnnnnnnnnnnnnnnnnnnnnnnnnnnnnnnnnnnnnnnnnnnnnnnnnnnnnnnnnnnnnnnnnnnnnnnnnnnnnnnnnnnnnnnnnnnnnnnnnnnnnnnnnnnnnnnnnnnnnnnnnnnnnnnnnnnnnnnnnnnnnnnnnnnnnnnnnnnnnnnnnnnnnnnnnnnnnnnnnnnnnnnnnnnnnnnnnnnnnnnnnnnnnnnnnnnnnnnnnnnnnnnnnnnnnnnnnnnnnnnnnnnnnnnnnnnnnnnnnnnnnnnnnnnnnnnnnnnnnnnnnnnnnnnnnnnnnnnnnnnnnnnnnnnnnnnnnnnnnnnnnnnnnnnnnnnnnnnnnnnnnnnnnnnnnnnnnnnnnnnnnnnnnnnnnnnnnnnnnnnnnnnnnnnnnnnnnnntgtggaacgtgccatacatctcgcaggcctatgtgatttttggggatacgctgcggacggagctgccccagagggacgtgttctcaggcagtgacacggacccggacatggccttctgtaagagctttcgagacaagg

SEQ ID NO: 33129 - DNA, 2804 bp, Macaca Mulatta
  misc_feature (1)...(2804): n = A,T,C or G
aagtggacaatgaatttgaaacagttgccactcagctcctaaaaaggacccaagctatgcttaacaaatacagatgcctgctcctagaagatgccatgnnnnnnnnnnnnnnnnnnnnnnnnnnnnnnnnnnnnnnnnnnnnnnnnnnnnnnnnnnnnnnnnnnnnnnnnnnnnnnnnnnnnnnnnnnnnnnnnnnnnnnnnnnnnnnnnnnnnnnnnnnnnnnnnnnnnnnnnnnnnnnnnnnnnnnnnnnnnnnnnnnnnnnnnnnnnnnnnnnnnnnnnnnnnnnnnnnnnnnnnnnnnnnnnnnnnnnnnnnnnnnnnnnnnnnnnnnnnnnnnnnnnnnnnnnnnnnnnnnnnnnnnnnnnnnnnnnnnnnnnnnnnnnnnnnnnnnnnnnnnnnnnnnnnnnnnnnnnnnnnnnnnnnnnnnnnnnnnnnnnnnnnnnnnnnnnnnnnnnnnnnnnnnnnnnnnnnnnnnnnnnnnnnnnnnnnnnnnnnnnnnnnnnnnnnnnnnnnnnnnnnnnnnnnnnnnnnnnnnnnnnnnnnnnnnnnnnnnnnnnnnnnnnnnnnnnnnnnnnnnnnnnnnnnnnnnnnnnnnnnnnnnnnnnnnnnnnnnnnnnnnnnnnnnnnnnnnnnnnnnnnnnnnnnnnnnnnnnnnnnnnnnnnnnnnnnnnnnnnnnnnnnnnnnnnnnnnnnnnnnnnnnnnnnnnnnnnnnnnnnnnnnnnnnnnnnnnnnnnnnnnnnnnnnnnnnnnnnnnnnnnnnnnnnnnnnnnnnnnnnnnnnnnnnnnnnnnnnnnnnnnnnnnnnnnnnnnnnnnnnnnnnnnnnnnnnnnnnnnnnnnnnnnnnnnnnnnnnnnnnnnnnnnnnnnnnnnnnnnnnnnnnnnnnnnnnnnnnnnnnnnnnnnnnnnnnnnnnnnnnnnnnnnnnnnnnnnnnnnnnnnnnnnnnnnnnnnnnnnnnnnnnnnnnnnnnnnnnnnnnnnnnnnnnnnnnnnnnnnnnnnnnnnnnnnnnnnnnnnnnnnnnnnnnnnnnnnnnnnnnnnnnnnnnnnnnnnnnnnnnnnnnnnnnnnnnnnnnnnnnnnnnnnnnnnnnnnnnnnnnnnnnnnnnnnnnnnnnnnnnnnnnnnnnnnnnnnnnnnnnnnnnnnnnnnnnnnnnnnnnnnnnnnnnnnnnnnnnnnnnnnnnnnnnnnnnnnnnnnnnnnnnnnnnnnnnnnnnnnnnnnnnnnnnnnnnnnnnnnnnnnnnnnnnnnnnnnnnnnnnnnnnnnnnnnnnnnnnnnnnnnnnnnnnnnnnnnnnnnnnnnnnnnnnnnnnnnnnnnnnnnnnnnnnnnnnnnnnnnnnnnnnnnnnnnnnnnnnnnnnnnnnnnnnnnnnnnnnnnnnnnnnnnnnnnnnnnnnnnnnnnnnnnnnnnnnnnnnnnnnnnnnnnnnnnnnnnnnnnnnnnnnnnnnnnnnnnnnnnnnnnnnnnnnnnnnnnnnnnnnnnnnnnnnnnnnnnnnnnnnnnnnnnnnnnnnnnnnnnnnnnnnnnnnnnnnnnnnnnnnnnnnnnnnnnnnnnnnnnnnnnnnnnnnnnnnnnnnnnnnnnnnnnnnnnnnnnnnnnnnnnnnnnnnnnnnnnnnnnnnnnnnnnnnnnnnnnnnnnnnnnnnnnnnnnnnnnnnnnnnnnnnnnnnnnnnnnnnnnnnnnnnnnnnnnnnnnnnnnnnnnnnnnnnnnnnnnnnnnnnnnnnnnnnnnnnnnnnnnnnnnnnnnnnnnnnnnnnnnnnnnnnnnnnnnnnnnnnnnnnnnnnnnnnnnnnnnnnnnnnnnnnnnnnnnnnnnnnnnnnnnnnnnnnnnnnnnnnnnnnnnnnnnnnnnnnnnnnnnnnnnnnnnnnnnnnnnnnnnnnnnnnnnnnnnnnnnnnnnnnaaacaagttttgcattttataattggatatagtcaacatatgatgtatgtttttgtttgttgctggattntgtttcatttaacctctctttgcaccctctcccacaacaaataccaagcatcaaaagcactttcatttgaaaattatgttgtaatttttcagtttaaactttaaggagactttggccttgtttatgcttcttgtctgagaacagtggtcatccctggcagcaattcattaccaaaacacagacaaaccaaaggtaaccagctagcccaccactgaaaggaaagatctgagacatgggattcccatttgagagccaaaggatatgccctgtcacgatttctgtttggcctgtgttcatattagtgagcatggcttattgctttatttatttttatttcttgtcagggagtgttctccgttttcctttctcgtatacctgccccaggttatcccatttctgttgttacctttattctcaatgtcattgtaaccatcacttatctcctctcattgggaaagctacatgatagtatttgtatgcactcttctcccacacatacacacatgtgcgtgtatctgagctgctcggatccagaggtcatttttgttacagtgtgtgcacactcactctccttcttagtgtgcatactctctcatttattctgtttatctccctggctctggaggtgcagcctctggtcttcactttagtgtgttactagaatctgcttctggctgtcgccagcatggggatgacccagattgtcatcatgttgggcatttcttttccggattggcctgttatggaaaggaaggcttctgattagaaatcaaagcaacagaagacctatacccccggtgcccctgtgtcccactacacacaaaaaaccctgtgag

SEQ ID NO: 33130 - DNA, 623 bp, Macaca Mulatta
  misc_feature (1)...(623): n = A,T,C or G
gacgaggccttcacgttattggccgggatggnnnnnnnnnnnnnnnnnnnnnnnnnnnnnnnnnnnnnnnnnntgtgctgggattagcggcgttagccaccgcgctcggttgcaaataacatcttaattttgttataaaaaatagtcattctcacctaccccctgacatagtctcagcgacctgtagggccgaggttacacttggagaacccgtgctctagggccaaacccattcttcttgccctggcccacgtgttccccccaccgctccacactggagccactgcctaattctccagcccaagatggtgctcgccagccctcctctcaatgctcatcacacacagggctattcctttcctccaatgaaccaaccgcctcccgcccacctccagttcccagccctctgttccctttgcctggtccaccctcggcctccctgggtcgcagacgaggtcggcctcgtcattccccgcagaccgccgcgcgtccctcttgtgcggttcaccacagttgtattttaagtgatcatgtgagtcgtcgttaaatgcctgtctccccgcggatcatgggctcctcgaggacagggaccggcctgtctgtccactgctgttaccccgcgc

SEQ ID NO: 33131 - DNA, 136 bp, Macaca Mulatta
agaggccggaggaagactgcctctttacagccaggaatctcagaggatttgaaaaaggtgaaggaagggatgggcattgacagtagtgatgcagtggacttcttcatcctcctggacaacgtggctgctgagcagg

SEQ ID NO: 33132 - DNA, 1123 bp, Macaca Mulatta
  misc_feature (1)...(1123): n = A,T,C or G
ggagagtctgattttggtgacagtaactccttagatctctcannnnnnnnnnnnnnnnnnnnnnnnnnnnnnnnnnnnnnnnnnnnnnnnnnnnnnnnnnnnnnnnnnnnnnnnnnnnnnnnnnnnnnnnnnnnnnnnnnnnnnnnnnnnnnnnnnnnnnnnnnnnnnnnnnnnnnnnnnnnnnnnnnnnnnnnnnnnnnnnnnnnnnnnnnnnnnnnnnnnnnnnnnnnnnnnnnnnnnnnnnnnnnnnnnnnnnnnnnnnnnnnnnnnnnnnnnnnnnnnnnnnnnnnnnnnnnnnnnnnnnnnnnnnnnnnnnnnnnnnnnnnnnnnnnnnnnnnnnnnnnnnnnnnnnnnnnnnnnnnnnnnnnnnnnnnnnnnnnnnnnnnnnnnnnnnnnnnnnnnnnnnnnnnnnnnnnnnnnnnnnnnnnnnnnnnnnnnnnnnnnnnnnnnnnnnnnnnnnnnnnnnnnnnnnnnnnnnnnnnnnnnnnnnnnnnnnnnnnnnnnnnnnnnnnnnnnnnnnnnnnnnnnnnnnnnnnnnnnnnnnnnnnnnnnnnnnnnnnnnnnnnnnnnnnnnnnnnnnnnnnnnnnnnnnnnnnnnnnnnnnnnnnnnnnnnnnnnnnnnnnnnnnnnnnnnnnnnnnnnnnnnnnnnnnnnnnnnnnnnnnnnnnnnnnnnnnnnnnnnnnnnnnnnnnnnnnnnnnnnnnnnnnnnnnnnnnnnnnnnnnnnnnnnnnnnnnnnnnnnnnnnnnnnnnnnnnnnnnnnnnnnnnnnnnnnnnnnnnnnnnnnnnnnnnnnnnnnnnnnnnnnnnnnnnnnnnnnnnnnnnnnnnnnnnnnnnnnnnnnnnnnnnnnnnnnnnnnnnnnnnnnnnnnnnnnnnnnnnnnnnnnnnnnnnnnnnnnnnnnnnnnnnnnnnnnnnnnnnnnnnnnnnnnaggtacaagcggagatcaagcgaaaatggcgaagctggaaggtgaaccgttactttgctgtggacttcaagcaccgacacccgtctctggccagcagtggggtgaacgggggcacccagctctccatcctgagcaagagcagctcccaaatccgcatgtctggcctccctgctgacaacctggccacctgagc

SEQ ID NO: 33133 - DNA, 384 bp, Macaca Mulatta
  misc_feature (1)...(384): n = A,T,C or G
gataaaatgcaatacccaatttcaattaatgttaatccctgcataaaattgaagggatccagaggattgttgcacattttctacattccaannnnnnnnnnnnnnnnnnnnnnnnnnnnnnnnnnnnnnnnnnnnnnnnnnnnnnnnnnnnnnnnnnnnnnnnnnnnnnnnnnnnnnnnnnnnnnnnnnnnnnnnnnnnnnnnnnnnnnnnnnnnnnnnnnnnnnnnnnnnnnnnnnnnnnnnnnnnnnnnnnnnnnnnnnnnnnnnnnnagggaaaatacaaatgtgttgttgaagctatttctgggagtccagaagaaatgctcttttgcttggagtttgacatcatacaccaacctaattcaaattagaataaattgagta

SEQ ID NO: 33134 - DNA, 206 bp, Macaca Mulatta
  misc_feature (1)...(206): n = A,T,C or G
ttgggttcgagttctggaaacagctgtgcgctgagcatggtatcagccccgagggcatcgtggaggagttcgccaccgaaggcactgaccgcaaggacgtctttttctaccaggncaggcagacgatgagcactacatcccccgggccgtgctgctggacctggagccccgggtgatcccactccatcctcaactccccctatgcc

SEQ ID NO: 33135 - DNA, 93 bp, Macaca Mulatta
cagacagctattaaaagaaacaaccccaggaagtttctgcgcagcgttggagatggggagactgtggaatttgatgtcgtggaaggagagaag

SEQ ID NO: 33136 - DNA, 175 bp, Macaca Mulatta
tagctacttactggcttatttcaacagctgcctgaatgccattgtctatgggctcttgaaccaaaacttccgcagggaatacaagaggatcctcttggccctttggaacccacggcactgcattcaagatgcttccatgggcagccatgtagaggggctgcagagcccagctcca

SEQ ID NO: 33137 - DNA, 860 bp, Macaca Mulatta
ggggttggggagaatcaacatgacgctgcaggccagggttttctttgctctggggtcgcggctgccctgtggcctcgctcctcggcggtttttcagttatgggacaaaaatattatatcaaaacactgaagctttgcagtctaaattctttccaccccttcaaaaagcgatgctaccacctaatagttttcaaggaaaagtggcattcattaccgggggaggtactggccttggtaaaggaatgacggctcttctgtccagcctaggtgctcagtgcgtgatagccagccggaagatggatgttttgaaagctaccgcagaacaaatttcttctcaaactggaaataaggttcatgcaattcagtgtgatgtgagggatcctgatatggttcaaaacactgtgtcagaactgatcaaagttgcaggacatcctaatattgtgataaacaatgcagcagggaattttatttctcctactgaaagactttctcctaatgcttggaaaaccataactgacatagttctaaatggcaccagcctttgtgacactagaaattggaaaacaactaattaaagcacagaaaaggagcagccatttcttgctattaccactatctatgctggagactgggttcaggttttgtgagtaccaagtggcttctgccaaagcaagtggtggaagcccatgagcaaggtctccttggcaactgaatggggggtaaaatatgggaatgggcaattctaatgtgaatctccaccaaggggcctattaacaaaccacaaggtgccttttagcccgtctggaacctaaacttgtggaaaattttgagaaagaaaatgatttgaccgaaattccctgg

SEQ ID NO: 33138 - DNA, 892 bp, Macaca Mulatta
  misc_feature (1)...(892): n = A,T,C or G
gggccctttcccttcggcgcgccactgaagatcctggtgtcgccatgggccgccgccccgcccgttgttaccggtattgtaagaacaagccgtacccaaagtctcgcttctgccgaggtgtccctgatgccaacattcgcatctttcacctggggcggaagaaggcaaaagtggatgactttccgctctgtggccacatggctgtcacatgaatatgagcagctgtcctctgaacccctgcaggctgccccaatttctgccaataactacatggcgaaaaacttgtggcaaggcatggcttccatatgcgggtgcggctccaccccttccacctcatccgcatcaacaagatgttgtcctgtgctggggccgacaggctccaaacgggcatgccaggtgcttttggaaagccccagggcactgtggccagggttcacattggccaagttatcatgtccatccgcaccaagctgcagaacaaggagcatgtgattgaggccctgcgcagggccaagttcaagtttcctggccgccagaagatccacatctcaaaaaagtgggggcttcaccaaattcaatggctgatgaatttgaaagacatggttggctgaaaaagcgggctccttccccaaatgggctggggggggtccaaagaacatatccccaagtccgtggggtccctctgtgaacaaaatgggggggggcccctggcgacctcaatgaaggggcctttccaaataagggctgagccccccactagtaatgacctccccctcactgaagaattctgatcttgtccctgggtcccgagccggagaaatggtgatanatatagacgacgcaacgcgagcaggtctgtgtaagttaaatatatctggaaaatttctggtat

SEQ ID NO: 33139 - DNA, 163 bp, Macaca Mulatta
atacagagacatggtgcctaagacgattgcaaggaagatcttcggctccatctgctccttgagtggcgtcctggtcattgccctgccagtccctgtgattgtttccaattttagccggatttaccaccagaatcagagagctgataaacgcagggcacaaaag

SEQ ID NO: 33140 - DNA, 651 bp, Macaca Mulatta
acagcttgggatatggggaggagcaagccatcagtgatgaggacgaagaggaaagttttcctggctggaagagatgggtgtgcaagataaaattaaaaagccagacatactttctatcaagcttcgtaaagagaaacatgaagtacagatggatcacagacctgagtctgttgtgttggtaaaaggaatcaacacctttacattgctcaattttttgattaactgtaagagtttagttgctacctcaggtccacaggcaggacttcctccaaccctcttgtcccctgttgctttccgaggtgccacaatgcaaatacttaaggcacgaagtgtaaatgtgaagacacaagctctttctggatacagagaccagtttagtttggagattacaggtcctatcatgcctcattctctgcattcactgaccatgctgctcaaatcttcacagagtgggtctttctctgcagtactatatccacacgagccaactgctgtatttaacatctgcctgccagtggacaaagtacttgatatggaggttgttcataaggagcttactaactgtggtttgcaccctaacactctggagcaacttagtcaaataccattacttgggaaatcatctttacggaatgtggtgctgagagacta

SEQ ID NO: 33141 - DNA, 235 bp, Macaca Mulatta
  misc_feature (1)...(235): n = A,T,C or G
nggaggccgcgcttcgggtccaccacatccccgaggaccctggccacctggagctgtgcccgctgcccccttccttgaaggcctgtgacacctgggctgggggcaaggctgggagtgctgtgatttcggaggagggcagaagccctgggtctggcgaggccacaccagaggcctgggtcatccgggctctgccgcgggcccaggaggtcctgaagatctaccctggctggctcaa

SEQ ID NO: 33142 - DNA, 147 bp, Macaca Mulatta
gggtctcttctttgacgattcctacggcttctacccaggccaggtgctcattggccctgccaagatcttctccagcgtccaatggctgtcaggtgtcaagcctgtgctcagcaccaagagcaagttccgagtggtggtggaagaggt

SEQ ID NO: 33143 - DNA, 496 bp, Macaca Mulatta
ttttcaaaaaataaagtaggaaaatgcacttactaagaacatgaaaaaaaatgaagtaggaaaataagatgaagactttgtattttggctatcaagttttattgtatgatcatcttaaatgagctcatttcatgaaactcataattatctatagaaggatatgccaattacaaagaaatgaaaagttcgtattatttataaacctgatttttctatcagtagtttcagtctcctccccaaggaccttcttcatccaacaagttacaaaatttcaatgtcctttctgtactatgttgggtgacctgtaaatgtaatgaccaaaagaaaagccacagaataaagaagaaatggtcaaagacctggataatatgcaaattggccattatattagaacaatcaagagctgactgtattatcattaccgctttctgcctagggtggccaaattctctagaaatagacatcaagccagttaacttcacttttccctgcaatg

SEQ ID NO: 33144 - DNA, 73 bp, Macaca Mulatta
cagaactttaccttttgaccagttggtccagagggcagctgaagagaagcataaagaattctttgtttcagag

SEQ ID NO: 33145 - DNA, 752 bp, Macaca Mulatta
tgcaaatcccaaccaaaaagcccattacattttttaagttagaatgggactcttctggatagttgaacttcttcactttataaaaaaaggaaagaggaaaaatcactgctgtatactaaatacctcacagactagatgaaaagatggttgtaagctttgggaattaaaaacaaatacattttagtaaatatatatttttaaatagtctatgactgttctgttctcctcattccaacagaaagcacctgaacccttataacaactgcagagggtgagtggggctaatagagctggtagtgctctttataagcctgtctgagaacagagtccatccacctgctacaaagacaactctgctcagggaaacccagccctgaaatgctgcacccaggtagacaccccagaatgccaactgaggcaagtcgttcttcattcatataacaagtattaattgagtacatgctataagaaaagtaactgtcacacagactataaacacctgtgttggcacaattatttagcatcttctctacctgtgggcagaagcaaatataatagccactagttaatatataataagaaataactgccctagaaagtagagtatgtcacacctttaggattgatcagggcattcccccatgtttgcagggaattggaaagctgcctggtgtctcaataagtttaagattttgtagagcaggtgtgttctcactgatggagtgtcaacagtccacctcgtaaaactctcc

SEQ ID NO: 33146 - DNA, 486 bp, Macaca Mulatta
  misc_feature (1)...(486): n = A,T,C or G
aggtcagcgcattgtgaataggctgagaacttcgttattctcctccatcctgaggcaggaggttgctttctttgacaagactcgcacaggagaattgattaaccgcctctcatcagacactgaactcctggggcgctcagtgactgaaaacctctcagatgggctcagggccggggcccaggcttctgtaggcatcagcatgatgnnnnnnnnnnnnnnnnnnnnnnnnnnnnnnnnnnnnnnnnnnnnnnnnnnnnnnnnnnnnnnnnnnnnnnnnnnnnnnnnnnnnnnnnnnnnnnnnnnnnnnnnnnnnnnnnnnnnnnnnnnnnnnnnnnnnnnnnnnnnnnnnnnnnnnnnnnnnnnnnnngaactgttcgagcttttgggacagtaatgactgaaagagacaaatatgccagcaaagtggactatgtgatgcagttagcaaggaaagaggcattcgctcgggctggcttctttggagca

SEQ ID NO: 33147 - DNA, 216 bp, Macaca Mulatta
catttcaaaggccacataacttagttttctctacttacacattcagtataaatatgtagctattttctgttcatatcaaacattaactacaaggcacattcgtatcaattttgtgtttctcaaatttaagtaccataccagttctgaagcagtgtcccagcttccatgttaaacaccccttgtttcaccattccagcaagtgctaaagggtgtact

SEQ ID NO: 33148 - DNA, 74 bp, Macaca Mulatta
ggataaaatgaaaagtccacgagtggctctttcagctgcaacacagaagtctcttgataggaagaaatacatga

SEQ ID NO: 33149 - DNA, 2746 bp, Macaca Mulatta
  misc_feature (1)...(2746): n = A,T,C or G
agacgcccaaaggggtggggcggtgaggggaaggaggagggaagtaggacttcaacatggcggctgcggcactggcggtggctacggtgacggcctggcccggagcgggcagaaaaggaggtggtggcgttcgctctccctaggggccgtcgggagctcagcggggaccgagcgtcggaggccggccggtgccagcacctttcggcttctgggacggcggcagcagcggcattcagnnnnnnnnnnnnnnnnnnnnnnnnnnnnnnnnnnnnnnnnnnnnnnnnnnnnnnnnnnnnnnnnnnnnnnnnnnnnnnnnnnnnnnnnnnnnnnnnnnnnnnnnnnnnnnnnnnnnnnnnnnnnnnnnnnnnnnnnnnnnnnnnnnnnnnnnnnnnnnnnnnnnnnnnnnnnnnnnnnnnnnnnnnnnnnnnnnnnnnnnnnnnnnnnnnnnnnnnnnnnnnnnnnnnnnnnnnnnnnnnnnnnnnnnnnnnnnnnnnnnnnnnnnnnnnnnnnnnnnnnnnnnnnnnnnnnnnnnnnnnnnnnnnnnnnnnnnnnnnnnnnnnnnnnnnnnnnnnnnnnnnnnnnnnnnnnnnnnnnnnnnnnnnnnnnnnnnnnnnnnnnnnnnnnnnnnnnnnnnnnnnnnnnnnnnnnnnnnnnnnnnnnnnnnnnnnnnnnnnnnnnnnnnnnnnnnnnnnnnnnnnnnnnnnnnnnnnnnnnnnnnnnnnnnnnnnnnnnnnnnnnnnnnnnnnnnnnnnnnnnnnnnnnnnnnnnnnnnnnnnnnnnnnnnnnnnnnnnnnnnnnnnnnnnnnnnnnnnnnnnnnnnnnnnnnnnnnnnnnnnnnnnnnnnnnnnnnnnnnnnnnnnnnnnnnnnnnnnnnnnnnnnnnnnnnnnnnnnnnnnnnnnnnnnnnnnnnnnnnnnnnnnnnnnnnnnnnnnnnnnnnnnnnnnnnnnnnnnnnnnnnnnnnnnnnnnnnnnnnnnnnnnnnnnnnnnnnnnnnnnnnnnnnnnnnnnnnnnnnnnnnnnnnnnnnnnnnnnnnnnnnnnnnnnnnnnnnnnnnnnnnnnnnnnnnnnnnnnnnnnnnnnnnnnnnnnnnnnnnnnnnnnnnnnnnnnnnnnnnnnnnnnnnnnnnnnnnnnnnnnnnnnnnnnnnnnnnnnnnnnnnnnnnnnnnnnnnnnnnnnnnnnnnnnnnnnnnnnnnnnnnnnnnnnnnnnnnnnnnnnnnnnnnnnnnnnnnnnnnnnnnnnnnnnnnnnnnnnnnnnnnnnnnnnnnnnnnnnnnnnnnnnnnnnnnnnnnnnnnnnnnnnnnnnnnnnnnnnnnnnnnnnnnnnnnnnnnnnnnnnnnnnnnnnnnnnnnnnnnnnnnnnnnnnnnnnnnnnnnnnnnnnnnnnnnnnnnnnnnnnnnnnnnnnnnnnnnnnnnnnnnnnnnnnnnnnnnnnnnnnnnnnnnnnnnnnnnnnnnnnnnnnnnnnnnnnnnnnnnnnnnnnnnnnnnnnnnnnnnnnnnnnnnnnnnnnnnnnnnnnnnnnnnnnnnnnnnnnnnnnnnnnnnnnnnnnnnnnnnnnnnnnnnnnnnntagtggaagaggctctggaaatgctccagtgttcagaagaaaanagatgatggagtttcttcagttaatgagcaaatttaaggagatgggctttgagctgaaagacattaaggaagtcttgctattacacaacaatgaccaggacaatgctttggaagacctcatggctcgggcaggagccagctgagaccaggccctgtctaggccctgccgcagaaccaccatccctgggaggccctgcagagcccatctgtggggaaagagaaagggcagcttccagattttcttttgggggttagaaggtcagatgtggaggttgtgctcgccagtctctgtgagcctaggccctgagctggggaggtggggaagattcgggcaagtgcccccagaattgtcctggctccttccatattaaacgtatttgcattttgagaagtgtccttcccacctcagtcctccagagagactgccctagtctttctggggtctttatgtcctcagctaaagcctggcctagttgctgagaggggctggggagatggggcgggagggccagactcagtgctgctgtggagctaggtgctgccccttcccccgagactggtggactgaactctaatcaagttgagttcaagtgaaagattcttccagggttttattttttcccctcctaacaaagtctcatagtgttaacactggttctgcaatgtctctgaggtgcaaagaatgcacttttccctatggggcccagagtttgccttttctgccaggcagtcaccacgcttccctaccccagcctgtttcttttggcttggtgtggaccacagtcctctgctatccagggttttagagcccctgctctaggaaacagttgttagtttaagaaatcattggccccttcccagcacactgaatgggggagcagacgggccatgatttagtcggccagcactaactccacctctgttctccttgaacagcttcccttccagcccactgctttaggatgacacaatgaataacacctagtcatagaaatcagtctctttggtttgttttgtattatgttgtacatcattaaagatctaaatacaaaggatatacagtcttgatgaatctaaaataatttgctaactattttgattcttcagagagaactactaataaaaatctaaaagg

SEQ ID NO: 33150 - DNA, 695 bp, Macaca Mulatta
  misc_feature (1)...(695): n = A,T,C or G
ggaattacacccggccccgaggccggccagtcccgaaactttccactcgtccccctgtcctcccaggcatcacggagaacgttcaccctggagtccctgacggaggaccgccgatgccaactggaccgatgaggatttcctgccggacgacgtggtgcagtatttaaattcccagaaccaagcagggtacgagcagcacttcccgagcaccctcccggacgagagcaaagtgccccacgggcccggtgactttgacgcgcccgggctgccagacagccacgctggccagcagttccatgccctcgagcagccctgccccgagggcagcaaaaccgacctgcccatccagtggaacgaagtcagctccggaagcgccgaactgtaataatacaagctcaagtgtggcccgcggcccgctgtgccgcagactaacgcctttgggttctgcaacggcatggtcgtccacacgcagaaccccttgaggagcgggcctgctgggggctatcagaccctcggggagaacagcaacccctacgctggcccagagcacttgatgcttcacaacagccccggaagtggcaccagtggaaacgctttccatgaacagccctgtaagccccctctgtggggttatgcctcaacaggcaaccagtggcccctggtgctctcgcncggtgcctgtggtgccaggattc

SEQ ID NO: 33151 - DNA, 809 bp, Macaca Mulatta
  misc_feature (1)...(809): n = A,T,C or G
gggaaaaggggggtattactacatacaagggaacaccccatgggacaaaataatctgaacaacagtctttagccctagaccttccctctaacagcctacccaaatgagaaggaaccagaaaaccaactctggtaatttgacaaaacaaggttctttaacacccccaaaaaaatcacactagctcaccagcaatggacccaaaccaagaagaaatccctgatttacctgaaaaagaatccgggaggttagttattaagataatcagggaggcaccagagaaaggcaaagcccaatacaaggaaatccaaaaaatgatacanaaagtgaagggataaatattcanggggaatagataagaaaaaacaatcaaaacttgggtaagcaatggacacacttatagaaatgcaaaatgctctgggaagtcttcgcaatggaatgactaaaataactaagttccagatacaatacattgnaatttcannnnnnnnnnnnnnnnnnnnnnnnnnnnnnnnnnnnnnnnnnnnnnnnnnnnnnnnnnnnnnnnnnnnnnnnnnnnnnnnnnnnnnnnnnnnnnnnnnnnnnnnnnnnnnnnnnnnnnnnnnnnnnnnnnnnnnnnnnnnnnnnnnnnnnnnnnnnnnnnnnnnnnnnnnnnnnnnnnnnnnnnnnnnnnnnnnnnnnnnnnnnnnnnnnnnnnnnnnnnnnnnnnnnnnnnnnnnnnnnnnnnnnnnnnnnnnnnnnnnnnnnnnnnnnnnnnnnnnnnnnnnnnnnnnnnnnnnnnnnnnnnnnnnnnnnnnnnnnnnnnnnnnnnn

SEQ ID NO: 33152 - DNA, 337 bp, Macaca Mulatta
gccccccaaggaagcctcactcgtttgagccgcggcagacggaggcggcagccacacctcccccttgactccttccctgacgtcctctgcacacagcgacccctccaggggaggccactggacagtgcttttggcccccaaggggcaggcagctgctgtcccctcccctctggggccacgcccccagcacattagtctcagaggtccaggtgagatggagaaggtgcagcttttccggctgttcaggccccatccgctgccctagtcctgcacattcagccggccatggggcacccggtccaggagggcagcgctggtctcaccgtgacaaggggca

SEQ ID NO: 33153 - DNA, 2967 bp, Macaca Mulatta
  misc_feature (1)...(2967): n = A,T,C or G
cttccagataagacaattgcaagccttgtaaaatattactattcttggaaaaaaactcgctctaggacaagtttgatggatcgccaggctcgtaaactagctaatagacataatcagggtgacagnnnnnnnnnnnnnnnnnnnnnnnnnnnnnnnnnnnnnnnnnnnnnnnnnnnnnnnnnnnnnnnnnnnnnnnnnnnnnnnnnnnnnnnnnnnnnnnnnnnnnnnnnnnnnnnnnnnnnnnnnnnnnnnnnnnnnnnnnnnnnnnnnnnnnnnnnnnnnnnnnnnnnnnnnnnnnnnnnnnnnnnnnnnnnnnnnnnnnnnnnnnnnnnnnnnnnnnnnnnnnnnnnnnnnnnnnnnnnnnnnnnnnnnnnnnnnnnnnnnnnnnnnnnnnnnnnnnnnnnnnnnnnnnnnnnnnnnnnnnnnnnnnnnnnnnnnnnnnnnnnnnnnnnnnnnnnnnnnnnnnnnnnnnnnnnnnnnnnnnnnnnnnnnnnnnnnnnnnnnnnnnnnnnnnnnnnnnnnnnnnnnnnnnnnnnnnnnnnnnnnnnnnnnnnnnnnnnnnnnnnnnnnnnnnnnnnnnnnnnnnnnnnnnnnnnnnnnnnnnnnnnnnnnnnnnnnnnnnnnnnnnnnnnnnnnnnnnnnnnnnnnnnnnnnnnnnnnnnnnnnnnnnnnnnnnnnnnnnnnnnnnnnnnnnnnnnnnnnnnnnnnnnnnnnnnnnnnnnnnnnnnnnnnnnnnnnnnnnnnnnnnnnnnnnnnnnnnnnnnnnnnnnnnnnnnnnnnnnnnnnnnnnnnnnnnnnnnnnnnnnnnnnnnnnnnnnnnnnnnnnnnnnnnnnnnnnnnnnnnnnnnnnnnnnnnnnnnnnnnnnnnnnnnnnnnnnnnnnnnnnnnnnnnnnnnnnnnnnnnnnnnnnnnnnnnnnnnnnnnnnnnnnnnnnnnnnnnnnnnnnnnnnnnnnnnnnnnnnnnnnnnnnnnnnnnnnnnnnnnnnnnnnnnnnnnnnnnnnnnnnnnnnnnnnnnnnnnnnnnnnnnnnnnnnnnnnnnnnnnnnnnnnnnnnnnnnnnnnnnnnnnnnnnnnnnnnnnnnnnnnnnnnnnnnnnnnnnnnnnnnnnnnnnnnnnnnnnnnnnnnnnnnnnnnnnnnnnnnnnnnnnnnnnnnnnnnnnnnnnnnnnnnnnnnnnnnnnnnnnnnnnnnnnnnnnnnnnnnnnnnnnnnnnnnnnnnnnnnnnnnnnnnnnnnnnnnnnnnnnnnnnnnnnnnnnnnnnnnnnnnnnnnnnnnnnnnnnnnnnnnnnnnnnnnnnnnnnnnnnnnnnnnnnnnnnnnnnnnnnnnnnnnnnnnnnnnnnnnnnnnnnnnnnnnnnnnnnnnnnnnnnnnnnnnnnnnnnnnnnnnnnnnnnnnnnnnnnnnnnnnnnnnnnnnnnnnnnnnnnnnnnnnnnnnnnnnnnnnnnnnnnnnnnnnnnnnnnnnnnnnnnnnnnnnnnnnnnnnnnnnnnnnnnnnnnnnnnnnnnnnnnnnnnnnnnnnnnnnnnnnnnnnnnnnnnnnnnnnnnnnnnnnnnnnnnnnnnnnnnnnnnnnnnnnnnnnnnnnnnnnnnnnnnnnnnnnnnnnnnnnnnnnnnnnnnnnnnnnnnnnnnnnnnnnnnnnnnnnnnnnnnnnnnnnnnnnnnnnnnnnnnnnnnnnnnnnnnnnnnnnnnnnnnnnnnnnnnnnnnnnnnnnnnnnnnnnnnnnnnnnnnnnnnnnnnnnnnnnnnnnnnnnnnnnnnnnnnnnnnnnnnnnnnnnnnnnnnnnnnnnnnnnnnnnnnnnnnnnnnnnnnnnnnnnnnnnnnnnnnnnnnnnnnnnnnnnnnnnnnnnnnnnnnnnnnnnnnnnnnnnnnnnnnnnnnnnnnnnnnnnnnnnnnnnnnnnnnnnnnnnnnnnnnnnnnnnnnnnnnnnnnnnnnnnnnnnnnnnnnnnnnnnnnnnnnnnnnnnnnnnnnnnnnnnnnnnnnnnnnnnnnnnnnnnnnnnnnnnnnnnnnnnnnnnnnnnnnnnnnnnnnnnnnnnnnnnnnnnnnnnnnnnnnnnnnnnnnnnnnnnnnnnnnnnnnnnnnnnnnnnnnnnnnnntttacagtacccttttcgtgtttggtttctgaacttaaaattgcccttatacttaataatatggtctgcatttaatatgaaaagtgttttcttgataaatctctattgtactatttggatacatttgtgtattccttgcagccaacctgtatttgtgggattggtttagggttaaatcatcaacattatttcaaaaataaatttaagaatttgttctgtgttatctaaagatgtatcagtatattgtcacaattgtgctgttaactaaaaatgctgagacccctttttatagaataacacaaaagacatcaagtcttcttaattcaacccataatcattaagtccttacaaagaatattttacaagtgatagtatttcaacaatgtgtaattaatatttttgatacaatgatttcatattggaatcattatttgtgcaaagggacagatcacttatattgctatactagtggacataggctaaatgtttgcacattcacattcttatcacatgtagaatacttcacaaaataatagtcaacataaggccctaatttatgttttgaaagatcatgtgttcccaaaatattccctatcattggctccacagccttaaagtgctatagatttaagttcattgattagttttaatttttaattttagaccacttatttccataaataccctacgtactggcatatctgaaactctttttccaggttaggttctttctcattgaatcatcttaaatagttcttggacctgaatttagctgatttaaaattcttaatattcaacaatttatacttattttttctttaaaagccacaggggacagttatgtatcttcaaatatctaaagcattttttaaa

SEQ ID NO: 33154 - DNA, 842 bp, Macaca Mulatta
tttttccttccaggaaataaatgtgacctctgggaaaagcggcacgtcctgttcgaagatgcctgcacactggctgagaagtacggcctcctggccgttttggagacatcggccaaggaatccaagaacatagacgaactcttcgtgctcatggccaaggagctgatcgcccgcaacagcctgcacctatatggggagagtgccctgaacagcctcccactggactccagccccgttcttatggcccagggtccaagtgaaaagacccactgcacttgctaagatgtttgcaaagccagtcacacccaccaaagaagcagcctctgaaactaaaggtagccaggataccgtagtgttgccccagtggcactttagaccccagcgtggacttgccgctcacccctaatcctcccagtctggatgggtcacgcttctcccttgactcacaccacaggtcgtagctgctgactctcaggaaaaccagcaccattgttttcactgactcttgactccggagaaagcaggacttcaggccaggagagggaggacgaattgtactcttctcccctttcacttttctgtctccccaacgcttctgctgccttctaccgaattttgtttcttgcttgaagaagagcgtagtgaaggagaggaaggaggcaaaacagcaagagagagaagaggctgtttggaacattctggagcagtttgaaacagctcaggcagggagaatggaacaaaagcccgcaattagaaaccagaatgctgctatcattttgttcctgacattcacacctcaggtcttcactttggggagcaaagccttttagcagaaataccag

SEQ ID NO: 33155 - DNA, 3562 bp, Macaca Mulatta
  misc_feature (1)...(3562): n = A,T,C or G
atgtactctgagtggaggtcactgcatttggtgattcagaatgatcaaggccataccagtgtgctgcacagctatccagagagtgttggacgagaggtggcaaatgctgtagtccgtcctcttgggcaggtgttaggtaccccttcagtggctggtagtgagagttagtgaaaactgacaaagaagtannnnnnnnnnnnnnnnnnnnnnnnnnnnnnnnnnnnnnnnnnnnnnnnnnnnnnnnnnnnnnnnnnnnnnnnnnnnnnnnnnnnnnnnnnnnnnnnnnnnnnnnnnnnnnnnnnnnnnnnnnnnnnnnnnnnnnnnnnnnnnnnnnnnnnnnnnnnnnnnnnnnnnnnnnnnnnnnnnnnnnnnnnnnnnnnnnnnnnnnnnnnnnnnnnnnnnnnnnnnnnnnnnnnnnnnnnnnnnnnnnnnnnnnnnnnnnnnnnnnnnnnnnnnnnnnnnnnnnnnnnnnnnnnnnnnnnnnnnnnnnnnnnnnnnnnnnnnnnnnnnnnnnnnnnnnnnnnnnnnnnnnnnnnnnnnnnnnnnnnnnnnnnnnnnnnnnnnnnnnnnnnnnnnnnnnnnnnnnnnnnnnnnnnnnnnnnnnnnnnnnnnnnnnnnnnnnnnnnnnnnnnnnnnnnnnnnnnnnnnnnnnnnnnnnnnnnnnnnnnnnnnnnnnnnnnnnnnnnnnnnnnnnnnnnnnnnnnnnnnnnnnnnnnnnnnnnnnnnnnnnnnnnnnnnnnnnnnnnnnnnnnnnnnnnnnnnnnnnnnnnnnnnnnnnnnnnnnnnnnnnnnnnnnnnnnnnnnnnnnnnnnnnnnnnnnnnnnnnnnnnnnnnnnnnnnnnnnnnnnnnnnnnnnnnnnnnnnnnnnnnnnnnnnnnnnnnnnnnnnnnnnnnnnnnnnnnnnnnnnnnnnnnnnnnnnnnnnnnnnnnnnnnnnnnnnnnnnnnnnnnnnnnnnnnnnnnnnnnnnnnnnnnnnnnnnnnnnnnnnnnnnnnnnnnnnnnnnnnnnnnnnnnnnnnnnnnnnnnnnnnnnnnnnnnnnnnnnnnnnnnnnnnnnnnnnnnnnnnnnnnnnnnnnnnnnnnnnnnnnnnnnnnnnnnnnnnnnnnnnnnnnnnnnnnnnnnnnnnnnnnnnnnnnnnnnnnnnnnnnnnnnnnnnnnnnnnnnnnnnnnnnnnnnnnnnnnnnnnnnnnnnnnnnnnnnnnnnnnnnnnnnnnnnnnnnnnnnnnnnnnnnnnnnnnnnnnnnnnnnnnnnnnnnnnnnnnnnnnnnnnnnnnnnnnnnnnnnnnnnnnnnnnnnnnnnnnnnnnnnnnnnnnnnnnnnnnnnnnnnnnnnnnnnnnnnnnnnnnnnnnnnnnnnnnnnnnnnnnnnnnnnnnnnnnnnnnnnnnnnnnnnnnnnnnnnnnnnnnnnnnnnnnccattacaacacaagctagcatggagtttcgacggaaagggtcacaaatgtccacagacaccatggtttccaatcctatgtttgatgcaagtgaatttcctgataactatgaagcaggaagagctgaggcttgtgggacactgtgtaggattttttgtagcaagaagactggagaagagattctgccagcttatttatccagnnnnnnnnnnnnnnnnnnnnnnnnnnnnnnnnnnnnnnnnnnnnnnnnnnnnnnnnnnnnnnnnnnnnnnnnnnnnnnnnnnnnnnnnnnnnnnnnnnnnnnnnnnnnnnnnnnnnnnnnnnnnnnnnnnnnnnnnnnnnnnnnnnnnnnnnnnnnnnnnnnnnnnnnnnnnnnnnnnnnnnnnnnnnnnnnnnnnnnnnnnnnnnnnnnnnnnnnnnnnnnnnnnnnnnnnnnnnnnnnnnnnnnnnnnnnnnnnnnnnnnnnnnnnnnnnnnnnnnnnnnnnnnnnnnnnnnnnnnnnnnnnnnnnnnnnnnnnnnnnnnnnnnnnnnnnnnnnnnnnnnnnnnnnnnnnnnnnnnnnnnnnnnnnnnnnnnnnnnnnnnnnnnnnnnnnnnnnnnnnnnnnnnnnnnnnnnnnnnnnnnnnnnnnnnnnnnnnnnnnnnnnnnnnnnnnnnnnnnnnnnnnnnnnnnnnnnnnnnnnnnnnnnnnnnnnnnnnnnnnnnnnnnnnnnnnnnnnnnnnnnnnnnnnnnnnnnnnnnnnnnnnnnnnnnnnnnnnnnnnnnnaggtaaaggtgatggttgactcataagggcggaagcgagccatcagttctgtgtgcagctannnnnnnnnnnnnnnnnnnnnnnnnnnnnnnnnnnnnnnnnnnnnnnnnnnnnnnnnnnnnnnnnnnnnnnnnnnnnnnnnnnnnnnnnnnnnnnnnnnnnnnnnnnnnnnnnnnnnnnnnnnnnnnnnnnnnnnnnnnnnnnnnnnnnnnnnnnnnnnnnnnnnnnnnnnnnnnnnnnnnnnnnnnnnnnnnnnnnnnnnnnnnnnnnnnnnnnnnnnnnnnnnnnnnnnnnnnnnnnnnnnnnnnnnnnnnnnnnnnnnnnnnnnnnnnnnnnnnnnnnnnnnnnnnnnnnnnnnnnnnnnnnnnnnnnnnnnnnnnnnnnnnnnnnnnnnnnnnnnnnnnnnnnnnnnnnnnnnnnnnnnnnnnnnnnnnnnnnnnnnnnnnnnnnnnnnnnnnnnnnnnnnnnnnnnnnnnnnnnnnnnnnnnnnnnnnnnnnnnnnnnnnnnnnnnnnnnnnnnnnnnnnnnnnnnnnnnnnnnnnnnnnnnnnnnnnnnnnnnnnnnnnnnnnnnnnnnnnnnnnnnnnnnnnnnnnnnnnnnnnnnnnnnnnnnnnnnnnnnnnnnnnnnnnnnnnnnnnnnnnnnnnnnnnnnnnnnnnnnnnnnnnnnnnnnnnnnnnnnnnnnnnnnnnnnnnnnnnnnnnnnnnnnnnnnnnnnnnnnnnnnnnnnnnnnnnnnnnnnnnnnnnnnnnnnnnnnnnnnnnnnnnnnnnnnnnnnnnnnnnnnnnnnnnnnnnnnnnnnnnnnnnnnnnnnnnnnnnnnnnnnnnnnnnnnnnnnnnnnnnnnnnnnnnnnnnnnnnnnnnnnnnnnnnnnnnnnnnnnnnnnnnnnnnnnnnnnnnnnnnnnnnnnnnnnnnnnnnnnnnnnnnnnnnnnnnnnnnnnnnnnnnnnnnnnnnnnnnnnnnnnnnnnnnnnnnnnnnnnnnnnnnnnnnnnnnnnnnnnnnnnnnnnnnnnnnnnnnnnnnnnnnnnnnnnnnnnnnnnnnnnnnnnnnnnnnnnnnnnnnnnnnnnnnnnnnnnnnnnnnnnnnnnnnnnnnnnnnnnnnnnnnnnnnnnnnnnnnnnnnnnnnnnnnnnnnnnnnnnnnnnnnnnnnnnnnnnnnnnnnnnnnnnnnnnnnnnnnnnnnnnnnnnnnnnnnnnnnnnnnnnnnnnnnnnnnnnnnnnnnnnnnnnnnnnnnnnnnnnnnnnnnnnnnnnnnnnnnnngaagaagtgatttcctctgaagatattggagctagcattttcaatggacagaagaaggtgctgtattatgctgatgcccttacggaaattgcttttgtggttccttctcctgtggagtcctta

SEQ ID NO: 33156 - DNA, 858 bp, Macaca Mulatta
gggaggcaggaagtgtcggcgccgccactgtccggggacagcctagcgctcttcgctgttgctcgttgtctcgcgcagggcgaccccggttctggtgtttggcgccggaattaaacaaccaccatgtcgagcaaaaaggcaaagaccaagaccaccaagaagcgccctcagcgtgcaacatccaatgtgtttgccatgtttgaccagtcacagattcaggagttcaaagaggccttcaacatgattgatcagaacagagatggtttcatcgacaaggaagatttgcatgatatgcttgcttctctagggaagaatcccactgatgcataccttgatgccatgatgaatgaggcaccagggcccatcaatttcaccatgttcctcaccatgtttggtgagaagttaaatggcacggatcctgaagatgtcatcagaaatgcttttgcttgctttgatgaagaagcaacaggcaccattcaggaagattaccctgagagagctgctgacaaccatggggggatcggtttacggatgaggaagtggatgagctgtacagagaagcaccctattgacaaaaaagggggaaatttcaattacatcgagttcacggcgcatcctgaaatcacggaagcaaagaaacaaagatgaactggaaggaaactttttgcctaaaaaccctttccaaattaaaattgtgcctttaactctggtttttaattttccccaaaaaacctttccccccccacccctctttaagaaaccccttgttttccattggcaagcctttaaattttttcaccaaggcctttttgtccccccacttttttttggaaatgggtaattatctaatttccccct

SEQ ID NO: 33157 - DNA, 199 bp, Macaca Mulatta
  misc_feature (1)...(199): n = A,T,C or G
ttcatgctccaaatcaaagggctttggatcaggaagctctgggaattcatctaaagnnnnnnnnnnnnnnnnnnnnnnnnnnnnnnnnnnnnnnnnnnnnnnnnnnnnnnnnnnnnnnnnnnnnnnnnnnnnnnnnnnnnnnnnnnnnnnnnnatctaaaatgaccaatggcaagacagaacaaagggttcctttctag

SEQ ID NO: 33158 - DNA, 2316 bp, Macaca Mulatta
  misc_feature (1)...(2316): n = A,T,C or G
gaacgcgaccggcagcctcgggcaggggagacgggactgtaggtcagagaagagacggcgattggccgccgggaatcctctgaagcaggagactgccctatccagnnnnnnnnnnnnnnnnnnnnnnnnnnnnnnnnnnnnnnnnnnnnnnnnnnnnnnnnnnnnnnnnnnnnnnnnnnnnnnnnnnnnnnnnnnnnnnnnnnnnnnnnnnnnnnnnnnnnnnnnnnntccctcagcaacctggcggagcagctgcaggccgcacagaacctgcggttcgaggatgtgccggcgcttcgggccttcccagacttaaaagagcggctgaggnnnnnnnnnnnnnnnnnnnnnnnnnnnnnnnnnnnnnnnnnnnnnnnnnnnnnnnnnnnnnnnnnnnnnnnnnnnnnnnnnnnnnnnnnnnnnnnnnnnnnnnnnnnnnnnnnnnnnnnnnnnnnnnnnnnnnnnnnnnnnnnnnnnnnnnnnnnnnnnnnnnnnnnnnnnnnnnnnnnnnnnnnnncattttcttttgagcagtcctcaacttccagaaaggtacctgaagagaaagtatcttctttcctctattcagtggggagacttggcaaacacccaagctttgtccaaggcctgggactgaannnnnnnnnnnnnnnnnnnnnnnnnnnnnnnnnnaacatccaagctttgcccaaggcctgggaccgaactttaaagacgaacaccaagatcttgtacaagnagatatcctattgagtgtttccttcttcctggaacagtaaggaagctgtgcgtatctggagaccatgggcaccacagtggaagactgacattctaaaccctgatgtttttaaagaaacgtcagtatttcagtctcacatatttgaaatatcagtgccttgaacctgaggactgggtcttggggaggattagtgcctagatgtctgatgttggagctgcagcatgccaggccatggctgagagtatgtgagccacaccttgcccttttctgaggctcagggaagtggatggagatagagacacagcaggaaagacggtgctgaagaacatagtgccttgcctccactgtagacttgaagaggtggggaagcaaggacaggaggcaaagagccacactgcccttggcatcatccagagcattgtctggttgacaccaggtcctggttttgtgtcttttgtcaatatctgaatccttgacaaaagaaaaagtgattttgatgatttaaagaaataagggtgattttgacagaaaatatattttaaaaatagtgaccaattgcaatagttatcctcaagccaatttccnnnnnnnnnnnnnnnnnnnnnnnnnnnnnnnnnnnnnnnnnnnnnnnnnnnnnnnnnnnnnnnnnnnnnnnnnnnnnnnnnnnnnnnnnnnnnnnnnnnnnnnnnnnnnnnnnnnnnnnnnnnnnnnnnnnnnnnnnnnnnnnnnnnnnnnnnnnnnnnnnnnnnnnnnnnnnnnnnnnnnnnnnnnnnnnnnnnnnnnnnnnnnnnnnnnnnnnnnnnnnnnnnnnnnnnnnnnnnnnnnnnnnnnnnnnnnnnnnnnnnnnnnnnnnnnnnnnnnnnnnnnnnnnnnnnnnnnnnnnnnnnnnnnnnnnnnnnnnnnnnnnnnnnnnnnnnnnnnnnnnnnnnnnnnnnnnnnnnnnnnnnnnnnnnnnnnnnnnnnnnnnnnnnnnnnnnnnnnnnnnnnnnnnnnnnnnnnnnnnnnnnnnnnnnnnnnnnnnnnnnnnnnnnnnnnnnnnnnnnnnnnnnnnnnnnnnnnnnnnnnnnnnnnnnnnnnnnnnnnnnnnnnnnnnnnnnnnnnnnnnnnnnnnnnnnnnnnnnnnnnnnnnnnnnnnnnnnnnnnnnnnnnnnnnnnnnnnnnnnnnnnnnnnnnnnnnnnnnnnnnnnnnnnnnnnnnnnnnnnnnnnnnnnnnnnnnnnnnnnnnnnnnnttttttaaaggacaaacatggtatcatcaatacatactgttaggttgtctttttaaaaacctaatataatttgttcatctttttataaatatagctcaacacagttatattccttttgtgaatgtattatatctacannnnnnnnnnnnnnnnnnnnnnnnnnnnnnnnnnnnnnnnnnnnnnnnnnnnntatctgtaaaagtaatacattctgattatgaaaatttaaaacgctacatagaaatgtactattatctatctgccagataattattattaataatatgtatttatttttctaggaattaaaatctatcatataagtattgcaaataaaacttaaaaag

SEQ ID NO: 33159 - DNA, 1286 bp, Macaca Mulatta
  misc_feature (1)...(1286): n = A,T,C or G
agtttacagtgatagctctcctttgattgagaagattcaagcatttgaaaaatttttcacaaggcatatttatttgtatgacaagnnnnnnnnnnnnnnnnnnnnnnnnnnnnnnnnnnnnnnnnnnnnnnnnnnnnnnnnnnnnnnnnnnnnnnnnnnnnnnnnnnnnnnnnnnnnnnnnnnnnnnnnnnnnnnnnnnnnnnnnnnnnnnnnnnnnnnnnnnnnnnnnnnnnnnnnnnnnnnnnnnnnnnnnnnnnnnnnnnnnnnnnnnnnnnnnnnnnnnnnnnnnnnnnnnnnnnnnnnnnnnnnnnnnnnnnnnnnnnnnnnnnnnnnnnngggtgtacaactatgagcctttgacacagctcaagaatgtccgagcaaattactatggaaaatacattgctctaagagggacagtggttcgtgtcagtaatataaagcctctttgcaccaagatggcttttctttgtgctgcatgtggagaagttcagagttttcctcttccagatggaaaatacagtcttcccacaaagngtgccctgtgcctgcatgtcgaggcaggtcatttactgctctccgcagatctcctctcacagttacaatggactggcagtcnnnnnnnnnnnnnnnnnnnnnnnnnnnnnnnnnnnnnnnnnnnnnnnnnnnnnnnnnnnnnnnnnnnnnnnnnnnnnnnnnnnnnnnnnnnnnnnnnnnnnnnnnnnnnnnnnnnnnnnnnnnnnnnnnnnnnnnnnnnnnnnnnnnnnnnnnnnnnnnnnnnnnnnnnnnnnnnnnnnnnnnnnnnnnnnnnnnnnnnnnnnnnnnnnnnnnnnnnnnnnnnnnnnnnnnnnnnnnnnnnnnnnnnnnnnnnnnnnnnnnnnnnnnnnnnnnnnnnnnnnnnnnnnnnnnnnnnnnnnnnnnnnnnnnnnnnnnnnnnnnnnnnnnnnnnnnnnnnnnnnnnnnnnnnnnnnnnnnnnnnnnnnnnnnnnnnnnnnnnnnnnnnnnnnnnnnnnnnnnnnnnnnnnnnnnnnnnnnnnnnnnnnnnnnnnnnnnnnnnnnnnnnnnnnnnnnnnnnnnnnnnnnnnnnnnnnnnnnnnnnnnnnnnnnnnnnnnnnnnnnnnnnnnnnnnnnnnnnnnnnnnnaggcagcatgcaatgttgctccacgtggcgtgtatgtttgtggtaacaccacgacgacctctggtctgacggtaactctttcaaaagataatgctctggagattttgctttggaagctggtgccctggtaattggtgatcaagg

SEQ ID NO: 33160 - DNA, 200 bp, Macaca Mulatta
agaccctggcctcctgccgagacaccctgaacttctgcttcaaggagcggctgcaagccgtggacctcatgaaccagcctctggacaaggttctagagcaggccggacgccactcatgggtgaacctgtcccgggcccccaccccacgcacgcagggtcagaaaacgcctcctccagaccctgtgggcacctatacccca

SEQ ID NO: 33161 - DNA, 738 bp, Macaca Mulatta
  misc_feature (1)...(738): n = A,T,C or G
ggggggctgttagcggcgttgtggctaagctcgtgtaacggcggcggtgtcggcagcagctgcagcgaagagagtttggcgcgatgtctcacaccattttgctggtacagcctactaagaggccagaagggagaacttatgctgactacgaatctgtgaatgaatgcatggaaggtgtttgtaaaatgtatgaagaacatctgaaaagaatgaatcccaacagtccctctatcacatatgacatcagtcagttgtttgatttcatcgatgatctggcagacctcagctgcctggtttaccgagctgatacccagacataccagccttataacaaagactggattaaagagaagatctacgttgctccttcgtcggcaggcccaacaggctgggaaataattgtgttggaagcatgggggggggttggggtgggcttggaacacatgtgtgtacagtgtgttgtattggaagttttgtatcatagtaatcctgtttcatctttgttatactctagcctagattgtctgtattggatgaaatgtgaggatcttttttcatcggaaacccccgttacccccacttgctgctttccttccctcacaaacnnnnnnnnnntaaaccttttttatgaaagatttaagaagaaaagttgtttctttcgtcaagtaaaatggttggtttcccagtcccttcaaactggttcctgaaatcaaacctttaaaaacgaacttccatggt

SEQ ID NO: 33162 - DNA, 1744 bp, Macaca Mulatta
  misc_feature (1)...(1744): n = A,T,C or G
tgcgctgcccgggaggagtccctccgctgcgcaccgcgccccccgagcgcgtcgtggccgtcgtgggcgcctcggccagatcagtatccatcatggcggcccacgtgctgcgcctgtttgcnnnnnnnnnnnnnnnnnnnnnnnnnnnnnnnnnnnnnnnnnnnnnnnnnnnnnnnnnnnnnnnnnnnnnnnnnnnnnnnnnnnnnnnnnnnnnnnnnnnnnnnnnnnnnnnnnnnnnnnnnnnnnnnnnnnnnnnnnnnnnnnnnnnnnnnnnnnnnnnnnnnnnnnnnnnnnnnnnnnnnnnnnnnnnnnnnnnnnnnnnnnnnnnnnnnnnnnnnnnnnnnnnnnnnnnnnnnnnnnnnnnnnnnnnnnnnnnnnnnnnnnnnnnnnnnnnnnnnnnnnnnnnnnnnnnnnnnnnnnnnnnnnnnnnnnnnnnnnnnnnnnnnnnnnnnnnnnnnnnnnnnnnnnnnnnnnnnnnnnnnnnnnnnnnnnnnnnnnnnnnnnnnnnnnnnnnnnnnnnnnnnnnnnnnnnnnnnnnnnnnnnnnnnnnnnnnnnnnnnnnnnnnnnnnnnnnnnnnnnnnnnnnnnnnnnnnnnnnnnnnnnnnnnnnnnnnnnnnnnnnnnnnnnnnnnnnnnnnnnnnnnnnnnnnnnnnnnnnnnnnnnnnnnnnnnnnnnnnnnnnnnnnnnnnnnnnnnnnnnnnnnnnnnnnnnnnnnnnnnnnnnnnnnnnnnnnnnnnnnnnnnnnnnnnnnnnnnnnnnnnnnnnnnnnnnnnnnnnnnnnnnnnnnnnnnnnnnnnnnnnnnnnnnnnnnnnnnnnnnnnnnnnnnnnnnnnnnnnnnnnnnnnnnnnnnnnnnnnnnnnnnnnnnnnnnnnnnnnnnnnnnnnnnnnnnnnnnnnnnnnnnnnnnnnnnnnnnnnnnnnnnnnnnnnnnnnnnnnnnnnnnnnnnnnnnnnnnnnnnnnnnnnnnnnnnnnnnnnnnnnnnnnnnnnnnnnnnnnnnnnnnnnnnnnnnnnnnnnnnnnnnnnnnnnnnnnnnnnnnnnnnnnnnnnnnnnnnnnnnnnnnnnnnnnnnnnnnnnnnnnnnnnnnnnnnnnnnnnnnnnnnnnnnnnnnnnnnngtggaggccctgcagtggtctggcgacccccgcgaggtgccctcatctctgtgcagcctcccctgtgggccgggggagcggaagaagatggtgaagggcgtcccctgctgttggcactgtgaggcctgtgacgggtaccgcttccaggtggacgagttcacgtgcgaggcctgtcctggggacatgaggccgacgcccaaccacaccggctgccgccccacgcctgtggtgcgcctgagctggtcctccccctgggcagccctgccgctcctcctggccgtgctgggcatcatggccactaccacagtggtggccaccttcatgcgacacaacaacacgcccattgtccgggcctcgggccgagagctcagctacgtcctcctcaccggcatcttcctcatctacgccatcaccttcctcatggtggctgagcctggggccgtggtctgtgccacccgcaggctcttcctgggcctaggcacgaccctcagctactctgccctgctcaccaagaccaaccgtatctaccgcatctttgagcagggcaagcgctcggtcacaccccctcccttcatcagccccacctcgcagctggccatcaccttcagcctcacctccctgcaggtg

SEQ ID NO: 33163 - DNA, 844 bp, Macaca Mulatta
  misc_feature (1)...(844): n = A,T,C or G
tacagctggctgaaataacatcagagaaacacaaaatccacgagcacctgaaaacctctgcagaacagcaccagcgtacgctaagtgcgtaccggcagagagtgacagcgctacaggaggagagtcgtgccgccaaggnnnnnnnnnnnnnnnnnnnnnnnnnnnnnnnnnnnnnnnnnnnnnnnnnnnnnnnnnnnnnnnnnnnnnnnnnnnnnnnnnnnnnnnnnnnnnnnnnnnnnnnnnnnnnnnnnnnnnnnnnnnnnnnnnnnnnnnnnnnnnnnnnnnnnnnnnnnnnnnnnnnnnnnnnnnnnnnnnnnnnnnnnnnnnnnnnnnnnnnnnnnnnnnnnnnnnnnnnnnnnnnnnnnnnnnnnnnnnnnnnnnnnnnnnnnnnnnnnnnnnnnnnnnnnnnnnnnnnnnnnnnnnnnnnnnnnnnnnnnnnnnnnnnnnnnnnnnnnnnnnnnnnnnnnnnnnnnnnnnnnnnnnnnnnnnnnnnnnnnnnnnnnnnnnnnnnnnnnnnnnnnnnnnnnnnnnnnnnnnnnnnnnnnnnnnnnnnnnnnnnnnnnnnnnnnnnnnnnnnnnnnnnnnnnnnnnnnnnnnnnnnnnnnnnnnnnnnnnnnnnnnnnnnnnnnnnnnnnnnnnnnnnnnnnnnnnnnngcccagtttcctctcaacaatctttgaagaaccttcgagaaaggagaaacacagacctcccacttctagacatgcacactgtaacccgggaagagggagaaggcatggagacaactgatactgagtctgtgtcttccgccagcacatatacacagtctttagagcagctgcttaattctcccgaaactaa

SEQ ID NO: 33164 - DNA, 888 bp, Macaca Mulatta
  misc_feature (1)...(888): n = A,T,C or G
gaagaagcagcaaacagttgctagtcagacaagtgacaggaaatggattccaaacaccagtgtgtgaaggtaaaagatgggcactacatgcctgtaatgggatgtgggacatatgcnnnnnnnnnnnnnnnnnnnnnnnnnnnnnnnnnnnnnnnnnnnnnnnnnnnnnnnnnnnnnnnnnnnnnnnnnnnnnnnnnnnnnnnnnnnnnnnnnnnnnnnnnnnnnnnnnnnnnnnnnnnnnnnnnnnnnnnnnnnnnnnnnnnnnnnnnnnnnnnnnnnnnnnnnnnnnnnnnnnnnnnnnnnnnnnnnnnnnnnnnnnnnnnnnnnnnnnnnnnnnnnnnnnnnnnnnnnnnnnnnnnnnnnnnnnnnnnnnnnnnnnnnnnnnnnnnnnnnnnnnnnnnnnnnnnnnnnnnnnnnnnnnnnnnnnnnnnnnnnnnnnnnnnnnnnnnnnnnnnnnnnnnnnnnnnnnnnnnnnnnnnnnnnnnnnnnnnnnnnnnnnnnnnnnnnnnnnnnnnnnnnnnnnnnnnnnnnnnnnnnnnnnnnnnnnnnnnnnnnnnnnnnnnnnnnnnnnnnnnnnnnnnnnnnnnnnnnnnnnnnnnnnnnnnnnnnnnnnnnnnnnnnnnnnnnnnnnnnnnnnnnnnnnnnnnnnnnnnnnnnnnnnnnnnnnnnnnnnnnnnnnnnnnnnnnnnnnnnnnnnnnnnnnnnnnnnnnnnnnnnnnnggtggaccagaactccccggttctcttggaggacccagtcctttgtgccttggcaaaaaagcacaagcgaaccccagccctgattgccctgcgctaccagctgcagcgtggggttgtggtcctggccaagagctacaatgagcaacggatcagagagaacgtgcaggt

SEQ ID NO: 33165 - DNA, 644 bp, Macaca Mulatta
  misc_feature (1)...(644): n = A,T,C or G
cgtgccgtccctgcagtgacaccgaggtgctcctagccgtctgcaccagcgacttcgnnnnnnnnnnnnnnnnnnnnnnnnnnnnnnnnnnnnnnnnnnnnnnnnnnnnnnnnnnnnnnnnnnnnnnnnnnnnnnnnnnnnnnnnnnnnnnnnnnnnnnnnnnnnnnnnnnnnnnnnnnnnnnnnnnnnnnnnnnnnnnnnnnnnnnnnnnnnnnnnnnnnnnnnnnnnnnnnnnnnnnnnnnnnnnnnnnnnnnnnnnnnnnnnnnnnnnnnnnnnnnnnnnnnnnnnnnnnnnnnnnnnnnnnnnnnnnnnnnnnnnnnnnnnnnnnnnnnnnnnnnnnnnnnnnnnnnnnnnnnnnnnnnnnnnnnnnnnnnnnnnnnnnnnnnnnnnnnnnnnnnnnnnctgatgagtcacatgcttcggtgggtgttgcggtcccggtggggccgtgcagtgggggccacccgctggggaccgcatgcctggggcccaggcctgaccctggtgcccaagctgtggacgttctcaccnacactcaaccccatgagctcccagccaaggacgccctggccaattggaaatgctgtaaaatgcaaactaagttattatatttttttggtaaaaaagaaatgtccataggaaa

SEQ ID NO: 33166 - DNA, 206 bp, Macaca Mulatta
  misc_feature (1)...(206): n = A,T,C or G
gaagaagaaggaaatacttgcaaaacacaaaaaatttcctggctccaagattgtgttttatccttatctccaaccaatgatcttatggtaatagctcgagagcaaaaagctgtatttctagtgaaagtggaaatatagtgataaaggaaaggaagaaatgcaatttgctgttggctggagtggttctttaaatgttgaagaagggn

SEQ ID NO: 33167 - DNA, 132 bp, Macaca Mulatta
ccggccggtggtggccgaacttgctgcctcgccccctggaggcgtgcgcccaggcggaaacttcaccttgacctgccgcgcggaggcctggcctccagcccagatcagctggcgcgcgcctccgggtgccct

SEQ ID NO: 33168 - DNA, 660 bp, Macaca Mulatta
  misc_feature (1)...(660): n = A,T,C or G
tcggcaccttcagcaccatcggcttcggggatctggtgagcagccagcacgccgcctaccggaaccaggggctctaccgcctgggcaacttcctcttcatcctgctcggcgtgtgctgcatttactcgctcttcaacgtcatctccatcctcatcaagcaggtgctcaactggatnnnnnnnnnnnnnnnnnnnnnnnnnnnnnnnnnnnnnnnnnnnnnnnnnnnnnnnnnctgtcccggcgcaatgccatcaccccgggctctcggctgcgccgccgcttggccgcgctcggcgccgaccccgcggcccgcgacagcgacgccgagggccgccgcctctcgggcgaaatcatctccatgcgcgacctcacggcctctaacaaggtgtcgctggcgctgctgcagaagcagctgtcggagacggccaacggctacccgcgcagcgtgtgcgtcaacacgcgccagaacggcttctcgggcggcgtgggcgccctgggcatcatgaacaaccggctggccgagaccagcgcctccaggtagaccgcccgtccgcccgcgccagggaccctctccaggccgcggggccgccgggcgtggtttgcttcccttctctcagtcactgctggcgctttcttaatgtttatccaataaaatgaaac

SEQ ID NO: 33169 - DNA, 272 bp, Macaca Mulatta
aaaaacaaaacaaaggctgtttttcctaatttggcatgaacccccccttgttccaaataaagacggcatcacgaagcagctccaaaaggaaaagcttgggcggtgcccagcgtgcccgctgcccatcgacatctgtcctggggatgtggagggtggcagcgtccctgtctgcaccagtgccgtcctgctgatgtggtaggctagcaatattttggttaaaatcatgtttgtgactgtaaccatttgtatgaattattttaaagaaataaaaa

SEQ ID NO: 33170 - DNA, 665 bp, Macaca Mulatta
ctgacggtttttgagcgttggtgtctggcacgcgctagcccctcttgctttggttccgccagggcgatgtaccaggtaaagccctatcacgggggtggcgcgcctctccgtgtggagcttcccacctgcatgtaccggctccccaacgtgcactgcaggagcggcggcccagcgcccggcgctggccacgtgcaggaagagtctaaccgggctctgcaagctcttgagtcccgccaagatgatattttaaaacgtctgtatgagttgaaagctgcagttgatggtctctccaagatgattcaaacaccagatgcagacttggatgtaaccaacataatccaagcggatgagcccatgaccttaaccaccaatgtgctggacttgaattcagtgcttgggaaggattatggggcgctgaaagacatcgtgatcaacgcgaacccggcctcccctcccctctccctgctcgtgttgcacaggctgctctgtgagcacttcagggtcctgtccacggtgcacacgcactcctcagtcaagagtgtgcctgaaaaccttctcaagtgctttggagaacagaataaaaaacagccccgccaagagtatcagctgggattcactttaatttggaagaatgtgccgaagacgcagatgaattcagcgtccag

SEQ ID NO: 33171 - DNA, 242 bp, Macaca Mulatta
aggagtgaaacacaaatcttttctaacagctgaggactgctttgagttgggcaaagtggcctatacagaagcagattattaccatacagaactgtggatggaacaagccctaaggcaactggacgaaggcgagatttctaccatagataaagtatctgttctagattatttgagctatgcggtatatcagcagggagacctggataaggcacttgtgctcacaaagaagcttcttgaactag

SEQ ID NO: 33172 - DNA, 1009 bp, Macaca Mulatta
  misc_feature (1)...(1009): n = A,T,C or G
tcagacccgaaatcccaagatccctacagattcctggctccatggattgnnnnnnnnnnnnnnnnnnnnnnnnnnnnnnnnnnnnnnnnnnnnnnnnnnnnnnnnnnnnnnnnnnnnnnnnnnnnnnnnnnnnnnnnnnnnnnnnnnnnnnnnnnnnnnnnnnnnnnnnnnnnnnnnnnnnnnnnnnnnnnnnnnnnnnnnnnnnnnnnnnnnnnnnnnnnnnnnnnnnnnnnnnnnnnnnnnnnnnnnnnnnnnnnnnnnnnnnnnnnnnnnnnnnnnnnnnnnnnnnnnnnnnnnnnnnnnnnnnnnnnnnnnnnnnnnnnnnnnnnnnnnnnnnnnnnnnnnnnnnnnnnnnnnnnnnnnnnnnnnnnnnnnnnnnnnnnnnnnnnnnnnnnnnnnnnnnnnnnnnnnnnnnnnnnnnnnnnnnnnnnnnnnnnnnnnnnnnnnnnnnnnnnnnnnnnnnnnnnnnnnnnnnnnnnnnnnnnnnnnnnnnnnnnnnnnnnnnnnnnnnnnnnnnnnnnnnnnnnnnnnnnnnnnnnnnnnnnnnnnnnnnnnnnnnnnnnatggagaatgggagcagcttgtcaaacaaggacctctgtgctgaggtggacacattcatgtttgaggaccacaacaccacagccagcggcatctcctggatcctctatgctcnnnnnnnnnnnnnnnnnnnnnnnnnnnnnnnnnnnnnnnnnnnnnnnnnnnnnnnnnnnnnnnnnnnnnnnnnnnnnnnnnnnnnnnnnnnnnnnnnnnnnnnnnnnnnnnnnnnnnnnnnnnnnnnnnnnnnnnnnnnnnnnnnnnnnnnnnnnnnnnnnnnnnnnnnnnnnnnnnnnnnnnnnnnnnnnnnnnnnnnnnnnnnnnnnnnnnnnnnnnnnnnnnnnnnnnnnnnnnnnnnnnnnnnnnnnnnnnnnnnnnngtttgacccttcccgctttgtatcgggttctgcttgacacagccatgctttcctgcccttctcaggaggatc

SEQ ID NO: 33173 - DNA, 1697 bp, Macaca Mulatta
  misc_feature (1)...(1697): n = A,T,C or G
tgggctcccagcgagagggtaatggggagggggcgcggcgtgggcgctgtagcccgagttcccaacgcaggaggcccggcccgcctccgccgcattgtcccgggccgcgcgtcccggtcatgagccgcgccgccgcagcacccgcccgccgcccgcggggccatgcggagagccgccgggatggaggacttctccgcggaggaagaggagccctggtacgaccagcaggacctggagcaggnnnnnnnnnnnnnnnnnnnnnnnnnnnnnnnnnnnnnnnnnnnnnnnnnnnnnnnnnnnnnnnnnnnnnnnnnnnnnnnnnnnnnnnnnnnnnnnnnnnnnnnnnnnnnnnagtacctaaccaagcagctggacacgctgcggcatgtgaacgagcagcacgccaaagtctacgagcagctggacctgacagcccgggacctggagctgaccaaccacaggctggtactggagagcaaggccgcccagcagaagatccatgggnnnnnnnnnnnnnnnnnnnnnnnnnnnnnnnnnnnnnnnnnnnnnnnnnnnnnnnnnnnnnnnnnnnnnnnnnnnnnnnnnnnnnnnnnnnnnnnnnnnnnnnnnnnnnnnnnnnnnnnnnnnnnnnnnnnnnnnnnnnnnnnnnnnnnnnnnnnnnnnnnnnnnnnnnnnnnnnnnnnnnnnnnnnnnnnnnnnnnnnnnnnnnnnnnnnnnnnnnnnnnnnnnnnacgagcggctgcagtccctggtggggtgctgcgctcccaggtgagccaagagcggcagcgcaaggagcgggcagagcgcgagtacaccgcggtgctgcaggagtactccgagctggagcgccagctatgcgagatggaggcctgtcgcctgcgcgtgcaagagctggaggcagagctgctggagctgcagcagatgaagcaggccaagacctacctactgggcccggacgaccacctggccgaggccctgcttgcacccctcacgcaggcccctgaggctgacgatccccagcccggccgcggcgacgactcaggcgcccaggacggtgtctcctcacctgccgcctccccaggccatgtggtgcgcaagagctgcagcgacactgcgcttaacgccatcgtggccaaagacccagccagccggcacgcgggcaacctcacactgcacgccaacagtgtgcgcaagcggggcatgtccattctgcgggaggtggacgagcagtaccacgcgctgctcgagaagtacgaggagctgcttagcaagtgccggcagcatggggccggggtgcggcacaccggtgtgcagacctcgcgccccatctcccgggacagctcgtggagggacttgcgcgggggtgaggagggccagggggaggccaaggcaggtgagaagagcctaagccagcacgtggaggctgtcgacaagcggctggagcagagccagcccgagtacaaggcgctctttaaggagatcttctccaggatccagaagaccaaggctgacatcaacgccaccaaagtcaagacgcacagcagcaagtgaccctcccccggcctgcagcctcccccagggtggaggccgtggggtccctcaggcctgggcggtgcagcttccagagagccagcgccctttagcggcctgccaccacagcacgcgacctcctgatccggaagcacgcagcatgt

SEQ ID NO: 33174 - DNA, 1626 bp, Macaca Mulatta
  misc_feature (1)...(1626): n = A,T,C or G
atgtctcgcagtcctgacgcgaaggaagaccctgtggagtgccctctttgcatggagcccttggagatagatgatatcaactttttcccttgcacctgtggctaccagatttgccgattttgttggcatcgaattcgcactgatgaaaatgggctttgtcctgcatgtagaaangccatatccagaagacccagcagtttataaaccactctcccaggaagaactgcannnnnnnnnnnnnnnnnnnnnnnnnnnnnnnnnnnnnnnnnnnnnnnnnnnnnnnnnnnnnnnnnnnnnnnnnnnnnnnnnnnnnnnnnnnnnnnnnnnnnnnnnnnnnnnnnnnnnnnnnnnnnnnnnnnnnnnnnnnnnnnnaggttttaaaacgaccagaatattttgggaagtttggtaaaatacataaagttgtcatcaataatagcacatcatatgcaggctcacagnnnnnnnnnnnnnnnnnnnnnnnnnnnnnnnnnnnnnnnnnnnnnnnnnnnnnnnnnnnnnnnnnnnnnnnnnnnnnnnnnnnnnnnnnnnnnnnnnnnnnnnnnnnnnnnnnnnnnnnnnnnnnnnnnnnnnnnnnnnnnnnnnnnnnnnnnnnnnnnnnnnnnnnnnnnnnnnnnnnnnnnnnnnnnnnnnnnnnnnnnnnnnnnnnnnnnnnnnnnnnnnnnnaggcgggtaaacaccaagaatatgaacagaagctacttcaagaattatataaattaaatcccaattttcttcagctatctacgggttcagttgataaaaataagaacaaagtgacaccactgcagaggtacgatannnnnnnnnnnnnnnnnnnnnnnnnnnnnnnnnnnnnnnnnnnnnnnnnnnnnnnnnnnnnnnnnnnnnnnnnnnnnnnnnnnnnnnnnnnnnnnnnnnnnnnnnnnnnnnnnnnnnnnnnnnnnnnnnnnnnnnnnnnnnnnnnnnnnnnnnnnnnnnnnnnnnnnnnnnnnnnnnnnnnnnnnnnnnnnnnnnnnnnnnnnnnnnnnnnnnnnnnnnnnnnnnnnnnnnnnnnnnnnnnnnnnnnnnnnnnnnnnnnnnnnnnnnnnnnnnnnnnnnnnnnnnnnnnnnnnnnnnnnnnagaaacaatcccagtatcatcctctacagactggcaagcagcttttggctttggttcttctaaacaaccagaggatgacttgggttttgatcccttcgatgtcactcgaaaagccttagcagacctgattgagaaggaactgtccgttcaagaccaaccttccctttcacccacatctcttcagaactcctcttcacacactacaaccgccaaaggtccaggctctggattcctgcatcctgctgcagctacaaatgccaattctctcaatagtaccttttcagtcttgccccagaggttccctcaatttcagcagcaccgagcggtttataattcattcagttttccaggccaggcagcccgctatccttggatggcctttccacgcaatagcatcatgcacttgaaccacacagcaaaccccacctcaaatagtaatttcttggacttgaatctcccgccacagcacaacacaggtctgggagggatccctgtagcaggta

SEQ ID NO: 33175 - DNA, 1469 bp, Macaca Mulatta
  misc_feature (1)...(1469): n = A,T,C or G
gaatgagccctgggaactggaaaaccctgtgctggcccagaccctggtggaggcattgcaactggatccggacacacttgccaatgagaccgccgcccgtgctgccaatgtagcccgcgccgccgcctccaaccgtgcggctcgggccgctgccgccgctgcccgtaccgccttcactcaggtggtcgctagccaccgggtggccacgccgcaggtctcaggagaggatacccagcccacgacctacgccgccgaggctcaggggcccacccctgagccaccccttgcttctccgcgagacctcccagatgttagtcaccagtgagatggctgcccccggggccccagtaacctccacaaagtcccagacaggctccccggcccaggaggctgctaccgagggccctagtagcgcctgtgctttctctcaggctccgtgtgccagggaggtggacaccacccggcccagcacagccttcctgggtcagaatgatgtcttcgatttcactcagccggcgggggtcagtggcatggccttcccacgccccaagagacctgccccagcccaagaggctgccacggagggctccagtgctgcctccggtgtgccccagactggacctggcagagaggtggcagccacccggcccaagaccaccaagtcagggaaggcgctggccaagactcggtgggtggagcctcagaacgttgtggcagcagctgctgccaaggccaagatggccacgagcatccctgagccggagggcgcagctgctgccactgctcagcacagtgctgagccctgggccaggatgggaggcaagaggaccaagaagnnnnnnnnnnnnnnnnnnnnnnnnnnnnnnnnnnnnnnnnnnnnnnnnnnnnnnnnnnnnnnnnnnnnnnnnnnnnnnnnnnnnnnnnnnnnnnnnnnnnnnnnnnnnnnnnnnnnnnnnnnnnnnnnnnnnnnnnnnnnnnnnnnnnnnnnnnnnnnnnnnnnnnnnnnnnnnnnnnnnnnnnnnnnnnnnnnnnnnnnnnnnnnnnnnnnnnnnnnnnnnnnnnnnnnnnnnnnnnnnnnnnnnnnnnnnnnnnnnnnnnnnnnnnnnnnnnnnnnnnnnnnnnnnnnnnnnnnnnnnnnnnnnnnnnnnnnnnnnnnnnnnnnnnnnnnnnnnnnnnnnnnnnnnnnnnnnnnnnnnnnnnnnnnnnnnnnnnnnnnnnnnnnnnnnnnnnnnnnnnnnnnnnnnnnnnnnnnnnnnnnnnnnnnnnnnnnnnnnnnaccaaggacactcccaggctgagtctcctcttggtgattctgggcgtcatcttcatgaatggcaaccgtgccagcgaggngctgtcctctgggaggcactacgcaagatgggactgcgccctgggngggtgaggcacccattcctcggcgatctgaggaagctcatcacagatgactttgtgaagcagaagta

SEQ ID NO: 33176 - DNA, 332 bp, Macaca Mulatta
  misc_feature (1)...(332): n = A,T,C or G
tcaacttgcctgtgtcttgagaagagagccccggtcaggacttgcgcctgagggacactcatggttccttcctctgtttccccttccgtgtcctccttgtcctgcactgccctgccttgaggccgaggatggactttgtgacatctctgagcagcagcctggtgactgtggggggctgtctcgcgcatctcccttcccattgatnccccacaccctctttcatttcctcctctgtgtccacagcctcccagtgaccattgtcacacgagctagtggggctgagtcaccaggtactggggtgactgaaggatgtggcatctaaatattagctt

SEQ ID NO: 33177 - DNA, 769 bp, Macaca Mulatta
gggtcgtttctttgtgtcttcttctattcctcaagcttaagcaaaaccttaggctcaccctaaaatcatcctttcttcaccccttttcagtagcagtgccttcaggtttcatttcctccttcctctgcatatcgatccgcaatgcaaattgcaggccttctgcctcacaccaagattcctacaccccgctaaagctctcccagacttcatatccttaactcgagttcacttttttattctagaattccaagtacttatgcactgtgaccatatcttacctagtcagtctcttacgcatttttttcaaactgtgcctctgctctttcctccagacccaccgctctgtgcccttatcatgtttttcccttctgtttgctagtcccaaaagagtaattacttcgtctcttatccattacctgggtgacaaaacgagacttcgtctcaaaaaaaccatagaatttggatcctttggtcagattctcctgaattgctttgaggtgtccatggtcaactgcttcagctttgttttggctaccccctgcccaaagtggcacataaggctgttcttcaccttgtttcccaggctgaggaacagaaagtaccctctgttttgagggaggtggaagttaagtatacatttattttttactgtgaactgtggaggaccacatttttacaaaaggcccttggtttcctttaatggttttcgggaaaaggaaaattccaatttaatatttgtttttacctttgaaataatagaaataatttc

SEQ ID NO: 33178 - DNA, 426 bp, Macaca Mulatta
agataatgatttcattaatgaaggccaaaagattatattgatgacaacaacaagaaggtcttcctggaaaaactaaagaaggatgttgagtttctggcccagctgaagctcatggactatagtctgctggtgggaattcacgatgtggagagagctgaacaggaggaagtggagtgtgaggagaacgacggggaggaggagggtgagagcgacggcacccacccggtggggaccccccagatagccccgggaatacactgaacagctcagcacccctggctcccggggagttcgatccgaacatcgacgtctatggaattaagtgccatgaaaacttcgcctaggaaggaggtgtacttcatggcaattattgacatccttactcattatgatgcaaaaaagaaagctgcccatgctgcaaaaaac

SEQ ID NO: 33179 - DNA, 912 bp, Macaca Mulatta
agtaggaacaaagcaagaaaaggttctgtggggagacttgagctgggaattagggtgttggtgcccctagtgaagacctagtgggcacctgtaggccattgccacctctgtttttaaccatagtgccactcggagagtggcccccattcacccaaaggctaagtaacttgcccttgattacactgttcttttgtgaccaaggccaagtatctgctcaggcctcctaagttatctgcatctcagagccatggcattatctgctcagcaggaggcaagttctccttaaaggactggggctgacttggttcctgtaggcagccatcaccttgtggtgtctggtgttggttggcggaagcatttcctttaggtctgaaataatcagagcagcaggcccacccctcaagcagagggcagctctgcccctcacacacattccttaagactagggattcactctcagtagggggcagagtatggcctagggtaggggataggaggtggctctgctcagcaaggggaggttaggtctgggcctgactcaggagtaactgtgtttgtgatctccattaccccctcccatttgcagctggaagatgtagagtgggaggactgggagtaagggagccagagggagcagctccccacccatggcatctctcgcctccctcgttcgtctcagcccagccctggaagactctgagaatgtccccccaaatctcctttgccaaccagagctctgggcacagattctggtggctccctgctggccctctgggcctctgctcatgcctggaaaggggctctctaaatcccggccaggaactctgacttgtgccaacaataggatgacccgagggagaggaaacctatcccccgtcaccagaagagcctgtgtttttctgccgaacaccc

SEQ ID NO: 33180 - DNA, 724 bp, Macaca Mulatta
accgctctcccgccccggggaggttttgattttagtggctttcttccttttattttccgttgtgtgcggatttcgctgcagagcgaacttgaggctagtccgagtacatgtgagcggtaatcgcccctgcagctggttaccctgacactatgcactccgaagcagaagaattcaaggaagtggccacagatgtctttaattccaaaaacctggccgttcaggcacaaaagaagatcttgggtaaaatggtgtccaaatccatcgccaccaccttaatagatgacacgagtagtgaggtgctggatgagctctacagagtgaccagggagtacacccaaaacaagaaggaggcagagaagatcatcaagaaccttatcaagacggtcatcaagctggccattctttacaggaataatcagtttaatcaagatgagctagcactgatggagaaatttaagaagaaagttcatcaacttgctatgaccgtggtcagtttccaccaggtggattatacctttgaccggaatgtgttatccaggctgttaaatgaatgcagagagatgctgcaccaaatcattcagcgtcacctcactgccaagtcacatggacgggttaataatgtctttgatcatttttcagattgtgactttttggctgccttgtataatccttttgggaattttaaacctcacttacaaaaactatgtgatggtatcaacaaaat

SEQ ID NO: 33181 - DNA, 557 bp, Macaca Mulatta
ctcacgaggggctagtgagagctctctggtgtgcggaccgagcaccatagagctctcacgaggggctagtgaccgacccccacagccctgcccgcttccgcgtgctgggcactctctccaactcccgtgacttcctgcggcacttcggctgccctgtcggctcccccatgaacccggggcagctgtgtgaggtgtggtagacctggatcagggaagaaatggccggctgtcaccagacctggggcagctctcccaacaaagctgtttgctcttgggttgggaggaagcagatgcaagctgggctgggtctagtccctccccaccacaggcaacacgagtacagtccctcactccccaccacaggtgacacaagtacagtccctcctcaatcaccacattgtgcctctgctttgggggtgcccctgcctccagcagagcccccaccattcactgtgacatctttccctgtcaccctgcctggaagaagtctgggcagggaggccagttcccacgggaaggagtctgcctcttctggccccaagcttactcagcctggc

SEQ ID NO: 33182 - DNA, 438 bp, Macaca Mulatta
  misc_feature (1)...(438): n = A,T,C or G
gaatgaaattccacaattagttggtgaaatttatcagaatttctttgtggagagcaaagaaatatctgtggaaaaatcactttacaaagaaattcagcagtgtcttgtaggaaataaaggtattgaagtattctacaaaatccagggagatgtttatgagatcctaaaggataggtattacccttcatttattgtcagtgacctgtatgagaaattgttgataaaagaggaagagaaacatgcctcacagatgatttccaacaaggatgagannnnnnnnnnnnnnnnnnnnnnnnnnnnnnnnnnnnnnnnnnnnnnnnnnnnnnnnnnnnnnnnnnnnnnnnnnnnnnnnnnnnnnnnnnnagaactaaatgagaaacttgaatataaaaggcaagctctaaattctattcaaaatgcaccaaaacctgacaagaa

SEQ ID NO: 33183 - DNA, 398 bp, Macaca Mulatta
  misc_feature (1)...(398): n = A,T,C or G
tcccctttcaaaaagagctggagaaatacaagaacattgatgaagatgagcttcttggcaaactctcagaagaggaactgaaacagttggaaaatgttctagatgacctagatcnnnnnnnnnnnnnnnnnnnnnnnnnnnnnnnnnnnnnnnnnnnnnnnnnnnnnnnnnnnnnnnnnnnnnnnnnnnnnnnnnnnnnnnnnnnnnnnnnnnnnnnnnnnnnnnnnnnnnnnnnnnnnnnnnnnnnnnnnnnnnnnnnnnnnnnnnnnnnaaagggagagtctttatccctaaagaaaagcctgtagaaactcgtaaagaagaaaaagtgacccttgacccagaactggaagaagctttggccagtgcctctgacaccgaactctatgatcttgcag

SEQ ID NO: 33184 - DNA, 909 bp, Macaca Mulatta
gggctccctgccaggtaaggggacccgggggagggcagaggtctggactgagtgtcccagcagctcctgggctagagcaccgagaccaagtgcttctgggaagtaaagacataggatccaagaatgagggttcccccacgggctgcagagctctgaggactctgggaaagtacagcccatgggtctaaggacctagtgggttaagagtgtttcccatgatcctcctgtgtgtgctcctgggattgctgggaaatgtggtcttagggccagagaagtagttttagagaagggctcccaaaggctcatgggaaacagcatatttgtaactagatggggttagaaggtgcttctgttgggtcccccaagggctgcctagaaaacttagtgcctctgggccctcctgggcccaagggcctactgggagatgcagtcccttccccactgcccctcaggtcagatgctgctgagcgggggtccccgaggcccggtcccccagccgggcctgcagcccagcgtcatggaggacgacatcctcatggatctcatctgaatccccaacacccaataaagttcctttttaacacacgccccggctcccgtcactgacatcccccaggactgggcaggaggaaaccccagggggcatctctgtccttgttctcacttcagcagatatccctggggccctgggtgggtgacgccggggcctccgtggtgagtcagaggcagtctggtgcaacctggttcgtgggagatgcagggacaggcaggcagcgctcaggactcaagctctcatggaggtggcggggcaccatgggagcctggaagaggtgtctgacccagccccagctcctcagtcttgaaagagaatcagctgtcaggccgggagggaaagaggtgaggggtgat

SEQ ID NO: 33185 - DNA, 191 bp, Macaca Mulatta
tctcatttcttccagcatgatcacaccctgctcctgagctgtggtagtcatgagcaggcaggcagggctttgcccagggtggcctgccacttgcatagcttttggttggtgtgctgttctgtttatttaataaatgggcaggttggaagcattgcacaaaagttctgagattttactgccttttttgtttt

SEQ ID NO: 33186 - DNA, 1288 bp, Macaca Mulatta
  misc_feature (1)...(1288): n = A,T,C or G
gagcctccctattaaggaccttgccgtagacagcgcctctcctgtctaccaggctgtgattaagaaccagaacaagccggaagatgaggctgacgagtgggcacgccgctcctccaacctgcagtctcgctccttccgcatcctggcccagatgacagggacagaattcannnnnnnnnnnnnnnnnnnnnnnnnnnnnnnnnnnnnnnnnnnnnnnnnnnnnnnnnnnnnnnnnnnnnnnnnnnnnnnnnnnnnnnnnnnnnnnnnnnnnnnnnnnnnnnnnnnnnnnnnnnnnnnnnnnnnnnnnnnnnnnnnnnnnnnnnnnnnnnnnnnnnnnnnnnnnnnnnnnnnnnnnnnnnnnnnnnnnnnnnnnnnnnnnnnnnnnnnnnnnnnnnnnnnnnnnnnnnnnnnnnnnnnnnnnnnnnnnnnnnnnnnnnnnnnnnnnnnnnnnnnnnnnnnnnnnnnnnnnnnnnnnnnnnnnnnnnnnnnnnnnnnnnnnnnnnnnnnnnnnnnnnnnnnnnnnnnnnnnnnnnnnnnnnnnnnnnnnnnnnnnnnnnnnnnnnnnnnnnnnnnnnnnnnnnnnnnnnnnnnnnnnnnnnnnnnnnnnnnnnnnnnnnnnnnnnnnnnnnnnnnnnnnnnnnnnnnnnnnnnnnnnnnnnnnnnnnnnnnnnnnnnnnnnnnnnnnnnnnnnnnnnnnnnnnnnnnnnnnnnnnnnnnnnnnnnnnnnnnnnnnnnnnnnnnnnnnnnnnnnnnnnnnnnnnnnnnnnnnnnnnnnnnnnnnnnnnnnnnnnnnnnnnnnnnnnnnnnnnnnnnnnnnnnnnnnnnnnnnnnnnnnnnnnnnnnnnnnnnnnnnnnnnnnnnnnnnnnnnnnnnnnnnnnnnnnnnnnnnnnnnnnnnnnnnnnnnnnnnnnnnnnnnnnnnnnnnnnnnnnnnnnnnnnnnnnnnnnnnnnnnnnnnnnnnnnnnnnnnnnnnnnnnnnnnnnnnnnnnnnnnnnnnnnnnnnnnnnnnnnnnnnnnnnnnnnnnnnnnnnnnnnnnnnnnnnnnnnnnnnnnnnnnnnnnnnnnnnnnnnnnnnnnnnnnnnnnnnnnnnnnnnnnnnnnnnnnnnnnnnnnnnnnnnnnnnnnnnnnnnnnnnnnnnnnnnnnnnnnnnnnnnnnnnnnnnnnnnggaagtgatgcatgccttgagacagacatggcacaccacctgcttcgtctgtgcggcctgcaagaagcctttcggaaacagcctcttccacatggaagatggggagccctactgcgagaaa

SEQ ID NO: 33187 - DNA, 820 bp, Macaca Mulatta
gggggagcccagtcggaacatccgctcagcccagtcggaacatccgcaccccatgctgaccaaaacccgtggacatggcgaaccaggttatcaagtgcaaggctgcagttgcttgggaggctggaaagcctctctccatagaggagatagaggtggcacccccaaaggctcatgaagttcgaatcaagatcattgccactgcagtttgccacaccgatgcctataccctgagtggagctgatcctgagggttgttttccagtgatcttgggacatgaaggtgctggagttgtggaaagtgttggcgagggagttactaaactgaaggcgggtgacactgtcatcccactttacatcccacagtgtggagaatgcaaattttgtctaaatcctaaaactaacctttgccagaagataagagtcactcaagggaaaggattaatgccagatggtaccagcagatttacttgcaaaggaaagacaattttgcattacatgggaaccagcacattttctgaatacacagttgtggctgatatctctgttgctaaaatagatcctttagcacctttggataaagtctgccttctaggttgtggcatttcaactggttatggtgctgctgtgaacactgccaaggtggagcctggctctgtttgtgcagtctttggcctgggaggagtttggattggcagttatcatgggctgtaaagtggctggtgcatcccggatcattggcgtggacatcaataaagataaatttgcaagggccaaagaggtttggagcccctgaaagtattaaccctcaggaattttgtaaa

SEQ ID NO: 33188 - DNA, 843 bp, Macaca Mulatta
  misc_feature (1)...(843): n = A,T,C or G
tgatgaatcaccaacaccagcagcagatggcccccagtaccctaagccagcagaaccaccccactcagaacccacccgcagggctcatgagtatgcccaatgctctgaacactcagcagcagcannnnnnnaactgcgccttcagagaatccagatggagagagaaaggattcgaatgcgccaagaggagctcatgaggcaggnnnnnnnnnnnnnnnnnnnnnnnnnnnnnnnnnnnnnnnnnnnnnnnnnnnnnnnnnnnnnnnnnnnnnnnnnnnnnnnnnnnnnnnnnnnnnnnnnnnnnnnnnnnnnnnnnnnnnnnnnnnnnnnnnnnnnnnnnnnnnnnnnnnnnnnnnnnnnnnnnnnnnnnnnnnnnnnnnnnnnnnnnnnnnnnnnnnnnnnnnnnnnnnnnnnnnnnnnnnnnnnnnnnnnnnnnnnnnnnnnnnnggagaaaacgcaggacaaacacccatgaacatcaacccccaacagacccgtttccctgatttccttgactgtcttccaggaacaaacgttgacttaggaactttggaatctgaagacctgatccctctcttcaatgatgtagagtctgctctgaacaaaagtgagccctttctaacctggctgtaatcactaccattgtaacttggatgtagccatgaccttacatttcctgggcctcttggaaaaagtgatggagcagagcaagtctgcaggtgcaccactttctgcctccatgactcgtgctccctcctttttatgttgccagtttaatcattgcctggtttcgattgagagtaacttaagttaaacataaataaatactatattttcgttttc

SEQ ID NO: 33189 - DNA, 546 bp, Macaca Mulatta
  misc_feature (1)...(546): n = A,T,C or G
gatcgcagagcctgtgcggcagaagatagccatcatgcataaaaacaagatcaacaggttaggagagttgatcctcacctctgagagcagccgctatcagttccggaatctggcagactgcctgcagaaaattcgagacatgatcgctgaggccagcgagacacccaaggagccaacaaaagaagatgttaaacttcagagaatcaggatagaaaacatgaatcaggaaaggctgagacaaaagagaattcattctgctgtaaagacaagcaggagagttgacatggactgaaatcaccctctgcagctgggagggctcgtatgggtgtcagggcagctgcagctgagaggcctttcacaccataannnnnnnnnnnnnnnnnnnnnggctgttaatgcttgtctataacattggagccatcacaagaacgttcatttggaatgaaggttacaggcactggttgcaaaagtctttataggcagtcaccatattgtcaaaccttaataatgcatctaatgtgttagccacaataaaattcaaaactc

SEQ ID NO: 33190 - DNA, 321 bp, Macaca Mulatta
ttaacttgtacattgtgtaatgtaatgtttgtatataatgaaattttgttatatttttatataataaaagctaaagtggaagttattgccaaaggaactgtctgtaagacaaaaaacaaaacatgttggaattacttaattgaaatttatctttcacctgaaacaacctagtgtttgagaaattttgccttgccaagtataacttgtatatcttgactctgtggtagatttcaagttcaatgttatttaattacatttggttttctgtaaaccgtgtcacttataagcacagtaataaaagatttgtcatgtgtttgaaga

SEQ ID NO: 33191 - DNA, 447 bp, Macaca Mulatta
  misc_feature (1)...(447): n = A,T,C or G
gccggctgagccacagcggggtcgccgcggggtcccggggccgtgctaccccgcccctcccgggagcgcgcggggtggggctggaccaggccagcgcgctgggccctcgcccctccctcgggcagtcacctgggcacgggcgccgcaggtgccgggcactcaaccttgcggagccgacagccatcgatcctcgggtnnnnnnnnnnnnnnnnnnnnnnnnnnnnnnnnnnnnnnnnnnnnnnnnnnnnnnnnnnnnnnnnnnnnnnnnnnnnnnnnnnnnnnnnnnnnnnnnnnnnnnnnnnnnnnnnnnnnnnnnnnnnnngagcttactcacatagcattttggtgtatcaaaatgaaatgcaaggaaccaaaaataacataactgaaggcagtaaaagcaaaattaaataggaagatcatcagtcaaagaagacccactggaga

SEQ ID NO: 33192 - DNA, 105 bp, Macaca Mulatta
aactattccatggcagtatatcttgtaaaacagttgtcctcaacagttcttcttcagaggttacgagcaaagggaataaggaatccggatcattctagagcttta

SEQ ID NO: 33193 - DNA, 460 bp, Macaca Mulatta
gattgaaaagagtcaacctaaagcccagaaccctgctcgactgagccgcaaagagctgaagaactttgatgtttattcctagttgctgcagcaattctcacctttcctgcacatcagcatctgctttgggaattggcacagtggatgatggcacaggagtctcatagaacagctcctagtttggagaggatatggaaatttgttcttgttttatattttgttttgaaaatgatgtctaacagccatggtaagagcaaggctgttaaataatatcttccagtttacaaatcagacatgaatgggtggaggggttaggttgttcacaaaaggccactttccaagtatttgtaatctaggaagtgtatgtaagtgatgttatcagcatcgagattctgtccacctgattttcaagctgtcccttgtctccttttctcctcaatctgggtgactgcatttctag

SEQ ID NO: 33194 - DNA, 1809 bp, Macaca Mulatta
  misc_feature (1)...(1809): n = A,T,C or G
cattgacctctaaagactcttggcacatgaggaagaaacccggaagaagagagcaaaggagtccggaatggcttttactcagnnnnnnnnnnnnnnnnnnnnnnnnnnnnnnnnnnnnnnnnnnnnnnnnnnnnnnnnnnnnnnnnnnnnnnnnnnnnnnnnnnnnnnnnnnnnnnnnnnnnnnnnnnnnnnnnnnnnnnnnnnnnnnnnnnnnnnnnnnnnnnnnnnnnnnnnnnnnnnnnnnnnnnnnnnnnnnnnnnnnnnnnnnnnnnnnnnnnnnnnnnnnnnnnnnnnnnnnnnnnnnnnnnnnnnnnnnnnnnnnnnnnnnnnnnnnnnnnnnnnnnnnnnnnnnnnnnnnnnnnnnnnnnnnnnnnnnnnnnnnnnnnnnnnnnnnnnnnnnnnnnnnnnnnnnnnnnnnnnnnnnnnnnnnnnnnnnnnnnnnnnnnnnnnnnnnnnnnnnnnnnnnnnnnnnnnnnnnnnnnnnnnnnnnnnnnnnnnnnnnnnnnnnnnnnnnnnnnnnnnnnnnnnnnnnnnnnnnnnnnnnnnnnnnnnnnnnnnnnnnnnnnnnnnnnnnnnnnnnnnnnnnnnnnnnnnnnnnnnnnnnnnnnnnnnnnnnnnnnnnnnnnnnnnnnnnnnnnnnnnnnnnnnnnnnnnnnnnnnnnnnnnnnnnnnnnnnnnnnnnnnnnnnnnnnnnnnnnnnnnnnnnnnnnnnnnnnnnnnnnnnnnnnnnnnnnnnnnnnnnnnnnnnnnnnnnnnnnnnnnnnnnnnnnnnnnnnnnnnnnnnnnnnnnnnnnnnnnnnnnnnnnnnnnnattcatagtggcgagaaaccttacaaatgcaatgaatgtggcaaggtgttcagtctgacttcaagccttgcaactcatcagagaattcacactgggggagaaaccatacaagtgtaatgaatgtggtaaagtcttcagtcaaacttcaagccttgcaaggcattggagaattcatactggagagaaaccttacaaatgcaatgaatgtggtaaggttttcagttataattcacaccttgcgagtcatcagagagttcatactggagagaaaccttacaagtgtaatgagtgtggcaaagcctttagtgtgcattcgaacttaactacccatcaggtcatccatactggagagaaaccttacaaatgtaatgagtgtggcaaagccttcagtgtgcattcaagcctaactacccatcaggtcatccatactggagaaaaaccttacaaatgtaatgaatgtggcagatcctttagtgtgcgcccaaacctcactagacatcagataatccatactggaaagaaaccttacaaatgtagtgattgtgggaagtcctttagtgtgcgcccaaacctctttagacatcaaattatccatactaaggagaaaccttataaaagaaattagtatggcaaggtcttcagtcaaagtttaaatcttgtgagtcatcaaagaatttataccagagagaaaccatacaaatataataaatgtggcaaggttttcagtcacaattaactcttacacagcatcagagaatttcattctcgagagaatccttacaagtatggcaaacccttcatcacgagttcaagcattcattgatgtcagagtccatgctaaagagaaatcatataaacctaagtatgtggcagaggcttcatttaggtctcacaactcactagatatcagaatgtatatacatctttttatattttgtgcatgttgaagctattaacaaggatcaaactgtaaacatccaaggattatgtgaggaata

SEQ ID NO: 33195 - DNA, 1215 bp, Macaca Mulatta
acgaggcatcagtgcctgccaggtgattgctgaagctgtaagaaccaccttgggtccccgtggcatggacaagcttattgtggatggcagaggcaaagcaacaatttctaatgatggggccacaattctgaaacttcttgatgttgtccatcctgcagcaaagactttggtagacattgccaaatcccaagatgctgaggtgggtgatggcaccacctcagtgaccttgctggctgcagagtttctgaagcaagtgaaaccctatgtggaggaaggtttacacccccagatcatcattcgagctttccgcacagccacccagctggcggttaacaagatcaaagagattgctgtgactgtgaagaaggcagataaagtggagcagaggaagctgctggaaaagtgtgccatgactgctttgagctccaagctgatctcccagcagaaagctttctttgctaagatggtggtggatgcagtgatgatgctcgatgatttgctgcagcttaaaatgattggaatcaagaaggtacagggtggagccctcgaggattctcagctggtagctggtgttgcattcaagaagactttctcttacgctgggtttgaaatgcaacccaagaagtaccacaatcctaagatcgcccttttgaatgtcgagctcgagttgaaagctgagaaggacaatgctgagataagagtccacacagttgaggattatcaggcaattgttgatgctgagtggaacattctctatgacaagttagagaagatccatcattctggagccaaagttgtcttgtccaaactccccattggggatgtggccacccagtactttgctgacagggacatgttctgtgctggccgagtacctgaggaggatctgaagaggacaatgatggcgtgtggaggctcaatccagaccagtgtgaatgctctgtcagcagatgtgctgggtcgatgtcaggtgtttgaagagacccagattggaggcgagaggtacaatttttttactggctgccccaaggccaagacatgtaccttcatcctccgtggcggtgccgagcagtttatggaggagacagagcggtccctgcatgatgccatcatgatcgtcaggagggccatcaaggatgattcagtggtggctggtggtcggggccattgagatggagctctccaagtacctgcgggattactcaaggactattc

SEQ ID NO: 33196 - DNA, 573 bp, Macaca Mulatta
  misc_feature (1)...(573): n = A,T,C or G
ggccgggcagggagtgcgggtcggttctgtgcgcgctgccggacgaggctcccgccgccgattgacccgcgctccgcccgtagccgggccnnnnnnnnnnnnnnnnnnnnnnnnnnnnnnnnnnnnnnnnnnnnnnnnnnnnnnnnnnnnnnnnnnnnnnnnnnnnnnnnnnnnnnnnnnnnnnnnnnnnnnnnnnnnnnnnnnnnnnnnnnnnnnnnnnnnnnnnnnnnnnnnnnnnnnnnnnnnnnnnnnnnnnnnnnnnnnnnnnnnnnnnnnnnnnnnnnnnnnnnnnnnnnnnnnnnnnnnnnnnnnnnnnnnnnnnnnnnnnnggagtacccgaacctgagcacgtcccttgacgacgccttcctgctgcgcttcctccgagcccgcaagtttgattacgaccgggccctgcagctcctcatcaactaccacagctgtaggagaagctggcccgaagtcttcaataacttgaagccatcagccttaaaagatgtccttgcttctgggttcctcaccgtgctgccccacactgaccccaggggctgccatgtcgtctgcatccgccca

SEQ ID NO: 33197 - DNA, 780 bp, Macaca Mulatta
gggcaggactattactcactttgctttagagatgaatttgtaagtgtcgttccagtaagccaggagatccgttgcctcttcatcatatacccgaatgttatgatactcaaagactcctgggaagaagttatctatctctcgagtgacattcaagatataccgtaccctgcaaggaaaccaagggagaatatgtgctctactgctcaggctaaatccaattcccagcaatgttttctcttacttaaaacttgtttattccataggctgaaattaaatacaaaaataatgaagacagctaaagaactaagaggttatatttatatattacagaaattatacaacagggttcctgggcatacctgggcaccagggaattattaagcaaaaggttatccaccatgttcaacatctaaattccattttcagtttatgtagttgcacaatctcatctttgatagtattctgaaaatatgcctcatattttactccaaagaatcaacttgaggccataatcagacactttgttactaaaattatcagcaatacaatttattcactgaaagtcatctgtataaaatcagactactgacatgtactccaaagaaaaaaacggagaatgaataacgacttcttcccatttttctaaacgccagattgttaggctttttgtgcattactcctctcttttgtgcaattacctgaaaagcaaatgtgggagagaactggaaagaagaaaagctgggacttaaaaactcccttaaaactcctctggactggcat

SEQ ID NO: 33198 - DNA, 914 bp, Macaca Mulatta
ccaggatcagcaaaccgaagaccagcagacccaagagaagaaatccctgaaaggacaatcccaaaatgttcgagccgaaggacagcaagctcaggtggagaaagtgccaaaactgttatgccaagattcagaatcccaaatacagcaataccaatactggcaatccccacaaaggcagtctccagactggacaacccaaaactgtcaatcttttggccaagaatcccctgaatggataactcaaggctggagaaacaaagattataaagcaagagaatggcaatttgaaatgcagccctggcaaacacaggatctattagagaaagaagccctaaagcagatagctctataccgagaagtccaaacccagcacacaacagcccaacataacctagaatgtcaagccagtcaagataaagaccaagaagaccttcaatccagagttacacagaaaggatatatatatactagagacatcaaaccaggggacatgaaatgtacagggcaagcctcaggagacctgcaatcagaaaacgtgaagccagattttcattcttcttctggccaaagctcagtacaagacacgtgtataggctatttgtcccatctagattcagaacaagatgtgcagccaaacacttcagcttcctcaaattcatataaagaagatgtgaatgtaacttctacttcatgtgatccaaaagagcaacagcaatctgaagactctgactaacatgcagaatctacccaagtgcctcactgcccccattaatggaattaaattagggaaaaacaatattgtcacctccaacctgcatactcaattgtggttgctacctaattagcttacaaaaaaatgaagggcatgctgagcactcaatttgttcttacttaaaataaaatgacaacaaacc

SEQ ID NO: 33199 - DNA, 657 bp, Macaca Mulatta
  misc_feature (1)...(657): n = A,T,C or G
tatgagaccgagatgtccctgcggcagctggtggagtcggacatcaatggcctgcgcaggatcttggatgagctgaccctgtgcaggtctgacctggaggcccaggtggagtccctgaaggaggagctgctgtgcctcaagcagaaccatgagcaggnnnnnnnnnnnnnnnnnnnnnnnnnnnnnnnnnnnnnnnnnnnnnnnnnnnnnnnnnnnnnnnnnnnnnnnnnnnnnnnnnnnnnnnnnnnnnnnnnnnnnnnnnnnnnnnnnnnnnnnnnnnnnnnnnnnnnnnnnnnnnnnnnnnnnnnnnnnnnnnnnnnnnnnnnnnnnnnnnnnnnnnnnnnnnnnnnnnnnnnnnnnnnnnnnnnnnnnnnnnnnnnnnnnnnnnnnnnnnnnnnnnnnnnnnnnnnnnnnnnnnnnnnnnnnnnnnnnnnnnnnnnnnngcgagactctcttgaaaacacactgacggagagcgaggcccgctacagctcccagctgtcccagttacagagcctgatcaccaatgtggagtcgcagctggcggagatccgctgtgacctggagcggcagaaccaggagtaccaggtgctgctggacgtgcgtgcccggctagagtgtgagatcaacacgtaccggagcctcctggagagcgag

SEQ ID NO: 33200 - DNA, 1504 bp, Macaca Mulatta
  misc_feature (1)...(1504): n = A,T,C or G
acccttgggacgaacgtggccacatttacctaaatgtcatttcatcccccaattgtgactcttctcagagtagcattgggcatgaagatgatggctggactacagttggcattgtcatcattgttgtggtctgctgtgttgttggcacttctttgatctgggtcattgttatttaccacatgagaaggaaaaatgaagactatagtatcacaaacacagnnnnnnnnnnnnnnnnnnnnnnnnnnnnnnnnnnnnnnnnnnnnnnnnnnnnnnnnnnnnnnnnnnnnnnnnnnnnnnnnnnnnnnnnnnnnnnnnnnnnnnnnnnnnnnnnnnnnnnnnnnnnnnnnnnnnnnnnnnnnnnnnnnnnnnnnnnnnnnnnnnnnnnnnnnnnnnnnnnnnnnnnnnnnnnnnnnnnnnnnnnnnnnnnnnnnnnnnnnnnnnnnnnnnnnnnnnnnnnnnnnnnnnnnnnnnnnnnnnnnnnnnnnnnnnnnnnnnnnnnnnnnnnnnnnnnnnnnnnnnnnnnnnnnnnnnnnnnnnnnnnnnnnnnnnnnnnnnnnnnnnnnnnnnnnnnnnnnnnnnnnnnnnnnnnnnnnnnnnnnnnnnnnnnnnnnnnnnnnnnnnnnnnnnnnnnnnnnnnnnnnnnnnnnnnnnnnnnnnnngaaacattgcagcggcccgtctggaacataaacagagaactaggcctgcctcatcctcctttttcccagcagccagtccatgagtcaccacaacttcatcaaaatgagggcttggcagggctggagccagactgttcggcttcttccatgtcctgccacaggttacaggatcatggttttgattttagtaggactcggaacattcaagatggtagtgaaggcacatgaaacccacttcaggatgaaatctgggcagagactcattaattaattttgcatttactacctcagagctcagaagaaactccaaagtcagcatttgctttactctttctttatgattgcatctgactgcaccaaggtgggccatgcgttgtttggtcttatacctgatgaagaaatggtaacagctgacagaaatgggtacggctcatcaaaaatgtgcagcatcggcagagggaagatacggggcaaatgtgcttcctgatggttccatggggatgtgccccagtgtgcatctgcctgtcggaagagtcacattgctgcttaacctgctggattgccctagtcttcagaatggtcctgagaaaacatcactacttggatgttctgctttgccttccaaggagcaaaaataactttggagccttgtgggaagtgtgcctgggattcttcagtggtttcaggcagatagttgagactggggctttgatattcaaggtctttggcaagaatcccagacttgaccaactggtaccaggtcaaaggtttttgtattcttgtgaannnnnnnnnnngtccctattgccagggatgtcactgtaaatatatgtacatttataaat

SEQ ID NO: 33201 - DNA, 635 bp, Macaca Mulatta
actcttcaccttattgttggttttgtttttccaggccatgagaatttcaaaagagataatcaggaatagagagaaagaaaaactacatgctgttaatgctgaagaatgcagtgtccttcagggaagatggctgtcagatgaatgcatgaatgcggtggtgaacttcttatccagaaaatcaaaactgtgatgaccactacagcggagtaaagcatgtccaaggaaggatgtgctgttacctctgatttctagtacttgaactaaataagcttcattgtgccttttgcagtactaaaatatcagttacaatgatgatatttcactacagccctgatgaataaaaattttgtaaaacaagcttaagaattcacataagtttttggtagtagagagacttacgtcttttgacatgaatcgttgttgccaggaacactggaacatggtgcctggggtcctactttgaaaagcactcacagcattacaggctgaagtcatgtctttgaatgccactatagcactttgacgtccacaaacagtgactgactgaattgggccaaatgcggacagcctacagatcactgacttgaggtcttcggtgggttgcatgttctttttcagccatctagcaagggagc

SEQ ID NO: 33202 - DNA, 2409 bp, Macaca Mulatta
  misc_feature (1)...(2409): n = A,T,C or G
tgttcctttccatcctggtggcgctgtgcctgtggctgcacctggcgctgggcgtgcgcggcgcgccctgcgaggcggtgcgcatccctatgtgccggcacatgccctggaacatcacgcggatgcccaaccacctgcaccacagcacacaggagaacgccatcctggccatcgagcagtacgaggagctggtggacgtgaactgcagctccgtgctgcgcttcttcctctgtgccatgtacgcgcccatctgcaccctggaagttctgcaccaaccccatcagccggtgcaagtcggtgtgccaacgcgcgcgcgaagactgccaacccctctggaaaatgtaaaccacaactgggccaaaagccgnnnnnnnnnnnnnnnnnnnnnnnnnnnnnnnnnnnnnnnnnnnnnnnnnnnnnnnnnnnnnnnnnnnnnnnnnnnnnnnnnnnnnnnnnnnnnnnnnnnnnnnnnnnnnnnnnnnnnnnnnnnnnnnnnnnnnnnnnnnnnnnnnnnnnnnnnnnnnnnnnnnnnnnnnnnnnnnnnnnnnnnnnnnnnnnnnnnnnnnnnnnnnnnnnnnnnnnnnnnnnnnnnnnnnnnnnnnnnnnnnnnnnnnnnnnnnnnnnnnnnnnnnnnnnnnnnnnnnnnnnnnnnnnnnnnnnnnnnnnnnnnnnnnnnnnnnnnnnnnnnnnnnnnnnnnnnnnnnnnnnnnnnnnnnnnnnnnnnnnnnnnnnnnnnnnnnnnnnnnnnnnnnnnnnnnnnnnnnnnnnnnnnnnnnnnnnnnnnnnnnnnnnnnnnnnnnnnnnnnnnnnnnnnnnnnnnnnnnnnnnnnnnnnnnnnnnnnnnnnnnnnnnnnnagtgggaagagaggctgcgggaacagcggagaacaattcaggacaagaagaaaacagctgggcgcaccagtcgtagtaatccccccaaaccaaagggaaagcctcctgctcccaaaccagccagccccaagaagaacattaaaactaggagtgcccagaagaaaacaaacccgaaaaaagtgtgagctaactagtttccaaaacggagacttccaacttccttacaggatgaggctgggcattgcctgggacaacctatgcaaggccatgtgccccttgccctaacaactcactgcagtgctcttcatagacacatcttgcagcatttttcttaatgctatgcttcagtttttctttgtaagccatcacaagccatagtggtaggtttgccctttggtacnnnnnnnnnnnnnnnnnnnnnnnnnnnnnnnnnnnnnnnnnnnnnnnnnnnnnnnnnnnnnnnnnnnnnnnnnnnnnnnnnnnnnnnnnnnnnnnnnnnnnnnnnnnnnnnnnnnnnnnnnnnnnnnnnnnnnnnnnnnnnnnnnnnnnnnnnnnnnnnnnnnnnnnnnnnnnnnnnnnnnnnnnnnnnnnnnnnnnnnnnnnnnnnnnnnnnnnnnnnnnnnnnnnnnnnnnnnnnnnnnnnnnnnnnnnnnnnnnnnnnnnnnnnnnnnnnnnnnnnnnnnnnnnnnnnnnnnnnnnnnnnnnnnnnnnnnnnnnnnnnnnnnnnnnnnnnnnnnnnnnnnnnnnnnnnnnnnnnnnnnnnnnnnnnnnnnnnnnnnnnnnnnnnnnnnnnnnnnnnnnnnnnnnnnnnnnnnnnnnnnnnnnnnnnnnnnnnnnnnnnnnnnnnnnnnnnnnngagaggcagacaatgtctggattcctgttttttggttacctgatttcatgatcatgatgcttcttgtcaacaccctcttaagcagcaccagaaacagtgagtttgtctgtaccactgggagttaggtactaattagttggctaatgctcaagtattttatacccacaacaagagaggtatgtcactcatctcacttcccaggacatccaccctgagagtaatttgacaagtataaaaaaggccttcatgtgagtgccaaaaatttattttcttcacttaaataattttttttgcctaaatacatgtgagaggagttaaatataaatatacacagaggaaagttgaggttccatctctgaaatgagaattacttgacagttgggatactttaatcagaaaagaagaacttatcttgcagtattttatcaacaaatttcataattgtggacaattggaggcatttatttaaaaaaacaattttattggccttttgctaacacagtaagcatgtattctctataaggcattcaataaatgcacaacgcccaaaggaaataaaatcctacctaatcctgctctccactacacagaggtaatcaccattagtattttggcatattattctcccaggtgtttcttatgcacttatacaaagatttgaataaataaaactaggagcctgctatacgtgtgtttca

SEQ ID NO: 33203 - DNA, 699 bp, Macaca Mulatta
tacatcctattaaaatattcaatcttgttttcttactcgatgaggctgtctgcaaagggcaaacttacagaacactcgctttctggagacgggtgtccagccgcactggaccatttacatattttactgtttgattgggtttcttccttctgttgtatttgtgagtaagagctgtgggatgcatttttaattacatggctgtgttttcaacagaagaaaccgtgtggggtattttccaacttcgttcctttttagcctttactagtgaaccagtgtgttaaccagtttgccgtgtttgtcttttaggacagaactgtaccgctctctttttggccagctccaccctcccgacgaaggccatggggattgacatcgcccacctccgacacccagcgggcgccttggctggtgcggctgctggtccagatggaggaaaccagtgactttatgggactgagttagtagggaagcccctgggaaggtgctgtgttccgaacctgtgcctaatacatgcaagggcgctgtcccgcccaaccccgcctttaaacaccacaaataaagagcactgttactgccaccaccgcttgtgatttcttaagaggctgagtcagtctgctttggcgctccagtggatgacacgtttcttgggctttcttttttttctagtccagtggcctcctcttacaatgtcagacttga

SEQ ID NO: 33204 - DNA, 1454 bp, Macaca Mulatta
  misc_feature (1)...(1454): n = A,T,C or G
gcatgggaactcgcttttggaaaaatttcacctctgccagttgatgaggagacgatgcccaaatacatttgccacaagagtcagagtgccactgtcctgggacaaaggtcgtcatctaacaacttaactcctccaaagnnagccaatgagtttaaagacagaaagaattagcttggggaaaacaccaccacaggaagatagagagaaaggtcctcccgggagacatcaagacggaaatctgacacccactggaaggccgacttccggtgcagaaagacggggggtgtctgaagacggaaannnnnnnnnnnnnnnnnnnnnnnnnnnnnnnnnnnnnnnnnnnnnnnnnnnnnnnnnnnnnnnnnnnnnnnnnnnnnnnnnnnnnnnnnnnnnnnnnnnnnnnnnnnnnnnnnnnnnnnnnnnnnnnnnnnnnnnnnnnnnnnnnnnnnnnnnnnnnnnnnnnnnnnnnnnnnnnnnnnnnnnnnnnnnnnnnnnnnnnnnnnnnnnnnnnnnnnnnnnnnnnnnnnnnnnnnnnnnnnnnnnnnnnnnnnnnnnnnnnnnnnnnnnnnnnnnnnnnnnnnnnnnnnnnnnnnnnnnnnnnnnnnnnnnnnnnnnnnnnnnnnnnnnnnnnnnnnnnnnnnnnnnnnnnnnnnnnnnnnnnnnnnnnnnnnnnnnnnnnnnnnnnnnnnnnnnnnnnnnnnnnnnnnnnnnnnnnnnnnnnnnnnnnnnnnnnnnnnnnnnnnnnnnnnnnnnnnnnnnnnnnnnnnnnnnnnnnnnnnnnnnnnnnnnnnnnnnnnnnnnnnnnnnnnnnnnnnnnnnnnnnnnnnnnnnnnnnnnnnnnnnnnnnnnnnnnnnnnnnnnnnnnnnnnnnnnnnnnnnnnnnnnnnnnnnnnnnnnnnnnnnnnnnnnnnnnnnnnnnnnnnnnnnnnnnnnnnnnnnnnnnnnnnnnnnnnnnnnnnnnnnnnnnnnnnnnnnnnnnnnnnnnnnnnnnnnnnnnnnnnnnnnnnnnnnnnnnnnnnnnnnnnnnnnnnnnnnnnnnnnnnnnnnnnnnnnnnnnnnnnnnnnngcacggctcatatctccagcattacagaagctcagcctggacagttcacctctgctcaccgacacccctgtcctcactgggacaagagggagacaattctagtcactacaaggatactcaagtggcgtccaagtcaggtcagggctccaatagtgcagttatcatggcctgtcacagcctggggagcatgttgcctcctgaaacttgagattttttaaatcccgatataaaatgataaccagttacttacttcttttgttgttttgcaggccacctagaaatacaaaagcagactggcattcatctaatttttatactgaaatgtggatgccccaaacatgattttggaaagagataatttcttgaaaatcttatcagaagatgcata

SEQ ID NO: 33205 - DNA, 222 bp, Macaca Mulatta
  misc_feature (1)...(222): n = A,T,C or G
agctttaaagaaagtgtttgctgaaaataaagaaatccagaaattggcagagcagtttgtcctcctcaatctggtnnnnnnnnnnnnnnnnnnnnnnnnnnnnnnnnnnnnnnnnnnnnnnnnnnnnnnnnnnnnnnnnnnnnnnnnnnnnnnnnnnnagccgatatcactggaagatactcaaatcgtctctatgcttacgaacctgcagatacagctctg

SEQ ID NO: 33206 - DNA, 472 bp, Macaca Mulatta
gggaagggatttactagggcagcctgtgatctcctctaaccaccactccctcaccacccaggaaatccaaggagaatcctcggaacttttcggacaaccagctgcaagagggcaagaacgtgatcgggttacagatgggcaccaaccgcggggcatctcaggcaggcatgactggctacgggatgccacgccagatcctctgatcccaccccaggccttgcccctgccctcccacgaatggttaatatatatgtagatatatattttagcagtgacattcccagagagccccagagctctcaagctcccttctgtcagggtggggggttcagcctgtcttgtcacctctgaggtgcctgttggcagcctctcccctgtgcttactaatacattcccttccccgtacccatcaaaactggaccaactggcctcctcttttcccctgggaccaaaatttagggcccttagtccc

SEQ ID NO: 33207 - DNA, 719 bp, Macaca Mulatta
ggtattagcttgattattgactcttctatttaaatctgcttctgtaaattatgctgaaagtttgccttgagaactctatttttttattagagttatattgaaacttttcatgggaaaagttaatgtgaatactgaggaattttggtccctcagtgacctgtgttgttaattcattagtgcattctgagttcacagagcaaattaggagaatcatttccaaccattatttactgcagtatggataccaattcctctaactgtactgtaacacagcctgtaaagttagccatataaatgcaagggtgtatcaaatatacaaatcaggaatcaggtctgttcaccgaacttcaaattgatgtttactaatatttttgtgacagagtatgaagaccctatagtgggtaaattagataccgttaacatattattaatttaatgtctttatcgttggatcttttgcatgctttaatctggttaacacatttaaatttgctttttttcctctttacccgaaggctctgtgtatagtatttcatggcattgttgaagtactatcataagtgacgattaatgatagtattcatcatattgtatatcataaaaactctccgcataatgctcctgactattaataagtctaactattcgagtacataacaaccatatggtcgctgtcagagaattcagtgctgatgatgtagtatgtactgtcgactaaa

SEQ ID NO: 33208 - DNA, 391 bp, Macaca Mulatta
  misc_feature (1)...(391): n = A,T,C or G
gcacaggtagtgccgccaggtgaacaagaacccagagagagggagacagaggagttcggttaagagttgtatctaactccggtccgagctgtggaggggctgcttgttcacttctctgtaggatgcagagcctattagtagaaaggcgggccctactgatgattgggagggaccataactcctgggtcagatcgcctagacatacagcaggaaacagtgacagtgcccctcggtgactctcggggctgctagggaagatctgtcaccctcttggcagaagaggcctttgttcccgatgttgggaggtgggatgttatgggaaggcctacnactttanccctgggtatgaactcatctaaaggggatgtgaaaccttataggtttggggagg

SEQ ID NO: 33209 - DNA, 964 bp, Macaca Mulatta
  misc_feature (1)...(964): n = A,T,C or G
ccagcatcctgcctgagcagagcaacgattaccgtgcggccgtgtttggggctggcggtgttggcaagagctccctggtgttgaggtttgtgaaaggcacattccgggagagctacatcccgacggtggaagacacctaccggcaagtgatcagctgcgacaagagcatatgcacgttgcagatcaccgacacgacggggagccaccagttcccggccatgcagcggctgtccatctccaaggggcacgccttcatcctggtgtactccatcaccagccggcagtccttggaggagctcaagcccatctacgaacaaatctgcgagatcaaaggggacgtggagagcatccccatcatgctggtggggaacaagtgtgacgagagccccagccgcgaggtgcagagcagcgaggcggaggccttggcccgcacatggaagtgcgccttcatggagacctcagccaagctcaaccataacgtgaaggagcttttccaggagctgctcaacctggagaagcgcaggaccgtgagtctccagatcgacgggaaaaagagcaagcagcagaagaggaaagagaagctcaaaggcaagtgcgtgatcatgtgaaggcccttcctgcgggaggagcagctgtgtgtccccggcacctcactccccccaagtgacacccaccgtcgtcagggtagcatgtacaatgcccacgtgttaaacattgcatttaatcgagatgcgccctatagtccttaagagggcgttccacaccaccaacagtaagccaccccctctggagtcacacaatctgccaggcggntcaagtgaaaacaaaacgctcagcatccccgggaactgagagctgccagcaatttctggagatggcgatgaacacccgaaggtgggaggaaggactggtacccacaaagcacatgtaccgagaggactaatgtcatctacgtgcatgtgaa

SEQ ID NO: 33210 - DNA, 1924 bp, Macaca Mulatta
  misc_feature (1)...(1924): n = A,T,C or G
cagctgacagccacctgcaacgtggagcagtccttcttcaacgactggttcagtggacaccttaacttccagattgagcaccnnnnnnnnnnnnnnnnnnnnnnnnnnnnnnnnnnnnnnnnnnnnnnnnnnnnnnnnnnnnnnnnnnnnnnnnnnnnnnnnnnnnnnnnnnnnnnnnnnnnnnnnnnnnnnnnnnnnnnnnnnnnnnnnnnnnnnnnnnnnnnnnnnnnnnnnnnnnnnnnnnnnnnnnnnnnnnnnnnnnnnnnnnnnnnnnnnnnnnnnnnnnnnnnnnnnnnnnnnnnnnnnnnnnnnnnnnnnnnnnnnnnnnnnnnnnnnnnnnnnnnnnnnnnnnnnnnnnnnnnnnnnnnnnnnnnnnnnnnnnnnnnnnnnnnnnnnnnnnnnnnnnnnnnnnnnnnnnnnnnnnnnnnnnnnnnnnnnnnnnnnnnnnnnnnnnnnnnnnnnnnnnnnnnnnnnnnnnnnnnnnnnnnnnnnnnnnnnnnnnnnnnnnnnnnnnnnnnnnnnnnnnnnnnnnnnnnnnnnnnnnnnnnnnnnnnnnnnnnnnnnnnnnnnnnnnnnnnnnnnnnnnnnnnnnnnnnnnnnnnnnnnnnnnnnnnnnnnnnnnnnnnnnnnnnnnnnnnnnnnnnnnnnnnnnnnnnnnnnnnnnnnnnnnnnnnnnnnnnnnnnnnnnnnnnnnnnnnnnnnnnnnnnnnnnnnnnnnnnnnnnnnnnnnnnnnnnnnnnnnnnnnnnnnnnnnnnnnnnnnnnnnnnnnnnnnnnnnnnnnnnnnnnnnnnnnnnnnnnnnnnnnnnnnnnnnnnnnnnnnnnnnnnnnnnnnnnnnnnnnnnnnnnnnnnnnnnnnnnnnnnnnnnnnnnnnnnnnnnnnnnnnnnnnnnnnnnnnnnnnnnnnnnnnnnnnnnnnnnnnnnnnnnnnnnnnnnnnnnnnnnnnnnnnnnnnnnnnnnnnnnnnnnnnnnnnnnnnnnnnnnnnnnnnnnnnnnnnnnnnnnnnnnnnnnnnnnnnnnnnnnnnnnnnnnnnnnnnnnnnnnnnnnnnnnnnnnnnnnnnnnnnnnnnnnnnnnnnnnnnnnnnnnnnnnnnnnnnnnnnnnnnnnnnnnnnnnnnnnnnnnnnnnnnnnnnnnnnnnnnnnnnnnnnnnnnnnnnnnnnnnnnnnnnnnnnnnnnnnnnnnnnnnnnnnnnnnnnnnnnnnnnnnnnnnnnnnnnnnnnnnnnnnnnnnnnnnnnnnnnnnnnnnnnnnnnnnnnnnnnnnnnnnnnnnnnnnnnnnnnnnnnnnnnnnnnnnnnnnnnnnnnnnnnnnnnnnnnnnnnnnnnnnnnnnnnnnnnnnnnnnnnnnnnnnnnnnnnnnnnnnnnnnnnnnnnnnnnnnnnnnnnnnnnnnnnnnnnnnnnnnnnnnnnnnnnnnnnnnnnnnnnnnnnnnnnnnnnnnnnnnnnnnnnnnnnnnnnnnnnnnnnnnnnnnnnnnnnnnnnnnnnnnnnnnnnnnnnnnnnnnnnnnnnnnnnnnnnnnnnnnnnnnnnnnnnnnnnnnnnnnnnnnnnnnnnnnnnnnnnnnnnnnnnnnnnnnnnnnnnnnnnnnnnnnnnnnnnnnnnnnnnnnnnnnnnnnnnnnnnnnnnnnnnnnnnnnnnnnnnnnnnnnnnnnnnnnnnnnnnnnnnnnnnnnnnnnnnnnnnnnnnnnnnnnnnnnnnnnnnnnnnnnnnnnnnnnnnnnnnnnnnnnnnnnnnnnnnnnnnnnnnnnnnnnnnnnnnnnnnnnnnnnnnnnnnnnnnnnnnnnnnnnnnnnnnnnnnnncagctactgtgtgcccccgacccccgcagaggcagaatgaacccacagggagctgattgtaatgtttatcatgttgcttccccacccctaaattttttgaaataaaataagtaattttattctc

SEQ ID NO: 33211 - DNA, 2217 bp, Macaca Mulatta
  misc_feature (1)...(2217): n = A,T,C or G
gcccgggttgctggggctccgtgcagctccgcacggcccggcccgtctcgtctcggccccggcgccatgagcggcggtggcggcggcggagggggctcggcgcccagtcgcttcgccgactactttgtcatctgtggactggacaccgagaccgggctggagccggacgagctgtcgnnnnnnnnnnnnnnnnnnnnnnnnnnnnnnnnnnnnnnnnnnnnnnnnnnnnnnnnnnnnnnnnnnnnnnnnnnnnnnnnnnnnnnnnnnnnnnnnnnnnnnnnnnnnnnnnnnnnnnnnnnnnnnnnnnnnnnnnnnnnnnnnnnnnnnnnnnnnnnnnnnnnnnnnnnnnnnnnnnnnngctatgtatgcccaaagggctggcattcaagacccaggctgatcccagggagccccaattccatgcctttattatcacaagggaggatggctctcggacatttgggtttgccctcacattttatgaagaggtgactagcaagcagatctgcagtgcgatgcagaccctctaccacatgcacaatgctgagtatgatgtcctacatgctccccctgctgatggcagagaccagagcagcatggaggatggtgaagacactcctgtgaccaaactgcagcgcttcaactcctatgacattagccgggacactctctacgtctctaagtgcatctgcctcatcacgcccatgtctttcatgaaggcatgtcggagcgtgctggagcaactccaccaggcggtcacttcacctcagccccctccactgccccttgagagctacatatacaacgtactctacgaggtgccactcccacctcctggccggtccttgaagttttctggggtctatgggccaataatctgccagagaccaagtaccaatgagcttcccctatttgactttcctgtcaaagaggtttttgaactgctcggggtggagaatgtgtttcagctttttacttgtgcccttctggagtttcaaatcctgctctactcacagnnnnnnnnnnnnnnnnnnnnnnnnnnnnnnnnnnnnnnnnnnnnnnnnnnnnnnnnnnnnnnnnnnnnnnnnnnnnnnnnnnnnnnnnnnnnnnnnnnnnnnnnnnnnnnnnnnnnnnnnnnnnnnnnnnnnnnnnnnnnnnnnnnnnnnnnnnnnnnnnnnnnnnnnnnnnnnnnnnnnnnnnnnaggctaacctctgctttgtggacattgacaaccacttcattgagttgccggaggacttgccacagtttcccaacaaattggagtttgtccaggaagtctctgagattctcatggcatttggaattccccctgaagggaatcttcattgcagtgagagtgcctccaagttgaagaggcttcgggcctctgagcttgtctcagacaagaggaatgggaacattgctggctcccctttgcattcctacgagcttcttaaggagaatgaaactattgcccggctgcaagccttggtcaagaggactggggtgagcctggaaaannnnnnnnnnnnnnnnnnnnnnnnnnnnnnnnnnnnnnnnnnnnnnnnnnnnnnnnnnnnnnnnnnnnnnnnnnnnnnnnnnnnnnnnnnnnnnnnnnnnnnnnnnnnnnnnnnnnnnnnnnnnnnnnnnnnnnnnnnnnnnnnnnnnnnnnnnnnnnnnnnnnnnnnnnnnnnnnnnnnnnnnnnnnnnnnnnnnnnnnnnnnnnnnnnnnnnnnnnnnnnnnnnnnnnnnnnnnnnnnnnnnnnnnnnnnnnnnnnnnnnnnnnnnnnnnnnnnnnnnnnnnnnnnnnnnnnnnnnnnnnnnnnnnnnnnnnnnnnnnnnnnnnnnnnnnnnnnnnnnnnnnnnnnnnnnnnnnnnnnnnnnnnnnnnnnnnnnnnnnnnnnnnnnnnnnnnnnnnnnnnnnnnnnnnnnnnnnnnnnnnnnnnnnnnnnnnnnnnnnnnnnnnnnagagaaagcaattgaactacgtctggcaaatattgaccatattgcagttcacccacatttacttgacatgaagattggacaagggaaatatgagccaggcttcttccctaagctgcagtctgatgtactttccactgggccagccagcaacaagtgngtggacgaaaaggaatgcccctgcccagtggaggcggaaagatcggcagaagcagcacacagaacacctgcgtttagacaatgaccagagg

SEQ ID NO: 33212 - DNA, 3954 bp, Macaca Mulatta
  misc_feature (1)...(3954): n = A,T,C or G
agttaggaaacctgctgccctacagtgaccccagcgtggtgtttgtcttcctgtccgtggtaatgtggtgaccatcctgcagtgnnnnnnnnnnnnnnnnnnnnnnnnnnnnnnnnnnnnnnnnnnnnnnnnnnnnnnnnnnnnnnnnnnnnnnnnnnnnnnnnnnnnnnnnnnnnnnnnnnnnnnnnnnnnnnnnnnnnnnnnnnnnnnnnnnnnnnnnnnnnnnnnnnnnnnnnnnnnnnnnnnnnnnnnnnnnnnnnnnnnnnnnnnnnnnnnnnnnnnnnnnnnnnnnnnnnnnnnnnnnnnnnnnnnnnnnnnnnnnnnnnnnnnnnnnnnnnnnnnnnnnnnnnnnnnnnnnnnnnnnnnnnnnnnnnnnnnnnnnnnnnnnnnnnnnnnnnnnnnnnnnnnnnnnnnnnnnnnnnnnnnnnnnnnnnnnnnnnnnnnnnnnnnnnnnnnnnnnnnnnnnnnnnnnnnnnnnnnnnnnnnnnnnnnnnnnnnnnnnnnnnnnnnnnnnnnnnnnnnnnnnnnnnnnnnnnnnnnnnnnnnnnnnnnnnnnnnnnnnnnnnnnnnnnnnnnnnnnnnnnnnnnnnnnnnnnnnnnnnnnnnnnnnnnnnnnnnnnnnnnnnnnnnnnnnnnnnnnnnnnnnnnnnnnnnnnnnnnnnnnnnnnnnnnnnnnnnnnnnnnnnnnnnnnnnnnnnnnnnnnnnnnnnnnnnnnnnnnnnnnnnnnnnnnnnnnnnnnnnnnnnnnnnnnnnnnnnnnnnnnnnnnnnnnnnnnnnnnnnnnnnnnnnnnnnnnnnnnnnnnnnnnnnnnnnnnnnnnnnnnnnnnnnnnnnnnnnnnnnnnnnnnnnnnnnnnnnnnnnnnnnnnnnnnnnnnnnnnnnnnnnnnnnnnnnnnnnnnnnnnnnnnnnnnnnnnnnnnnnnnnnnnnnnnnnnnnnnnnnnnnnnnnnnnnnnnnnnnnnnnnnnnnnnnnnnnnnnnnnnnnnnnnnnnnnnnnnnnnnnnnnnnnnnnnnnnnnnnnnnnnnnnnnnnnnnnnnnnnnnnnnnnnnnnnnnnnnnnnnnnnnnnnnnnnnnnnnnnnnnnnnnnnnnnnnnnnnnnnnnnnnnnnnnnnnnnnnnnnnnnaggccgcaccattattctctccacacaccacatggatgaagcggacatcctgggggacagaattgccatcatctcccatgggaagctgtgctgtgtgggctcctccctgtttctgaagaaccagctgggaacaggctactacctgaccctggtcaagaaagatgtggaatcctccctcagttcctgcagaaacagtagtagcactgtgtcatacctgaaaaaggnnnnnnnnnnnnnnnnnnnnnnnnnnnnnnnnnnnnnnnnnnnnnnnnnnnnnnnnnnnnnnnnnnnnnnnnnnnnnnnnnnnnnnnnnnnnnnnnnnnnnnnnnnnnnnnnnnnnnnnnnnnnnnnnnnnnnnnnnnnnnnnnnnnnnnnnnnnnnnnnnnnnnnnnnnnnnnnnnnnnnnnnnnnnnnnnnnnnnnnnnnnnnnnnnnnnnnnnnnnnnnnnnnnnnnnnnnnnnnnnnnnnnnnnnnnnnnnnnnnnnnnnnnnnnnnnnnnnnnnnnnnnnnnnnnnnnnnnnnnnnnnnnnnnnnnnnnnnnnnnnnnnnnnnnnnnnnnnnnnnnnnnnnnnnnnnnnnnnnnnnnnnnnnnnnnnnnnnnnnnnnnnnnnnnnnnnnnnnnnnnnnnnnnnnnnnnnnnnnnnnnnnnnnnnnnnnnncagagtccagagagacagacttgctcagcgggatggatggcaaaggctcctaccaggtgaagggctggannnnnnnnnnnnnnnnnnnnnnnnnnnnnnnnnnnnnnnnnnnnnnnnnnnnnnnnnnnnnnnnnnnnnnnnnnnnnnnnnnnnnnnnnnnnnnnnnngtttgtctcgcattgcccttgtgttcagcctgatctgtgccacccntttggcaagtaccccagcctggaacttcagccctggatgtacaacgaacagtacacatttgtcagnnnnnnnnnnnnnnnnnnnnnnnnnnnnnnnnnnnnnnnnnnnnnnnnnnnnnnnnnnnnnnnnnnnnnnnnnnnnnnnnnnnnnnnnnnnnnnnnnnnnnnnnnnnnnnnnnnnnnnnnnnnnnnnnnnnnnnnnnnnnnnnnnnnnnnnnnnnnnnnnnnnnnnnnnnnnnnnnnnnnnnnnnnnnnnnnnnnnnnnnnnnnnnnnnnnnnnnnnnnnnnnnnnnnnnnnnnnnnnnnnnnnnnnnnnnnnnnnnnnnnnnnnnnnnnnnnnnnnnnnnnnnnnnnngaaaacaaaacactgcagatatccttcaggacctgacgggaagaaacatttcggattatctggtgaagacgtatgtgcagatcatagccaaaagnnnnnnnnnnnnnnnnnnnnnnnnnnnnnnnnnnnnnnnnnnnnnnnnnnnnnnnnnnnnnnnnnnnnnnnnnnnnnnnnnnnnnnnnnnnnnnnnnnnnnnnnnnnnnnnnnnnnnnnnnnnnnnnnnnnnnnnnnnnnnnnnnnnnnnnnnnnnnnnnnnnnnnnnnnnnnnnnnnnnnnnnnnnnnnnnnnnnnnnnnnnnnnnnnnnnnnnnnnnnnnnnnnnnnnnnnnnnnnnnnnnnnnnnnnnnnnnnnnnnnnnnnnnnnnnnnnnnnnnnnnnnnnnnnnnnnnnnnnnnnnnnnnnnnnnnnnnnnnnnnnnnnnnnnnnnnnnnnnnnnnnnnnnnnnnnnnnnnnnnnnnnnnnnnnnnnnnnnnnnnnnnnnnnnnnnnnnnnnnnnnnnnnnnnnnnnnnnnnnnnnnnnnnnnnnnnnnnnnnnnnnnnnnnnnnnnnnnnnnnnnnnnnnnnnnnnnnnnnnnnnnnnnnnnnnnnnnnnnnnnnnnnnnnnnnnnnnnnnnnnnnnnnnnnnnnnnnnnnnnnnnnnnnnnnnnnnnnnnnnngtgcaattacgttgtccctgccacactggtcattatcatcttcatctgcttccagcagaagtcctatgtgtcctccaccaacctgcctgtgctagcccttctacttctgctgtatgggnnnnnnnnnnnnnnnnnnnnnnnnnnnnnnnnnnnnnnnnnnnnnnnnnnnnnnnnnnnnnnnnnnnnnnnnnnnnnnnnnnnnnnnnnnnnnnnnnnnnnnnnnnnnnnnnnnnnnnnnnnnnnnnnnnnnnnnnnnnnnnnnnnnnnnnnnnnnnnnnnnnnnnnnnnnnnnnnnnnnnnnnnnnnnnnnnnnnnnnnnnnnnnnnnnnnnnnnnnnnnnnnnnnnnnnnnnnnnnnnnnnnnnnnnnnnnnnnnnnnnnnnnnnggggagaaccgctttgtgtcaccattatcttgggacttggtgggacgaaacctcttcgccatggctgtggaaggggtggtgttcttcctcattactgttctgatccagtacagattcttcatcaggcccannnnnnnnnnnnnnnnnnnnnnnnnnnnnnnnnnnnnnnnnnnnnnnnnnnnnnnnnnnnnnnnnnnnnnnnnnnnnnnnnnnnnnnnnnnnnnnnnnnnnnnnnnnnnnnnnnnnnnnnnnnnnnnnnnnnnnnnnnnnnnnnnnnnnnnnnnnnnnnnnnnnnnnnnnnnnnnnnnnnnnnnnnnnnnnnnnnnnnnnnnnnnnnnnnnnnnnnnnnnnnnnnnnnnnnnnnnnnnnnnnnnnnnnnnnnnnnnnnnnnnnnnnnnnnnnnnnnnnnnnnnnnnnnngtatcttatcaaacatacatgaagtacatcagaacatgggctactgccctcagtttgatgccatcacagagctgttgactgggagagaacatgtggagttctttgcccttttgagaggagtcccagagaaagaagttggcaaggt

SEQ ID NO: 33213 - DNA, 836 bp, Macaca Mulatta
tgcatgaattctttctgcttgatatggccaattagttttttcatagcaattgtatgaaaactacgatcatacttcttgattacttttgcatagtccaaaagaaacatttgactacgccttttttttcccctaattttttggcggttctgtggctgtaacatcagagaacattatattgaaattagcatttacttaaaatgaaaattatttggcaacccctgtaaatatttttgtttttgttgaaattaataaatgtgattgtatttgttctgattggaaatattttaaaaatcaggaacaatttaaaattaggaaatctgtactccctccctaaagaaaatcatatggtaaacattatgctaaaatcaaacatatagtaaaaccaattttttctttcctagatatgcaaacatgtgttggtaaaagacataaaaataattgtgttggatctgaggtgatatgttctgaatgtaagcaccatcaacatcagacacctactcacggacatgtggttgccggattttcttaagatgtttccagaaatgactgatattttatatttatacattttagatcagaaagcttgatatttattgctgttgcacattttgaagttttctttttgggttgctctgtgtcaagagaggttacatggtgttaaatctgtacctaataatgtgcccaaatactatgaccagataataaattgtgctgcaaacaacatgtctggtatttatagaggtctctgcatacacttttagagctttagatgatttactgtattttttattcatgtaaaatgtaattccaaataagaaattctgagtgtatgtagt

SEQ ID NO: 33214 - DNA, 1177 bp, Macaca Mulatta
  misc_feature (1)...(1177): n = A,T,C or G
ggtgttcctgaaaagagggtacttccaatcactgtccccaagtcaccagcctttgcattgaagaacagaattcgaatgcccaccaaagaagatgaggnnnnnnnnnnnnnnnnnnnnnnnnnnnnnnnnnnnnnnnnnnnnnnnnnnnnnnnnnnnnnnnnnnnnnnnnnnnnnnnnnnnnnnnnnnnnnnnnnnnnnnnnnnnnnnnnnnnnnnnnnnnnnnnnnnnnnnnnnnnnnnnnnnnnnnnnnnnnnnnnnnnnnnnnnnnnnnnnnnnnnnnnnnnnnnnnnnnnnnnnnnnnnnnnnnnnnnnnnnnnnnnnnnnnnnnnnnnnnnnnnnnnnnnnnnnnnnnnnnnnnnnnnnnnnnnnnnnnnnnnnnnnnnnnnnnnnnnnnnnnnnnnnnnnnnnnnnnnnnnnngctggaagaagaactgagacagcagaaagaagcagcttgcttcaaggctcgtccaaacacggtcatctctcaggagccctttgttcccaaaaaagagaagaaatcagttgctgnnnnnnnnnnnnnnnnnnnnnnnnnnnnnnnnnnnnnnnnnnnnnnnnnnnnnnnnnnnnnnnnnnnnnnnnnnnnnnnnnnnnnnnnnnnnnnnnnnnnnnnnnnnnnnnnnnnnnnnnnnnnnnnnnnnnnnnnnnnnnnnnnnnnnnnnnnnnnnnnnnnnnnnnnnnnnnnnnnnnnnnnnnnggtgcataaggcaaatccaatacgcaagtaccagggtctggagataaagtcaagtgaccagcctctgactgtgcctgtatctcccaaattctccactcgattccactgctgaactcagctgtgagctgcggacaccgcctgacaatgggacctgctcttaatatcaaacctgagaccatcttgctttgttactgggcatggagagaacccatttctccagacttttagctacccatgcctgagaaagcatacttgacaactgtggactccagttttgttgagaattgttttctttttcattactaaggctaatgagacataacgcatgtatgtctcgattagactccatgtagttacttcctgtaaacttatcagctggccctttatatgggtcttcactctgattagaatttagtctctgtgtcagcacagtgtaatccctattgctattgtccctta

SEQ ID NO: 33215 - DNA, 1449 bp, Macaca Mulatta
  misc_feature (1)...(1449): n = A,T,C or G
taatcaggtgctgctgttccttctgatcgtgaccctctgtgtgattctgtataagaaagttcataaggnnnnnnnnnnnnnnnnnnnnnnnnnnnnnnnnnnnnnnnnnnnnnnnnnnnnnnnnnnnnnnnnnnnnnnnnnnnnnnnnnnnnnnnnnnnnnnnnnnnnnnnnnnnnnnnnnnnnnnnnnnnnnnnnnnnnnnnnnnnnnnnnnnnnnnnnnnnnnnnnnnnnnnnnnnnnnnnnnnnnnnnnnnnnnnnnnnnnnnnnnnnnnnnnnnnnnnnnnnnnnnnnnnnnnnnnnnnnnnnnnnnnnnnnnnnnnnnnnnnnnnnnnnnnnnnnnnnnnnnnnnnnnnnnnnnnnnnnnnnnnnnnnnnnnnnnnnnnnnnnnnnnnnnnnnnnnnnnnnnnnnnnnnnnnnnnnnnnnnnnnnnnnnnnnnnnnnnnnnnnnnnnnnnnnnnnnnnnnnnnnnnnnnnnnnnnnnnnnnnnnnnnnnnnnnnnnnnnnnnnnnnnnnnnnnnnnnnnnnnnnnnnnnnnnnnnnnnnnnnnnnnnnnnnnnnnnnnnnnnnnnnnnnnnncagaatacatatatgggctatctggactcccggaagaaggccatcaaggacctcggcatcagccccagcacctgctctttcaatcctggtgtgattgttgccaacatgacagaatggaagcaccagcacatcaccaagcaattggagaaatggatgcaaaagaatgtggannnnnnnnnnnnnnnnnnnnnnnnnnnnnnnnnnnnnnnnnnnnnnnnnnnnnnnnnnnnnnnnnnnnnnnnnnnnnnnnnnnnnnnnnnnnnnnnnnnnnnnnnnnnnnnnnnnnnnnnnnnnnnnnnnnnnnnnnnnnnnnnnnnnnnnnnnnnnnnnnnnnnnnnnnnnnnnnnnnnnnnnnnnnnnnnnnnnnnnnnnnnnnnnnnnnnnnnnnnnnnnnnnnnnnnnnnnnnnnnnnnnnnnnnnnnnnnnnnnnnnnnnnnnnnnnnnnnnnnnnnnnnnnnnnnnnnnnnnnnnnnnnnnnnnnnnnnnnnnnnnnnnnnnnnnnnnnnnnnnnnnnnnnnnnnnnnnnnnnnnnnnnnnnnnnnnnnnnnnnnnnnnnnnnnnnnnnnnnnnnnnnnnnnnnnnnnnnnnnnnnnnnnnnnnnnnnnnnnnnnnnnnnnnnnnnnnnnnnnnnnnnnnnnnnnnnnnnnnnnnnnnnnnnnnnnnnnnnnnnnnnnnnnnnnnnnnnnnnnnnnnnnnagataccagtaatcaatctgcttaattctgaataacaattatatccacaaatttttaaaacttctaaatgtatttttcacatgtagatctttttaacaggttgccaatcttttcttttataaaactattgcatttaaaatatggatgtctgaaaaataaaatattcatcattttta

SEQ ID NO: 33216 - DNA, 645 bp, Macaca Mulatta
  misc_feature (1)...(645): n = A,T,C or G
gggggctgccttgtgaaatgattgcctgcagtaaacggacttttcatttatttaatcattcaaacttgcattcacatctgcatgattacagaaaacatggggtatgtaggctagtaacacataagaaaattgcagtaagatggtaacaaaacctcatattcgtctttacatgtttccaatggaaaatgtttcgagtgtttattgttcagtttattacgtttcacttgattaaatgttttttgttgtattaaaccatgtacgttgcagcttaacaataaaaaaaaaaatctatgaatccttgtgagcaattatgctcccaaatcgaagcannnnnnnnnnnnnnnnnnnnnnnnnnnnnnnnnnnnnnnnnnnnnnnnnnnnnnnnnnnnnnnnnnnnnnnnnnnnnnnnnnnnnnnnnnnnnnnnnnnnnnnnnnnnnnnnnnnnnnnttgtggcnnnnnnnnnnnnnnnnnnnnnnnnnnnnnnnnnnnnnnnnnnnnnccggccccaaaaaaaaattaacaagtgacaactcttttccccaagagatctgggtccacaaatggtgttaattccccaaaataaaacccgccgggcaaaccggctttttaaaaatccaaggggttttaagaacctcccggcctcc

SEQ ID NO: 33217 - DNA, 350 bp, Macaca Mulatta
aaaacccggaaaccggctgccaagaaagtggccccgctgatggccaaggcaattcgagactacaagaggagattctcccgaagataaactcaggacttgccttagggttaaaatctggggggaggaggaacaatgcaaagtcaatgcgggttggggaaagaaacttccagtggacaccagaacctttggcttggtgcaaagttgagcctctgcattctgcaggtgtcaagtgctggccctgtgattttgcctcacacacccagccactgcctccctgcttggaggccacctcagaattcagaagatgggaacgcattcgggtcaactctactttggctgttcactgatcg

SEQ ID NO: 33218 - DNA, 886 bp, Macaca Mulatta
  misc_feature (1)...(886): n = A,T,C or G
gtatggggacatgcgtgtaatgatggcttatgaactgttcagcatgtggcagaatttgggtnnnnnnnnnnnnnnnnnnnnnnnnnnnnnnnnnnnnnnnnnnnnnnnnnnnnnnnnnnnnnnnnnnnnnnnnnnnnnnnnnnnnnnnnnnnnnnnnnnnnnnnnnnnnnnnnnnnnnnnnnnnnnnnnnnnnnnnnnnnnnnnnnnnnnnnnnnnnnnnnnnnnnnnnnnnnnnnnnnnnnnnnnnnnnnnnnnnnnnnnnnnnnnnnnnnnnnnnnnnnnnnnnnnnnnnnnnnnnnnnnnnnnnnnnnnnnnnnnnnnnnnnnnnnnnnnnnnnnnnnnnnnnnnnnnnnnnnnnnnnnnnnnnnnnnnnnnnnnnnnnnnnnnnnnnnnnnnnnnnnnnnnnnnnnnnnnnnnnnnnnnnnnnnnnnnnnnnnnnnnnnnnnnnnnnnnnnnnnnnnnnnnnnnnnnnnnnnnnnnnnnnnnnnnnnnnnnnnnnnnnnnnnnnnnnnnnnnnnnnnnnnnnnnnnnnnnnnnnnnnnnnnnnnnnnnnnnnnnnnnnnnnnnnnnnnnnnnnnnnnnnnnnnnnnnnnnnnnnnnnnnnnnnnnnnnnnnnnnnnnnnnnnnnnnnnnnnnnnnnnnnnnnnnnnnnnnnnnnnnnnnnnnnnnnnnnnnnnnnnnnnnnnnnnnnnnnnnnnnnnnnnnnnnnnnnnnnnnnnnnnnnnnnnnnnnnnnnnnnnnnnnnnnnnnnnnnnnnnnnnnnnnnnnnnnnnnnnnnnngaaaatggaggccagctactatgacaacattatggagcagcaacgcctggagcctgagttctttcgggtcggcttctatggcaggaagtttcctttctttcttcgg

SEQ ID NO: 33219 - DNA, 459 bp, Macaca Mulatta
ggaccgtggtggggaaactggagccctagagcctggagaaaggatgagaaaaagaagagaacctggcagcgcttgttgcacactgacctctgccctctcttaggtggaagagatcatgcagctggtgaatgcctacttggccaacccctcccccgagaggccctgcagcagctcttctcgtccatgccaagacctgccagacacctcccctcccagccagcacccgggcctggacgagccccagggacagtctggctgcttggggcagctgcaggactgagcctgccaagaggtcacgacttccctcctgcctccagcctgggccaggactgctccgagatttgagggaaacatggacccttttggccctgcagggacagggcacatcccacacccaagggctacaatgggtgtgggcaattttctagtttgtttcttaatttatttgtagaagagaag

SEQ ID NO: 33220 - DNA, 126 bp, Macaca Mulatta
aggaacaaaaggagaattatgaggatattcagcgtgccacctacagaggaaactttgtcagagcccaacttttatgacacaataagcaagattcgtttgagacaacaactggaaatgtattccatt

SEQ ID NO: 33221 - DNA, 2719 bp, Macaca Mulatta
  misc_feature (1)...(2719): n = A,T,C or G
atgaactttgcggagagagagggctctaagagatactgcattcaaacgaaacacgtggccattctctgtgcggtggtggtgggtgtaggattaatagtgggacttgccgtgggcttgaccagatcgtgtgactccggcggggatggtggcccgggcacggcgccggctccttcccacctgccgtcttccacggccagcccctcaggtcctcctgcccaggaccaggacatctgcccggccagtgaggatgacagcggacagtggaaaaactttcgactgccagacttcatcaacccggtccactacgacctgcacgtgaagcccctgttggaggaggacacctacacgggcaccgtgagcatctccatcaatctgagcgcgcccacccggtacctgtggctgcacctccgggagaccaggatcacccgactccccgagctgaagaggccctcggggaaccaggtgcaagtccggagatgtttcgagtacaaaaagcaggagtatgtggttgtcgaggcggaggaagagcttacccccagcagtggagatagcctctatctcctgaccatggagttcgccggctggctgaacggctccctcgtggggttttacagaaccacctacacggagaacggacaagtcaannnnnnnnnnnnnnnnnnnnnnnnnnnnnnnnnnnnnnnnnnnnnnnnnnnnnnnnnnnnnnnnnnnnnnnnnnnnnnnnnnnnnnnnnnnnnnnnnnnnnnnnnnnnnnnnnnnnnnnnnnnnnnnnnnnnnnnnnnnnnnnnnnnnnnnnnnnnnnnnnnnnnnnnnnnnnnnnnnnnnnnnnnnnnnnnnnnnnnnnnnnnnnnnnnnnnnnnnnnnnnnnnnnnnnnnnnnnnnnnnnnnnnnnnnnnnnnnnnnnnnnnnnnnnnnnnnnnnnnnnnnnnnnnnnnnnnnnnnnnnnnnnnnnnnnnnnnnnnnnnnnnnnnnnnnnnnnnnnnnnnnnnnnnnnnnnnnnnnnnnnnnnnnnnnnnnnnnnnnnnnnnnnnnnnnnnnnnnnnnnnnnnnnnnnnnnnnnnnnnnnnnnnnnnnnnnnnnnnnnnnnnnnnnnnnnnnnnnnnnnnnnnnnnnnnnnnnnnnnnnnnnnnnnnnnnnnnnnnnnnnnnnnnnnnnnnnnnnnnnnnnnnnnnnnnnnnnnnnnnnnnnnnnnnnnnnnnnnnnnnnnnnnnnnnnnnnnnnnnnnnnnnnnnnnnnnnnnnnnnnnnnnnnnnnnnnnnnnnnnnnnnnnnnnnnnnnnnnnnnnnnnnnnnnnnnnnnnnnnnnnnnnnnnnnnnnnnnnnnnnnnnnnnnnnnnnnnnnnnnnnnnnnnnnnnnnnnnnnnnnnnnnnnnnnnnnnnnnnnnnnnnnnnnnnnnnnnnnnnnnnnnnnnnnnnnnnnnnnnnnnnnnnnnnnnnnnnnnnnnnnnnnnnnnnnnnnnnnnnnnnnnnnnnnnnnnnnnnnnnnnnnnnnnnnnnnnnnnnnnnnnnnnnnnnnnnnnnnnnnnnnnnnnnnnnnnnnnnnnnnnnnnnnnnnnnnnnnnnnnnnnnnnnnaggcgagtaggctcccagtgaaagaagtaatggacacctggaccagacagatgggttatcctgtgcttaacgtgaatggtggcaagaacatcacacagaaacggtttctgctggactcaagagctaacccttctcagcccccttcagatcttgnnnnnnnnnnnnnnnnnnnnnnnnnnnnnnnnnnnnnnnnnnnnnnnnnnnnnnnnnnnnnnnnnnnnnnnnnnnnnnnnnnnnnnnnnnnnnnnnnnnnnnnnnnnnnnnnnnnnnnnnnnnnnnnnnnnnnnnnnnnnnnnnnnnnnnnnnnnnnnnnnnnnnnnnnnnnnnnnnnnnnnnnnnnnnnnnnnnnnnnnnnnnnnnnnnnnnnnnnnnnnnnnnnnnnnnnnnnnnnnnnnnnnnnnnnnnnnnnnnnnnnnnnnnnnnnnnnnnnnnnnnnnnnnnnnnnnnnnnnnnnnnnnnnnnnnnnnnnnnnnnnnnnnnnnnnnnnnnnnnnnnnnnnnnnnnnnnnnnnnnnnnnnnnnnnnnnnnnnnnnnnnnnnnnnnnnnnnnnnnnnnnnnnnnnnnnnnnnnnnnnnnnnnnnnnnnnnnnnnnnnnnnnnnnnnnnnnnnnnnnnnnnnnnnnnnnnnnnnnnnnnnnnnnnnnnnnnnnnnnnnnnnnnnnnnnnnnnnnnnnnnnnnnnnnnnnnnnnnnnnnnnnnnnnnnnnnnnnnnnnnnnnnnnnnnnnnnnnnnnnnnnnnnnnnnnnnnnnnnnnnnnnnnnnnnnnnnnnnnnnnnnnnnnnnnnnnnnnnnnnnnnnnnnnnnnnnnnnnnnnnnnnnnnnnnnnnnnnnnnnnnnnnnnnnnnnnnnnnnnnnnnnnnnnnnnnnnnnnnnnnnnnnnnnnnnnnnnnnnnnnnnnnnnnnnnnnnnnnnnnnnnnnnnnnnnnnnnnnnnnnnnnnnnnnnnnnnnnnnnnnnnnnnnnnnnnnnnnnnnnnnnnnnnnnnnnnnnnnnnnnnnnnnnnnnnnnnnnnnnnnnnnnnnnnnnnnnnnnnnnnnnnnnnnnnnnnnnnnnnnnnnnnnnnnnnnagatttacactcaataacagaaacctcggacgaattgtcacaatagcagagccattcaacactgaactgcaactgtggcagn

SEQ ID NO: 33222 - DNA, 424 bp, Macaca Mulatta
cagactccagatggacatgcggattacccctgctgcggcagatggaaggcatttacgctgacatccctgtgcggcgtccagagtccagtgcacacatgcaggagctgtaccaggagtggctggaggggatcaactcccccaaagcccgagaggtgctgcacaccacataccagagccaggagcgtggcgcacacagcctggacatcaagtggtgaagtcaggccagggccttccagctgctcttggggccagagctactctcagtagagggaggggctgccttgagtggagtattaaagacacttaagaaaactgctcaatgggttactttggtttctcagagttccctgctatcccgtttattggaggcccctcaggcagtttcatgtggtgctatcttcataataggtgtgggattggaact

SEQ ID NO: 33223 - DNA, 664 bp, Macaca Mulatta
tgctgccagtccagctgctgtcttccgtgtgctgccagtgcaagatctgaggctctagtgggaaacctcaggtagctcctgaagatctgctcttctcaacaagtgagtatccctcaagcacatcctgttctggagcagagcaatgagtcccctggctcagggcttctttttccagcccttgaggaagtggaatgaaccactccctgcccattcactgtaagggtatcacatgccccttgtactttggaccctccttcctacatgcccccatatgtctgagccagactgcactgggggcatccctcatgccaagcaagagcctggaattccccttcttgataattccatgggagacagcaaacttttctttcctgtgtctcccaggagctccatttacagatggatgtcctgcaacccaaatgatcacatgtatctgtagaaatccaaaatgcacctgggtgcagcactaaataaattatccaccctcagccttggtctcactgactcttttctttcagcctctgtctcattgctaaactggtcacatgtgcttcccctccctccctgatggcttactactgccaccactgtgacagtgtgccaggcccagctcgcattccagaaacagttgttgaactgattaatgaaggagtcactagcagtg

SEQ ID NO: 33224 - DNA, 1073 bp, Macaca Mulatta
  misc_feature (1)...(1073): n = A,T,C or G
agcaagcagagatgaactccagtccagaaaagttaaattagactatgaagaagttggtgcatgtcagaaagaggtcttaataatttgggataagaagttgttaaactgcagagctaaaatcagatgtgatatggaagatattcatactcttcttaaagaagnnnnnnnnnnnnnnnnnnnnnnnnnnnnnnnnnnnnnnnnnnnnnnnnnnnnnnnnnnnnnnnnnnnnnnnnnnnnnnnnnnnnnnnnnnnnnnnnnnnnnnnnnnnnnnnnnnnnnnnnnnnnnnnnnnnnnnnnnnnnnnnnnnnnnnnnnnnnnnnnnnnnnnnnnnnnnnnnnnnnnnnnnnnnnnnnnnnnnnnnnnnnnnnnnnnnnnnnnnnnnnnnnnnnnnnnnnnnnnnnnnnnnnnnnnnnnnnnnnnnnnnnnnnnnnnnnnnnnnnnnnnnnnnnnnnnnnnnnnnnnnnnnnnnnnnnnnnnnnnnnnnnnnnnnnnnnnnnnnnnnnnnnnnnnnnnnnnnnnnnnnnnnnnnnnnnnnnnnnnnnnnnnnnnnnnnnnnnnnnnnnnnnnnnnnnnnnnnnnnnnnnnnnnnnnnnnnnnnnnnnnnnnnnnnnnnnnnnnnnnnnnnnnnnnnnnnnnnnnnnnnnnnnnnnnnnnnnnnnnnnnnnnnnnnnnnnnnnnnnnnnnnnnnnnnnnnnnnnnnnnnnnnnnnnnnnnnnnnnnnnnnnnnnnnnnnnnnnnnnnnnnnnnnnnnnnnnnnnnnnnnnnnnnnnnnnnnnnnnnnnnnnnnnnnnnnnnnnnnnnnnnnnnnnnnnnnnnnnnnnnnnnnnnnnnnnnnnnnnnnnnnnnnnnnnnnnnnnnnnnnnnnnnnnnnnnnnnnnnnnnnnnnnnnnncaggtttttgagatggatatttctaagcagttgcatgcctatgaggtggaatatcatgtgctacaggatgagcttcaggaatcttcatatgcctgtgaggatagtgaacctttggagaagctggagagggccaatagccaactgaaaagacaaaacatggacctcctagaaaaattacaggt

SEQ ID NO: 33225 - DNA, 923 bp, Macaca Mulatta
  misc_feature (1)...(923): n = A,T,C or G
cagcgaggagccggcgcctcccgcgccccgcggtcgccctggagtaatttcggatgccccgccgcggccgccttccctagtagacccgggagaggagttgcggccaacttgtgtgcctttcttccgctccggtgggagccggcgctgcgcgaagggctctcccggcggctcatgctgccggccctgcgcctgcccagcctctggtgagccgcctccggagagacgggggagcgcggcggcgccgcgggctcggcgtgctctcctccggggacgcgggacgaagcagcagccccgggcgcgcgccggaggcatggagcgctgccccagcctaggggtcaccctctacgccctggtggtggtcctggggctgcgggcgacaccggccggcggccagcactatctccacatccgcccggcgcccagcgacaacctgcccctggtggacctcatcgaacacccagaccctatctttgaccccaaggagaaggatctgaacgagacgctgctgcgctcgctgctcgggggccactacgacccgggcttcatggccacctcgccccccgaggaccggcnnnnnnnnnnnnnnnnnnnnnnnnnnnnnnnnaggacctggcggagctggaccagctgctgcggcagcggccgtcgggggccatgccgagtgagatcaaagggctagagttctccgagggcttggcccagggcaagaagcagcgcctgagcaagaagctgcggaggaagttacagatgtggctgtggtcgcagacgttctgccccgtgctgtacgcgtggaacgacctgggcagccgcttttggcctgcgctacgtgaaggtgggcagctgcttcagtaagcgctcgtgctccgtgcccgagggcatggtgtgcaagccgtccaagtccgtgcacctcacggtgctgcggt

SEQ ID NO: 33226 - DNA, 357 bp, Macaca Mulatta
  misc_feature (1)...(357): n = A,T,C or G
tagggagtcgggccccgggccgccaccgtcacctcggccgctgccgctgtcgccatcgccttgtttccccatcccccgccatggccgaggacctctccgcggccacgtcctacaccgaagatgatttctactgccccgtctgtcaggaggtgctcaaaacgcccgtgcggaccgcggcctgtcagcacgnnnnnnnnnnnnnnnnnnnnnnnnnnnnnnnnnnnnnnnnnnnnnnnnnnnnnnnagttcttctggtcatcctacttttaagtgtcccctgtgtcaagaatcaaattttaccagacagcgtttactggatcactgtaacagtaatcacctatttcagatagttcctgt

SEQ ID NO: 33227 - DNA, 1803 bp, Macaca Mulatta
  misc_feature (1)...(1803): n = A,T,C or G
catctcaaggaatactggaacaaccctgagttggatgaaggggagcggtttctgcgggattacatcctcaacaaacgctnnnnnnnnnnnnnnnnnnnnnnnnnnnnnnnnnnnnnnnnnnnnnnnnnnnnnnnnnnnnnnnnnnnnnnnnnnnnnnnnnnnnnnnnnnnnnnnnnnnnnnnnnnnnnnnnnnnnnnnnnnnnnnnnnnnnnnnnnnnnnnnnnnnnnnnnnnnnnnnnnnnnnnnnnnnnnnnnnnnnnnnnnnnnnnnnnnnnnnnnnnnnnnnnnnnnnnnnnnnnnnnnnnnnnnnnnnnnnnnnnnnnnnnnnnnnnnnnnnnnnnnnnnnnnnnnnnnnnnnnnnnnnnnnnnnnnnnnnnnnnnnnnnnnnnnnnnnnnnnnnnnnnnnnnnnnnnnnnnnnnnnnnnnnnnnnnnnnnnnnnnnnnnnnnnnnnnnnnnnnnnnnnnnnnnnnnnnnnnnnnnnnnnnnnnnnnnnnnnnnnnnnnnnnnnnnnnnnnnnnnnnnnnnnnnnnnnnnnnnnnnnnnnnnnnnnnnnnnnnnnnnnnnnnnnnnnnnnnnnnnnnnnnnnnnnnnnnnnnnnnnnnnnactggaactgggacacgtgggacgggcctgagcaggagggagactggagccagcaggagctgcactgtgaggaccccaacttcaacnatggatgctgactacgaccccagccagccacggaaaaagcgtgaagccccctcgacgggcaagaagaagcgcaagtcgcccttcgccgcggccgtggggcaggagaagccagtgtttgaacccggnggggacaagacgtttgaggagtacctggatgagtattaccggctggactacgaggacatcatcgacgacctgccctgtcgcttcaagtaccgcaccgtggtgccctgcgacttcggcctcagcactgaggagnnnnnnnnnnnnnnnnnnnnnnnnnnnnnnnnnnnnnnnnnnnnnnnnnnnnnnnnnnnnnnnnnnnnnnnnnnnnnnnnnnnnnnnnnnnnnnnnnnnnnnnnnnnnnnnnnnnnnnnnnnnnnnnnnnnnnnnnnnnnnnnnnnnnnnnnnnnnnnnnnnnnnnnnnnnnnnnnnnnnnnnnnnnnnnnnnnnnnnnnnnnnnnnnnnnnnnnnnnnnnnnnnnnnnnnnnnnnnnnnnnnnnnnnnnnnnnnnngccggagagtcccccagcacaggaagaggaggcccctgtatcaccccacaagaagccagccccccagaggcgaaggagggccaagaaggcacggctgctgggccccactgtgatgcttggtggacgcgagttcagccgccagagactgcaggcctttggcctcaaccccaaacggctgtacttccgccagctgggccggcagcggaggaaacaacaggggcccaagaacagctcctgagcactgggagcaggcaggggcctcaggctcctcccctcaaatcaagccctggacaggtctcgcacccacaagtaccatctgctgcagagaacctctcatctgtggccaggaacacctgtaatcccagcactttaggaggctgaggtgaaaggattacttgagcccaggaactggagaccagcctgggcaacacagtgagactccatctctacaaaatgtggtggcacatgcctgtagtcccagctattcaggaggctggggaaggaggatcacttaaggccaggaatttgaggctgcagtgaactatgattgcaccactgcactccagcctgggcgacaaagcaagaccctgtctctt

SEQ ID NO: 33228 - DNA, 4247 bp, Macaca Mulatta
  misc_feature (1)...(4247): n = A,T,C or G
gccctgtgtacggaggagtgtgtgcacggccgctgcgtttccccggacacctgccactgcgagcctggctggggagggcccgactgctccagcgnnnnnnnnnnnnnnnnnnnnnnnnnnnnnnnnnnnnnnnnnnnnnnnnnnnnnnnnnnnnnnnnnnnnnnnnnnnnnnnnnnnnnnnnnnnnnnnnnnnnnnnnnnnnnnnnnnnnnnnnnnnnnnnnnnnnnnnnnnnnnnnnnnnnnnnnnnnnnnnnnnnnnnnnnnnnnnnnnnnnnnnnnnnnnnnnnnnnnnnnnnnnnnnnnnnnnnnnnnnnnnnnnnnnnnnnnnnnnnnnnnnnnnnnnnnnnnnnnnnnnnnnnnnnnnnnnnnnnnnnnnnnnnnnnnnnnnnnnnnnnnnnnnnnnnnnnnnnnnnnnnnnnnnnnnnnnnnnnnnnnnnnnnnnnnnnnnnnnnnnnnnnnnnnnnnnnnnnnnnnnnnnnnnnnnnnnnnnnnnnnnnnnnnnnnnnnnnnnnnnnnnnnnnnnnnnnnnnnnnnnnnnnnnnnnnnnnnnnnnnnnnnnnnnnnnnnnnnnnnnnnnnnnnnnnnnnnnnnnnnnnnnnnnnnnnnnnnnnnnnnnnnnnnnnnnnnnnnnnnnnnnnnnnnnnnnnnnnnnnnnnnnnnnnnnnnnnnnnnnnnnnnnnnnnnnnnnnnnnnnnnnnnnnnnnnnnnnnnnnnnnnnnnnnnnnnnnnnnnnnnnnnnnnnnnnnnnnnnnnnnnnnnnnnnnnnnnnnnnnnnnnnnnnnnnnnnnnnnnnnnnnnnnnnnnnnnnnnnnnnnnnnnnnnnnnnnnnnnnnnnnnnnnnnnnnnnnnnnnnnnnnnnnnnnnnnnnnnnnnnnnnnnnnnnnnnnnnnnnnnnnnnnnnnnnnnnnnnnnnnnnnnnnnnnnnnnnnnnnnnnnnnnnnnnnnnnnnnnnnnnnnnnnnnnnnnnnnnnnnnnnnnnnnnnnnnnnnnnnnnnnnnnnnnnnnnnnnnnnnnnnnnnnnnnnnnnnnnnnnnnnnnnnnnnnnnnnnnnnnnnnnnnnnnnnnnnnnnnnnnnnnnnnnnnnnnnnnnnnnnnnnnnnnnnnnnnnnnnnnnnnnnnnnnnnnnnnnnnnnnnnnnnnnnnnnnnnnnnnnnnnnnnnnnnnnnnnnnnnnnnnnnnnnnnnnnnnnnnnnnnnnnnnnnnnnnnnnnnnnnnnnnnnnnnnnnnnnnnnnnnnnnnnnnnnnnnnnnnnnnnnnnnnnnnnnnnnnnnnnnnnnnnnnnnnnnnnnnnnnnnnnnnnnnnnnnnnnnnnnnnnnnnnnnnnnnnnnnnnnnnnnnnnnnnnnnnnnnnnnnnnnnnnnnnnnnnnnnnnnnnnnnnnnnnnnnnnnnnnnnnnnnnnnnnnnnnnnnnnnnnnnnnnnnnnnnnnnnnnnnnnnnnnnnnnnnnnnnnnnnnnnnnnnnnnnnnnnnnnnnnnnnnnnnnnnnnnnnnnnnnnnnnnnnnnnnnnnnnnnnnnnnnnnnnnnnnnnnnnnnnnnnnnnnnnnnnnnnnnnnnnnnnnnnnnnnnnnnnnnnnnnnnnnnnnnnnnnnnnnnnnnnnnnnnnnnnnnnnnnnnnnnnnnnnnnnnnnnnnnnnnnnnnnnnnnnnnnnnnnnagtgtgtgctggaggacactttgggcaggactgtgcccagctttgctcctgtgccaacaatgggacctgcagccctatcgatggctcctgtcagtgctttcctggatggattggcaaggactgctcacagnnnnnnnnnnnnnnnnnnnnnnnnnnnnnnnnnnnnnnnnnnnnnnnnnnnnnnnnnnnnnnnnnnnnnnnnnnnnnnnnnnnnnnnnnnnnnnnnnnnnnnnnnnnnnnnnnnnnnnnnnnnnnnnnnnnnnnnnnnnnnnnnnnnnnnnnnnnnnnnnnnnnnnnnnnnnnnnnnnnnnnnnnnnnnnnnnnnnnnnnnnnnnnnnnnnnnnnnnnnnnnnnnnnnnnnnnnnnnnnnnnnnnnnnnnnnnnnnnnnnnnnnnnnnnnnnnnnnnnnnnnnnnnnnnnnnnnnnnnnnnnnnnnnnnnnnnnnnnnnnnnnnnnnnnnnnnnnnnnnnnnnnnnnnnnnnnnnnnnnnnnnnnnnnnnnnnnnnnnnnnnnnnnnnnnnnnnnnnnnnnnnnnnnnnnnnnnnnnnnnnnnnnnnnnnnnnnnnnnnnnnnnnnnnnnnnnnnnnnnnnnnnnnnnnnnnnnnnnnnnnnnnnnnnnnnnnnnnnnnnnnnnnnnnnnnnnnnnnnnnnnnnnnnnnnnnnnnnnnnnnnnnnnnnnnnnnnnnnnnnnnnnnnnnnnnnnnnnnnnnnnnnnnnnnnnnnnnnnnnnnnnnnnnnnnnnnnnnnnnnnnnnnnnnnnnnnnnnnnnnnnnnnnnnnnnnnnnnnnnnnnnnnnnnnnnnnnnnnnnnnnnnnnnnnnnnnnnnnnnnnnnnnnnnnnnnnnnnnnnnnnnnnnnnnnnnnnnnnnnnnnnnnnnnnnnnnnnnnnnnnnnnnnnnnnnnnnnnnnnnnnnnnnnnnnnnnnnnnnnnnnnnnnnnnnnnnnnnnnnnnnnnnnnnnnnnnnnnnnnnnnnnnnnnnnnnnnnnnnnnnnnnnnnnnnnnnnnnnnnnnnnnnnnnnnnnnnnnnnnnnnnnnnnnnnnnnnnnnnnnnnnnnnnnnnnnnnnnnnnnnnnnnnnnnnnnnnnnnnnnnnnnnnnnnnnnnnnnnnnnnnnnnnnnnnnnnnnnnnnnnnnnnnnnnnnnnnnnnnnnnnnnnnnnnnnnnnnnnnnnnnnnnnnnnnnnnnnnnnnnnnnnnnnnnnnnnnnnnnnnnnnnnnnnnnnnnnnnnnnnnnnnnnnnnnnnnnnnnnnnnnnnnnnnnnnnnnnnnnnnnnnnnnnnnnnnnnnnnnnnnnnnnnnnnnnnnnnnnnnnnnnnnnnnnnnnnnnnnnnnnnnnnnnnnnnnnnnnnnnnnnnnnnnnnnnnnnnnnnnnnnnnnnnnnnnnnnnnnnnnnnnnnnnnnnnnnnnnnnnnnnnnnnnnnnnnnnnnnnnnnnnnnnnnnnnnnnnnnnnnnnnnnnnnnnnnnnnnnnnnnnnnnnnnnnnnnnnnnnnnnnnnnnnnnnnnnnnnnnnnnnnnnnnnnnnnnnnnnnnnnnnnnnnnnnnnnnnnnnnnnnnnnnnnnnnnnnnnnnnnnnnnnnnnnnnnnnnnnnnnnnnnnnnnnnnnnnnnnnnnnnnnnnnnnnnnnnnnnnnnnnnnnnnnnnnnnnnnnnnnnnnnnnnnnnnnnnnnnnnnnnnnnnnnnnnnnnnnnnnnnnnnnnnnnnnnnnnnnnnnnnnnnnnnnnnnnnnnnnnnnnnnnnnnnnnnnnnnnnnnnnnnnnnnnnnnnnnnnnnnnnnnnnnnnnnnnnnnnnnnnnnnnnnnnnnnnnnnnnnnnnnnnnnnnnnnnnnnnnnnnnnnnnnnnnnnnnnnnnnnnnnnnnnnnnnnnnnnnnnngtctgcaacaagattcctagggcagctttatcaaattttgccaattcaaagtttaaggacattacaagtcagtgctggctatgtcatacctacttagtccattcaacacctgaatcattccatgtaaaacagagctctaagatgatcctttaagtaagcagtcacagactggttgggattaagtatccctaaagacggctagttggcctcctcattttatttggtcagcatcccttgactcaaaggaatacttgcttccaagtagttcctcataaatcttaggattgatgtagtatgaaacctaaaagtatacaggaaattggacaaatgtggatataggaaatttacattgcttaaagtacattacgctttttgatggaactaaatgaaatgatcaaaaaaagaatgaactgtaaccagttgctataacgtgatgtaaaaagttactgtaaacagcaggggatatgaagtccttccaccttctatcttaaaactactacttactgagctagcccaatatgcattacaatgagctaatgctccagatcccagtattcatatgtgtctgtaccttccactatgaacatagataaactgaggctcagatgagtccaaatgaagtcaaatcccaagccctaaagagaaccttctcacaagaattaaaaacaaaaagggcaaacctaggaagctaatggctactcctgtaccactctattcactggt

SEQ ID NO: 33229 - DNA, 462 bp, Macaca Mulatta
caaagatattatttgactctatcaaaagtctctcctttttaaaccttttcttatggatggctgtcaatcctgaggcagaagttttcaggtggagaccaagcggcctttgctcttcttcctccttcctgccacactctgctttcttcctgccatggacccctggaggagacctatggagggacagttttgacctgacccctagaggacacagttttgacctcttcagcaccaggaaggaagctctgaggatggttgcagtgaggaagcatgggtctttaaggacttctctctcttttttgctggacattattgagtttgtgggaccctgcctcttcctgctacctgtgagtctgcccagagtcccctgcaggcctgtccatgcattaaaaattcctattgtctctctttctgcttgggtagtatttcttaccaaaggaatgttcttgagagacctctgtttat

SEQ ID NO: 33230 - DNA, 425 bp, Macaca Mulatta
  misc_feature (1)...(425): n = A,T,C or G
aggacacctatttcctaagttcagaagagtgcatcactgcaggagacttccagaacaagcatcccaacatgtgccggctctctcccgatggacattttggatccaagtttgttactgcagtggctacaggnnnnnnnnnnnnnnnnnnnnnnnnnnnnnnnnnnnnnnnnnnnnnnnnnnnnnnnnnnnnnnnnnnnnnnnnnnnnnnnnnnnnnnnnnnnnnnnnnnnnnnnnnnnnnnnnnnnnnnnnnnnnnnnnnnnnnnnnnnnnnnnnnnnnnnnnnnnnnnnnnnnnnnnnnnnnnnnnnnnnnnnnnnnnnnnnnnnnnnnnnnnnnnnnnnnnnnnnnnnnnnnnnnnnnnntcacaacaactttccccaaggatccagtttacactttttctatttcgcaaaatccatttcctat

SEQ ID NO: 33231 - DNA, 652 bp, Macaca Mulatta
cttgtgaaactgccagtcatagtgaagctagaaaaacctttgccagaaaatgaagaaaaaaagatcatcaaagaagaaagtgattccttcaaggaaaatgtcaaacccattaaagttgaagtgaaggaatgtagagcagatcctaaagataccaaaagtagcatggagaggccagtggcgcaggagcctgaaaggattgaatttggtggcaatattaaattttctcatgaaattactgagaaatctactgaagaaactgagaaacttaaaaatgaccagcaggccaagataccactaaaaaaacgagaaattaaactgagtgatgattttgacagtccagtcaagggacctttgtgtaaatcagttactccaacaaaagagtttttgaaagatgaaataaaacaagaggaagagacttgtaaaaggatctctacaatcaccgctttgggttatgaagggaaacagctggtaaatggagaagttagtgacgaaagggtagctccaaattttaagacagaaccaatagagacaaagttttatgagacaaaggaagagagctatagcccctctaaggacagaaatatcatcatggagggaaatggaacagagtccttaaattctgtcataacgagtttgaaaataggtgagcttg

SEQ ID NO: 33232 - DNA, 403 bp, Macaca Mulatta
ggtccttccatccccgccagtcccacagaccacccagggcttcatcggctggagatctgcagtgccaggcctgaacaagtgcctagagctggacgatgaaatcagaagctgcaaaggtgcttttgcgcgagagctgtgctggcccaagcagggcgtgcactgaatccaggcggagcttctgcccaggggtggtgcatgtcggtcgccaggcacccagggccatgccaggcaaaggaagagctcccctgaatcccgaggacacagtcccctgcgtacttgcccatgggatgttgcaaagaacacaaagtgtgccttagacattcttaactcatcagcgtctcccttccagaatgttcacgtccacacccattcttggctgatataagaataaggcttctctcat

SEQ ID NO: 33233 - DNA, 188 bp, Macaca Mulatta
actggattactctggtattgctcttctgattatgggaagttttgttccttggctttattattctttctactgtaatccacaaccttgtttcatctacttgattgtcatctgtgtgctgggcattgcagccattatagtctcccagtgggacatgtttgccacccctcagtatcggggagtaagagcag

SEQ ID NO: 33234 - DNA, 6048 bp, Macaca Mulatta
  misc_feature (1)...(6048): n = A,T,C or G
ggcatcgtgttccattacagagccatctctacacgctacaccctcgactttgacagggcgcagcgggcctgcctgcagaacagtgccatcattgccacacccgagcagctgcaggccgcctacgaagacggcttccaccagtgtgatgccggctggctggctgaccagactgtcagnnnnnnnnnnnnnnnnnnnnnnnnnnnnnnnnnnnnnnnnnnnnnnnnnnnnnnnnnnnnnnnnnnnnnnnnnnnnnnnnnnnnnnnnnnnnnnnnnnnnnnnnnnnnnnnnnnnnnnnnnnnnnnnnnnnnnnnnnnnnnnnnnnnnnnnnnnnnnnnnnnnnnnnnnnnnnnnnnnnnnnnnnnnnnnnnnnnnnnnnnnnnnnnnnnnnnnnnnnnnnnnnnnnnnnnnnnnnnnnnnnnnnnnnnnnnnnnnnnnnnnnnnnnnnnnnnnnnnnnnnnnnnnnnnnnnnnnnnnnnnnnnnnnnnnnnnnnnnnnnnnnnnnnnnnnnnnnnnnnnnnnnnnnnnnnnnnnnnnnnnnnnnnnnnnnnnnnnnnnnnnnnnnnnnnnnnnnnnnnnnnnnnnnnnnnnnnnnnnnnnnnnnnnnnnnnnnnnnnnnnnnnnnnnnnnnnnnnnnnnnnnnnnnnnnnnnnnnnnnnnnnnnnnnnnnnnnnnnnnnnnnnnnnnnnnnnnnnnnnnnnnnnnnnnnnnnnnnnnnnnnnnnnnnnnnnnnnnnnnnnnnnnnnnnnnnnnnnnnnnnnnnnnnnnnnnnnnnnnnnnnnnnnnnnnnnnnnnnnnnnnnnnnnnnnnnnnnnnnnnnnnnnnnnnnnnnnnnnnnnnnnnnnnnnnnnnnnnnnnnnnnnnnnnnnnnnnnnnnnnnnnnnnnnnnnnnnnnnnnnnnnnnnnnnnnnnnnnnnnnnnnnnnnnnnnnnnnnnnnnnnnnnnnnnnnnnnnnnnnnnnnnnnnnnnnnnnnnnnnnnnnnnnnnnnnnnnnnnnnnnnnnnnnnnnnnnnnnnnnnnnnnnnnnnnnnnnnnnnnnnnnnnnnnnnnnnnnnnnnnnnnnnnnnnnnnnnnnnnnnnnnnnnnnnnnnnnnnnnnnnnnnnnnnnnnnnnnnnnnnnnnnnnnnnnnnnnnnnnnnnnnnnnnnnnnnnagataccccattgtgagcccacgcaccccatgcgtgggtgacaaggacagcagcccaggggtcaggacgtacggcgtgcgcccatcaacagagacctacgatgtctactgctatgtggacagacttgagggnggggaggtgttcttcgccacacgtcttgagcagttcaccttccaggaagcactggagttctgtgaatctcacaatgccacgctggccaccacgggccagctctacgccgcctggagccgcggcctggacaagtgctatgctggctggctggccgatggcagcctccgctaccccatcgtcaccccaaggcctgcctgcggtggggacaaaccaggcgtgagaacggtctacctcnnnnnnnnnnnnnnnnnnnnnnnnnnnnnnnnnnnnnnnnnnnnnnnnnnnnnnnnnnnnnnnnnnnnttcggcggttccttctccaggagaggaagagggtggcacacccacatcaccctctggtgtggaggactggatcgctacgcaagtggtgcctggtgtggctgctgtccctgtagaagaggagacaactgctgtacccttaggggagactactgccatcctagagttcaccactgagccagaaaaccagacagaatgggaaccagcctacaccccaatgggcacatccccgctgccaggnnnnnnnnnnnnnnnnnnnnnnnnnnnnnnnnnnnnnnnnnnnnnnnnnnnnnnnnnnnnnnnnnnnnnnnnnnnnnnnnnnnnnnnnnnnnnnnnnnnnnnnnnnnnnnnnnnnnnnnnnnnnnnnnnnnnnnnnnnnnnnnnnnnnnnnnnnnnnnnnnnnnnnnnnnnnnnnnnnnnnnnnnnnnnnnnnnnnnnnnnnnnnnnnnnnnnnnnnnnnnnnnnnnnnnnnnnnnnnnnnnnnnnnnnnnnnnnnnnnnnnnnnnnnnnnnnnnnnnnnnnnnnnnnnnnnnnnnnnnnnnnnnnnnnnnnnnnnnnnnnnnnnnnnnnnnnnnnnnnnnnnnnnnnnnnnnnnnnnnnnnnnnnnnnnnnnnnnnnnnnnnnnnnnnnnnnnnnnnnnnnnnnnnnnnnnnnnnnnnnnnnnnnnnnnnnnnnnnnnnnnnnnnnnnnnnnnnnnnnnnnnnnnnnnnnnnnnnnnnnnnnnnnnnnnnnnnnnnnnnnnnnnnnnnnnnnnnnnnnnnnnnnnnnnnnnnnnnnnnnnnnnnnnnnnnnnnnnnnnnnnnnnnnnnnnnnnnnnnnnnnnnnnnnnnnnnnnnnnnnnnnnnnnnnnnnnnnnnnnnnnnnnnnnnnnnnnnnnnnnnnnnnnnnnnnnnnnnnnnnnnnnnnnnnnnnnnnnnnnnnnnnnnnnnnnnnnnnnnnnnnnnnnnnnnnnnnnnnnnnnnnnnnnnnnnnnnnnnnnnnnnnnnnnnnnnnnnnnnnnnnnnnnnnnnnnnnnnnnnnnnnnnnnnnnnnnnnnnnnnnnnnnnnnnnnnnnnnnnnnnnnnnnnnnnnnnnnnnnnnnnnnnnnnnnnnnnnnnnnnnnnnnnnnnnnnnnnnnnnnnnnnnnnnnnnnnnnnnnnnnnnnnnnnnnnnnnnnnnnnnnnnnnnnnnnnnnnnnnnnnnnnnnnnnnnnnnnnnnnnnnnnnnnnnnnnnnnnnnnnnnnnnnnnnnnnnnnnnnnnnnnnnnnnnnnnnnnnnnnnnnnnnnnnnnnnnnnnnnnnnnnnnnnnnnnnnnnnnnnnnnnnnnnnnnnnnnnnnnnnnnnnnnnnnnnnnnnnnnnnnnnnnnnnnnnnnnnnnnnnnnnnnnnnnnnnnnnnnnnnnnnnnnnnnnnnnnnnnnnnnnnnnnnnnnnnnnnnnnnnnnnnnnnnnnnnnnnnnnnnnnnnnnnnnnnnnnnnnnnnnnnnnnnnnnnnnnnnnnnnnnnnnnnnnnnnnnnnnnnnnnnnnnnnnnnnnnnnnnnnnnnnnnnnnnnnnnnnnnnnnnnnnnnnnnnnnnnnnnnnnnnnnnnnnnnnnnnnnnnnnnnnnnnnnnnnnnnnnnnnnnnnnnnnnnnnnnnnnnnnnnnnnnnnnnnnnnnnnnnnnnnnnnnnnnnnnnnnnnnnnnnnnnnnnnnnnnnnnnnnnnnnnnnnnnnnnnnnnnnnnnnnnnnnnnnnnnnnnnnnnnnnnnnnnnnnnnnnnnnnnnnnnnnnnnnnnnnnnnnnnnnnnnnnnnnnnnnnnnnnnnnnnnnnnnnnnnnnnnnnnnnnnnnnnnnnnnnnnnnnnnnnnnnnnnnnnnnnnnnnnnnnnnnnnnnnnnnnnnnnnnnnnnnnnnnnnnnnnnnnnnnnnnnnnnnnnnnnnnnnnnnnnnnnnnnnnnnnnnnnnnnnnnnnnnnnnnnnnnnnnnnnnnnnnnnnnnnnnnnnnnnnnnnnnnnnnnnnnnnnnnnnnnnnnnnnnnnnnnnnnnnnnnnnnnnnnnnnnnnnnnnnnnnnnnnnnnnnnnnnnnnnnnnnnnnnnnnnnnnnnnnnnnnnnnnnnnnnnnnnnnnnnnnnnnnnnnnnnnnnnnnnnnnnnnnnnnnnnnnnnnnnnnnnnnnnnnnnnnnnnnnnnnnnnnnnnnnnnnnnnnnnnnnnnnnnnnnnnnnnnnnnnnnnnnnnnnnnnnnnnnnnnnnnnnnnnnnnnnnnnnnnnnnnnnnnnnnnnnnnnnnnnnnnnnnnnnnnnnnnnnnnnnnnnnnnnnnnnnnnnnnnnnnnnnnnnnnnnnnnnnnnnnnnnnnnnnnnnnnnnnnnnnnnnnnnnnnnnnnnnnnnnnnnnnnnnnnnnnnnnnnnnnnnnnnnnnnnnnnnnnnnnnnnnnnnnnnnnnnnnnnnnnnnnnnnnnnnnnnnnnnnnnnnnnnnnnnnnnnnnnnnnnnnnnnnnnnnnnnnnnnnnnnnnnnnnnnnnnnnnnnnnnnnnnnnnnnnnnnnnnnnnnnnnnnnnnnnnnnnnnnnnnnnnnnnnnnnnnnnnnnnnnnnnnnnnnnnnnnnnnnnnnnnnnnnnnnnnnnnnnnnnnnnnnnnnnnnnnnnnnnnnnnnnnnnnnnnnnnnnnnnnnnnnnnnnnnnnnnnnnnnnnnnnnnnnnnnnnnnnnnnnnnnnnnnnnnnnnnnnnnnnnnnnnnnnnnnnnnnnnnnnnnnnnnnnnnnnnnnnnnnnnnnnnnnnnnnnnnnnnnnnnnnnnnnnnnnnnnnnnnnnnnnnnnnnnnnnnnnnnnnnnnnnnnnnnnnnnnnnnnnnnnnnnnnnnnnnnnnnnnnnnnnnnnnnnnnnnnnnnnnngtgggcagccatcagggtttcctgacactagcggggaaacatctggagtgactgagcttagtgggctcccctctggacaaccaggtgttagtggagaagcatctggggttccttatggcagtagtcaaccctttggcataaccgacctgagtggagaaacatccggggtccctgatctcagtgggcagccttcacggttaccagggttcagtggggcaacatcacgagtccctgacctggattctggtgccacgagtggcagcggtgaatcttctgacattacatttgtggacaccagtttggttgaagtgacccctactacatttaaagaagaatgaggcctagggtctgtggaactcagtggcctcccttcccggagagcagatctgtcaggcagatctgagatggtggatgtcagtggacaattttctgggacagacgattcagtgggtttacatcccggactccagaatcagtggcctgcacattggcatagctgaagtcagtggagaatctctggagctgacactgggactacctgccctcgggagcatatatggcagtgaacttcgtctggtttcccactgtctctcttgtannnnnnnnnnnnnnnnnnnnnnnnnnnnnnnnnnnnnnnnnnnnnnnnnnnnnnnnnnnnnnnnnnnnnnnnnnnnnnnnnnnnnnnnnnnnnnnnnnnnnnnnnnnnnnnnnnnnnnnnnnnnnnnnnnnnnnnnnnnnnnnnnnnnnnnnnnnnnnnnnnnnnnnnnnnnnnnnnnnnnnnnnnnnnnnnnnnnnnnnnnnnnnnnnnnnnnnnnnnnnnnnnnnnnnnnnnnnnnnnnnnnnnnnnnnnnnnnnnnnnnnnnnnnnnnnnnnnnnnnnnnnnnnnnnnnnnnnnnnnnnnnnnnnnnnnnnnnnnnnnnnnnnnnnnnnnnnnnnnnnnnnnnnnnnnnnnnnnnnnnnnnnnnnnnnnnnnnnnnnnnnnnnnnnnnnnnnnnnnnnnnnnnnnnnnnnnnnnnnnnnnnnnatagtggagctacnccagtgtcnttgggtctggagtagaagtgtcatcagtcccagaatctagcagtgagacgtccgcctatcctgaggctgtagttggggcatctgctgccccttgagaccagcggagaaagattctgggtcacctgatctgagtgaaaaccacntttgcattacatgaagctggccctgatgagatcttctggcctaggagtgagcggcagcacttagacatttcaagaagtcgagcngtcagcttctccagaagtgagtggagaatctaccaccaccggtgatgtggcgacagaggcaccaggcttgctgtcagccactctcacggcttctggagacaggactgaaatcagcggagacttgtctggtcatacctcggggctgggcgttgtcatcagcaccagcatcccagagtctgagtggacccagcagacccagcgccttgcagaggcgcatctagaaattgagtcctcaagcctcctgtactcaggagaagagactcacacagccgaaacagccacctccccaacagatgcttccatcccagcttctccagaatggacaggtgaatcagagtcaactgttgca

SEQ ID NO: 33235 - DNA, 603 bp, Macaca Mulatta
  misc_feature (1)...(603): n = A,T,C or G
ggaaagaaaagtccatgaaagtaaagagagaaccagggagtggagggaggaagaatgggaaccaaataggaggtaagagatactatttttgctgaggcaaccagtgttttacaaggatgctacaaagaaaaatatagaatagaaatttaagtacaggcttggaatcagctacagatcctaaagatggggtgnnnnnnnnnnnnnnnnnnnnnnnnnnnnnnnncaccattgtgtgtttgtgtaaaatgcgtatgttcaggagtaagggtgtatgtgtgtatgtatgtggattaaaattccagagtgaccatggcacttgggtgtacaggtaattcctccaaagctgtttgctggcttcaggagtggagtgagaatttctttagtatgaaaagggatataaaggcaccgagctgatgcagtatttgtaatattaaattgacctaacaaggtatttgcatgagtcacaattgcaaagttttgagcagttttgtaatttgacatttaggaaagtctcctatatattctcatgctttatattcatgcttaggtatactatagaggatgccagctttaatctttctgtcatttaaagcaatatgataa

SEQ ID NO: 33236 - DNA, 730 bp, Macaca Mulatta
  misc_feature (1)...(730): n = A,T,C or G
caagtaccacatgttctcactcatatgtgggagttgaacagtgagaacacatggacacagggaggggaacatcacacatgggggcctcttgcaggggatggagagaattaggacaaatacctaatgcatgcagggcttaaaacctaaatgaggggttgataggtgcagcaaaccaccatgcccatgtatatctgggtaaccaacctgcatgttctgcacatgtatcccagaacnnnnnnnnnnnnnnnnnnnnnnnnnnnnnnncaaaagtttattcttccacagtcctggaggcgagaagtccacgtgaaggtgtcagccaaatcacgctctttctgaagcctctaggggaggattcttctgattcttccttgcctcttccagctctggtagcaccaggcattccttaggggcgtatcttcaacccctgcctctgtcgggcctcttcccttcgtgtctgtctcttatctcttcttcttctaaggacactagcccttgggttggagtctactctaatccactgtgacctcatgttgacttgattacatctgcaaagactgtttccaaaaaaagggtcacatgcacaggtattgggagtcaggacttgaacatacgttttggaaggaacctaattcaatccataagaacactttttctcaacttttttattttgcaagcactctgtggttaaaagaaactattttgtggaatctcctcagatctgcggggt

SEQ ID NO: 33237 - DNA, 341 bp, Macaca Mulatta
  misc_feature (1)...(341): n = A,T,C or G
tcaggtctcgcccgcgtggctgtgggcgtggctagcgtggcttctcgggaccacctgaactcgcggccatggccccggccgccgccagccccccggaggtgatccgcgcggcgcagaaggacgagtactaccgcggtgggctgcggagcgcggcgggtggcgccctgcacagcctggcgggtgnnnnnnnnnnnnnnnnnnnnnnnnnnnnnnnnnnnnnnnnnnnnnnnnnnnnnnnnnnnnnnnnnnnnnnnnnncaggctaccagaccctgggggaggagtacgtcagcatcgtccaggtggacccgtcacagacacgtgtgccctcctggctgcgcc

SEQ ID NO: 33238 - DNA, 83 bp, Macaca Mulatta
cagatcctgtattaaaagtaactctagcagtgtctgatcttcacaagtccttgaactactggtgtggtcaactgggaatgaaa

SEQ ID NO: 33239 - DNA, 276 bp, Macaca Mulatta
gggtctcacaccctccagggaatgaacggctgcgacatggggcccgacggacgcctcctccgcgggtatcaccagcacgcctacgacggcaaggattacatctccctgaacgaggacctgcgctcctggaccgccgcggacacggtagctcggatcacccagcgcttctatgaggcagaggaatatgcagaggagttcaggacctacctggagggcgagtgcctggagttgctccgcagatacctggagaacgggaaggagacgctacagcgcgca

SEQ ID NO: 33240 - DNA, 1665 bp, Macaca Mulatta
  misc_feature (1)...(1665): n = A,T,C or G
gaaatctgcctgaatcttcgagatcccccaacaaacataattatcattccagaaaagcaggtgaaaccagaatggagactgccaaagttaaatcaccgatttaccacaaggnnnnnnnnnnnnnnnnnnnnnnnnnnnnnnnnnnnnnnnnnnnnnnnnnnnnnnnnnnnnnnnnnnnnnnnnnnnnnnnnnnnnnnnnnnnnnnnnnnnnnnnnnnnnnnnnnnnnnnnnnnnnnnnnnnnnnnnnnnnnnnnnnnnnnnnnnnnnnnnnnnnnnnnnnnnnnnnnnnnnnnnnnnnnnnnnnnnnnnnnnnnnnnnnnnnnnnnnnnnnnnnnnnnnnnnnnnnnnnnnnnnnnnnnnnnnnnnnnnnnnnnnnnnnnnnnnnnnnnnnnnnnnnnnnnnnnnnnnnnnnnnnnnnnnnnnnnnnnnnnnnnnnnnnnnnnnnnnnnnnnnnnnnnnnnnnnnnnnnnnnnnnnnnnnnnnnnnnnnnnnnnnnnnnnnnnnnnnnnnnnnnnnnnnnnnnnnnnnnnnnnnnnnnnnnnnnnnnnnnnnnnnnnnnnnnnnnnnnnnnnnnnnnnnnnnnnnnnnnnnnnnnnnnnnnnnnnnnnnnnnnnnnnnnnnnnnnnnnnnnnnnnnnnnnnnnnnnnnnnnnnnnnnnnnnnnnnnnnnnnnnnnnnnnnnnnnnnnnnnnnnnnnnnnnnnnnnnnnnnnnnnnnnnnnnnnnnnnnnnnnnnnnnnnnnnnnnnnnnnnnnnnnnnnnnnnnnnnnnnnnnnnnnnnnnnnnnnnnnnnnnnnnnnnnnnnnnnnnnnnnnnnnnnnnnnnnnnnnnnnnnnnnnnnnnnnnnnnnnnnnnnnnnnnnnnnnnnnnnnnnnnnnnnnnnnnnnnnnnnnnnnnnnnnnnnnnnnnnnnnnnnnnnnnnnnnnnnnnnnnnnnnnnnnnnnnnnnnnnnnnnnnnnnnnnnnnnnnnnnnnnnnnnnnnnnnnnnnnnnnnnnnnnnnnnnnnnnnnnnnnnnnnnnnnnnnnnnnnnnnnnnnnnnnnnnnnnnnnnnnnnnnnnnnnnnnnnnnnnnnnnnnnnnnnnnnnnnnnnnnnnnnnnnnnnnnnnnnnnnnnnnnnnnnnnnnnnnnnnnnnnnnnnnnnnnnnnnnnnnnnnnnnnnnnnnnnnnnnggtgatattataaaagcggcaactgaactggatagagtgcatattgtcggtatcttggatatctgtaatttgggtaataataaagtggaagtctatttgcacaaaatttatagtccagagaatacttcttaaaagttagcgaatggaattattacagattatatgagtgtactgctttaaagatattctgtcattttgctggtaatttcagtaactgttttcagcaagaatattacatgagctctaaagttattaagcagttttatgttcgtcttgtgtttagggggctaaaacacttcattttagattcattattgaaaaaggtcatcaaaataatttttgtgtataaggaaatttaccttgcttaccttactaatatgactattatcttgacttgtaataatttatgttcactattccatctgtgaagtgtacttcattctaaagcctcagtataaggcatcctaatttacaagagtaactttccatggagattt

SEQ ID NO: 33241 - DNA, 467 bp, Macaca Mulatta
  misc_feature (1)...(467): n = A,T,C or G
tggctggcctgttgtccgcccgggacttcctggccagcctggccttccgcgtgttccagtgcacccagtatatccggcacgcgtcctcgcccatgcactcccctgagccgnggactgctgccacgagctgctggggcacgtgcccatgctggccgaccgcaccttcgcgcagttctcccaggnnnnnnnnnnnnnnnnnnnnnnnnnnnnnnnnnnnnnnnnnnnnnnnnnnnnnnngctgtactggtttaccgtggagtttgggctgtgcaaacagaacggggaggtgaaggcctatggcgccgggctgctgtcctcctatggggagcnnngcactgcctgtctgaggagcccgagattcgagccttcgaccctgaagcagcggctgtgcagccctaccaagaccagacgtaccagtcagtctactttgtgtctgagagcttcagcgatgccaaggacaagctcag

SEQ ID NO: 33242 - DNA, 126 bp, Macaca Mulatta
aggacatcacacccctgcaagtggttctgcccaacactgccctccatctaaaggcgctgcttgattttgaggataaagatggagacaaggtggtggcaggagacgagtggcttttcgagggacctg

SEQ ID NO: 33243 - DNA, 686 bp, Macaca Mulatta
  misc_feature (1)...(686): n = A,T,C or G
gtgcgcacgcgctggcaagatggccggtggggtgcgcccgctgcggggcctcagcgccctgtgtcgcgtgctgctcttcctctcgcagttctgcattctatcgggcggtgaaagtactgacatcccaccttatgtgatgaagtgtccaacccatggtttgagtagcatacttcctgaatactgtatacactgcacaacaaatttctcctgtatctatgggaagcctgtcacttttgactgtgcagtgaaaccatctgttacctgtgttgnnnnnnnnnnnnnnnnnnnnnnnnnnnnnnnnnnnnnnnnnnnnnnnnnnnnnnnnnnnnnnnnnnnnnnnnnnnnnnnnnnnnnnnnnnnnnnnnnnnnnnnnnnnnnnnnnnnnnnnnnnnnnnnnnnnnnnnnnnnnnnnnnnnnnnnnnnnnnnnnnnnnnnnnnnnnnggtaaccgtacttttcccaaaatgctatattgcaattggactggaggctataagtggtctactgctctggctctaanagcatcaccctcggtgggtttggagcagaccgtttctacctgggccagtggcgagaaggcctcggcaagctcttcagcttcggtggtctgggaatatggacgctgatagacgtcctgctaattggagttggctacgttggaccagcagatggctctttgtacattta

SEQ ID NO: 33244 - DNA, 710 bp, Macaca Mulatta
gggctttgaggcagtaccggaggagaaatatggcggccaccctactagctgctcggggaaccgggccggcaccggcttgggggccggaggccttcaccccagactgggaaagccgagaagtctccactgggactactatcatggccgtgcaatttgacgggggcgtggttctgggggcagactccagaacaaccactgggtcctacatcgccaatcgagtgactgacaagctgactcctattcacgaccacattttctgctgtcgctcaggctcagctgctgatacccaggcagtagctgatgctgtcacttaccagctcggtttccacagcattgaactgaatgagcctccactggtccacacagcagccagcctctttaaggagatgtgttaccgataccgagaagacctgatggcgggaatcatcatcgcaggctgggaccctcaagaaggagggcaggtgtactcagtgcctatggggggtatgatggtaaggcagtcctttgccattggaggctctgggagctcctacatctatggctatgtggatgctacctaccgggaaggcatgaccaaggaggagtgtctgcaattcactgccaatgctctcgctttggccatggagcggggatggctccagtggagggagtgatccgccttggcagccatttgcagagtcaagggggtaggagcgggccaagttactttt

SEQ ID NO: 33245 - DNA, 923 bp, Macaca Mulatta
ggggggggtccccgacgcaaccatggctgaagaacaaccgcaggtcgaattgttcgtgaaggctggtagtgatggggccaagattgggaactgcccgttctcccagagactgttcatggtactgtggctcaagggagtcaccttcaatgttaccaccgttgacaccaaaaggcggaccgagacagtgcagaagctgtgcccaggagggcagctcccattcctgctgtatggcactgaagtgcacacagacaccaacaagattgaggaatttctggaggcagtgctgtgccctcccaggtaccccaagctggcagctctgaaccctgagtccaacactgctgggctggacatatttgccaaattttctgcctacatcaagaattcaaacccagcactcaatgataatctggagaagggactcctgaaagccctgaaggttttagacaattacttaacatcgcccctcccagaagaagtggatgaaaccagtgctgaagatgaaggtgtctctcagaggaagtttctggatggcaacgagctcaccctggctgactgcaacctgttgccaaagttacacatagtacaggtggtgtgtaagaagtaccgggggattcaccatccccgaggtcttccggggagtgcatcggtacttgaagcaatgccctacgcgcgggaagaattcggcttccacctgttccaggatgatgaagggagatccaagcttcgccctatgaaccaaattggcccaaggccccttcaaaataaagcccccttcctggggacttccccttaacccccttcgggttttcctttaacaaaggcccctggtggtttccacaattgcctacccaatgggacacaactccaaaaatgggcccagtgggttcaaggggaatccctgggaatcaccttaatttcccggg

SEQ ID NO: 33246 - DNA, 713 bp, Macaca Mulatta
  misc_feature (1)...(713): n = A,T,C or G
ggtacacttggagggaaaagttgttttttattcctactcacccctacccccaaactaccctcttcctgggaagataattgctgagccagtacagccacaaacagtactattttgcagatgctcatgtaagaagcttttcaagagggaaataattctttaagcagaataaagttaggctggcactgctcccttaagattttgctcctttattaaccctgtaaaggagtcttgtttatcctctaatgggcatgcttcaggggcagcagcatattgaaatattttcaccaactaaaggaaatagacagaaaaacaatgataatattcaatcacagcagtaaatggcctttgtgttgcaagcccttctaccccatcagacagctcctagaaacattcctcttacagttcatttctctaaagcattttctgattcttagataactccaacttttgctacttttatcttagacattaacactatagcccaaagcatagttactttgctgaatcagaaagcaactgagttcttcgttttcccctcaaatagaatggggaacattcacaacattctcttaagttctaacagtaataccattgtggttatagaactcagggctgctaaagcaactactctagacccatagttctttttagttagaatgtattgnnaacngacnnnnnnnnnnnnnnnnnnnnnnnnnnnnnnnctgtcggcc

SEQ ID NO: 33247 - DNA, 652 bp, Macaca Mulatta
tccacccacctgggcctcccacagtgctagtgggtgagccaccacgcccagctggccacgtaggttttaaaacaaggggcataaagaaagcacagtgagatatgtgaccgttctcgtggtagttcatttggcctaaatggacctggcatgaaatttcaagaaggatttggcattttctcttcttgacccttctctttaaagggtataatattaatgtttaaaatgacaaagatgaattattacaataaatctgatgatgtacacaaactgaaacacacacacataccccctaatgaaaacattggggaaaaacgtatttggttttgttcctttcatcctgtctgtgttatgtgggtggagatggttttcattctttcattactgttttgtttgatcctttatatctgaaatacctttaatttatttaatatctgttgttcagagctctgccatttcttaagtacctgttagtattatttatgtgtatcaggagtgtgtttagtcttttatttgcagtaaaccgatctccaaagatttccttttggaaacgatttttcctctccttaatttttatattccttactgttttactaaatattaagtgttctttgacaattttggtgcttatgtgttcttgggacaaaagtgaatc

SEQ ID NO: 33248 - DNA, 189 bp, Macaca Mulatta
  misc_feature (1)...(189): n = A,T,C or G
tgagcgtgaagatggtcctgatgtccaggagatgagcctgccaaatccagagnnnnnnnnnnnnnnnnnnnggtgaaaagcaatgacagtgttaaaagaagacacgctgaaatgatgcaggctgctcctatgttggaaatttgttcattaccattctcccaataaagctttacagccttctgcaaagaa

SEQ ID NO: 33249 - DNA, 473 bp, Macaca Mulatta
  misc_feature (1)...(473): n = A,T,C or G
cttcgctgtgaagatggcgtcgggcagcgggngacaaaaaacttggactttcgccgaaagtgggacaaagatgaatatgagaaactcgccgagaagaggctcacggaagagagagaaaagaaagatggnggaaaaccagtgcagcctgtcaagcgagagcttttacggcatagggactacaaggtggacttggaatccaagcttgggaagacaattgtcattaccaagacaacccctcaatctgagatgggagnnnnnnnnnnnnnnnnnnnnnnnnnnnnnnnnnnnnnnnnnnnnnnnnnnnnnnnnnnnnnnnnnnnnnnnnnnnnnnnnnnnnnnnnnnnnnnnnnnnnnnnnngaacgttcgaccctggatcaggtgaagaaacgttttgaggtcaacaagaagaagatggaagagaaacagaaggattatgattttgaggaaaggatgaaggagctcagagaagagg

SEQ ID NO: 33250 - DNA, 812 bp, Macaca Mulatta
  misc_feature (1)...(812): n = A,T,C or G
atttggacttggtttctggctatgatgctcgctcataagcagctcaaagtgatcagaggaaacctagtnttatcttntgatgtggcaagaacccagctacttagaacctccttgtgttntaataaagcttattattaatattacatgtttgattttttcctacattgctaatcaaactgttgtttcaaaccccacaattccacatcacatagtaaaaaccacattacatgttgccacttgcccacagtgcctggaacctagtagacctataaacatcgtttttggataggtaaatcatcccttctcctgatcattattctgggaaggatttccacattagaagaaaaatgaaagtattaccaatgctctatcttaatcttaagcagtagaagaaccatttcaagtgaggttttctgaacaactccaatattttcggcagtacaaaactaaacaatgttacactgtctccaggggtattttccaaaagtcccagatagaagttttgaggaaggacttcttgggaaaaagggttttgggaataggtaacatcctctgctctgcctggacaggaaaaccaggtggaactttccatcagttcccatagttcttctgttcttaacatccccccgactttgcacctctcacatagcacacagttacacatatatcacaccccactggtagcatgagctcattgaagagacactggcctggagcttcagagataatgtgctcccaacaccatcactaatactgggtgatcagggtactgagtttccaatctgtgtgccagacaaaatgaacaagttagg

SEQ ID NO: 33251 - DNA, 1692 bp, Macaca Mulatta
ttcccgggatcttcagactgcccggagagcgcgctctgcctgccgcctgcctgtctgtcactgagggttcccagcaccatgagggcctggatcttctttctcctttgcctggctgggagggccttggcagcccctcagcaagaagccctgcctgatgagacagaggtggtggaagaaactgtggcagaggtgaccgaggtatctgtgggagctaatcctgtccaggtggaagtaggagaatttgatgacggcccagaggaaaccgaagaggaggtggtagctgaaaacccctgccagaaccaccactgcaaacacggcaaggtgtgcgagctggatgagaacaacacccccatgtgtgtgtgccaggaccccaccagctgcccggcccccattggcgagtttgagaaggtgtgcagcaatgacaacaagaccttcgactcttcctgccacttctttgccacaaagtgcaccctggagggcaccaagaagggccacaagctccacctggactacatcgggccttgcaaatacatccccccttgcctggactctgagctgaccgaattccccctgcgcatgcgggactggctcaagaacgtcctggtcaccctgtatgagagggatgaagacaacaacctcctgactgagaagcagaagctgcgggtgaagaagatccatgagaatgagaagcgcctggaggcaggagaccaccccgtggagctgctggcccgggactttgagaagaactacaacatgtacatctttcctgtgcactggcagttcggccagctggaccagcaccccattgatgggtacctctcccacaccgagctggccccactgcgcgctcccctcatccccatggagcactgcaccacccgctttttcgagacctgtgacctggacaatgacaagtatatcgccctggatgagtgggccggctgcttcggcatcaagcagaaggatatcgacaaggatcttgtgatctaaatccactccttccgcagtaccggattctctctctttaaccctccccttcctgtttcccccaatgtttaaaatgtttggatggtttgttgttctgcctggggacaaggtgctaacatagatttaagtgaatactttaacggtgctaaaaatgaaaattctaacccaagacatgacattcttagctgtaacttaactattaaggccttttccacactcattaatagtcccatttttctcttgccatttgtagctttgcccattgtcttattggcacatgggtggacatggatctgctgggctctgccttaaacacacattgcagcttcaacttttctctctagtattctgtttgaaactaatactcaccgagtcagactttgtgttcatttcatttcagggtattggctgcctgtgggcttccccaggtggcctgaaggtgggcaaaggggagtaacagacacacgatgttgtcaagggagggttttgggactagagggcccagtgatggggaaaggtcccctgcaaaaaccccgccaaccagaacattggtttgccctggaagcctgtccccttgagaaaaaagaattcctagggggctgtggttattgaaaaattattagaccttttctcgccatagaaccccaggttccggccccccattttccccccccctttgacccttgttcccgggggcaaggttta

SEQ ID NO: 33252 - DNA, 1672 bp, Macaca Mulatta
  misc_feature (1)...(1672): n = A,T,C or G
ttaccagaaggcaaaatcatgccaaacactgtttttgttggaggaattgatgttagggtattgtattcgtacctcatttttatgttacaatacattatgaataatgggatttgggccctgttacaaacttaaggtttttttgtacttcttggaggtttagaattggttttatgtttgtcccatagctactaaaaatatctttgacaaagagctactggtcatttggggacaaaagggggagaaattttcatatcatcaaactttttaataaaattgaaatttttgaatgctgagtttttactcttgaagttcaattcttttccatagatggatgagactgagattagaagcttctttgctagatatggttcagtgaaagaagtgaagataatcactgatcgaactggtgtgtccaaagggtgagtaattttagcaaaaatatctgaactctagccacgtatagagtatcagagaagacttcaaaactggtattctgatgcttacataaatgaaatttgttgctgtgttaatttctttcatgtagaggataaaagtttactgccagttctttaatcatttttctgtttgttttttaatatcttcagtcttcatttcatacaaatgaaatcagttttctcaaagaattgttttcttcatacattgcacggtatcttaaattttaaccaccttgtcttagtaagttaaattcaggttcacagatacgaattacttgtcaatcaataaagttttcacactaatcttagcacattttgacatagttcagattaagaaaaagcagtatttgtagaggatctatcatgtacatcttaacaaataccgtagtatattattcatcttttagtcatcacttctgtatattgttgaagttctgaaccatgtactgtatgatggtgattttatacttcatttatctgcctttatagctatggatttgtttcattttttaatgacgtggatgtgcagaagatagtagaagtaagtaatctaatagaaaaatatcatttgttttattgatacagtgtttagtgttgagtgatatactcagtcttgtataaaatttggaagaagatacactttctgtttaaaatccaaacttagaggaatctcacatgatatgttagaacctgtttatttttgactgggcacctagcttcatgaactacagatgggaagggttggagacagggcagggtgatgaaaagtttttgatcaactttcacttgatgcctcttgacactgatagagaagtaagggaggtagcttcatgatgacagattttaatttggtgtgtagttatcactgatcttctatgataataggaactttagaagactttaggtgttcacccaagtcttggaagtaaagaacttgaaaattgattctagttttgttactgttttattttcagtcacagataaatttccatggtaaaaagctgaagctgggccctgcaatcaggaaacaaaatttatgtgagtacaaagagaaattgttcttgttgacacatgtagcttttctaagaactaaaaatagannnnnnnnnnnnnnnnnnnnnnnnggtgcttatcatgtgcagccacgtcctttggtttttaatcatcctcctccaccacagtttcagaatgtctggactaatccaaacactgaaact

SEQ ID NO: 33253 - DNA, 325 bp, Macaca Mulatta
agatgacgggcgccgggccaccatctcactgagcgacagtgacctgctgcggctggagggtgactcgcgtaccgtgcggctgctgagggagctgcggcgggccctgggccgcatggtggagcggagcctgcgcagcgagctggctgctcttccccccagcgtgcaggaggagcacgggcagctgcttgcgctactggcagagctgctgcgaggaccgtgtggcagctttgatgtgcgcaagacagctgacgactgagccctgcttctgctggggctgtgtacagagtgcaaatgtttatttaaaataaagttctatttatccctt

SEQ ID NO: 33254 - DNA, 1071 bp, Macaca Mulatta
  misc_feature (1)...(1071): n = A,T,C or G
acccggcttgccccgcggcaagatggcgacctgaacgcagctggcagcggcggaaannnnnnnnnnnnnnnnnnnnnnnnnnnnnnnnnnnnnnnnnnnnnnnnnnnnnnnnnnnnnnnnnnnnnnnnnnnnnnnnnnnnnnnnnnnnnnnnnnnnnnnnnnnnnnnnnnnnnnnnnnnnnnnnnnnnnnnnnnnnnnnnnnnnnnnnnnnnnnnnnnnnnnnnnnnnnnnnnnnnnnnnnnnnnnnnnnnnnnnnnnnnnnnnnnnnnnnnnnnnnnnnnnnnnnnnnnnnnnnnnnnnnnnnnnnnnnnnnnnnnnnnnnnnnnnnnnnnnnnnnnnnnnnnnnnnnnnnnnnnnnnnnnnnnnnnnnnnnnnnnnnnnnnnnnnnnnnnnnnnnnnnnnnnnnnnnnnnnnnnnnnnnnnnnnnnnnnnnnnnnnnnnnnnnnnnnnnnnnnnnnnnnnnnnnnnnnnnnnggaacccctgactgacgcagaaaggatgaagnnnnnnnnnnnnnnnnnnnnnnnnnnnnnnnnnnnnnnnnnnnnnnnnnnnnnnnnnnnnnnnnnnnnnnnnnnnnnnnnnnnnnnnnnnnnnnnnnnnnnnnnnnnnnnnnnnnnnnnnnnnnnnnnnnnnnnnnnnnnnnnnnnnnnnnnnnnnnnnnnnnnnnnnnnnnnnnnnnnnnnnnnnnnnnnnnnnnnnnnnnnnnnnnnnnnnnnnnnnnnnnnnnnnnnnnnnnnnnnnnnnnnnnnnnnnnnnnnnnnnnnnnnnnnnnnnnnnnnnnnnnnnnnnnnnnnnnnnnnnnnnnnnnnnnnnnnnnnnnnnnnnnnnnnnnnnnnnnnnnnnnnnnnnnnnnnnnnnnnnnnnnnnnnnnnnnnnnnnnnnnnnnnnnnnnnnnnnnnnnnnnnnnnnnnnnnnnnnnnnngccctgtgagctacaggacatggttcggaaacatctgcacagtggtcaagaggctgccagcccaggtcctgctcccagcctagccccaggggctgtggtgcctacctcggtcattgcccgagtgttaaagaagccggagtctcta

SEQ ID NO: 33255 - DNA, 165 bp, Macaca Mulatta
agctgtcagaaattcaacacaggtcagtgccctgtaggaggagatctgccagatccggggtgagactaaatgcctgaacgcagagtacgagcaactgctggacatcaagacacgcctggagatggagatcgagacctaccgccgcctgctcgatggagagggagg

SEQ ID NO: 33256 - DNA, 356 bp, Macaca Mulatta
  misc_feature (1)...(356): n = A,T,C or G
cctgctgccctttacctttgtgggaaacctcttcatggtacctgatgacccactgggacgaaacggccccaccctggatgaatttctgaagaagccagccaggnnaggacacaagggtcttctaaggctcagcatccttccaggggctttgcagaacatggtaaacagcagcacgggagagaagaggaaaaaggtagtggtggcattcggaagacccgggaaacagagcggctccggcggcagctgctggaggtgttttggggtcaggatcacaaggtggacttcatcctgcagcgggagccatactgccgggacattaaccaactgtctgaggccctgctcagtcttaacttttg

SEQ ID NO: 33257 - DNA, 701 bp, Macaca Mulatta
  misc_feature (1)...(701): n = A,T,C or G
ctttttcagcaatattcgcggctgtagggctcagaatctattttaatatttgaattattcttccatttcatatagtgatcacaagcgggggttctacaattccgttcagattttttgtcactggctataaaatcagtatctgcctcttttaggtcagaatatgctatgagtagcattacatacatatatttttaaaagttgatacttctttatgacccacagttggcctttattttcttaaacacctgggcaattgtggctcattgtgcattttactgttggcccattcatttcgtttttggaaattatggttttgtattttcatttttatttacattcatttttgtttattcagggaaaggtgatctttttttcaaannnnnnnnnnnnnnnnnnnnnnnnnntagatatgaacaagagttcattaaatatcttgctattgtaaaagtttttaaaatacagacttaattttgttttttatattggaatacaataaagtactacctacatttgagtcagtcaccactcttattgtgcaggttaaatataaactaaaaattaactgtcctctgtgatgcaactcacaacgaagatcaagattaccttaaaatttatttgaattttttaagatgtttcggttgtcaaactgtaggaaacttcacaacatttaagtcttattctgtatgttacaatccattcat

SEQ ID NO: 33258 - DNA, 645 bp, Macaca Mulatta
  misc_feature (1)...(645): n = A,T,C or G
tttgctggctatgccttcaagaacctggggatcccgaaaaattaggggaatttcttcagaaagacaatatcagcgtgcattatttctgtcttnnnnnnnnnnnnnnnnnnnnnnnnnnnnnnnnnnnnnnnnnnnnnnnnnnnnnnnnnnnnnnnnnnnnnnnnnnnnnnnnnnnnnnnnnnnnnnnnnnnnnnnnnnnnnnnnnnnnnnnnnnnnnnnnnnnnnnnnnnnnnnnnnnnnnnnnnnnnnnnnnnnnnnnnnnnnnnnnnnnnnnnnnnnnnnnnnnnnnnnnnnnnnnnnnnnnnnnnnnnnnnntcattttgtgacaaacatcgcccagcacagaacatccaacatgggaatatgggggaggaaagttgcatcttgtgttgtgaagacctatcccaacagagtgttgagaacatccagagcccatgttgtagtcaagccatctaccaccgcaagtgcatacagnnnnnnnnnnnnnnnnnnnnnnnnnnnnnnnnnnnnnnnnnnnnnnnnnnnnnnnnnnnnnnnnnnnnnnnnnnnnnnnnnnnnnnnnnnnnnnnnnnnnnaggaggtggtgcctcattctgtgtgatacatgcggatcccacggaacccacagggactgctcctctctta

SEQ ID NO: 33259 - DNA, 2325 bp, Macaca Mulatta
  misc_feature (1)...(2325): n = A,T,C or G
cctgacttcagaaaatcaaattggattctacagaaaggttctgttggattctgaccggaacctctttgggtgtgcctttggatttcaagnnnnnnnaagtgttgacatgggaagatgctccagttcctcaagctatctgaaacaagctcattacaatgctaagggaatagcgcacagtgaagacagtcagtgagaaccagagctattgttacaattgacagcagccagctcaggcggcagaggacgagagagatcgggctgcacacacatggatgaggctgacttttcagaagacacgacttataagcaggaggatttgccttatgatggggacctctctccgattaagatatgcaatgattacagttttacctcaaaaaatgatgcctttgaagtctcaagtcaaattattttcatagcagatgaccctcaagagaaggctatgcataatgagacttgtggaaatacagctatgaccatgcccctgggtaaaactactgaaaatgctgccaacaaaaaagatgagaaagagaaacaatgcactgcagctcttcctattccagcaaatgaaggagatgcttctaagtcaagcatttctgatattttacttcatcatctttccaaagagccattcttacgaggtcaaggcattgattgtgaaaccctcccagagatctcaaatgccgacagttttgaagaggaagctattattaaaagtattatttcatgttgtaataagaattcttggccaaaagaacaaaccctagaactcactgaccaactcaaccccaaaaaggatggtgaaaacagcaatannnnnnnnnnnnnnnnnnnnnnnnnnnnnnnnnnnnnnnnnnnnnnnnnnnnnnnnnnnnnnnnnnnnnnnnnnnnnnnnnnnnnnnnnnnnnnnnnnnnnnnnnnnnnnnnnnnnnnnnnnnnnnnnnnnnnnnnnnnnnnnnnnnnnnnnnnnnnnnnnnnnnnnnnnnnnnnnnnnnnnnnnnnnnnnnnnnnnnnnnnnnnnnnnnnnnnnnnnnnnnnnnnnnnnnnnnnnnnnnnnnnnnnnnnnnnnnnnnnnnnnnnnnnnnnnnnnnnnnnnnnnnnnnnnnnnnnnnnnnnnnnnnnnnnnnnnnnnnnnnnnnnnnnnnnnnnnnnnnnnnnnnnnnnnnnnnnnnnnnnnnnnnnnnnnnnnnnnnnnnnnnnnnnnnnnnnnnnnnnnnnnnnnnnnnnnnnnnnnnnnnnnnnnnnnnnnnnnnnnnnnnnnnnnnnnnnnnnnnnnnnnnnnnnnnnnnnnnnnnnnnnnnnnnnnnnnnnnnnnnnnnnnnnnnnnnnnnnnnnnnnnnnnnnnnnnnnnnnnnnnnnnnnnnnnnnnnnnnnnnnnnnnnnnnnnnnnnnnnnnnnnnnnnnnnnnnnnnnnnnnnnnnnnnnnnnnnnnnnnnnnnnnnnnnnnnnnnnnnnnnnnnnnnnnnnnnnnnnnnnnnnnnnnnnnnnnnnnnnnnnnnnnnnnnnnnnnnnnnnnnnnnnnnnnnnnnnnnnnnnnnnnnnnnnnnnnnnnnnnnnnnnnnnnnnnnnnnnnnnnnnnnnnnnnnnnnnnnnnnnnnnnnnnnnnnnnnnnnnnnnnnnnnnnnnnnnnnnnnnnnnnnnnnnnnnnnnnnnnnnnnnnnnnnnnnnnnnnnnnnnnnnnnnnnnnnnnnnnnnnnnnnnnnnnnnnnnnnnnnnnnnnnnnnnnnnnnnnnnnnnnnnnnnnnnnnnnnnnnnnnnnnnnnnnnnnnnnnnnnnnnnnnnnnnnnnnnnnnnnnnnnnnnnnnnnnnnnnnnnnnnnnnnnnnnnnnnnnnnnnnnnnnnnnnnnnnnnnnnnnnnnnnnnnnnnnnnnnnnnnnnnnnnnnnnnnnnnnnnnnnnnnnnnnnnnnnnnnnnnnnnnnnnnnnnnnnnnnnnnnnnnnnnnnnnnnnnnnnnnnnnnnnnnnnnnnnnnnnnnnnnnnnnnnnnnnnnnnnnnnnnnnnnnnnnnnnnnnnnnnnnnnnnnnnnnnnnnnnnnnnnnnnnnnnnnnnnnnnnnnnnnnnnnnnnnnnnnnnnnnnnnnnnnnnnnnnnnnnnnnnnnnnnnnnnnnnnnnnnnnnnnnnnnnnnnnnnnnnnnnnnnnnnnnnnnnnnnnnnnnnnnnnnnnnnnnnnnnnnnnnnnnnnnnnnnnnnnnnnnnnnnnnnnttctgatacaggacacagcttctgttctgattctggcactgaaatgcagggtaacaaatgtcaggactgtggcactaagattcctacctcccgaagagcctgcagaaaggaaccacctaaag

SEQ ID NO: 33260 - DNA, 644 bp, Macaca Mulatta
  misc_feature (1)...(644): n = A,T,C or G
tcactgtcaagtcatttgacaccntccctggttaggaagaccaggactatccttgtaggcaaaacaagcgaagaaaccagcaagtccctataaacttgcatataagtataattttgaatattctgtggtttcaacatggtactttggataatgatcgccttggccttggctgtgattatcacctcttacaatatttggaacatggatcctggatatgatagcatcatttataggatgacaaacccagaagattcgaatggattgaacgttccctgtgccagaattagaaaagagcgttggaaattggctgttttgttaaaatatgtcttttggtgtgctttaaagtagatagtatactttacactnnnnnnnnnnnnnnnnnnttttgttctctattttgtgtgtgcctgtgatgtttttctagagtgaattatagtattgatgtgagtcccactgtggtatagattccataatatgcttgaatactatgatatagctatttaataacatgatttcattatgtttaatgaatttggaaatatgtactgaaagaaatgtcaaacatttaaaatagctcatgttattatggaaaaaagtgcactgaatttattagataaacttatgaatgcttaacttctttacac

SEQ ID NO: 33261 - DNA, 645 bp, Macaca Mulatta
  misc_feature (1)...(645): n = A,T,C or G
ggggcctctggtctttctgtcagtaacatatcagtggctctctgcattgcaaaaagattaaccaggatcttctctgatagagactttaagaagatacagcatctacaccaagaggcacgtgacacaacctggactctgggcaaaccaccgggtgcacccatatgaagtgggggtttgtttggcctccccaggatggactggagcatcagtagtgcctgggttcatcacaggacagatactcaagacaccctgatcaccattaggtggaattgaaggagccaaaaacgggcgcagtggctcctcagcagagactctcctgaatgtatagacatggaaaccaccttcagcatcaaaaaaggaaacattctgcatgcccatatccagaaaaatccccactcgctgtagcttgccatctacgaagaggaaagtcagaggcaccgtgctggcagagaggcggcctccagccctcaaactcacagtccagaatccacgctctgtggtcagctggatcctcccttttcggtgaacagattcctgcagattcccaggtcccattctgtgcttgtttccacgtctacctcctagtagtggcggccacaggtaaangcgagagagccccaggacacaatggacaagtcnaatctc

SEQ ID NO: 33262 - DNA, 2022 bp, Macaca Mulatta
  misc_feature (1)...(2022): n = A,T,C or G
cagatatcaagatgagtggggatgtagctgattccacggatgctcgcaacactctcagccaggtggagccaggnnnnnnnnnnnnnnnnnnnnnnnnnnnnnnnnnnnnnnnnnnnnnnnnnnnnnnnnnnnnnnnnnnnnnnnnnnnnnnnnnnnnnnnnnnnnnnnnnnnnnnnnnnnnnnnnnnnnnnnnnnnnnnnnnnnnnnnnnnnnnnnnnnnnnnnnnnnnnnnnnnnnnnnnnnnnnnnnnnnnnnnnnnnnnnnnnnnnnnnnnnnnnnnnnnnnnnnnnnnnnnnnnnnnnnnnnnnnnnnnnnnnnnnnnnnnnnnnnnnnnnnnnnnnnnnnnnnnnnnnnnnnnnnnnnnnnnnnnnnnnnnnnnnnnnnnnnnnnnnnnnnnnnnnnnnnnnnnnnnnnnnnnnnnnnnnnnnnnnnnnnnnnnnnnnnnnnnnnnnnnnnnnnnnnnnnnnnnnnnnnnnnnnnnnnnnnnnnnnnnnnnnnnnnnnnnnnnnnnnnnnnnnnnnnnnnnnnnnnnnnnnnnnnnnnnnnnnnnnnnnnnnnnnnnnnnnnnnnnnnnnnnnnnnnnnnnnnnnnnnnnnnnnnnnnnnnnnnnnnnnnnnnnnnnnnnnnnnnnnnnnnnnnnnnnnnnnnnnnnnnnnnnnnnnnnnnnnnnnnnnnnnnnnnnnnnnnnnnnnnnnnnnnnnnnnnnnnnnnnnnnnnnnnnnnnnnnnnnnnnnnnnnnnnnnnnnnnnnnnnnnnnnnnnnnnnnnnnnnnnnnnnnnnnnnnnnnnnnnnnnnnnnnnnnnnnnnnnnnnnnnnnnnnnnnnnnnnnnnnnnnnnnnnnnnnnnnnnnnnnnnnnnnnnnnnnnnnnnnnnnnnnnnnnnnnnnnnnnnnnnnnnnnnnnnnnnnnnnnnnnnnnnnnnnnnnnnnnnnnnnnnnnnnnnnnnnnnnnnnnnnnnnnnnnnnnnnnnnnnnnnnnnnnnnnnnnnnnnnnnnnnnnnnnnnnnnnnnnnnnnnnnnnnnnnnnnnnnnnnnnnnnnnnnnnnnnnnnnnnnnnnnnnnnnnnnnnnnnnnnnnnnnnnnnnnnnnnnnnnnnnnnnnnnnnnnnnnnnnnnnnnnnnnnnnnnnnnnnnnnnnnnnnnnnnnnnnnnnnnnnnnnnnnnnnnnnnnnnnnnnnnnnnnnnnnnnnnnnnnnnnnnnnnnnnnnnnnnnnnnnnnnnnnnnnnnnnnnnnnnnnnnnnnnnnnngatcttggtaccgatggaatcatcccacctacctccactgagaccaaaaagtttctccgactccaccgggccctgtattccgcctggaaggaagggaatcatgccttctatatacagacagattgctttccgaagagtgcaagaaaatccccactatcaatgaatccagactcttgccttcttcaggagcaagggcctccggagatccaaactgtgattgaaccaagtgcagactcccaatgctcttgaaatatatagcccctcctaggagcttaccgttttcaccttccttgcctatgcccttgccttctagttccaagtattttagtcagcttcactgtggcaatggtctttcagagaaaagactccttgctgttaatctccaactcatctgtgggcttctggggacaaccatttggctggagtgccaaacaccggaagtggagataatagttttgactctgaacttggccacaatccctgaactgatccccaaaatctgtgaaaagatttgaatctgatatctccaccaaagccttgatgttttctctgtacagctaagttttttgacggaatcttcatctcaccccattttctttttaacctcgcccccttttctacaaccaaattccgttcattattgtgcccttcaggtcccctcctttttgcagaaggcgtaaaagaacctgcccttggtgggtgctctgggcatgttgcgctgcccaccggtgcccttctgtctgtccatgtctgcctagggctcaggaatgcctgttc

SEQ ID NO: 33263 - DNA, 2417 bp, Macaca Mulatta
  misc_feature (1)...(2417): n = A,T,C or G
agtcaccaggtgtcaagatgctgcgagtccataggactggactgggcaggctggaggtcagcctctccaagggtcttcaccacaaagctgtgttggccgtccggagggaggatgtgaatgcctgggagagaagggcccccctagctcccaagcacatcaaaggcatcaccaatctgggatacaaggtcttgatacagccttcgaatcgacgggccattcatgataaggnnnnnnnnnnnnnnnnnnnnnnnnnnnnnnnnnnnnnnnnnnnnnnnnnnnnnnnnnnnnnnnnnnnnnnnnnnnnnnnnnnnnnnnnnnnnnnnnnnnnnnnnnnnnnnnnnnnnnnnnnnnnnnnnnnnnnnnnnnnnnnnnnnnnnnnnnnnnnnnnnnnnnnnnnnnnnnnnnnnnnnnnnnnnnnnnnnnnnnnnnnnnnnnnnnnnnnnnnnnnnnnnnnnnnnnnnnnnnnnnnnnnnnnnnnnnnnnnnnnnnnnnnnnnnnnnnnnnnnnnnnnnnnnnnnnnnnnnnnnnnnnnnnnnnnnnnnnnnnnnnnnnnnnnnnnnnnnnnnnnnnnnnnnnnnnnnnnnnnnnnnnnnnnnnnnnnnnnnnnnnnnnnnnnnnnnnnnnnnnnnnnnnnnnnnnnnnnnnnnnnnnnnnnnnnnnnnnnnnnnnnnnnnnnnnnnnnnnnnnnnnnnnnnnnnnnnnnnnnnnnnnnnnnnnnnnnnnnnnnnnnnnnnnnnnnnnnnnnnnnnnnnnnnnnnnnnnnnnnnnnnnnnnnnnnnnnnnnnnnnnnnnnnnnnnnnnnnnnnnnnnnnnnnnnnnnnnnnnnnnnnnnnnnnnnnnnnnnnnnnnnnnnnnnnnnnnnnnnnnnnnnnnnnnnnnnnnnnnnnnnnnnnnnnnnnnnnnnnnnnnnnnnnnnnnnnnnnnnnnnnnnnnnnnnnnnnnnnnnnnnnnnnnnnnnnnnnnnnnnnnnnnnnnnnnnnnnnnnnnnnnnnnnnnnnnnnnnnnnnnnnnnnnnnnnnnnnnnnnnnnnnnnnnnnnnnnnnnnnnnnnnnnnnnnnnnnnnnnnnnnnnnnnnnnnnnnnnnnnnnnnnnnnnnnnnnnnnnnnnnnnnnnnnnnnnnnnnnnnnnnnnnnnnnnnnnnnnnnnnnnnnnnnnnnnnnnnnnnnnnnnnnnnnnnnnnnagtgttgaaggctcagggatcctgatgtgttccattgacaatttgccagcacagctcccgattgaagctacagaatgctttggagacatgctttacccttatgttgaagaaatgnnnnnnnnnnnnnnnnnnnnnnnnnnnnnnnnnnnnnnnnnnnnnnnnnnnnnnnnnnnnnnnnnnnnnnnnnnnnnnnnnnnnnnnnnnnnnnnnnnnnnnnnnnnnnnnnnnnnnnnnnnnnnnagggaatgtgctcagtcactttcaatgggcaccagaaaggttttggttcttggatctggctatgtatctgagcctgtattggaatatttatcaagagatggcaatatagaaataacagtaggntaggctctgacatgaagaatcaaattgaacagttaggcaagaaatataatattaatcctgttagcatggacatttgtaaacaagaagagaagctgggcttcttggtggcaaaacacgatcttgtcatcagnnnnnnnnnnnnnnnnnnnnnnnnnnnnnnnnnnnnnnnnnnnnnnnnnnnnnnnnnnnnnnnnnnnnnnnnnnnnnnnnnnnnnnnnnnnnnnnnnnnnnnnnnnnnnnnnnnnnnnnnnnnnnnnnnnnnnnnnnnnnnnnnnnnnnnnnnnnnnnnnnnnnnnnnnnnnnnnnnnnnnnnnnnnnnnnnnnnnnnnnnnnnnnnnnnnnnnnnnnnnnnnnnnnnnnnnnnnnnnnnnnnnnnnnnnnnnnnnnnnnnnnnnnnnnnnnnnnnnnnnnnnnnnnnnnnnnnnnnnnnnnnnnnnnnnnnnnnnnnnnnnnnnnnnnnnnnnnnnnnnnnnnnnnnnnnnnnnnnnnnnnnnnnnnnnnnnnnnnnnnnnnnnnnnnnnnnnnnnnnnnnnnnnnnnnnnnnnnnnnnnnnnnnnnnnnnnnnnnnnnnnnnnnnnnnnnnnnnnnnnnnnnnnnnnnnnnnnnnnnnnnnnnnnnnnnnnnnnnnnnnnnnnnnnnnnnnnnnnnnnnnnnnnnnnnnnnnnnnnnnnnnnnnnnnnnnnnnnnnnnnnnnnnnnnnnnnnnnnnnnnnnnnnnnnnnnnnnnnnnnnnnnnnnnnnnnnnnnnnnnnnnngaaacaactcctctgtgacctagttgggatttcaccctcctctgagcacaatgtgttgaaggaagctgttcttaagaaactaggaggagacaatactcagttggaggctgctgaatggt

SEQ ID NO: 33264 - DNA, 564 bp, Macaca Mulatta
gacacacaacactgtcccctgtcagctccacaagcccaggccgtcagggagaatttactaccttccaaacccccccaggatcaattcacacagcaccttcacctcccagcaccacacctacccttgttgaagaatctactaccgccgacagcagcccgggctcaactgtaacaacacacttccctgacagctccacaacctcaggccatagtaaggaatcaacagcatcccacagcagcccagacacaatggaaaccacattcttacctacccgctccacggtctcagctattgctggagaatctacaacctcacccatgagttcaggctcagtggaaacaacaatattacccgacagtaccacaacaccaggcctcagtgagaaatcgaccactttccacagtagccccagatcaccagacacaacacgcttacctgccagcacgaaaagctcaggtgtcagtcaagaatccaccacctccctcagccgaccagggacaacacacacaacggcgttctctgacagcactaccatacgaggcttcagtcaggaatctacaactt

SEQ ID NO: 33265 - DNA, 642 bp, Macaca Mulatta
  misc_feature (1)...(642): n = A,T,C or G
ggggggatctctgtacaccgcagtggtcagaatatggagaacttctcactcctcagcatctctggacctccaatctcttcctccgccctgagtgcttttcccgacattacgttctctcgtgccaccagcctgccagactgcagcttgggggacacccagcacggagagaagctgaggcggaactgcactatctaccggccctggttctccccctacagctactttgtgtgtgcagacaaagagagccacccggaagcttatgacttcccagaggtgcaacaggatgagggcaagtgggacaactgcctttctgaggacatggctgagagcatctgttcgtcctcttcctccgcagagaacacttgtcctcgagaagccaccaagaaatccaggcatggcctggactccatcacatctcaggacatcctaatggcttccaggtggcacccagcacagcagaatggctacaagtgcgcagcctgctgccgcatgtaccccaccctggacttccttaagagccacatcaagagaggcttcagggagggcttcagttgncaggtgtactaccggaagctcnaagccctctggagtaaggagccgaaaggctgnctcggagacaggctctcctcgggcagctgccag

SEQ ID NO: 33266 - DNA, 1839 bp, Macaca Mulatta
  misc_feature (1)...(1839): n = A,T,C or G
atttagagacagaaggtgggtaggcaaatctccaccttcagactggtaggctcctccagaagccatcagacaggaagatgtgaaaatccccagcactcatcccagaatcactaagtggcacctctcctgggccaaagtcccaggacagacctcattgttcctctgtgggaacacctccccaggagggcctcttggatttcccccttgcaacccaggtcagaagtttcattgtcaannnnnnnnnnnnnnnntttcctgtctaacagctctgactaccatccaaccttgaggcacagtgaagacatcggtggccactccaataacagcaggtnnnnnnnnnnnnnnnnnnnnnnnnnnnnnnnnnnnnnnnnnnnnnnnnnngtcaggatttaagtttacctcaaaaacagaagatattaacatggagagtttcaattntgaagatctctggaaaggtgaagattttagtaattacagttacagctctgacctgcccccttctctaccagatgtcgccccatgtcgaccagaatccctggaaatcaacaagtattttgtggtcattatctatgccctggtattcctgctgagcttgctgggaaactccctcgtgatgctggtcatcttacacagcagggtcggccgctccatcactgatgtctacctactgaacctggccatggccgacctactgtttgccctgaccttgcccatctgggctgccgccaaggtgaatggctggatttttggcacattcctgtgcaaagtggtctcactcctgaaggaagtcaacttctatagtggcatcctgctactggcctgcatcagtgtggaccgttacctggccattgtccatgccacacgcacactgacccagaagcgctacttggtcaagttcgtatgtctcagcatctggagtctatccttgctcctggccctgcctgtcttacttttccgaaggactgtctacctgacctatattagcccagtctgctatgaggacatgggcaacaatacagcaaaatggcggatggtgttgcggatcctgccccagacctttggcttcatcttgccgctgctgatcatgctgttctgctatggattgaccctgcgcacgctgtttaaggcccacatggggcagaagcaccgggccatgcgggtcatctttgctgtcgtcctcatcttcctactctgctggctgccttaccagctggtcctgctggcagacaccctcatgaggacccggtagatcaacgagacctgtcagcgccgcaacaacatcgaccaggccctggatgccaccgagattctgggcatccttcacagctgcctcaaccccctcatctacgccttcattggccagaagtttcgccatggactcctcaagattctagccacacatggcttgatcagcaaggactccctgcccaaagacagcaggccttcctttgttggctcttcttcagggcacacttccactactctctgagacgtcctgcctaagtgcagccccgtggggttcctcccttctcttcacagtcacattccaagcctcatgtccactggttcttcttggtctcagtgtctgtgcagcccccattgtggtcacaggaagcagaggaggccacgttcttactagtttctcttgcatggtttaaaaagcctgccctggtgcctcaccccttgccataattactacatcacttgctggagctctgtgcatcccgtccctgagcccgtggcactctgtgttctaagaagtgaaaatctacactccagtgagacagctctgtgtactcattaggatggctagtatcagaagaaagaaaatcaagctgg

SEQ ID NO: 33267 - DNA, 1774 bp, Macaca Mulatta
  misc_feature (1)...(1774): n = A,T,C or G
acgcgcggcgggctgcacttggtcgctgactccaagatcgcgcggggccgtcggaagcccaggacggtaccgggggcagcagccgcagccggcgccgccctccaccctccccgantgcaggccgagtcccgtagcatccggtagggaaatggtcgtgctttcggtccccgccgaagtcaccgtgatcctgttagatatcgaaggtaccacaaccccgattgctttcgtgaagnnnnnnnnnnnnnnnnnnnnnnnnnnnnnnnnnnnnnnnnnnnnnnnnnnnnnnnnnnnnnnnnnnnnnnnnnnnnnnnnnnnnnnnnnnnnnnnnnnnnnnnnnnnnnnnnnnnnnnnnnnnnnnnnnnnnnnnnnnnnnnnnnnnnnnnnnnnnnnnnnnnnnnnnnnnnnnnnnnnnnnnnnnnnnnnnnnnnnnnnnnnnnnnnnnnnnnnnnnnnnnnnnnnnnnnnnnnnnnnnnnnnnnnnnnnnnnnnnnnnnnnnnnnnnnnnnnnnnnnnnnnnnnnnnnnnnnnnnnnnnnnnnnnnnnnnnnnnnnnnnnnnnnnnnnnnnnnnnnnnnnnnnnnnnnnnnnnnnnnnnnnnnnnnnnnnnnnnnnnnnnnnnnnnnnnnnnnnnnnnnnnnnnnnnnnnnnnnnnnnnnnnnnnnnnnnnnnnnnnnnnnnnnnnnnnnnnnnnnnnnnnnnnnnnnnnnnnnnnnnnnnnnnnnnnnnnnnnnnnnnnnnnnnnnnnnnnnnnnnnnnnnnnnnnnnnnnnnnnnnnnnnnnnnnnnnnnnnnnnnnnnnnnnnnnnnnnnnnnnnnnnnnnnnnnnnnnnnnnnnnnnnnnnnnnnnnnnnnnnnnnnnnnnnnnnnnnnnnnnnnnnnnnnnnnnnnnnnnnnnnnnnnnnnnnnnnnnnnnnnnnnnnnnnnnnnnnnnnnnnnnnnnnnnnnnnnnnnnnnnnnnnnnnnnnnnnnnnnnnnnnnnnnnnnnnnnnnnnnnnnnnnnnnnnnnnnnnnnnnnnnnnnnnnnnnnnnnnnnnnnnnnnnnnnnnnnnnnnnnnnnnnnnnnnnnnnnnnnnnnnnnnnnnnnnnnnnnnnnnnnnnnnnnnnnnnnnnnnnnnnnnnnnnnnnnnnnnnnnnnnnnnnnnnnnnnnnnnnnnnnnnnnnnnnnnnnnnnnnnnntaacccttagtgagggtaacgtgtagttgatagaagaaattgctgaaaaccaatctaatgtgctatgtttatcaagtcatgtactaaaatggaaagctagttttgagagattattcagaagccttgttattttaaaaatgaaatatttcaaagactnnnnnnnnnnnnnnnnnnnnataattcattgcccctgtttgtgatttagaagattataacagctgtatttcatatttgcatccttatatatatcaaagaccaaggtatttccttctgctccaaaagatgaaaattgggaaagaaaactcacttgagtcttgatcaaacaagtgtcttttaagaagaaacttggtaatcattgtggcacccacagcaagctgttgccttaccagtgaaaaaggtgcactgatgtaacagctaaaacagagctgtgttcttcatggaacagttctaatcctgccgggtgttatcgttatatattttatagttacctttctaactacttagcaccgtttgagaatatgttaattgctatttactatttaaaaagttttactgaaatcagtccataagattaagatgagctctaatacgtaagattttc

SEQ ID NO: 33268 - DNA, 876 bp, Macaca Mulatta
  misc_feature (1)...(876): n = A,T,C or G
ttttggctgatggaatttggaagatttgtatttggnnnnnnnnnnnnnnnnnnnnnnnnnnnnnnnnnnnnnnnnnnnnnnnnnnnnnnnnnnnnnnnnnnnnnnnnnnnnnnnnnnnnnnnnnnnnnnnnnnnnnnnnnnnnnnnnnnnnnnnnnnnnnnnnnnnnnnnnnnnnnnnnnnnnnnnnnnnnnnnnnnnnnnnnnnnnnnnnnnnnnnnnnnnnnnnnnnnnnnnnnnnnnnnnnnnggggataacatgtattctttcactaatctgtgccttggctcttgcctacttggatcagagagcagagagaatccttcacaaagaacaaggaaaaacaggtnnnnnnnnnnnnnnnnnnnnnnnnnnnnnnnnnnnnnnnnnnnnnnnnnnnnnnnnnnnnnnnnnnnnnnnnnnnnnnnnnnnnnnnnnnnnnnnnnnnnnnnnnnnnnnnnnnnnnnnnnnnnnnnnnnnnnnnnnnnnnnnnnnnnnnnnnnnnnnnnncagtgttgtatatgtcatatcagctcccatgtccccagtatttgggctcctggtggataaaacagggaagaacatcctctgggttctttgcgcagtagcagccactcttgtgtcccacatgatgctggcctttacgatgtggaatccttggattgctatnnnnnnnnnnnnnnnnnnnnnnnnnnnnnnnnnnnnnnnnnnnnnnnnnnnnnnnnnnnnnnnnnnnnnnnnnnnnnnnnnnnnnnnnnnnnnnnnnncatgcagtccattcagaatcttgggttggccatcatttccatcattgctggtatgatactggattctcgggggtatttgtttttagaagtgttcttcattgcctgtgtttct

SEQ ID NO: 33269 - DNA, 141 bp, Macaca Mulatta
acagccagccctggacatctgatgaaacagtggtggctggtggcaccgtggtgctcaagtgccaagtgaaagatcacgaggactcatccctgcaatggtctaaccctgctcagcagactctctactttggggagaagagag

SEQ ID NO: 33270 - DNA, 1663 bp, Macaca Mulatta
  misc_feature (1)...(1663): n = A,T,C or G
caggaatcagtgacattcaaagatgtgtctgtggacttcacccaggaagaatggtaccacgtcgaccctgctcagaggagcttatacagggatgtgatgctggagaactatagccacctggtttctcttnnnnnnnnnnnnnnnnnnnnnnnnnnnnnnnnnnnnnnnnnnnnnnnnnnnnnnnnnnnnnnnnnnnnnnnnnnnnnnnnnnnnnnnnnnnnnnnnnnnnnnnnnnnnnnnnnnnnnnnnnnnnnnnnnnnnnnnnnnnnnnnnnnnnnnnnnnnnnnnnnnnnnnnnnnnnnnnnnnnnnnnnnnnnnnnnnnnnnnnnnnnnnnnnnnnnnnnnnnnnnnnnnnnnnnnnnnnnnnnnnnnnnnnnnnnnnnnnnnnnnnnnnnnnnnnnnnnnnnnnnnnnnnnnnnnnnnnnnnnnnnnnnnnnnnnnnnnnnnnnnnnnnnnnnnnnnnnnnnnnnnnnnnnnnnnnnnnnnnnnnnnnnnnnnnnnnnnnnnnnnnnnnnnnnnnnnnnnnnnnnnnnnnnnnnnnnnnnnnnnnnnnnnnnnnnnnnnnnnnnnnnnnnnnnnnnnnnnnnnnnnnnnnnnnnnnnnnnnnnnnnnnnnnnnnnnnnnnnnnnnnnnnnnnnnnnnnnnnnnnnnnnnnnnnnnnnnnnnnnnnnnnnnnnnnnnnnnnnnnnnnnnnnnnnnnnnnnnnnnnnnnnnnnnnnnnnnnnnnnnnnnnnnnnnnnnnnnnnnnnnnnnnnnnnnnnnnnnnnnnnnnnnnnnnnnnnnnnnnnnnnnnnnnnnnnnnnnnnnnnnnnnnnnnnnnnnnnnnnnnnnnnnnnnnnnnnnnnnnnnnnnnnnnnnnnnnnnnnnnagcttactgagcatcagattatctcacactggggagaaaccctttgaatgcatgtgtgtggaaaggccttcaggcatagctcatctcttggtcagcatgagaatgctcataccggagagaaaccctatcagtgtagtctctgtgggaaagccttccagcgcagctcctcccttgttcaacaccagcgaattcacactggagagaaaccctatcgatgtaatctatgtgggaggtcctttaggcatggcacatccctcactcaacatgaggtcacacatagtggagagaagcccttccagtgtaaggaatgtgggaaagcctttagtcgatgttcttcccttgtccaacatgagaggactcatactggagagaaaccttttgaatgtagcatatgtgggagggcttttggtcagagcccatccctttataaacatatgagaattcataagagaggcaaaccttaccaaaacaataactacagcatagatttcaagcacaattcatctctcactcaagatgaaagcactcttaccgaagtgaaatcctatcattgtaatgactgtggggaagactttagtcacattacagactttactgaccatcagaggatccatactggagagaacccctatgattgtgagcaggcttttagtcagcaagctatttctcatcctggagagaaaccctatcaatgtaatgtatgtggtaaagctttcaaaagaagtacaagtttcatagagcatcacagaattcatactggagaaaaccttatgaaatgtatgagtgtngagaagc

SEQ ID NO: 33271 - DNA, 609 bp, Macaca Mulatta
  misc_feature (1)...(609): n = A,T,C or G
gcaaatgatgcttatcttcagatggccattggaaatgcgccttggcccatcggtgtcactatgnnnnnnnnnnnnnnnnnnnnnnnnnnnnnnnnnnnnnnnnnnnnnnnnnnnnnnnnnnnnnnnnnnnnnnnnnnnnnnnnnnnnnnnnnnnnnnnnnnnnnnnnnnnnnnnnnnnnnnnnnnnnnnnnnnnnnnnnnnnnnnnnnnnnnatgtgtggagtacaatgcactgtgagatctgtgcatggtgtgtaataacagtaagaaacgtacagaagcaggctgtggacttctggaattaccaacaggaatgaggaaagaagaaaactggagtttccaatctgagttctccttgatgtaactcttgattggttttaagaactgtgttggccttcatttcataactgactgcaagctgatttttctttcttgctttcatttaattagtccaaaattaagttttaaagacttttcctcacaatttaaatctgtagacaacagaagggggtttaaaatgacctttttttcagttgacccaaaagttgtggttagattaaaaagaaacatttgaagatggacttaattatttcagtaaaatactataatt

SEQ ID NO: 33272 - DNA, 442 bp, Macaca Mulatta
  misc_feature (1)...(442): n = A,T,C or G
tcaggtgtcaactgatggacgcttgtttagtctgaagccaacatccggacctgtcttaacagtaactctgtttgggaggttgtatgagaaagactgggcatcaaatgcttcatcaggtctcaaagcacaagcaagaagaataatgctaatagttatagcacctattgtatactcattaatttggtagaatattgacattttctgttttttacttgggataatttaaaaaatgatggataagaaaagaaagattgttctgggttaatattgttctctagtataagtgaattactgatttctctttatttagacannnnnnnnnnnncagataatataagcttaataaattatctgttaatgtagattttataaaaaactgtagtttgaacattggtctttcttagaagtgagctaattatatcaaataaatattacaaatctt

SEQ ID NO: 33273 - DNA, 863 bp, Macaca Mulatta
  misc_feature (1)...(863): n = A,T,C or G
ggggccgctttcttttttcaggccggccgggaagatggcggacattcagactgagcgtgcctaccaaaagcagccgaccatctttcaaaacaagaagagggtcctgctgggagaaactggcaaggagaagctcccgcggtactacaagaacatcggtctgggcttcaagacacccaaagaggctattgagggcacttacattgacaagaaatgccccttcactggtaatgtctccattcgagggcggatcctctctggtgtggtgacgaagatgaagatgcagaggaccattgtcatccgccgagactacctccactacatccgcaagtacaaccgcttcgagaagcgccacaagaacatgtctgtgcacctgtccccctgcttcagggacgtccagatcggtgacatcgtcacagtgggtgagtgtcggcccctgagcaagacagtgcgcttcaacgtgctcaaggtcaccaaggctgccggcaccaagaagcagttccagaagttctgaggctggacatcggcccgctccccacaatgaaataaagttattttctcattcccaagccnnnnnnnnnnnnnnnnnnnnnnntgtctgctgtccnnnnnnnnnnnnnnnnnnnnnnnnnnnnnnttgtcgggcccgccttccggcccctcagaagaaacttttctaaaaacaatttcgttttgggggccgcgggcccccagtaggttaaagtggaaacatggggccaatagcgtggttttccctagggaaaaaatccctggggccacagggacaaagaggggcccgtggaaatatctccccccaataaaaaaaaccgnnnnnnnnnnnnnnnnnnnnnnnaaaaccccgaaac

SEQ ID NO: 33274 - DNA, 224 bp, Macaca Mulatta
cgaggttttatacttcaggttagtttttggaaggaagaacatttttaggtttgcaagcctcctgatgaggaaaccagaaataccacatttatggaccgtgaaatgttggttctctactctgaagggacttttgagttaatgggcgtaagggggtttctaaagcaggcaatccctgtagccacagagaataaatgccttcccaaagtggcaacttcccagagcca

SEQ ID NO: 33275 - DNA, 306 bp, Macaca Mulatta
  misc_feature (1)...(306): n = A,T,C or G
nnnnnnnnnnnnnnnnnnnnnnnnnnnnnnnnnnnnnnnnngtgcattaatatatttattcacatcctcactgtcttaagtgtgtatttacagactccaacaggcagttatgtcagaaatcctcagactcctggcaatttcaaatgagccaagcaactcttgtgaagaccaaattttcaaactcttcaccaaggacatccttctggtcacctttgtgctcccagatggtattgagctagcagcagtctacacttcaggcatccatcttccacctgccgtcccacaatccttttctagaagtggccc

SEQ ID NO: 33276 - DNA, 3016 bp, Macaca Mulatta
  misc_feature (1)...(3016): n = A,T,C or G
caggtggagctcacgggcaacagtatttatgaatacatccatccttccgaccacgacgagatgaccgctgtcctcacggcccaccagccgctgcaccaccacctgctccaagnagagtatgagatagagaggtcgttctttcttcgaatgaagtgtgtcttggcgaaaaggaacgcgggcctgacctgcagtggatacaaggtnnnnnnnnnnnnnnnnnnnnnnnnnnnnnnnnnnnnnnnnnnnnnnnnnnnnnnnnnnnnnnnnnnnnnnnnnnnnnnnnnnnnnnnnnnnnnnnnnnnnnnnnnnnnnnnnnnnnnnnnnnnnnnnnnnnnnnnnnnnnnnnnnnnnnnnnnnnnnnnnnnnnnnnnnnnnnnnnnnnnnnnnnnnnnnnnnnnnnnnnnnnnnnnnnnnnnnnnnnnnnnnnnnnnnnnnnnnnnnnnnnnnnnnnnnnnnnnnnnnnnnnnnnnnnnnnnnnnnnnnnnnnnnnnnnnnnnnnnnnnnnnnnnnnnnnnnnnnnnnnnnnnnnnnnnnnnnnnnnnnnnnnnnnnnnnnnnnnnnnnnnnnnnnnnnnnnnnnnnnnnnnnnnnnnnnnnnnnnnnnnnnnnnnnnnnnnnnnnnnnnnnnnnnnnnnnnnnnnnnnnnnnnnnnnnnnnnnnnnnnnnnnnnnnnnnnnnnnnnnnnnnnnnnnnnnnnnnnnnnnnnnnnnnnnnnnnnnnnnnnnnnnnnnnnnnnnnnnnnnnnnnnnnnnnnnnnnnnnnnnnnnnnnnnnnnnnnnnnnnnnnnnnnnnnnnnnnnnnnnnnnnnnnnnnnnnnnnnnnnnnnnnnnnnnnnnnnnnnnnnnnnnnnnnnnnnnnnnnnnnnnnnnnnnnnnnnnnnnnnnnnnnnnnnnnnnnnnnnnnnnnnnnnnnnnnnnnnnnnnnnnnnnnnnnnnnnnnnnnnnnnnnnnnnnnnnnnnnnnnnnnnnnnnnnnnnnnnnnnnnnnnnnnnnnnnnnnnnnnnnnnnnnnnnnnnnnnnnnnnnnnnnnnnnnnnnnnnnnnnnnnnnnnnnnnnnnnnnnnnnnnnnnnnnnnnnnnnnnnnnnnnnnnnnnnnnnnnnnnnnnnnnnnnnnnnnnnnnnnnnnnnnnnnnnnnnnnnnnnnnnnnnnnnnnnnnnnnnnnnnnnnnnnnnnnnnnnnnnnnnnnnnnnnnnnnnnnnnnnnnnnnnnnnnnnnnnnnnnnnnnnnnnnnnncaccgcgtgctgacccggcgcggaccgctggggggcgccgcacccgccgcctccggcttggcctgcgctcccggcggccccgaggcggcgaccagcgcgctgcggccccggcacccgagccccgccgctgcctccccagccggcacgccactgccgcactacctgggcgcctcggtcatcatcaccaacgggaggtgacccgccggccgcccgcgccaggagcctggacccggcctcggggctgcggcgccaccgagcccggcaggtgcgcacgacctacgttaatttatgcagagacagctatttgaattggaccccgccgccgacttgcggatttccacccgcggaggccgcgcgcgccggtgccgagggtggtggagcgcccggtccggggcaggtgaccgcccacctctgtcctgcgagggccagtgcgacccagttgctggtggcttggtttcctcaccttgaaatcgggcttcacgcatcttgccttgtccccaacgttccacgatagtcccgctgggggatttaagcgatttcactccgcaaatatcctccactttcaggagggaaacccaccctgccgcagtccgctcttccaagtggacggcagccctggaaggcgacgcctgtgtccgagcccttttagatgcttaggtgaaggcagaagtgacgattgtaagtcccatgaatacacaactccactgtctttaagtcattcaagagtctcattatttttgttttatttaaccctttcttcaattcaaaaaccaacaaagccaagaataaggggggtgaccatgcaattccattttgtgtgtctgtgaacatgggtgtgcttcacaaatccattaacaagctcttacttccccctaacccctatgaactcttgataacaccaagagtagcaccttcagaatatattgaataggcattaaatgcaaaaatatatatgtagccagagagtttatgagaatgaccctgtcaagcttaattattacgtggcaaaatccctctggtccacacagctctgtaattcactaggctcatgtttgctacaaatagtgttaataaagttaaattgcatgtgcaataccaaacactgtcaatggactgcaccgtgtggatgaaaaacatgcttaaggggatgtaatgaaaatgatgtagacattttaagcattttctacacatcaagaaaacgtcataagaacgttacgtgtgcaacaggtaaacagaaatcctttcgtaaagcaccagcagtgtttaaaaaatgagcttccattaatttttattttttatgggttttgcttaaagatctcaacattggaaaatcctgccatggctgtgaactgcaccaatgcattgaaccaccatctttcaattttcttcatcctatcaacactgcatcattctgctgctttatcaaaatggtttatattaggaaactttttccacctgaatggaaagaggttttcccaaatgttttaaactcattgttctagaatcaagtgcacctacaccagctgctctcaaaatgtgaannnnnnnnnnnnnnnnnnnnnnngccaaccctgtgtcacttagtgaggacctgatacaatccctacagggtgtctgtccgtgggcctcatggtaagagtcacaatttgcaaatttaggactgtgggtcatgtagcgaaggggctggatggtaggaagggaggtgcccgcctctccacgcactcagctatacctcattcacagctccttgtgagtgtgtgcacgggaaataagccgagggtatt

SEQ ID NO: 33277 - DNA, 452 bp, Macaca Mulatta
  misc_feature (1)...(452): n = A,T,C or G
ggatcggctttgccattgcccggcgtttggcccaggacggggcccacgtggtcgtcagcagccggaagcagcagaatgtggaccaggcggtggccacgctgcagggggagggggctgagcgtgacgggcaccgtgtgccatgtggggaaggcggaggaccgggagcggctggtggctacggnggctgtgaagcttcatggcggtatcgatatcctagtctccaatgctgctgtcagccctgtctttggaagcctaatggatatcaccaaggaggtgtgggacaagnnnnnnnnnnnnnnnnnnnnnnnnnnnnnnnnnnnnnnnnnnnnnnnnnnnnnnaggttaggtgagccagaggattgtgctggcattgtgtctttcctgcgctctgaagatgccagctacatcactggggagacagtggtggtgggtggaggaaccccgtcccgcct

SEQ ID NO: 33278 - DNA, 803 bp, Macaca Mulatta
  misc_feature (1)...(803): n = A,T,C or G
atgtgaaggaaagattgcaaggaaactgaattattgtttagaatagaaggtcaatctgcatagaaaacagagtccactcctctttactttcaggaagcttagggagagcctaaacgggtgctgagaatgtctcttttctttccaggttttctctttctttgatttgatccgctactgtgtcagtgtttgcaatcagattgcgtctcacctgcacatacatgtcttcagaatcaaggtttctacagctcattctaatcatcattaatgatgtaattggtattatataggaacaccatgttttctgcaggaaggaatctgaacatattaaggagaatgggggtggataagaacaaatataatttataataatcaatgttgtataacttttattctttattattggtaacactccctaactatcctgtgtgagaatgggaatttcaagtcccatcttgtaaattgtatatgttatcatgcagggtttgggccaagaaagcatgcagaaaaaaaatgccatgtgattgtaattatcctggattcagaataacattgtgatggggagccagatccacagtggtggggagttctaatgttgactatttgcaggccaaaagatgattgctttataattttaacaaatcatcgtcttttagtaacatccttgtttagtgtcttctcaagctttctttactaaggagttcagcttgtgacacagatacatcccactagcttgtgaggtggaactagtaatanagaccttgaatttggattgaaaggtttcctatttttacattgttgaggaa

SEQ ID NO: 33279 - DNA, 1175 bp, Macaca Mulatta
  misc_feature (1)...(1175): n = A,T,C or G
gttgatgtcaagtggaatttggcagagaggtaaagaagaagaaggagtttatggttttctaatagaagatatcaggaaggaagtgaatagagcttctaaactgnnnnnnnnnnnnnnnnnnnnnnnnnnnnnnnnnnnnnnnnnnnnnnnnnnnnnnnnnnnnnnnnnnnnnnnnnnnnnnnnnnnnnnnnnnnnnnnnnnnnnnnnnnnnnnnnnnnnnnnnnnnnnnnnnnnnnnnnnnnnnnnnnnnnnnnnnnnnnnnnnnnnnnnnnnnnnnnnnnnnnnnnnnnnnnnnnnnnnnnnnnnnnnnnnnnnnnnnnnnnnnnnnnnnnnnnnnnnnnnnnnnnnnnnnnnnnnnnnnnnnnnnnnnnnnnnnnnnnnnnnnnnnnnnnnnnnnnnnnnnnnnnnnnnnnnnnnnnnnnnnnnnnnnnnnnnnnnnnnnnnnnnnnnnnnnnnnnnnnnnnnnnnnnnnnnnnnnnnnnnnnnnnnnnnnnnnnnnnnnnnnnnnnnnnnnnnnnnnnnnnnnnnnnnnnnnnnnnnnnnnnnnnnnnnnnnnnnnnnnnnnnnnnnnnnnnnnnnnnnnnnnnnnnnnnnnnnnnnnnnnnnnnnnnnnnnnnnnnnnnnnnnnnnnnnnnnnnnnnnnnnnnnnnnnnnnnnnnnnnnnnnnnnnnnnnnnnnnnnnnnnnnnnnnnnnnnnnnnnnnnnnnnnnnnnnnnnnnnnnnnnnnnnnnnnnnnnnnnnnnnnnnnnnnnnnnnnnnnnnnnnnnnnnnnnnnnnnnnnnnnnnnnnnnnnnnnnnnnnnnnnnnnnnnnnnnnnnnnnnnnnnnnnnnnnnnnnnnnnnnnnnnnnnnnnnnnnnnnnnnnnnnnnnnnnnaggcaaggcagcaaatttagaagaaatgtatcaacactattaatagagttaggattccaaattaaaaaaaaaactaaaagattatatatcaacaaagccaatatctggactagtgccttagatgcattcagaaatcgaaactttaatccttcatatgcaattgaagtagcatatgttattgaaaatgataattttggaagtgagcatcctggatcaaagcaagaatttctgagtctcttaatgcaacatcttgagaactcatcattgttgaagggtccttgtcaaagaactgtctctaaat

SEQ ID NO: 33280 - DNA, 922 bp, Macaca Mulatta
  misc_feature (1)...(922): n = A,T,C or G
gtacctgaaccagtttgagaattgctgtggtctgcgggaaggtgnnnnnnnnnnnnnnnnnnnnnnnnnnnnnnnnnnnnnnnnnnnnnnnnnnnnnnnnnnnnnnnnnnnnnnnnnnnnnnnnnnnnnnnnnnnnnnnnnnnnnnnnnnnnnnnnnnnnnnnnnnnnnnnnnnnnnnnnnnnnnnnnnnnnnnnnnnnnnnnnnnnnnnnnnnnnnnnnnnnnnnnnnnnnnnnnnnnnnnnnnnnnnnnnnnnnnnnnnnnnnnnnnnnnnnnnnnnnnnnnnnnnnnnnnnnnnnnnnnnnnnnnnnnnnnnnnnnnnnnnnnnnnnnnnnnnnnnnnnnnnnnnnnnnnnnnnnnnnnnnnnnnnnnnnnnnnnnnnnnnnnnnnnnnnnnnnnnnnnnnnnnnnnnnnnnnnnnnnnnnnnnnnnnnnnnnnnnnnnnnnnnnnnnnnnnnnnnnnnnnnnnnnnnnnnnnnnnnnnnnnnnnnnnnnnnnnnnnnnnnnnnnnnnnnnnnnnnnnnnnnnnnnnnnnnnnnnnnnnnnnnnnnnnnnnnnnnnnnnnnnnnnnnnnnnnnnnnnnnnnnnnnnnnnnnnnnnnnnnnnnnnnnnnnnnnnnnnnnnnnnnnnnnnnnnnnnnnnnnnnnnnnnnnnnnnnnnnnnnnnnnnnnnnnnnnnnnnnnnnnnnnnnnnnnnnnnnnnnnnnnnnnnnnnnnnnnnnnnnnnnnnnnnnnnnnnnnnnnnnnnnnnnnnnnnnnnnnnnnnnnnnnnnnnnnnnnnnnnnnnnnnnnnnnnnnnnnnnnnnnnnagttaaatgagggccgcacattggacatggatcttgtttttctctttgacaacagtaaaatcacctatgagactcagatctccccacggccccaacctgaaagtgtcagctgtatc

SEQ ID NO: 33281 - DNA, 668 bp, Macaca Mulatta
atttatagatttagaaatcatgttagtatagtatgtggttgtttgttaaatgaaaaaaatttccttgaagaatttagttctaaggactgttatcctcaacacaatttaattttagttcattctgtatcttttcctatttgcagttgtgggatatgaccccagtcgtgtcttgatgactctcccaggaatcagaaagatagtatttactaaagaaatggttgttttaatccaagtcattaccagagtggtaaagcagacatgtgagaagtaagaaagaaactaaagaccctggatgaatttgcagatgacccatgcgcacagtggggacccggcgagtgagaacttgcaaggggactcttccaacttgttcatacaatataaaagaagctatttttttaacaaatggtttatacagtctggctgtgctgcattgttttgagtataccgaaaaatctgtgtggggtgtttaattttatactttccacaccccattttatgtgttgctttgtgtgtcagagaaataagggaagtatccactcagagtattttggtcattatagtttctgtattttctttacttcaacatgtgtcacatggccagcggctttttgttctctcccctctgcacctacctgcacctctctgcctttcctgaaggggatgtattt

SEQ ID NO: 33282 - DNA, 968 bp, Macaca Mulatta
  misc_feature (1)...(968): n = A,T,C or G
ctcgcctcgtgccgaatcggcacgaggaaaagaactgtgcttcaaagaatacgcagaacaaggggaggtggacatggagagccaccggaacgccaacgcagagccagctgttcagcgtactcttttagagaaatagaagattgtcggcagtaacagcccaggcttggcggcagggttagaacagctgcctgaggctcctccccgaaggacacttgcgtgagagcagagacggaggccttctgttcacggcggattctttgttttaatcttgcgatgtgctttgcttgttgttgctgggcggatgatgtttactaatgatgaaacatccaaagggggataggcacttggacccccattctccaaggcccgtgggagaggggtttcccatgggatgtgaaaggctggccattattaagtccccgtaactcaaatgtcaaccccaccgaggcaccccctgtcccccagaatctcggctgtttacaaatcacgtgtccattgagcacgtctgaaacttccctgggtagccctnnnnnnnnnnnnnnnnnnnaaataaggtaagcccttcaatttgcttcttcaatatttctttcatttgtagggatatttctttttcatgtcagactaataaaaagaaattagaaaccaaaagaaaaaaaaaaannnnnnnnnnnnnnnnnnngtcggccgccctccnnnnnnnnnnnnnnnnnnnnnnnnnnnnnnnnnnnngggcgcggcggggcccccgtaagggtaagggaaacctggggccaaagccgtgtttccctaaggaaaatcccggggccatgaaccaaaggggcttgggaattcccccccccacttannnnnnnnnnnnnnnnnnnnnnnaaaacccagaggccggttcttggaaaaaaaattctcccaaaaggggggagtttcttggggggggcccttttcccgtggggaatcctttcctcccggggggg

SEQ ID NO: 33283 - DNA, 875 bp, Macaca Mulatta
ttataggtgacgcaacttgcaaaacaatcctgaaacatgaaacaagaataataatatttaaatgtaacttaatcattatacctctttatccaccaaagtgaattcattccattccctttcatctgtgctcacactttgcatcaaatattgggtaaaccaacgtgtgtaggaagaaataaatgttttcatagtcattactctttacaatgggagtgctaaaattcaagcacatctttttcagaagctttgttaaatcaagtggagtatcacagatagttttcaccttccttctgattccgtgttgcttaactctgaatttcagagcaccccctattattccaaatgtgcctttcctctgggcctggaatgccccaagtgaattttgtcttggaaaatttaatgagccactagatatgagcctcttcactttaatgggaagcccccgaataaacatcaccgggcaaggtgttacaatattttatgttgatagacttggctactatccatatatagacctaaccacaggagtaactgtgcatggaggaatcccccagaaggtttccttgcaagaccatctggacaaatctaagcaagacattcttttttatatgccagtagacaatttgggaatggctgttattgactgggaagaatggagacccacttgggcaagaaactggaaacctaaagatgtttacaagaataggtctattgaactggttcagcaacaaaatgtacagcttagtctccctcaggccactgacaaagctaatcaagaattgaaaaggcagggaaggatttcatgatagagactataaaattgggaagatcacttcggccaaatcaaaagtggggttattatctttttccggatt

SEQ ID NO: 33284 - DNA, 159 bp, Macaca Mulatta
ccccctctcccaacaactccgacacctgttccaagggaacctggccggaagcctctttctagctcccgcctcggagaagtcactggtagcccctcccctccgccccggagtggcgcccccacaccaagctcgcgcgccccggctctgtctcccacccgg

SEQ ID NO: 33285 - DNA, 390 bp, Macaca Mulatta
  misc_feature (1)...(390): n = A,T,C or G
agccacagagcccgggtcgcaggcacctccccgccagctctcccgcttctcgcacagcctcccgatccgtctgctgagccccatggcccgcgccgcgctctccgcagcccccagcaatcctcggctcctgcgggtggctctgctgctcctgctcctagtggcnnnnnnnnnnnnnnnnaggagcacccgtggccactgaactgcgctgccagtgcttgcagaccctacagggaattcaccccaagaacatccaaagtgtgattgtgaaggccccaggaccccactgcgcggaaaccgaagtcatnagccacactcaagaatgggcagaaagcttgtctcaaccccgcatcccccatggttcagaaaatcatcgaaaagatactgaacaag

SEQ ID NO: 33286 - DNA, 490 bp, Macaca Mulatta
ttcgtataacgtcaggtgcacgtttacactgtggctagtgtaataaaacattttccttgtatctactcaattctttattttatgttgttcattaaacttttactataggaacttcttgtatgtgttcatcctttaacatgaaattcttatcctgactgtgctacctgattagagaataaagggtaaaatttatttactcatcattattatatgagagatgtaagtaaaaatgacctttctctaaaccaggttgcatgttgtactcaatatgtaaaggtaaatacaataaatctattttctactctcttgcatatttgatttttgtagggaatcaaactaaaaatagtaataatatttaatatcagttatgctaagtactctaaggagaaaaaagaacaaacgacgatttcttttggcagcatgtaaactgaaacatgtcaggaaataaaaatagagatatcctctgtaagttgactggtataacatgtgg

SEQ ID NO: 33287 - DNA, 667 bp, Macaca Mulatta
aaggtgtcatcaacaaaccagaggtggagatgtcaccacaagaactgcagctccattacttcaaaatgcacgattatgatggcaatgatttgcttgatggcttagaactctccatagccattactcatgtccataaggagaaagggagtgaacaggcaccactaatgagtgaagatgaactgattaacataagagatggtgttttgagagatgatgacaagaacaatgatggatacattgactatgctgaatttgcaaaatcactgcagtagatgttatttgtccatctcttggttatatgcaaatgtgatctgtgatgatgtgattgaacactttgataatgcaaaataactcatttccaactactgctgcagcgttttggtaaaaacctatagcaatttgttacactggggtgagaagagatcaagagaaatgaaagagaagagaaatgggacatctaatagtccctaagcgctattaaataccttattggacaagggcttgctttttaaagcatcttttcaagaatattgaataattggagctgagtactcaggagcttcactgtagtagaaaactgctagtttcttaattttaattcatgttacctgaaaagtaaaacaacagactttgacaagtggacgtttttcagtaacagtgaaggagt

SEQ ID NO: 33288 - DNA, 731 bp, Macaca Mulatta
gtatacagcatggagctgaaggctttgcaggctacacacgctgtagcctgtcttgccgtctttgtcttgttgccactgggtttgtttggagccaaggggctgaagaaggcattgggtatggggccaggcccctggatgaatatcttgtgggcctggtttattttctggtggcctcatggggtggttctgggactggatttcctggtgaggtccaagctgttgctgttgtcaacatgtctggcccagcaggctctggatctgctgctgaacctggcagaagccttggcaattttgcactgtgtggctacgcccctgctcctcgccctattctgccaccaggccacccgcaccctcttgccctctctgcccctccctgaaggatggtcttctcatctggacacccctggaagcaaatcctagttctcttcccacctgtcaacctgaattaaagtctacactgcctttgtgaagcgggtggtttcttattttgtctggggagaaggagaatgaagagagagacatttttatgtcagactttcttgccagtgtctgtttctatagctggcctggggagaaggtgaatgatgaataaacatcctcaaggtgcgcagatgttctcttgaggtgtggggtcactgtcatctcaagggagaagagaagaggaaccagagcaaaggggagttgtaaaccaagaaaacccagaagggatggcttcactggaagaaaagctg

SEQ ID NO: 33289 - DNA, 640 bp, Macaca Mulatta
atcatgatgaataaaatgtctttgcttgtaatttttaaattcaaatcaatcatggatgagtctcaatgatgtgtaggcctttccattccatttattcacactgagtgtcctacaataaacttccgtattttttaacctttttttttctttaagagaatgtgtatctttaggtgcaatcatagtattcctctcatctctcacccttctttttcaaccctgagctgccttaagtttgagctttcctttctattccttgtggctaagacagcaagccagtgtgagacagagattcctcccttgggaaatcagctgctgccctgggtgctgcagagaaacctctggccttcagcagacccgtttctctgttgtagacacagaatgacttccatttgcttttagaccttcattctagtcccctaatgaatgtataatgtcaaggacacaaacacaggtagccctgggttaattctgtagagcagcagctttattcaaagcagctttccatgtctgactttcatagaccacatcttgatgtctgctccctactttctcttgaagactgttctggctattctctgccctttcttgcattttggcttctagtccagcagcagttgaaggcttttgtgtcctcgggtca

SEQ ID NO: 33290 - DNA, 2370 bp, Macaca Mulatta
  misc_feature (1)...(2370): n = A,T,C or G
aggagaaatatttgaactaaaagcagagctcaacaatgaaaaaaaagaaaagagaaaggaggctagaggaaagtgattgctgctatgactgtggggaagnnnnngttctctctttccagacgtagtgaactgtatgcagactgacaatctggaactaaagaagcttgtgtatctctacttgatgaactatgccaagagtcagccagacatggccatcatggccgtgaacagctttgtgaaggnnnnnnnnnnnnnnnnnnnnnnnnnnnnnnnnnnnnnnnnnnnnnnnnnnnnnnnnnnnnnnnnnnnnnnnnnnnnnnnnnnnnnnnnnnnnnnnnnnnnnnnnnnnnnnnnnnnnnnnnnnnnnnnnnnnnnnnnnnnnnnnnnnnnnnnnnnnnnnnnnnnnnnnnnnnnnnnnnnnnnnnnnnnnnnnnnnnnnnnnnnnnnnnnnnnnnnnnnnnnnnnnnnnnnnnnnnnnnnnnnnnnnnnnnnnnnnnnnnnnnnnnnnnnnnnnnnnnnnnnnnnnnnnnnnnnnnnnnnnnnnnnnnnnnnnnnnnnnnnnnnnnnnnnnnnnnnnnnnnnnnnnnnnnnnnnnnnnnnnnnnnnnnnnnnnnnnnnnnnnnnnnnnnnnnnnnnnnnnnnnnnnnnnnnnnnnnnnnnnnnnnnnnnnnnnnnnnnnnnnnnnnnnnnnnnnnnnnnnnnnnnnnnnnnnnnnnnnnnnnnnnnnnnnnnnnnnnnnnnnnnnnnnnnnnnnnnnnnnnnnnnnnnnnnnnnnnnnnnnnnnnnnnnnnnnnnnnnnnnnnnnnnnnnnnnnnnnnnnnnnnnnnnnnnnnnnnnnnnnnnnnnnnnnnnnnnnnnnnnnnnnnnnnnnnnnnnnnnnnnnnnnnnnnnnnnnnnnnnnnnnnnnnnnnnnnnnnnnnnnnnnnnnnnnnnnnnnnnnnnnnnnnnnnnnnnnnnnnnnnnnnnnnnnnnnnnnnnnnnnnnnnnnnnnnnnnnnnnnnnnnnnnnnnnnnnnnnnnnnnnnnnnnnnnnnnnnnnnnnnnnnnnnnnnnnnnnnnnnnnnnnnnnnnnnnnnnnnnnnnnnnnnnnnnnnnnnnnnnnnnnnnnnnnnnnnnnnnnnnnnnnnnnnnnnnnnnnnnnnnnnnnnnnnnnnnnnnnnnnnnnnnnnnnnnnnnnnnnnnnnnnnnnnnnnnnnnnnnnnnnnnnnnnnnnnnnnnnnnnnnnnnnnnnnnnnnnnnnnnnnnnnnnnnnnnnnnnnnnnnnnnnnnnnnnnnnnnnnnnnnnnnnnnnnnnnnnnnnnnnnnnnnnnnnnnnnnnnnnnnnnnnnnnnnnnnnnnnnnnnnnnnnnnnnnnnnnnnnnnnnnnnnnnnnnnnnnnnnnnnnnnnnnnnnnnnnnnnnnnnnnnnnnnnnnnnnnnnnnnnnnnnnnnnnnnnnnnnnnnnnnnnnnnnnnnnnnnnnnnnnnnnnnnnnnnnnnnnnnnnnnnnnnnnnnnnnnnnnnnnnnnnnnnnnnnnnnnnnnnnnnnnnnnnnnnnnnnnnnnnnnnnnnnnnnnnnnnnnnnnnnnnnnnnnnnnnnnnnnnnnnnnnnnnnnnnnnnnnnnnnnnnnnnnnnnnnnnnnnnnnnnnnnnnnnnnnnnnnnnnnnnnnnnnnnnnnnnnnnnnnnnnnnnnnnnnnnnnnnnnnnnnnnnnnnnnnnnnnnnnnnnnnnnnnnnnnnnnnnnnnnnnnnnnnnnnnnnnnnnnnnnnnnnnnnnnnnnnnnnnnnnnnnnnnnnnnnnnnnnnnnnnnnnnnnnnnnnnnnnnnnnnnnnnnnnnnnnnnnnnnnnnnnnnnnnnnnnnnnnnnnnnnnnnnnnnnnnnnnnnnnnnnnnnnnnnnnnnnnnnnnnnnnnnnnnnnnnnnnnnnnnnnnnnnnnnnnnnnnnnnnnnnnnnnnnnnnnnnnnnnnnnnnnnnnnnnnnnnnnnnnnnnnnnnnnnnnnnnnnnnnnnnnnnnnnnnnnnnnnnnnnnnnnnnnnnnnnnnnnnnnnnnnnnnnnnnnnnnnnnnnnnnnnnnnnnnnnnnnnnnnnnnnnnnnnnnnnnnnnnnnnnnnnnnnnnnnnnnnnnnnnnnnnnnnnnnnnnnnnnnnnnnnnnnnnnnnnnnnnnnnnnnnnnnnnnnnnnnnnnnnnnnnnnnnnnnnnnnnnnnnnnnnnnnnnnnnnnnnnnnnnnnnnnnnnnnnnnnnnnnnnnnnnnnnnnnntagctttggtgtcatccccagcactcctctggccatccatacaccactgatgccaaaccagagcattgatgtctccctgcctctcaatactttgggcccagtcatgaagatggaacctctgaataacctccagg

SEQ ID NO: 33291 - DNA, 738 bp, Macaca Mulatta
  misc_feature (1)...(738): n = A,T,C or G
tctatgctgggcagacagagcatgagcacctattcaaggcaactgcagccctntggaagacattgtcctgcgagcaggacagggcagtatctatattcctacagcgactatttttctctgtagagagcctcccttctgttgtagactggactctggctgccccataagccaggccttcatcagattgggagagttgacaagatttgcctcagccctaaaagctggagacacagatgtccagagtgattggagagtgtcctgggggaatgaagttccttccacaaacacagctcagttcttagcaacaaactgtttgtttttctacttgctccacctgcagcctacgctgacctggcctcctgcagacagatagtggagttacctggcgaggcctggtgagagccagtgaacctaagctttgggtggtggtgtctttctggggagtagggcatgtacattcagggagtagccttttgcagaaaaaatctctagggctacagacagttatgtgtgacttctctctactgtgaaaactcccagagtctctttagggattttccctaaggtgcacaccaccaggcacacctcagtcttcttgacccagagcctaaaaactgtttccactgggttccaccagtcccagcaaaatcctctttgtatttattttgctaagttattggtggttttgcttacatctcatgattgatataataccagagttctatagcgttatcttgc

SEQ ID NO: 33292 - DNA, 3996 bp, Macaca Mulatta
  misc_feature (1)...(3996): n = A,T,C or G
aggggagcgcatcttggccagtggctccgtgcagctgcctcgnnnnnnnnnnnnnnnnnnnnnnnnnnnnnnnnnnnnnnnnnnnnnnnnnnnnnnnnnnnnnnnnnnnnnnnnnnnnnnnnnnnnnnnnnnnnnnnnnnnnnnnnnnnnnnnnnnnnnnnnnnnnnnnnnnnnnnnnnnnnnnnnnnnnnnnnnnnnnnnnnnnnnnnnnnnnnnnnnnnnnnnnnnnnnnnnnnnnnnnnnnnnnnnnnnnnnnnnnnnnnnnnnnnnnaggtacatctgggagaaggacggggccaccctgggcgtggagagcaatccccgtatccgcctggacagaaacggctccctgcacatctcacagacgtggtcgggagacatcggcacgtacacctgccgggtgatctcagcggggggcaacgactctcgcagtgcccacctgcgagtcaggnnnnnnnnnnnnnnnnnnnnnnnnnnnnnnnnnnnnnnnnnnnnnnnnnnnnnnnnnnnnnnnnnnnnnnnnnnnnnnnnnnnnnnnnnnnnnnnnnnnnnnnnnnnnnnnnnnnnnnnnnnnnnnnnnnnnnnnnnnnnnnnnnnnnnnnnnnnnnnnnnnnnnnnnnnnnnnnnnnnnnnnnnnnnnnnnnnnnnnnnnnnnnnnnnnnnnnnnnnnnnnnnnnnnnnnnnnnnnnnnnnnnnnnnnnnnnnnnnnnnnnnnnnnnnnnnnnnnnnnnnnnnnnnnnnnnnnnnnnnnnnnnnnnnnnnnnnnnnnnnnnnnnnnnnnnnnnnnnnnnnnnnnnnnnnnnnnnnnnnnnnnnnnnnnnnnnnnnnnnnnnnnnnnnnnnnnnnnnnnnnnnnnnnnnnnnnnnnnnnnnnnnnnnnnnnnnnnnnnnnnnnnnnnnnnnnnnnnnnnnnnnnnnnnnnnnnnnnnnnnnnnnnnnnnnnnnnnnnnnnnnnnnnnnnnnnnnnnnnnnnnnnnnnnnnnnnnnnnnnnnnnnnnnnnnnnnnnnnnnnnnnnnnnnnnnnnnnnnnnnnnnnnnnnnnnnnnnnnnnnnnnnnnnnnnnnnnnnnnnnnnnnnnnnnnnnnnnnnnnnnnnnnnnnnnnnnnnnnnnnnnnnnnnnnnnnnnnnnnnnnnnnnnnnnnnnnnnnnnnnnnnnnnnnnnnnnnnnnnnnnnnnnnnnnnnnnnnnnnnnnnnnnnnnnnnnnnnnnnnnnnnnnnnnnnnnnnnnnnnnnnnnnnnnnnnnnnnnnnnnnnnnnnnnnnnnnnnnnnnnnnnnnnnnnnnnnnnnnnnnnnnnnnnnnnnnnnnnnnnnnnnnnnnnnnnnnnnnnnnnnnnnnnnnnnnnnnnnnnnnnnnnnnnnnnnnnnnnnnnnnnnnnnnnnnnnnnnnnnnnnnnnnnnnnnnnnnnnnnnnnnnnnnnnnnnnnnnnnnnnnnnnnnnnnnnnnnnnnnnnnnnnnnnnnnnnnnncagggtaccggatctcctgggaggagtacaaccgaaccaacacccgtgtgacccactacctgcccaacgtgaccctggagtaccgtgtcacgggcctcaccgcacttaccacctacaccatcgaggtggccgccatgacctcgaagggccagggccaagtgtccgcctccaccatctcctctggggtgcccccagnnnnnnnnnnnnnnnnnnnnnnnnnnnnnnnnnnnnnnnnnnnnnnnnnnnnnnnnnnnnnnnnnnnnnnnnnnnnnnnnnnnnnnnnnnnnnnnnnnnnnnnnnnnnnnnnnnnnnnnnnnnnnnnnnnnnnnnnnnnnnnnnnnnnnnnnnnnnnnnnnnnnnnnnnnnnnnnnnnnnnnnnnnnnnnnnnnnnnnnnnnnnnnnnnnnnnnnnnnnnnnnnnnnnnnnnnnnnnnnnnnnnnnnnnnnnnnnnnnnnnnnnnnnnnnnnnnnnnnnnnnnnnnnnnnnnnnnnnnnnnnnnnnnnnnnnnnnnnnnnnnnnnnnnnnnnnnnnnnnnnnnnnnnnnnnnnnnnnnnnnnnnnnnnnnnnnnnnnnnnnnnnnnnnnnnnnnnnnnnnnnnnnnnnnnnnnnnnnnnnnnnnnnnnnnnnnnnnnnnnnnnnnnnnnnnnnnnnnnnnnnnnnnnnnnnnnnnnnnnnnnnnnnnnnnnnnnnnnnnnnnnnnnnnnnnnnnnnnnnnnnnnnnnnnnnnnnnnnnnnnnnnnnnnnnnnnnnnnnnnnnnnnnnnnnnnnnnnnnnnnnnnnnnnnnnnnnnnnnnnnnnnnnnnnnnnnnnnnnnnnnnnnnnnnnnnnnnnnnnnnnnnnnnnnnnnnnnnnnnnnnnnnnnnnnnnnnnnnnnnnnnnnnnnnnnnnnnnnnnnnnnnnnnnnnnnnnnnnnnnnnnnnnnnnnnnnnnnnnnnnnnnnnnnnnnnnnnnnnnnnnnnnnnnnnnnnnnnnnnnnnnnnnnnnnnnnnnnnnnnnnnnnnnnnnnnnnnnnnnnnnnnnnnnnnnnnnnnnnnnnnnnnnnnnnnnnnnnnnnnnnnnnnnnnnnnnnnnnnnnnnnnnnnnnnnnnnnnnnnnnnnnnnnnnnnnnnnnnnnnnnnnnnnnnnnnnnnnnnnnnnnnnnnnnnnnnnnnnnnnnnnnnnnnnnnnnnnnnnnnnnnnnnnnnnnnnnnnnnnnnnnnnnnnnnnnnnnnnnnnnnnnnnnnnnnnnnnnnnnnnnnnnnnnnnnnnnnnnnnnnnnnnnnnnnnnnnnnnnnnnnnnnnnnnnnnnnnnnnnnnnnnnnnnnnnnnnnnnnnnnnnnnnnnnnnnnnnnnnnnnnnnnnnnnnnnnnnnnnnnnnnnnnnnnnnnnnnnnnnnnnnnnnnnnnnnnnnnnnnnnnnnnnnnnnnnnnnnnnnnnnnnnnnnnnnnnnnnnnnnnnnnnnnnnnnnnnnnnnnnnnnnnnnnnnnnnnnnnnnnnnnnnnnnnnnnnnnnnnnnnnnnnnnnnnnnnnnnnnnnnnnnnnnnnnnnnnnnnnnnnnnnnnnnnnnnnnnnnnnnnnnnnnnnnnnnnnnnnnnnnnnnnnnnnnnnnnnnnnnnnnnnnnnnnnnnnnnnnnnacaggctgaagcccttcacgtcctacaagttccgagtgaaggcgaccaatgacattggcgacagcgagtttagcgaggagtcggagtcgctgaccaccctgcaggcnnnnnnnnnnnnnnnnnnnnnnnnnnnnnnnnnnnnnnnnnnnnnnnnnnnnnnnnnnnnnnnnnnnnnnnnnnnnnnnnnnnnnnnnnnnnnnnnnnnnnnnnnnnnnnnnnnnnnnnnnnnnnnnnnnnnnnnnnnnnnnnnnnnnnnnnnnnnnnnnnnnnnnnnnnnnnnnnnnnnnnnnnnnnnnnnnnnnnnnnnnnnnnnnnnnnnnnnnnnnnnnnnnnnnnnnnnnnnnnnnnnnnnnnnnnnnnnnnnnnnnnnnnacctgaacaagcacaggcggtacgagatacggatgagcgtgtacaacgctgtgggcgaggggccctccagcaccccgcaggaggtcttnnnnnnnnnnnnnnnnnnnnnnnnnnnnnnnnnnnnnnnnnnnnnnnnnnnnnnnnnnnnnnnnnnnnnnnnnnnnnnnnnnnnnnnnnnnnnnnnnnnnnnnnnnnnnnnnnnnnnnnnnnnnnnnnnnnnnnnnnnnnnnnnnnnnnnnnnnnnnnnnnnnnnnnnnnnnnnnnnnnnnnnnnnnnnnnnnnnnnnnnnnnnnnnnnnnnnnnnnnnnnnnnnnnnnnnnnnnnnnnnnnnnnnnnnnnnnnnnnnnnnnnnnnnnnnnnnnnnnnnnnnnnnnnnnnnnnnnnnnnnnnnnnnnnnnnnngcagcccccagtgctcccagctccgtcaagttcagtgagctgaccacaacctcggtgaatgtgtcctgggaagccccacagttccccaatggcatcctggagggctatcggctggtgtacgagccctgcagccccgtggatgg

SEQ ID NO: 33293 - DNA, 343 bp, Macaca Mulatta
tgccgcgcgtgcatcgggcgcgcggggcaccccggcagcagggccccgggaccggcacccgcgacgtcttccagaagagccgtttcgccccgcgcggcgccccgcactttcgtttcatcatcgccgggcggcaggctgggaggcgctgccgcgggcgccttttccagactgcattccccgcgccgtacgggcctagcccggcctcccgctacgtgcagaagctgcccatgatcggccgcaccagccgccccgcccgccggtgggcgctctcggactactcgctgtacttgccgctctgagtaggtgagcgcttccatctttgtaaataaatcccgcccccgga

SEQ ID NO: 33294 - DNA, 176 bp, Macaca Mulatta
  misc_feature (1)...(176): n = A,T,C or G
nagtgttctaggacagatcagacattttgtaatgatgcctgaaataaacactgaccacctcgacaagcaacaggttcaactcctggcagagatgtgtatccttattgacgaaaatgacaataaaattggggctgagaccaagaagaattgtcacctgaatgagaacattgagaaag

SEQ ID NO: 33295 - DNA, 349 bp, Macaca Mulatta
cagaagccagaagtaccatggcttctgacctagagagtagcctcacctccatagactggcttccccagctgaccctccgagctaccattgagaagcttggaagtgcctcccaggctgggcctcccgggagcagccgcaagtgttcaccaggctcacccacagatcctaatgccaccctgagcaaagatgaggcagcagttcaccaggatggcaagccacgatacagctatgccactctcatcacctatgccatcaactcctctccagccaagaagatgactctcagcgagatttaccgctggatctgtgataacttcccctattacaagaatgctggcattggttggaa

SEQ ID NO: 33296 - DNA, 526 bp, Macaca Mulatta
cttaaattctgtcataacgcgtttgaaaataggtgagcttgagaaagaaacaacacctttgattaaagatgcagatagttcaatatcagtcttagacatccatagtcaaaaagcacaaatagaggaacccggtcctccagaaatggaaacttctcttgagtcttctgagatggcaaaagatctctctttaaaaactgctttatctaccactgagtcgtgtaccatgaaagttgaagaaaagtctcccaaaactaagaaggataagcgcccaccaatcctagaatgtcttgaaaagttagagaagtccaaaaagacttttcttgataaggacacacaaagattgagtccaataccagaataagttccaaagagtactctagagtcagagggggggggctctcctgaggcagctgaaacttctccaccatctaatatgattgaccactgtgagaaactagcttcagaaaaagaattggtagaatgccagagtacaggtactgttggtggtcagtctgtgaataaagta

SEQ ID NO: 33297 - DNA, 1074 bp, Macaca Mulatta
  misc_feature (1)...(1074): n = A,T,C or G
gggggctcttttcctccctgactgtccggagataggcagccatcatgaacgacaccgtaactatccgcactagaaagttcatgaccaaccgactacttcagaggaaacaaatggtcattgacgtccttcaccctgggaaggcaacagtgcctaagacagaaattcgggaaaaactagccaaaatgtacaagaccacaccggatgtcatctttgtatttggattcagaactcattttggtggtggcaagacaactggctttggcatgatttatgactccctggattatgcaaagaaaaatgaacccaaacatagacttgcaagacatggcctgtatgagaagaaaaagacctcaagaaagcaacgaaaggaacgcaagaacagaatgaagaaagtcagggggactgcaaaggccaatgttggtgctggcaaaaagtgagctggagattggatcacagccgaaagagtaaaggtgctgcagtaaaggctacctgtgtccattttggatttttcacaagcagattaataaactaaaaactttcatgtaacanncnaaccaaaccaccaaaaactatccttgtcgggccgccttcggcccctcgagaaagcttttcttagaacacattcgttttgggcgcgcggggccccggtagggtaaagtggaaacatgggtccatagccttgtttccccataggaaaatcctgtggtctcatgaactaaggtgcctggggaattctcctcccaaataaaaaaaaaccgcccccgggccgggcaaaccgaaaccggtttcttgaaaccaaattccccaagaatggggaattttcctggaagggtcccaatttacccgggggaatcctatattcaaacccaggggaaagtctcccaaagccgcggaggccctcccaaaatatatccaaaatttatagacccccccccgcgccgcccctttggcaccaacttcctatgcgggacaaaatatatccggtgtttggtataatatttctacctatttgaagcacatttattcgcgcgccgcaaaatattgtaaaaaagcgccccattctcgccataatag

SEQ ID NO: 33298 - DNA, 659 bp, Macaca Mulatta
  misc_feature (1)...(659): n = A,T,C or G
ggcgagccctttgaccccacgtttgtgctgagtcgctcagtgcccaacattatctgttccgtgctcttcggcagccgcttcgactacgatgatgagcgtctgctcaccgttatccgccttatcaatgacaacttccaaatcatgagcagcccctggggcgagnnnnnnnnnnnnnnnnnnnnnnnnnnnnnnnnnnnnnnnnnnnnnnnnnnnnnnnnnnnnnnnnnnnnnnnnnnnnnnnnnnnnnnnnnnnnnnnnnnnnnnnnnnnnnnnnnnnnnnnnnnnnnnnnnnnnnnnnnnnnnnnnnnnnnnnnnnnnnnnnnnnnnnnnnnnnnnnnnnnnnnnnnnnnnnnnnnnnnnnnnnnnnnnnnnnnnnnnnnnnnnnnnnnnnnnnnnnnnnnnnnnnnnnnnnnnnnnnnnnnnnnnnnnnnnnnnnnnnnnnnnnnnnnnnnnnnnnnnnnnnnnnnnnnnnnnnnnnnnnnnnnnnnnnnnnnnnnnnnnnnnnnnnnnnnnnnnnnnnnnnnnnnnnnnnnnnnnnnnnnnnnnnnnnnnnnnnnnnnnnnnnnnnnnnnnnnnnnnnnnnnnnnnnnnnnnnnnnnnnnnnnnnnnnnnaccgcctcactcgggacacagcctttcctggcttgctgatacccaag

SEQ ID NO: 33299 - DNA, 674 bp, Macaca Mulatta
  misc_feature (1)...(674): n = A,T,C or G
gggggcgcccagcgtcctcactccctcgcgttcgctgacgaggaagctggtgccttcggaatatgatggcaaatcaccttgtaaagcctgacaatagaaattgcaagaggccaagagaattggagtctccagtgccagatagtccacagctgtcctctcttggaaaatcagattcatctttctctgaaagttctggactgttttataaagatgaagccttggagaaagatttaaatgatgtgagcaaggaaattaatctaatgttgtctacctatgcaaagcttttgagtgagagagcagcagtagatgcatcttacattgatgagatagatgaactcttcaaagaagccaatactattgaaaactttctaatacaaaaaagagagttcctgcgacagaggtttacagtgattgcaaacacattacacagataaaatatatacttgaaataagctgataatttaaatctattattgttataatgaaagaatgacatttatgctttgaaagctctggagttataaaganatgtatattttgatagagaggggaactctttgaattctagattaaagggaacttacattccttatgttatatnnatgtcgtgtatgtctaactgacattactgactactcctttctttgaggtcaaattagtacattaaaatgtaa

SEQ ID NO: 33300 - DNA, 1858 bp, Macaca Mulatta
gtcccttcgccgtcgccagagatttcggtgtcgctgcgaagcgtcgcgcgcgctgccgtatccgggttcggcccgcaggcgtcttacagcccagcgccatcttcatcgagcgccatggccgtagcctgcgggccgggagcggccgggcactgcttgcttctcggcctgcatttgtttctgctcaccgcgggccctgccctgggctggaacgaccctgacagaatgttgctgcgggacgtaaaagctcttaccctccactatgaccgctataccacctcccgcaggctggatcccatcccacagctgaaatgtgttggaggcacagctggttgtgattcttataccccaaaagtcatacagtgtcagaacaaaggctgggatgggtatgatgtacagtgggaatgtaagaccgacttagatattgcatacaaatttggaaaaactgtggtgagctgtgaaggctatgagtcctctgaagaccagtatgtactaagagggtcttgtggcttggagtacaatttagattatacagaacttggcctgcagaaactgaaggagtctggaaagcagcacggctttgcctctttctctgattattattataagtggtactcggcggattcctgtaacatgggtggattgattaccatcgtggtgctccttgggatcgcctttgtagtctataagctgttcctgagtgatgggcagtattctcctccaccgtattctgagtatcctccattttcccaccgttaccagagattcaccaactcagcaggacctcctcccccaggctttaagtctgagttcacaggaccgcagaatactggccatggtgcaacttctggttttggcagtgcttttacaggacaacaaggatatgaaaattcaggaccagggttctggactggtttgggaactggtggaatactaggatatttgtttggcagcaatagagcggcaacacccttctccgactcgtggtactacccatcctatcctccctcctaccctggcacatggaatagagcttactcaccccttcgtggaggcttgggcggctattcggcatgttccaactcagacacaaaaaccagaactgcatcaggatatggtggtaccaggagacgataaagtagaaagttggagtcaaacattggatgcagaaattttggatttttcgtcactttctctttagaaaaagtgctacctgttaacaattgggaaagggggatattcaaaagttctgtggtgttttgtcctgtatagctttttgtattctattatttgaggctaaaagttgtgtgacaaaatacttatgtgttgtatgtcagtgtaacatgcagatgtatattgcagtttttgaaagtgatcattactgtggaatgctaaaaatacattaatttctaaaacctgtgatgccctaggaagcattaagaatgaaggtgttgtactaatagaaactaagtacagaaaatttcagtcttaggtggttgtagctgatgagtaattacctcatagagactttaatattctatttgatattatattatttgatgtttgctgttcttcaaacatttaaatcaggctttggactaattatgctaatttgtgagttctgatcacttttgagctctgaaactttgaatcattcagtggtggtgatgggccctcggggtaagtgagtattacctttctgtaggaaaaggtagaaaataaagctcctagaaggttgttgtgaatgactgtgtgctggcagaaatgcttgaaaactctatattcagttcataagaggtaaaggtcaaatttttcaaaaaaagtctttttaataacaaaagcatgcagttctcctgtgaaa

SEQ ID NO: 33301 - DNA, 904 bp, Macaca Mulatta
gtgaaacagcaagaggtagccccctctcccgtcctcatgctccctctcagtcccctggattgccccagtcctgtgaccatgttgccctgaagaagaccatcttcatgactgctcattgtagatggagaattcaacataaatacagcaagaaaatgtgtttgggcttctgaagagttgtctgcttaccttaacatgtttacttttttgaacttgtactgtataggctgttggtgaaatttttaagaagttgtaatgaactcaaaattgaggccagagcttgctttcccttttcccaaacaaaattggttttctgcacaagcgatgctaatgatgtgttcagtgtaacttgcagattggcaataagatacccgctacaaactgtgattggatgcaaaatctcttagctttttcacaaatgttggccctgcctagatgttgtgaagcttcccagaatgcatagtcattcactgtagatctcttattgaaatgcgtattttatttaatgtaagtatattttggaacagatttgtaatttgtacaatttaatgctttaattattttttctattctcatttagtttgtattttcattgtatagagcagacagaaagatgttgggtcaagcaactattgaagagaaatacaaagaaaatatgaaaggcacattattcattttgtccaaatgcaatgagaatctcactcttaaaaatcagctcttgctttcaggtccagatgtggcgaggacgttttggagccctttgaagctagatttggatgatcaaaacaaaaaggcagggagcccattgtaacatgctgcccagaggaaactggctggaacctggaccagctggggttgatgtttctgcagtggtcatgtgattgtgacctggtagctacttaccaga

SEQ ID NO: 33302 - DNA, 3260 bp, Macaca Mulatta
  misc_feature (1)...(3260): n = A,T,C or G
ctggaccaaagcagctgcagccgcctcctcgttcctctcctggacgggacagaatgtggcgtggagaannnnnnnnnnnnnnnnnnnnnnnnnnnnnnnnnnnnnnnnnnnnnnnnnnnnnnnnnnnnnnnnnnnnnnnnnnnnnnnnnnnnnnnnnnnnnnnnnnnnnnnnnnnnnnnnnnnnnnnnnnnnnnnnnnnnnnnnnnnnnnnnnnnnnnnnnnnnnnnnnnnnnnnnnnnnnnnnnnnnnnnnnnnnnnnnnnnnnnnnnnnnnnnnnnnnnnnnnnnnnnnnnnnnnnnnnnnnnnnnnnnnnnnnnnnnnnnnnnnnnnnnnnnnnnnnnnnnnnnnnnnnnnnnnnnnnnnnnnnnnnnnnnnnnnnnnnnnnnnnnnnnnnnnnnnnnnnnnnnnnnnnnnnnnnnnnnnnnnnnnnnnnnnnnnnnnnnnnnnnnnnnnnnnnnnnnnnnnnnnnnnnnnnnnnnnnnnnnnnnnnnnnnnnnnnnnnnnnnnnnnnnnnnnnnnnnnnnnnnnnnnnnnnnnnnnnnnnnnnnnnnnnnnnnnnnnnnnnnnnnnnnnnnnnnnnnnnnnnnnnnnnnnnnnnnnnnnnnnnnnnnnnnnnnnnnnnnnnnnnnnnnnnnnnnnnnnnnnnnnnnnnnnnnnnnnnnnnnnnnnnnnnnnnnnnnnnnnnnnnnnnnnnnnnnnnnnnnnnnnnnnnnnnnnnnnnnnnnnnnnnnnnnnnnnnnnnnnnnnnnnnnnnnnnnnnnnnnnnnnnnnnnnnnnnnnnnnnnnnnnnnnnnnnnnnnnnnnnnnnnnnnnnnnnnnnnnnnnnnnnnnnnnnnnnnnnnnnnnnnnnnnnnnnnnnnnnnnnnnnnnnnnnnnnnnnnnnnnnnnnnnnnnnnnnnnnnnnnnnnnnnnnnnnnnnnnnnnnnnnnnnnnnnnnnnnnnnnnnnnnnggcggtacggcgaggagtatggcaacctcacctgcccagacatcactttcacctacttccagcctaagccgcggcaggcctgggtgtgggccgctgtgcgtgggccctgctcggtgagctgtggggcaggncagggctgcgctgggtaaactacagctgcctggaccaggccaggaaggagttggtagagactgcccggtgccaagggagccagcagccaccagcgtggccagaggcctgcatgctcgaaccttgccctccnnnnnnnnnnnnnnnnnnnnnnnnnnnnnnnnnnnnnnnnnnnnnnnnnnnnnnnnnnnnnnnnnnnnnnnnnnnnnnnnnnnnnnnnnnnnnnnnnnnnnnnnnnnnnnnnnnnnnnnnnnnnnnnnnnnnnnnnnnnnnnnnnnnnnnnnnnnnnnnnnnnnnnnnnnnnnnnnnnnnnnnnnnnnnnnnnnnnnnnnnnnnnnnnnnnnnnnnnnnnnnnnnnnnnnnnnnnnnnnnnnnnnnnnnnnnnnnnnnnnnnnnnnnnnnnnnnnnnnnnnnnnnnnnnnnnnnnnnnnnnnnnnnnnnnnnnnnnnnnnnnnnnnnnnnnnnnnnnnnnnnnnnnnnnnnnnnnnnnnnnnnnnnnnnnnnnnnnnnnctggatgccacctctgcaggggaggaggctccctccccatggggcagcatcaggatgggggctcaagctgcacacgtgtggacccctctggcagggccgtgctccgtctcctgcgggcgaggtgatggagctgcgtttcctgtgcatggacgctgccctcanggtgcctgtccaggaggagctgtgtggcctggcaagcaagcctggaagccggcgggaggtctgccaggnnnnnnnnnnnnnnnnnnggtggcagtacaagctggcggcctgcagcgtgagctgtgggggaggggtcatgcggaggatcctgtattgtgcccgggcccatggggaggatgaggaggaggagatcctgttggacacccaatgccaggggctgcctcgcccagacccccaggaggcctgcagcctggagccctgcccacctaggtnnnnnnnnnnnnnnnnnnnnnnnnnnnnnnnnnnnnnnnnnnnnnnnnnnnnnnnnnnnnnnnnnnnnnnnnnnnnnnnnnnnnnnnnnnnnnnnnnnnnnnnnnnnnnnnnnnnnnnnnnnnnnnnnnnnnnnnnnnnnnnnnnnnnnnnnnnnnnnnnnnnnnnnnnnnnnnnnnnnnnnnnnnnnnnnnnnnnnnnnnnnnnnnnnnnnnnnnnnnnnnnnnnnnnnnnnnnnnnnnnnnnnnnnnnnnnnnnnnnnnnnnnnnnnnnnnnnnnnnnnnnnnnnnnnnnnnnnnnnnnnnnnnnnnnnnnnnnnnnnnnnnnnnnnnnnnnnnnnnnnnnnnnnnnnnnnnnnnnnnnnnnnnnnnnnnnnnnnnnnnnnnnnnnnnnnnnnnnnnnnnnnnnnnnnnnnnnnnnnnnnnnnnnnnnnnnnnnnnnnnnnnnnnnnnnnnnnnnnnnnnnnnnnnnnnnnnnnnnnnnnnnnnnnnnnnnnnnnnnnnnnnnnnnnnnnnnnnnnnnnnnnnnnnnnnnnnnnnnnnnnnnnnnnnnnnnnnnnnnnnnnnnnnnnnnnnnnnnnnnnnnnnnnnnnnnnnnnnnnnnnnnnnnnnnnnnnnnnnnnnnnnnnnnnnnnnnnnnnnnnnnnnnnnnnnnnnnnnnnnnnnnnnngggacatgttgttgctttggggccggctcacctggaggaagatgtgcaggaagctattgggcatgactttcagctccaagaccaacacgctggtggtgaagcagcgctgcaggcagcttttaggcggggtgctgctgcggtatgggagccagcttgctcctgaaaccttctacagagnnnnnnnnnnnnnnnnnnnnnnnnnnnnnnnnnnnnnnnnnnnnnnnnnnnnnnnnnnnnnnnnnnnnnnnnnnnnnnnnnnnnnnnnnnnnnnnnnnnnnnnnnnnnnnnnnnnnnnnnnnnnnnnnnnnnnnnnnnnnnnnnnnnnnnnnnnnnnnnnnnnnnnnnnnnnnnnnnnnnnnnnnnnnnnnnnnnnnnnnnnnnnnnnnnnnnnnnnnnnnnnnnnnnnnnnnnnnnnnnnnnnnnnnnnnnnnnnnnnnnnnnnnnnnnnnnnnnnnnnnnnnnnnnnnnnnnnnnnnnnnnnnnnnnnnnnnnggccagtactggaccctccaatcatgggtaccggaggggcaggaccctcagtcctggaagggaaaggaagggacctg

SEQ ID NO: 33303 - DNA, 195 bp, Macaca Mulatta
ggagacaagatccctggctcagccgtgctaatcttcaacgttcatgtcattgacttccacaaccctgcggatgtggtggaaatcaggacactgtctcggccatcggagacctgcaatgagaccaccaagcttggggactttgttcgataccattacaactgttctttgctggacggcacccagctcttcacctcg

SEQ ID NO: 33304 - DNA, 237 bp, Macaca Mulatta
ttctccatagccgtcttcgggcccatcgtcaacgagggctacgtgaaacaccgacagcggccccgagttgcgctgcgtgttcaacgggaatgcgggcgcctgccgcttcggcgtcgcgctgggcctcggagccttcctcgcctgcgccgccttcctgttgctcgatgtgcgcttccagcagatcagcagcgtccgcgaccgccggcgcgctgtgttgctggacctgggcttctcagg

SEQ ID NO: 33305 - DNA, 675 bp, Macaca Mulatta
  misc_feature (1)...(675): n = A,T,C or G
cctggagtgggcggccagcttcgtggaggtgatggccgtggctgccanagaatgtggccttgctggcttacaaccgctggtaccaggacctagacaagattgatcaaaaagatttgatgcacaaggtcaagactgaactgtgagggctctggggagagcctgggaactttcatcccccactgaaaatggatcacaccccaccgcagcccaggactgaataagccatgctcgcccaccaggcctctttctgacccctcgtgtatcaagtgtcttttccctccagtgtgggtccaggtggcctactgtctgcctatcttaagggtccacacggtggctgctgcttttttttaagggggaaagtaagaaaagggaaggaaatccaagccagtatatttgttttatttatttctttttaagaagaaaaaagttcgtcttcacaaggtgcttcagacttggttttttagctagaaaccagaagactgcgggagggaatgtaaggcagagaactgtgagtctaattttattactgtttttttcactacctactcccacaatggacaatcagttgaggcaaactacaataaaacatctacaaccagatggttacaaataaagtagaagggaagatcagaaaacctaagaactgatcatagctcctgtttactgttgacttgc

SEQ ID NO: 33306 - DNA, 1041 bp, Macaca Mulatta
  misc_feature (1)...(1041): n = A,T,C or G
cagcccctgcgaggaattggcatccttaagcaagccatagacaagatgcagatgaatacaaaccagctgacctcaatacatgctgatctctgccagnnnnnnnnnnnnnnnnnnnnnnnnnnnnnnnnnnnnnnnnnnnnnnnnnnnnnnnnnnnnnnnnnnnnnnnnnnnnnnnnnnnnnnnnnnnnnnnnnnnnnnnnnnnnnnnnnnnnnnnnnnnnnnnnnnnnnnnnnnnnnnnnnnnnnnnnnnnnnnnnnnnnnnnnnnnnnnnnnnnnnnnnnnnnnnnnnnnnnnnnnnnnnnnnnnnnnnnnnnnnnnnnnnnnnnnnnnnnnnnnnnnnnnnnnnnnnnnnnnnnnnnnnnnnnnnnnnnnnnnnnnnnnnnnnnnnnnnnnnnnnnnnnnnnnnnnnnnnnnnnnnnnnnnnnnnnnnnnnnnnnnnnnnnnnnnnnnnnnnnnnnnnnnnnnnnnnnnnnnnnnnnnnnnnnnnnnnnnnnnnnnnnnnnnnnnnnnnnnnnnnnnnnnnnnnnnnnnnnnnnnnnnnnnnnnnnnnnnnnnnnnnnnnnnnnnnnnnnnnnnnnnnnnnnnnnnnnnnnnnnnnnnnnnnnnnnnnnnnnnnnnnnnnnnnnnnnnnnnnnnnnnnnnnnnnnnnnnnnnnnnnnnnnnnnnnnnnnnnnnnngatagaagatggtgagatttttgcaagtattaaccagaaggatggtatggtcagtttccatgataaccctgaaaaatataataacccagccatgcttcataatattgatcaggagnagatgctgaagtgcatagagctggatgagcggctgaaagccatggaccaggagatcacagtgaaccctcagtttgtacaaaagnagagtatgggctcacaagaagatgattcaggaaacaaaccatccagttattcttgaaactaacatccatcctgagctaaacaagagaaactaccatcttggccagtggcaagtgttcggagggcagcagagaggaccaagcctgtgtcacctggagactaagaa

SEQ ID NO: 33307 - DNA, 2145 bp, Macaca Mulatta
  misc_feature (1)...(2145): n = A,T,C or G
gagtacacatccagatgccggcccagcaaccacaggggatccctctgggagactaaaagtacaggttctggggcccaggttgaggccgaccaaccctgagcctcaggccaggggaatggcagcccccttggagccccaggaccagacctctggggagggagaagggcttctgattgtcaaagtggaagattcctcctgggaacaggaatctgcccagcatgaggacagcagggattccgaagcctgccgccagcgcttccggcagttctgctatggggatgtgcatgggcctcatgaggccttcagccagctctgggagctctgctgccgctggctgcggcccgagttgcgcaccaaggagcagatcctggagctgctggtgctggagcagttcctgacggtgcttccaggggagatccagggctgggtgcgtgagcagcacccaggaagtggcgaggaggctgtcgccttggtggagnnnnnnnnnnnnnnnnnnnnnnnnnnnnnnnnnacaggatgtgccctcggaggaggcggaacccgaggctgcaggccagggatctcaggccaaggggcctcccccgatggtgggggcacggaggcggccatctgttccccaagagcagcacagccatagcnnnnnnnnnnnnnnnnnnnnnnnnnnnnnnnnnnnnnnnnnnnnnnnnnnnnnnnnnnnnnnnnnnnnnnnnnnnnnnnnnnnnnnnnnnnnnnnnnnnnnnnnnnnnnnnnnnnnnnnnnnnnnnnnnnnnnnnnnnnnnnnnnnnnnnnnnnnnnnnnnnnnnnnnnnnnnnnnnnnnnnnnnnnnnnnnnnnnnnnnnnnnnnnnnnnnnnnnnnnnnnnnnnnnnnnnnnnnnnnnnnnnnnnnnnnnnnnnnnnnnnnnnnnnnnnnnnnnnnnnnnnnnnnnnnnnnnnnnnnnnnnnnnnnnnnnnnnnnnnnnnnnnnnnnnnnnnnnnnnnnnnnnnnnnnnnnnnnnnnnnnnnnnnnnnnnnnnnnnnnnnnnnnnnnnnnnnnnnnnnnnnnnnnnnnnnnnnnnnnnnnnnnnnnnnnnnnnnnnnnnnnnnnnnnnnnnnnnnnnnnnnnnnnnnnnnnnnnnnnnnnnnnnnnnnnnnnnnnnnnnnnnnnnnnnnnnnnnnnnnnnnnnnnnnnnnnnnnnnnnnnnnnnnnnnnnnnnnnnnnnnnnnnnnnnnnnnnnnnnnnnnnnnnnnnnnnnnnnnnnnnnnnnnnnnnnnnnnnnnnnnnnnnnnnnnnnnnnnnnnnnnnnnnnnnnnnnnnnnnnnnnnnnnnnnnnnnnnnnnnnnnnactgcggcaagagcttctcgctgcgctcctacctgtctggaccatcggcgtgtgcacaccggtgagcggccctttggctgcggagagtgcgacaagagcttcaagcaccgtgcgcacctcatcgcgcatcagagcctgcacgccaagatggcccagcccgtggggtgagcagccagcttggccggaaacttgggggaggcccagccacggcacatcctacttcattcaccactgggactcttcttctatttgtggccacctcctgggctgtccgagggaccccagggtaccccacactcggagctcgcctgccctgctcggctctgaggacttgcccagcactcaaagggaacggaagcccccctcccgtcccctgatcttgtcgtctttcccccttctgcgcctagcgtttctcttcccctctagtttctggagccccaacgcattcctgacaggggcagcagggtggcgaggactcaggtctaggtcccttcccagaagcccccgagcctcatttgactgtgtggctctttggcccccaccctctggggtgggtccatgagtcaggcctctgccctgccaacctgtgcctttcagtgggcacggaggactggccttggcccccagggggttgttgggctttgggacggacagtcagcccacacctgtgggaccacgggtcttagggcgcaggggctttctggcccccacccactcccgtttccaggccatgaccactctgccctgtcctggccacacggactcggcctgcccttgccctcggtctacttgccctaacatgaggttctgagagccacttgcc

SEQ ID NO: 33308 - DNA, 676 bp, Macaca Mulatta
ggccccccggtccccagtggtcaatgttactttaaaacccagggtcattgcccctcctcccattcgactgcctcttccacccctatcagactccaacaactgacctgatctctctgtcttcaggatacgcgggagtatgaagtttccatctgaaccccaagactacagctgcaggagccaggacgccccttccctcctcattcgggccgggggaagtacgggacccggtctctgcctcctggctgccctcctccctggctgtgtaaatattctccccgtcccatgagggggctttgatggccctggagatcctacagtaaataaaccagcatcctgccgcccaaagccgcctcttctcagttgccaaacgagggacctgccccccaccctactggcttttggattctgggaggggaactctgccccctgcaaatcttgcggcccctcctgcacagggcacccctcaaggactgcccccgatagctctactgttcccttgaaggcgcccccctcccagatgccctggccctaggtctgactccagccaggagggtcagaagaaggatgaaggggagagctgagacaaggccttgcccccttcctgccatctccccaacccacggtctctccacctttgcttctgaattcttgtttttgagcaataaacagaaaatca

SEQ ID NO: 33309 - DNA, 774 bp, Macaca Mulatta
ggggccggaagtggcgtaacgtccggtcaaggcagccatctcgccgtgagacagcaggtgtcggagctggagctgcaggcgcagccgtgcgatgttgtcctccgtagccatgtattcggctcctggcagagacttggggatggagccgcacggagccgcgggccctttgcagctgcgattttcgccctacgctttcaacggaggtactgtactggcaattgctggagaagattttgcaattgttgcttctgatactcgactgagtgaagggttttcaattcatacccgggatagccccaaatgttacaaattaacagacaaaacagtcattggatgcagtggttttcatggagactgccttaccctgacaaagattattgaagcaagactaaagatgtataagcattccaataataaggccatgactacgggggcaattgctgcgatgctgtctacgatcctgtattcaaggcgcttctttccatactatgtttacaacatcatcggtggacttgatgaagaaggaaagggggctgtatacagctttgacccagtagggtcttaccagagagactccttcaaggctggaggctcagcaagtgccatgctacagcccctgcttgacaaccaggttggtttttaagaacatgcagaatgtggaagcatgtcccgcctgtccttggacagagccatgcggcttggtgaaaaaaggcctttattttccgccggctgagaagagacgtgttacactgggggaaacccgctcccgaatct

SEQ ID NO: 33310 - DNA, 757 bp, Macaca Mulatta
gcaagcaaagcagcaagcatgaaccttaagcactgtgctttaaacgtcctgaaaaatgagtctccattgcttttttaaaatagcagaatcagctttgcttcaaaagaaataggcttaatgttgaaataatagattagttggtgttttcacatgcaaacattcaaaatgaatatgaaattaaaatttgaacattatggtgaggagaatggtatattaacacaaaattatattagtaagtagatgtcatagaaatagtgttgctacctgccaaggcatcctgtgtacaccattgattttacaaagaaacacccttccctccttttttgccattattatggcaacttaagtgtatctgcatctctacattaaaaaggagaaagagaaataacctatctttcattcctaagttgcctcattaattttggtgaacaagaatatgtacctttttgatgctatattattgtgattaaaaagtacttgcaggtaatgtttatgatacgttaaacattgtaatttcctatggtaattataacattcccattcttttgtagatgaaacttctatgtattgaaccacagattttccgagcttctaaatgtagcctttcattgcacatttcagtgatcagaatagatatctttctacacacacaaaagcaatagattcattcagtggacaatttccttgtttaactacacagctatgatggaatgatatatccaagttccttccctcagtgaaatatgcatatgtatat

SEQ ID NO: 33311 - DNA, 808 bp, Macaca Mulatta
  misc_feature (1)...(808): n = A,T,C or G
ggggtgggggttgagggggagaacggcccttgctgccagcaacatggagaccttgtaccgtgtcccgttcttagtgctcgaatgtcccaacctgaagctgaagaagccgccctggttgcacatgccgtcggccatgactgtgtatgctctggtggtggtgtcttacttcctcattaccggaggaataatttatgatgttattgttgaacctccaagtgttggctctatgactgatgaacatgggcatcagaggccagtagctttcttggcctacagagtaaatggacaatatattatggaaggacttgcatccagcttcttatttacaatgggaggtttaggtttcataatcctggaccgatcgaatgcaccaaatatcccaaaactcaatagatttcttcttctgttcattggattcgtctgtgtcctactgagttttttcatggctagagtattcatgagaatgaaactgccgggctatctgatgggttagagtgcctttgagaagaaatcagtggatactggatttgctcctgtcaatgaagttttaaaggctgtaccaatcctccagtatgacatgtggaaaagaatgaagagcagcagtaaaagaaatatctagtgaaaaaacaggaagcgtattgaagcttgcactagaatttcttcttgatattaaagagacaagtttatcacagtnnnnnnnnnnnnnnnnnnnnnnggctgacctattgctataccaacaatgtttgagtggcattttcttttttagtttttcatttccttaaaagaaaatatactccatatctacaac

SEQ ID NO: 33312 - DNA, 897 bp, Macaca Mulatta
gaaacctggagaactgccctggaactcactggtttgaaagtctttggcaatgaaattaaactagagaaaccaaaaggaaaagacagtaagaaggagcgagatgcgagaacgcttttggctaaaaatctcccttacaaagttactcaggatgaattgaaagaagtgtttgaagatgctgcggagatcagattagtcagcaaggatgggaaaagtaaagggattgcttatattgaatttaagacagaagctgatgcagagaaaacctttgaggaaaagcagggaacagagattgatgggcgatctatttccctgtactataccggagagaaaggtcaaaatcaagactatagaggtggaaagaatagcacttggagtggtgaaccaaaaactctggttttaagcaacctctcctacagtgcaacagaagagactcttcaggaagtatttgagaaagcaacttttatcaaagtaccccagaaccaaaatggcaaatctaaagggtatgcatttatagagtttgcttcattcgaagatgctaaagaagctttaaattcctgtaataaaagggaaattgagggcagagcaatcaggcttggagttgcaaggacccaggggatcacctaatgccagaagccagccatccaaaactctgtttgtcaaaggcctgtctgaggataccactgaagagacattaaaggagtcatttgacggctctgttcgggcaaggatagtcactgaccgggaaactgggtcctccaaagggtttggttttgtagacttcaacagtgaggaggatgccaaagctgccaaggaggccatggaagatggtgaaattgatggaaataaagttaccttggactgggccaaacctaagggtgaaggtggctttgggggtcg

SEQ ID NO: 33313 - DNA, 170 bp, Macaca Mulatta
gtatggtttggagaagatctgcctctaagtcctcggagtcctctgacccccagacatggaccaggattggctaatgtttgtcagtatgatgagtggatagctgtgaggcatgaagccactctgttgcccatgcaagaagatctatcaatctggttatctggtttattagg

SEQ ID NO: 33314 - DNA, 388 bp, Macaca Mulatta
ttctgtttcaaatcaaaggcctcaggactatctttgaagacaggtgacatataaattcatcatgatcatcttcgaatgtataaaaattggaagttttgtattaagggtcaggtttcctgaggatttcatccatctggaccagattcaaaacaaacccaaaaagagtttccatttttattttgtgaaatctggagaaaattcattttatccagcaagttaccacatatatttcaaagcatttatcctgtttttatttccagaagggccatcagaattttcttcttgggatttttagggttgattggccagattggtttatagcttcacataatgatgtgatttttctccagtctaaatgcttaagaagagaattgtcaatgaatataat

SEQ ID NO: 33315 - DNA, 155 bp, Macaca Mulatta
cttgctctacgatgtgtgaattcttctcggtcagcatatggatgtgtcctgttctctcctgtgttttttcaacattatcaatggtcagctttagtgaaaaagagtgaaaatgaacttgacacaacactgaatttaaaatgaaagttaggaatgaa

SEQ ID NO: 33316 - DNA, 639 bp, Macaca Mulatta
  misc_feature (1)...(639): n = A,T,C or G
gggggaggccccttccttaggtccttcaagctactccgtccggccccgcctattctctgctctcctgaacctttaggctcatctcggcccatttgaagaccaggaagttgatcaatcccgaggctgctgagagacggtggcgcgagtgggacagtcgccagggatggctgagcgtgaggatgcagcgggtgtccgggctgctctcctggacgctgagcagagtcctgtggctctcgggcctctctgagccgggagctgcccggcagccccggatcatggaagagaaagcgctagaggtttatgatttgattagaactatccgggacccagaaaagcccaatactttagaagaactggaagtggtctcggaaagttgtgtggaagttcaggagataaatgaagaagaatatctggttattatcaggttcacgccaacagtacctcattgctctttggcgactcttattgggctgtgcttaagagtaaaacttcagcgatgtttaccatttaaacataagttggaaatctacatttctgaaggacccattcacagaagagacatcataagcagataatgacaagagcagtggcactgcaatgaaacccacttacggaattgtgacgtgtgtcttgactgan

SEQ ID NO: 33317 - DNA, 297 bp, Macaca Mulatta
acccgcccagcctcagtgtccttctctacaagcagaggataagagctatggctcccttggctgcctcctgagaggctccggggccgaagcagctctgtaagatatgcctcgctgcagaggggagcaacagaggaacggagagacggtggccgggccgaaagcgtcacaaagcctcagagagcgggctctgtcccgcccggtccccgggtgggcgcccgcgcctgtccggagagtccacaggctgggggaccggaggcaccaaaggccaatagacatgtaggggcgggggctccaccg

SEQ ID NO: 33318 - DNA, 335 bp, Macaca Mulatta
acatttcagatgaattctcagaggccatcaaggccttccggggccaggacgacaagaatccgtgtagtgctgaacaaggccgaccaagtggacacgcagcagctgatgcgggtctacggggccctcatgtggtccctgggcaaggtcatcaacacgccagaggtgctgcgcgtctacattggctccttctgggcgcagcccctgcagaacacagacaaccgccggctcttcgaggccgaggcccaggacctcttcagagacatccagagcctcccccagaaggcagcggtgcgcaaactcaacgacctcatcaagcgagcgaggctggccaaggt

SEQ ID NO: 33319 - DNA, 124 bp, Macaca Mulatta
cagaggtggagtgctccacggtgaccacacgcatcgtgtctcagatcaagaccaagggggccttgggcgtcagcttcaccttttttggcacctccttcctcttcatcacgtcccacttcacctg

SEQ ID NO: 33320 - DNA, 743 bp, Macaca Mulatta
ggcttgcagtcctcttggcagacatgaggcaacgattgctcccgttcttcaccagccttctccttgtggctctgctgtttccaggattgtcccaagccagacatgttaaccactcagccaccgaggctctcagagaactccgggaaggagccactgggcaaggcacaaacaggtctcagctgctacgccacccagtgaaacgggcccccataatacggcgcatcccctattacccagaagttgaatcagatttaagaattgtcgactgcaagagaagtgaaggcttctgtcaagaatactgttctgtgcaatggagtccattctgttctaagtactgtggaatgtagtcaggatgttagtgcacatctctcaccaggaggctcgaggaccctgatttaagagctgcatgggctttttagggcctagatgggccaggggatgttccaccgggaattagaaataccatctgccttatgcagcaagggacctgcagactttttttctgccattctggtgagaaaaagcgtgacatttgctctgatccctggaataggtgttgcgtatcaaatagagatgaagaaggaaaagagaagccaaagaccgatggcagatctggaatctaaaatgtaagctcctggaaggcagggatcttgaagtatcccaagggcttaaaggaatgtgtggcttgtagtaggtgttcaataaatatttgttgaatgaatttagcaccaaaaaaaaaaaaa

SEQ ID NO: 33321 - DNA, 884 bp, Macaca Mulatta
  misc_feature (1)...(884): n = A,T,C or G
cagcggccacagcaccggggaggactcggcctttcaagatcccgactcgccgctgccgcccgcgcggagccccacggagcccgggcccgagcgccgccgctcgcccgggcaggcccccgggagccccggcgagctggaggaggacctgttgctgcccggcgcctgccnnnnnnnnnnnnnnnnnnnnnnnnnnnnnnnnnnnnnnnnnnnnnnnnnnnnnnnnnnnnnnnnnnnnnnnnnnnnnnnnnnnnnnnnnnnnnnnnnnnnnnnnnnnnnnnnnnnnnnnnnnnnnnnnnnnnnnnnnnnnnnnnnnnnnnnnnnnnnnnnnnnnnnnnnnnnnnnnnnnnnnnnnnnnnnnnnnnnnnnnnnnnnnnnnnnnnnnnnnnnnnnnnnnnnnnnnnnnnnnnnnnnnnnnnnnnnnnnnnnnnnnnnnnnnnnnnnnnnnnnnnnnnnnnnnnnnnnnnnnnnnnnnnnnnnnnnnnnnnnnnnnnnnnnnnnnnnnnnnnnnnnnnnnnnnnnnnnnnnnnnnnnnnnnnnnnnnnnnnnnnnnnnnnnnnnnnnnnnnnnnnnnnnnnnnnnnnnnnnnnnnnnnnnnnnnnnnnnnnnnnnnnnnnnnnnnnnnnnnnnnnnnnnnnnnnnnnnnnnnnnnnnnnnnnnnnnnnnnnnnnnnnnnnnnnnnnnnnnnnnnnnnnnnnnnnnnnnnnnnnnnnnnnagagaattacaattactgaaagcaatatgaagtcccggtatacaacagaatttcatgagctagagaaaattggctctggagaatttggttctgtatttaagtgtgtgaagaggctggatggatgcatttatcccattaagcgatcaaaaaagccattggccggatctgttg

SEQ ID NO: 33322 - DNA, 594 bp, Macaca Mulatta
agttcacctcccaaattgggcgcatgcaatgcccaaaacacttgcaaaccacaggagctctccaagagaaggtcacgttcctccaatgccctccgtccccagcgcggcatcgcctgccagatctccagcatgaggggtctgggcatcccgcttctacctgggagctcaccgccatgtgtttgcctcctcctcagggaagtgtaccgcgtgacagagagtctacagcgcgagaaggccgggctcctcaagcagctggatttcctaaggtgcgtcggtgggcactggcctgtgctgagagcacctcccagaagcctggggtcggaaggaccagtctgagggtcatccttgcctacgtgctagaaaaatatgcctgcggagagcgccctcattcccttggtccccaacgcagtgtttggaccactgagtagccactgtgttatgtgtggtccatttacacgtgcgcccatatccagtgtattcctcctggtggggcggctccgccccactcttctgagtccctcacaggaccatgcttggtacgggatcacctgggagcagagctgggtttattgagcatttaatctatgccagaaa

SEQ ID NO: 33323 - DNA, 1063 bp, Macaca Mulatta
  misc_feature (1)...(1063): n = A,T,C or G
caggaaggactactcgggagagtacaccatctacctgatcccttgcacagtgcagcccacacagccatgggttgacccaggagagaagcctttggcctgcactgcacatgccccggaaagnnnnnnnnnnnnnnnnnnnnnnnnnnnnnnnnnnnnnnnnnnnnnnnnnnnnnnnnnnnnnnnnnnnnnnnnnnnnnnnnnnnnnnnnnnnnnnnnnnnnnnnnnnnnnnnnnnnnnnnnnnnnnnnnnnnnnnnnnnnnnnnnnnnnnnnnnnnnnnnnnnnnnnnnnnnnnnnnnnnnnnnnnnnnnnnnnnnnnnnnnnnnnnnnnnnnnnnnnnnnnnnnnnnnnnnnnnnnnnnnnnnnnnnnnnnnnnnnnnnnnnnnnnnnnnnnnnnnnnnnnnnnnnnnnnnnnnnnnnnnnnnnnnnnnnnnnnnnnnnnnnnnnnnnnnnnnnnnnnnnnnnnnnnnnnnnnnnnnnnnnnnnnnnnnnnnnnnnnnnnnnnnnnnnnnnnnnnnnnnnnnnnnnnnnnnnnnnnnnnnnnnnnnnnnnnnnnnnnnnnnnnnnnnnnnnnnnnnnnnnnnnnnnnnnnnnnnnnnnnnnnnnnnnnnnnnnnnnnnnnnnnnnnnnnnnnnnnnnnaggtggaagcaggacaccagtggtatctccaggtcatctacatcattggccccgacaccatctcagggccccgggtccagcgctctctcacagctccactcagacgcaaccgaagggacctggtggagcccagtggccggctgacccttgatgattccctcatttatgacaatgaaggagaccaagtcaagaatggcaccaatatgaagtccctgaatctggagatgcaagagccagcggtagctgcgtccctatcacagactggggcgtccattggcagtgctctggctgcgatcatgcttctacttctggggtttttgtggcttgttttcatccacaggaaatggccagaaacagaggaagaagaagcccccagaggaaatttttggaggaatatcctctgaaaactaaaggtagaagtgccc

SEQ ID NO: 33324 - DNA, 478 bp, Macaca Mulatta
  misc_feature (1)...(478): n = A,T,C or G
gttctcagttccttgaagttaaaaaccagtggtggagaaggccaacgcacagatccagatcttaacaagaagttgggaagaagtcggtaccttaaatgcccaaatcccagagttaaaaagtgatttggagaaagccagtgctttgaatacaaagatccgggcactccagggcagcttggacaatatgagcaagttgctcaaacgacaaanatgacattctacaggtggtttctcaaggctggaagtacttcaaggggaacttctattacttttctctcgtcacaaagacctggtatagtgcccagcagttctgtgtgtccaggaattcacacctgacctcggtgacctcacagaatgagcnaggagtttctgtataaaacagcggggggactcacctactggattggcctgactaaagcagggacggaaggggactggttctgggtggatgacacgccattcgacaaggtccaaagtg

SEQ ID NO: 33325 - DNA, 255 bp, Macaca Mulatta
catctccgttcatggatgcattaacagccaatgggacaaccagcatacagacatctgttacagcagtgacggccagcaaaaggaaatttattgacgacagaagagaccagccttttgacaaacgattgcgtttcagcgtgaggcaaacagaaagtgcctacagatacagagatattgtggtcaggaagcaggatggcttcacccacatcttgttatccacaaagtcctcagagaataactcactgaatccagagg

SEQ ID NO: 33326 - DNA, 853 bp, Macaca Mulatta
gggccttttttcttttttccggcgttcaagatgtcgaagcgaggacgtggtgggtcctctggtgcgaaattccggatttcgttgggtcttccggtaggagctgtgatcaattgtgctgacaacacaggagccaaaaacctgtatatcatctccgtgaaggggatcaagggacggctgaacagacttcccgctgctggtgtgggtgacatggtgatggccacagtcaagaaaggcaaaccagagctcagaaaaaaggtacatccagcagtggtcattcgacaacgaaagtcataccgtagaaaagatggcgtgtttctttattttgaagataatgcaggggtcatagtgaacaataaaggcgagatgaaaggttccgccattacaggaccagtagcaaaggagtgtgcagacttgtggccccggattgcatccaatgctggcagcattgcatgattctccagtgtatttgtaaaaaataaaaattttaaacccacttttttgcaagatttcgctcatctaaaatattaaacatgtcgtcggccgccttcggaccctcgaagaacgttttcatgtaccattcctttttgggggggcggggccaagttaggttaagttgaaacatgggtaattagcgtgtttctcctagggagatcctggggtctgtgactaggtgccttgttattcttccccccccatataaaaaacggccccggggggcaaagccgaaactttttttgaaacaaactcacccaatggggatttccctgaagagttatttactgggaattctatccacacaggggatgtcccaagacggaagcttccgaaaattccgattattacccccccccgc

SEQ ID NO: 33327 - DNA, 278 bp, Macaca Mulatta
acttgttcatggtgatccagaaaggaaaaatgagttagtaaatgataccatccttaacgtcatttttggaaaatgaaagcaatttcttgaagcaataccttagaaaatgttaagccttatggttaaataaggcgaattgatttttaaattattttctccctgaagtcctgttaaaatgtcagttaaggaatgaaaagatgtatatcaacaaaggcaaagagatggagaaggtatgacaatgacataaacaagagatgtaaagaaactttttggaacac

SEQ ID NO: 33328 - DNA, 365 bp, Macaca Mulatta
  misc_feature (1)...(365): n = A,T,C or G
gccaagcccatcccgcaccatggccaggtacagatgctgtcgcagccagagccggagcagatgctgccgccggagacgaagatgtcgcagacgaaggaggcggagatgccgggcacggaggagagccatgagtaagtgggcccagctgagggggnnnnnnnnnnnnnnnnnnnngctctcggggcccagtcttcctctcaccacctttcttggtctcaccagggtgctgccgccgcaggtacaggctgaggtgtagaagatactaattgcacaaaatagcacgtccaccaaactcctgcctgagaattttaccagacttcacgaccctcttgccacatcttgaaaacgccaccatccaatgaaaa

SEQ ID NO: 33329 - DNA, 1194 bp, Macaca Mulatta
  misc_feature (1)...(1194): n = A,T,C or G
acccgggagaaggagggccaagatggcggaagcggaggagtctccaggagacccggggacagcatcgcccaggcccctgnnnnnnnnnnnnnnnnnnnnnnnnnnnnnnnnnnnnnnnnnnnnnnnnnnnnnnnnnnnnnnnnnnnnnnnnnnnnnnnnnnnnnnnnnnnnnnnnnnnnnnnnnnnnnnnnnnnnnnnnnnnnnnnnnnnnnnnnnnnnnnnnnnnnnnnnnnnnnnnnnnnnnnnnnnnnnnnnnnnnnnnnnnnnnnnnnnnnnnnnnnnnnnnnnnnnnnnnnnnnnnnnnnnnnnnnnnnnnnnnnnnnnnnnnnnnnnnnnnnnnnnnnnnnnnnnnnnnnnnnnnnnnnnnnnnnnnnnnnnnnnnnnnnnnnnnnnnnnnnnnnnnnnnnnnnnnnnnnnnnnnnnnnnnnnnnnnnnnnnnnnnnnnnnnnnnnnnnnnnnnnnnnnnnnnnnnnnnnnnnnnnnnnnnnnnnnnnnnnnnnnnnnnnnnnnnnnnnnnnnnnnnnnnnnnnnnnnnnnnnnnnnnnnnnnnnnnnnnnnnnnnnnnnnnnnnnnnnnnnnnnnnnnnnnnnnnnnnnnnnnnnnnnnnnnnnnncctccacagctttccttgctgatagccagcctccaaaccgcagagccctagctgtttatcctgttttcctgttttactttgtcatcagttggatgattctcacctttactcctcagtaannnnnnnnnnnnnnnnnnnnnnnnnnnnnnnnnnnnnnnnnnnnnnnnnnnnnnnnnnnnnnnnnnnnttgtctctggccctattttgctctaattttggaggtatttggtaactgagtaggtgagaagactaaaagggagccatacagcagtgtcaccacttatgtgaggaactgatgtttgaaaggctgttcttttctctcttaatgtcatttctttaaaaatacatgtgcatactacacacagtatataatgcctccttaaggcatcatggagtcactgtggtccatttgagtgacaactagtgacttgggaagcacatggatacatcttacaagctgaatagagttgattactattttcagttttgagaataccagttcaggtgcagctcttaaacacattgccttatgactattagaatatgcctctcttttcgtaaataaaaataaatggtctata

SEQ ID NO: 33330 - DNA, 660 bp, Macaca Mulatta
tagacttgtccagcgccgacgctgcccaggagcacgaggaggtgactgtcacggggcccctggaggatcccagtgagctggaggtcgatattgattcctttatgaaacatgccaaggtactgaggctcccgcggccctgggggacccagcgccatcactgccgcctcgctctgcccatcttgccgggccatctgcgtgacacctccctccactcacctcttcatgagctctccctccagtctcccttctcccctgtgggcagtgtgtctgccgcctccgtgtagcctcctttcaattttctgcctgtgttctgcccatctttgccatctatcctgctttctgtctctgctgctgtctgcaggtggagctgagagggagtggcctacaaccggacctgatagagggcaggaaaggggcgcagatagtgaagcgggccagcctgaaaagggggaaacagtgaccccgagccgctctccttggagtagcctctcgggaggtaacgcagcccttctcatcccctctgcatggcctgttctttggtggagtggctgctccctgtctcacccgatcccctcccagccaccccagcatgatgtgggacaaacaacttgcggctatgtctcgaggcagagattctcgcttcccggccctactaacagc

SEQ ID NO: 33331 - DNA, 370 bp, Macaca Mulatta
tgggggggttcccctcctttgcccagacttctctttgaacacaaatgcattagccttgtggctagaacatcctcttcctacctctgtctcccctcacttgtcatatgctatgacatgctaacatttattttgttcatctctgttgccaccacagaaagatgccagaaaaaccggtcagtgttcctccctgatgcttaggtttctgagatagggttctgttacatcctctttgatagcctatttaaaatatttagaaagtctggagctcaaaaatgcattcttccacattgataatttagtaaaaggagaacattgacatcactacagggcagcataagaggatggttacctgtggtagcagctctgattt

SEQ ID NO: 33332 - DNA, 152 bp, Macaca Mulatta
ctcctgtagggaggccaccttttaaggtaccactatcagtcaggatgtggtggcatcagccctggggccgcctgggtggcaggggggcagcagctctcctccccactcacaggccttgcagtgcccatttggaattcctcccaagacccctg

SEQ ID NO: 33333 - DNA, 115 bp, Macaca Mulatta
ggactaagacatacttgtttgaggaatttttgatgaactggcatgacaggttaaggaaggttgaagaacattcagtgatgacggtgaaattacaatcagaggttgacaaatataa

SEQ ID NO: 33334 - DNA, 2088 bp, Macaca Mulatta
  misc_feature (1)...(2088): n = A,T,C or G
caagagaaagaagaacagcatcagttggctgttactgcataccttaaaaattcacgaaaagagcaccagcgaatcctggctcgccgccagacaattgaggaaagaaaagagcgccttgagagtctgaatattcagcgtgagaaagaagaattggaacagagggaagctgaactccagaaagtacggaaggctgaggaagagaggctgcgccaggaagcgaaggagagagagaaggagcgtatcttacaggaacatgaacaaatcaaaaagaaaactgttcgagagcgtttggagcagatcaagaaaacagaactgggtgccaaggcattcaaagatattgacattgaagnnnnnnnnnnnnnnnnnnnnnnnnnnnnnnnnnnnnnnnnnnnnnnnnnnnnnnnnnnnnnnnnnnnnnnnnnnnnnnnnnnnnnnnnnnnnnnnnnnnnnnnnnnnnnnnnnnnnnnnnnnnnnnnnnnnnnnnnnnnnnnnnnnnnnnnnnnnnnnnnnnnnnnnnnnnnnnnnnnnnnnnnnnnnnnnnnnnnnnnnnnnnnnnnnnnnnnnnnnnnnnnnnnnnnnnnnnnnnnnnnnnnnnnnnnnnnnnnnnnnnnnnnnnnnnnnnnnnnnnnnnnnnnnnnnnnnnnnnnnnnnnnnnnnnnnnnnnnnnnnnnnnnnnnnnnnnnnnnnnnnnnnnnnnnnnnnnnnnnnnnnnnnnnnnnnnnnnnnnnnnnnnnnnnnnnnnnnnnnnnnnnnnnnnnnnnnnnnnnnnnnnnnnnnnnnnnnnnnnnnnnnnnnnnnnnnnnnnnnnnnnnnnnnnnnnnnnnnnnnnnnnnnnnnnnnnnnnnnnnnnnnnnnnnnnnnnnnnnnnnnnnnnnnnnnnnnnnnnnnnnnnnnnnnnnnnnnnnnnnnnnnnnnnnnnnnnnnnnnnnnnnnnnnnnnnnnnnnnnnnnnnnnnnnnnnnnnnnnnnnnnnnnnnnnnnnnnnnnnnnnnnnnnnnnnnnnnnnnnnnnnnnnnnnnnnnnnnnnnnnnnnnnnnnnnnnnnnnnnnnnnnnnnnnnnnnnnnnnnnnnnnnnnnnnnnnnnnnnnnnnnnnnnnnnnnnnnnnnnnnnnnnnnnnnnnnnnnnnnnnnnnnnnnnnnnnnnnnnnnnnnnnnnnnnnnnnnnnnnnnnnnnnnnnnnnnnnnnnnnnnnnnnnnnnnnnnnnnnnnnnnnnnnnnnnnnnnnnnnnnnnnnnnnnnnnnnnnnnnnnnnnnnnnnnnnnnnnnnnnnnnnnnnnnnnnnnnnnnnnnnnnnnnnnnnnnnnnnnnnnnnnnnnnnnnnnnnnnnnnnnnnnnnnnnnnnnnnnnnnnnnnnnnnnnnnnnnnnnnnnnnnnnnnnnnnnnnnnnnnnnnnnnnnnnnnnnnnnnnnnnnnnnnnnnnnnnnnnnnnnnnnnnnnnnnnnnnnnnnnnnnnnnnnnnnnnnnnnnnnnnnnnnnnnnnnnnnnnnnnnnnnnnnnnnnnnnnnnnnnnnnnnnnnnnnnnnnnnnnnnnnnnnnnnnnnnnnnnnnnnnnnnnnnnnnnnnnnnnnnnnnnnnnnnnnnnnnnnnnnnnnnnnnnnnnnnnnnnnnnnnnnnnnnnnnnnnnnnnnnnnnnnnnnnnnnnnnnnnnnnnnnnnnnnnnnnnnnnnnnnnnnnnnnnnnnnnnnnnnnnnnnnnnnnnnnnnnnnnnnnnnnnnnnnnnnnnnnnnnnnnnnnnnnnnnnnnnnnnnnnnnnnnnnnnnnnnnnnnnnnnnnnnnnnnnnnnnnnnnnnnnnnnnnnnnnnnnnnnnnnnnnnnnnnnnnnnnnnnnnnnnnnnnnnnnnnnnnnnnnnnnnnnnnnnnnnnnnnnnnnnnnnnnnnnnnnnnnnnnnnnnnnnnggtggatggagagagaaagaaaaagccagagaggagagctggggtccacctcgagaatcaaggccatcagaagaacgtgaatgggacagagaaaaagaaagagatagagataatcaggatcgagaggaaaatgacaaggaacctgaaaaagaaagggagagagagaaagaagtggattgaaaggaacgcttcc

SEQ ID NO: 33335 - DNA, 1304 bp, Macaca Mulatta
  misc_feature (1)...(1304): n = A,T,C or G
cgcctgcagcgctggggtcccgccggagcccgccccctcccgcgaggaccnnnnnnnnnnnnnnnnnnnnnnnnnnnnnnnnnnnnnnnnnnnnnnnnnnnnnnnnnnnnnnnnnnnnnnnnnnnnnnnnnnnnnnnnnnnnnggcgctagcgagctgccaccgcccctgggggccacgagtaggaccaagcggtttgtgtctgaggcgcgcttcgtggagacgctgctggtggccgatgcgtccatggctgccttctacggggccgacctgcannnnnnnnnnnnnnnnnnnnnnnnnnnnnnnnnnnnnnnnnnnnnnnnnnnnnnnnnnnnnnnnnnnnnnnnnnnnnnnnnnnnnnnnnnnnnnnnnnnnnnnnnnnnnnnnnnnnnnnnnnnnnnnnnnnnnnnnnnnnnnnnnnnnnnnnnnnnnnnnnnnnnnnnnnnnnnnnnnnnnnnnnnnnnnnnnnnnnnnnnnnnnnnnnnnnnnnnnnnnnnnnnnnnnnnnnnnnnnnnnnnnnnnnnnnnnnnnnnnnnnnnnnnnnnnnnnnnnnnnnnnnnnnnnnnnnnnnnnnnnnnnnnnnnnnnnnnnnnnnnnnnnnnnnnnnnnnnnnnnnnnnnnnnnnnnnnnnnnnnnnnnnnnnnnnnnngggcacgtcctcagcatgccgcacgacgactccaagccctgcacgcggctcttcgggcccatgggcaagcaccacatgatggcgccgctgttcgtccacctgaaccagacgctgccctggtccccctgcagcgccatgtacctcacggagctcctggacggcgggcacggnnnnnnnnnnnnnnnnnnnnnnnnnnnnnnnnnnnnnnnnnnnnnnnnnnnnnnnnnnnnnnnnnnnnnnnnnnnnnnnnnnnnnnnnnnnnnnnnnnnnnnnnnnnnnnnnnnnnnnnnnnnnnnnnnnnnnnnnnnnnnnnnnnnnnnnnnnnnnnnnnnnnnnnnnnnnnnnnnnnnnnnnnnnnnnnnnnnnnnnnnnnnnnnnnnnnnnnnnnnnnnnnnnnnnnnnnnnnnnnnnnnnnnnnnnnnnnnnnnnnnnnnnnnnnnnnnnnnnnnnnnnnnnnnnnnnnnnnnnnnagcccgtggtagatggaggctgggcaccgtggggaccctggggagaatgttctcggacctgtggaggaggagtacagttttcacaccgtgagtgcaaggaccccgagcctcagaatggaggaagatactgcctgggtcggagagccaagtaccagtcatgccacacggaggaatgcccccctgacg

SEQ ID NO: 33336 - DNA, 1758 bp, Macaca Mulatta
  misc_feature (1)...(1758): n = A,T,C or G
ctgggagcccattgagaagtacatcaatgagcagtacgagaaattcctgaaggaggaggtgaacatcgccaggaagaaacgcatccctgacactcgtgtccactgctgcctttacttcatctcccccacaggacactcnnnnnnnnnnnnnnnnnnnnnnnnnnnnnnnnnnnnnnnnnnnnnnnnnnnnnnnnnnnnnnnnnnnnnnnnnnnnnnnnnnnnnnnnnnnnnnnnnnnnnnnnnnnnnnnnnnnnnnnnnnnnnnnnnnnnnnnnnnnnnnnnnnnnnnnnnnnnnnnnnnnnnnnnnnnnnnnnnnnnnnnnnnnnnnnnnnnnnnnnnnnnnnnnnnnnnnnnnnnnnnnnnnnnnnnnnnnnnnnnnnnnnnnnnnnnnnnnnnnnnnnnnnnnnnnnnnnnnnnnnnnnnnnnnnnnnnnnnnnnnnnnnnnnnnnnnnnnnnnnnnnnnnnnnnnnnnnnnnnnnnnnnnnnnnnnnnnnnnnnnnnnnnnnnnnnnnnnnnnnnnnnnnnnnnnnnnnnnnnnnnnnnnnnnnnnnnnnnnnnnnnnnnnnnnnnnnnnnnnnnnnnnnnnnnnnnnnnnnngggagaaggcctcctgggcactgtccttccacctgtgccagccaccccctgccccactgctgaatgaagtccatttcaagcgctgcttctccctccattcctctcagctgttattgcttcagggccaggccctttttagtgctgtgctcgtccagctcaccaccacagcccctctcagccctcagtaggtgggaggggccagatgcctctttagnnnnnnnnnnnnnnnnnnnnnnnnnnnnnnnnnnnnnnnnnnnnnnnnnnnnnnnnnnnnnnnnnnnnnnnnnnnnnnnnnnnnnnnnnnnnnnnnnnnnnnnnnnnnnnnnnnnnnnnnnnnnnnnnnnnnnnnnnnnnnnnnnnnnnnnnnnnnnnnnnnnnnnnnnnnnnnnnnnnnnnnnnnnnnnnnnnnnnnnnnnnnnnnnnnnnnnnnnnnnnnnnnnnnnnnnnnnnnnnnnnnnnnnnnnnnnnnnnnnnnnnnnnnnnnnnnnnnnnnnnnnnnnnnnnnnnnnnnnnnnnnnnnnnnnnnnnnnnnnnnnnnnnnnnnnnnnnnnnnnnnnnnnnnnnnnnnnnnnnnnnnnnnnnnnnnnnnnnnnnnnnnnnnnnnnnnnnnnnnnnnnnnnnnnnnnnnnnnnnnnnnnnnnnnnnnnnnnnnnnnnnnnnnnnnnnnnnnnnnnnnnnnnnnnnnnnnnnnnnnnnnnnnnnnnnnnnnnnnnnnnnnnnnnnnnnnnnnnnnnnnnnnnnnnnnnnnnnnnnnnnnnnnnnnnnnnnnnnnnnnnnnnnnnnnnnnnnnnnnnnnnnnnnnnnnnnnnnnnnnnnnnnnnnnnnnnnnnnnnnnnnnnnnnnnnnnnnnnnnnnnnnnnnnnnnnnnnnnnnnnnnnnnnnnnnnnnnnnnnnnnnnnnnnnnnnnnnnnncacaggtggtcactgtaggctaatggaaaatacccaagggagggcaaagccccccatcagatgcatgaatgtttgcgaatgttgactgccactgccccacacactgtgtctttatagaattcccctttgcccaccccctccctgtctccacctggacacaacttgctcaaaggctggtgacttgtgggccattcatctacaaccaagtcctgatggagcaagaggcccatacctaggggatgcaagaac

SEQ ID NO: 33337 - DNA, 641 bp, Macaca Mulatta
  misc_feature (1)...(641): n = A,T,C or G
gcctccaacccggggattgccataattggaatcttcacaggtcacattgaaatcttcaagatgaccatgcccccccaggatgctggggcagtaatcatggcagactccctgcccgggcccccaggattctaggaccccaggcagccccttggcctggtcccgggtaccttccaagcacagtctccatgctcccagattctcgacctttccctggccggggaggtgcagcctgcgtctgcctgtgtcatgtgtgctgatttgagtggctcggcttgccacagcgcaacctcttctgtccctttcagtcatttgccgtacttccctgcggcacgccaccacggaagccgctccagggtgggtcagggcgtaagctgctggtgaggtttggaagcatcaggctcacgggtgttcgtgtgtgttcgtgcgtgtgtgtgcgtacgtgtatataactgaagtgtctgtacggaatgccctttgctagccatgggctggtcaccagactattttgtaatacccgccccctgcctcgatattgccagtttcttgtgcaataaacaatcagcagnnnnnnnnnnnnnnnnnnnnnnnnnnnnnnnnnnnnnnnnnnnnnnnnnnnnnnnnnnnnnnnnnnnnnnnnnnnn

SEQ ID NO: 33338 - DNA, 468 bp, Macaca Mulatta
gaagggagacagatgcaggagaggggacctagatgggcaggctgccccgcaccgtctccttggagtcctgaggggcccgggcctcagctgcatgggagaactgaaagaaaggagagggggctgtggagcctgcaggacacacagagaaaagttggttccgcaagcagggaggtgggtcccgagccccagcaccctgagctgcaggcacagccaagcagaggcaacatgctgcacagagcctattttttgggtgcccccagcctctccccacaagtcctcctgattcatcagaggctggtgtctccgtggcagctgcagtgtacaagccagcaccccgcagtcctgggcagtgttggtgactgcagcaggccccagcgttcagatgagccgctcttccggcggcaacttgatgctgggggtcggaggcacacggtaatccaactgcgcctcgctgctgtgccggtaggg

SEQ ID NO: 33339 - DNA, 411 bp, Macaca Mulatta
aagagctttgaaaatgaaaaaataaaatctgagcagtttataatttccctattttgctttttcccctcctctttctcttagatgcagtttcgacattaagcaatgccgaggactatctcgatgatgaagactcagattaatttctttctggagctttgagatctaaaacttctgttgcttttgccattccaaaacttggtctttgccagaaaagtgttggtaactataaagcaaagtatatatgaacacggcagtgttgcactgtgtttgagtagcaagtgtaaatgacttgttcccacctttggcttgccaataagtgactggattcttggctgtataaaatacatttgtgttcaccagagtagaacaaaaagagattatttctatttatcaagctaaaggaattttaag

SEQ ID NO: 33340 - DNA, 435 bp, Macaca Mulatta
tatttcttattcacttaatccttggtctttcctcttctgtgagaattaaagttgccagaagttggtggggaaggagtcctttaggaggaaatatttgtaaatgtataattaatcatgtgtctttttctttataggagaagatttacaaatctctgcctggatgctgtttgtggttaccttgttgagctccagtctatgagctcgtcagtagcagtacaagccatcactgggaattttaaatctcttcaggctaaattagaacggcttcattaattactgtgatatactttcatccattttgtgatctgtaaaataaaaactcagctgggtccagatatcaggtgttctaagtctaaatgtaagaacaatcttaatggaagtatgtttttaataagtggctaacatctacaaatagtaccttttctaaatgaattc

SEQ ID NO: 33341 - DNA, 372 bp, Macaca Mulatta
tcacaatttaaaatatttcccctagttttttggggggataggaagaaagatttgttactgtatttttttaactatatagaaatagatcaatgaaggtcagcattggcctctgtgtacaaaccaagagcttttacagatccagaatttattattttaaaatgcaggtgaatttttttttgcctttggtttacttgtctgctaaatgtttctttaaacgtgaaactgaataaggagaggagtatttttaacacttaaatttcttggaaattttcaaaccattttttagtctgcaacccgctccacttgaagcacttaagtcttccttaaatgacttttcttaagtaacgatactgtgtgttttcccaaagcact

SEQ ID NO: 33342 - DNA, 210 bp, Macaca Mulatta
  misc_feature (1)...(210): n = A,T,C or G
gttcagcaccggaggagacaagccagctatctggctggatgctgggatccatgctcgagagtgggttacacaagctacggcactttggacagcaaataagnnnnnntctgattatggaaagaacccatccgtcacttccattctggacaccctggatatcttcctcctgccagtcacaaaccctgatggatacgtgttctctcaaaccaa

SEQ ID NO: 33343 - DNA, 2621 bp, Macaca Mulatta
  misc_feature (1)...(2621): n = A,T,C or G
tacattaagattggcgacaaggaggtggagtaccaccccaagttccgcctgatcctgcacaccaagtacttcaacccgcactacaagccagagatgcaggctcagtgcaccctcatcaacttcctggtcaccagggatggactcgaggaccaactcttggccgctgtggtggccaaagagcgcccagatctagaacagctgaaggnnnnnnnnnnnnnnnnnnnnnnnnnnnnnnnnnnnnnnnnnnnnnnnnnnnnnnnnnnnnnnnnnnnnnnnnnnnnnnnnnnnnnnnnnnnnnnnnnnnnnnnnnnnnnnnnnnnnnnnnnnnnnnnnnnnnnnnnnnnnnnnnnnnnnnnnnnnnnnnnnnaggtggtggaggcaaaaatcacggaagttaaaatcaacgaggcgagagagaactaccgcccagctgcagagcgggcatctctgctctacttcatactgaacgacctcaacaaattcaagcccatctaccagttctccctcaagnnnnnnnnnnnnnnnnnnnnnnnnnnnnnnnnnnnnnnnnnnnnnnnnnnnnnnnnnnnnnnnnnnnnnnnnnnnnnnnnnnnnnnnnnnnnnnnnnnnnnnnnnnnnnnnnnnnnnnnnnnnnnnnnnnnnnnnnnnnnnnnnnnnnnnnnnnnnnnnnnnnnnnnnnnnnnnnnnnnnnnnnnnnnnnnnnnnnnnnnnnnnnnnnnnnnnnnnnnnnnnnnnnnnnnnnnnnnnnnnnnnnnnnnnnnnnnnnnnnnnnnnnnnnnnnnnnnnnnnnnnnnnnnnnnnnnnnnnnnnnnnnnnnnnnnnnnnnnnnnnnnnnnnnnnnnnnnnnnnnnnnnnnnnnnnnnnnnnnnnnnnnnnnnnnnnnnnnnnnnnnnnnnnnnnnnnnnnnnnnnnnnnnnnnnnnnnnnnnnnnnnnnnnnnnnnnnnnnnnnnnnnnnnnnnnnnnnnnnnnnnnnnnnnnnnnnnnnnnnnnnnnnnnaacttcgtggaggaaaagatgggcagcaagttcgtggaaggccggagtgtcgagttttctaagtcctacgaggagagcagcccctccacgccaatcttcttcatcctctcccccggggttgaccccttgaaggacgtggaagccctgggnnnnnnnnnnnnnnnnnnnnnnnnnnnnnnnnnnnnnnnnnnnnnnnnnnnnnnnnnnnnnnnnnnnnnnnnnnnnnnnnnnnnnnnnnnnnnnnnnnnnnnnnnnnnnnnnnnnnnnnnnnnnnnnnnnnnnnnnnnnnnnnnnnnnnnnnnnnnnnnnnnnnnnnnnnnnnnnnnnnnnnnnnnnnnnnnnnnnnnnnnnnnnnnnnnnnnnnnnnnnnnnnnnnnnnnnnnnnnnnnnnnnnnnnnnnnnnnnnnnnnnnnnnnnnnnnnnnnnnnnnnnnnnnnnnnnnnnnnnnnnnnnnnnnnnnnnnnnnnnnnnnnnnnnnnnnnnnnnnnnnnnnnnnnnnnnnnnnnnnnnnnnnnnnnnnnnnnnnnnnnnnnnnnnnnnnnnnnnnnnnnnnnnnnnnnnnnnnnnnnnnnnnnnnnnnnnnnnnnnnnnnnnnnnnnnnnnnnnnnnnnnnnnnnnnnnnnnnnnnnnnnnnnnnnnnnnnnnnnnnnnnnnnnnnnnnnnnnnnnnnnnnnnnnnnnnnnnnnnnnnnnnnnnnnnnnnnnnnnnnnnnnnnnnnnnnnnnnnnnnnnnnnnnnnnnnnnnnnnnnnnnnnnnnnnnnnnnnnnnnnnnnnnnnnnnnnnnnnnnnnnnnnnnnnnnnnnnnnnnnnnnnnnnnnnnnnnnnnnnnnnnnnnnnnnnnnnnnnnnnnnnnnnnnnnnnnnnnnnnnnnnnnnnnnnnnnnnnnnnnnnnnnnnnnnnnnnnnnnnnnnnnnnnnnnnnnnnnnnnnnnnnnnnnnnnnnnnnnnnnnnnnnnnnnnnnnnnnnnnnnnnnnnnnnnnnnnnnnnnnnnnnnnnnnnnnnnnnnnnnnnnnnnnnnnnnnnnnnnnnnnnnnnnnnnnnnnggctatctggggactggcttccaggtgaaggccgtgctggacgacatcctggagaagattccggagactttcaacatggctgagatcatggcaaaggcagcggaaaagaccccctacgtggtagtcgcctttcaagaatgtgaaagaatgaacatcttgaccaacgaaatgcgccgttcactgaaggagctgaacctagggctgaaggnngggagaactgaccatcacgaccgacatggaagatctgtccacggctctcttctatgacaccgtgcctgatacgtgggtggcccgggcctacccctccatgatgggcctggcggcctggtacgcagacctgctgctccgcatcagggnnnnnnnnnnnnnnnnnnnnnnnnnnnnnnnnnnnnnnnnnnnnnnnnnnnnnnnnnnnnnnnnnnnnnnnnnnnnnnnnnnnnnnnnnnnnnnnnnnnnnnnnnnnnnnnnnnnnnnnnnnnnnnnnnnntgtgtctgtctgtggaggtgaccaagaaaagccgagaggacatgaccgctcccccccgagagggctcctatgtgtacggactcttcatggaagg

SEQ ID NO: 33344 - DNA, 663 bp, Macaca Mulatta
  misc_feature (1)...(663): n = A,T,C or G
ctgctctgacagggncccacgctccntaatgnctgcctgggctcagtgggtgcttggctgtgctggataatatgttgatctgtattggatgaggaccaatgacagcaaagcaaaaatggctttaaagcttggtgttacttttcttaagttgtttaattatagttaagcaatttcaaaaatgctccaaagaaatgtgaaaggaccttttgtcacagcacttcagaaaatacaaaacagccccttctgcccccgcacagaaatgctgcagagtatataaaacttgagacatttttgtaggatgcctgacgaggtgtagccttttatcttgtttccggatgcgtatttattacgagtactctggttaaatattgaaaagttatatgctgtagtttagtattttgtctttgtaatttacagaagttattggagaaaataataaacttgtttcatnnnnnnnnnnnnnnnnnnnnnnnnnnnnnnnnnnnnnnnnnnnnnnnnnnnnnnnnnnnnnnnnnnnnnnnnnnnnnnnnnnnnnnnnnnnnnnnnnnnnnnnnnnnnnnnnnnnnnnnnnnnnnnnnnnnnnnnnnnnnnnnnnnnnnnnnnnnnnnnnnnnnnnnnnnnnnnnnnnnnnnnnnnnnnnnnnnnnnnnnnnnnnnnnnnnnn

SEQ ID NO: 33345 - DNA, 355 bp, Macaca Mulatta
ccaagacaatgcaaactccagtgaccattcctgtacctgtgctccggctgccccggggccctgatggcttcagccgtggctttgcccctgatggacgcagagcccccctgaggccagaggttcctgaaatccaggagtgtcccatagctcaagaatccctggaattccaggagcagcgggcccgagccgcccttcgggagcattacctccgcagcctgctggccatggtgggtcgtcaggtgagcttcacgttgcacgagggtgtgcgtgtggccgcccacttcggagccaccgacctggatgtggtcaacttctacgtgtcacagctgcagactcccataggtgtgcaagcaga

SEQ ID NO: 33346 - DNA, 586 bp, Macaca Mulatta
gtgattttcctgtgtccacatctaacaaagtcaagattcctggctggacttctacagcttccttccaagtcttcctgaccacctgcactattggactttggaaggaggtgcctatagaaaacgattttgaacatacttcatcgcagtggactatgtccctcggtgcagaaactaccagatttgagggacgaggtcaaggagacatgatgggcccggaagttgctgtgccccgtcagcagcttgatgcttggtcacaggatgatttcgccgacactgcggactctcaggactaccgttaccaagaggttaggtgaagtggtttaaaccaaacggaactcttcatcttaaactacacgttgaaaatcatcccaataattctgtattaactgaattctgaacttttcaggaggtactgtgaggaagagcaggcaccagcagcagaatggagaggtgggcaggggctccagcttccctttgattttttgctgcagactcatcctttttaaatgagacttgttttcccccgtctttgagtcaggtcaaatgtgtagattgactttggcaattcttctcaagcactgacact

SEQ ID NO: 33347 - DNA, 150 bp, Macaca Mulatta
taggtccatatacttttgttcagcaacatcttatgattggcacagatcctcgaacaattcttaaagatttattgccggaaacaattcctccacctgagttggatgatatgacactgtggcagattgttattaatatcctttcagaaccac

SEQ ID NO: 33348 - DNA, 523 bp, Macaca Mulatta
tagagctagagattcccaaagtgaatctcctgcccatctctgtggttctggtagaggtggggaatggggtatcactggacttggcccaagttagaaaggcccaagaagcccattttatctgatggtatacctgccgcgctggacatcaattgtctgttctgatgagaggtgatatgaaatctggaagaaggtctagggtaactggtaccccagtaagggactactccagtagggtggggtctgttggtccgatccccggagtctccttcaaccatgatagctgcctggaacctcagacctgatgaagttcctgctctgggcagtggggcactggaggcggctgatgacagcaatttggggcccttatgtttggcagatcacaccacacagtccctcccgtccaccgccttcctcataccacttggggcggaaggaagtggcagattctctttaatttcctcctgagcagtgagaagcaaacaaacggctaccgcatctcatggggcctcccccgcttactggg

SEQ ID NO: 33349 - DNA, 154 bp, Macaca Mulatta
ataactctgttagtgctgtcccctggatggagaatcagaccctgaggctggttacatctctcagatttctacataaagtaggcaaaaaatagtagctgtgatataaaaacttgtcatgtccctgttgaccaatttctgggcaaagtgttttaat

SEQ ID NO: 33350 - DNA, 602 bp, Macaca Mulatta
  misc_feature (1)...(602): n = A,T,C or G
gggagaccagaccaacagtaacaccaagggcaggtgggcaggcctcagccctcctcccccaccccagggcccactgcagcctcagcccaggagccaccagctctcccaacaccatggtccgataccgcatgaggagcctgagcgaacgcccgcacgaggtgcacgggcagcaggtgcatgggcaagaccaaggacacaacggccaagaggagcaggggctgaacccggaacacgtcgaggtctacgaaaggacccaccgaggccactctcaccataggcgcaggcgctgctctcgaaggaggctgcaccggatccacagacggcggcatcgctcctgcagaaggcgcagaagacgctcctgcaggcaccggaggaggcatcgcagaggctgcagaaccaggaggagaagatgcagaaggcactaagcttcttgggcccctcacccccggctggaaattaagaaaaagtcacctgcccaagaaacaccaagagaggccatagcaattcccctccatncaatgctcaagcccccagctggaagagaaagtcacctgcccaggaaacaccaagtgaggccatagcaactcccctacatcaaatgc

SEQ ID NO: 33351 - DNA, 142 bp, Macaca Mulatta
acgcctacagcccaagaggctggaaaaatgccgccctgtccctgaacaggaagcggaagcaggaaggaactgagaacactggcatctgctaccgccctgaatcagcgttagcatgtggaggcaacctcagcccccagttttt

SEQ ID NO: 33352 - DNA, 761 bp, Macaca Mulatta
  misc_feature (1)...(761): n = A,T,C or G
ggcttcttccaatgagacctttgatgggctggactgtccagctgcagggagggtggccctcaaatatatgacccctgtgnnnnnnnnnnnnnnnnnnnnnnnnnnnnnnnnnnnnnnnnnnnnnnnnnnnnnnnnnnnnnnnnnnnnnnnnnnnnnnnnnnacaggcaacaggggagaaggaggagatggaggagctacaggcatacaaccggaggctgctgcataacattctgcccaaggacgtggccgcccacttcctggcccgggagcgccgcaatgatgaactctactatcagtcgtgtgagtgtgtggctgttatgtttgcctccattgccaacttctctgagttctatgtggagctggaggcaaacaatgagggtgtcgagtgcctgcggctgctcaacgagatcatcgctgactttgatgannnnnnnnnnnnnnnnnnnnnnnnnnnnnnnnnnnnnnnnnnnnnnnnnnnnnnnnnnnnnnnnnnnnnnnnnnnnnnnnnnnnnnnnnnnnnnnnnnnnnnnnnnnnnnnnnnnnnnnnnnnnnnnnnnnnnnnnnnnnnnnnnnnnnnnnnnnnnnnnnnnnnnnnnnnnnnnnnnnnnnnnnnnnnnnnnnnnnnnnnnnngggctgaacatgggcccagtcgtggcaggtgtcatcggggctcggaagccgcagtatgacatctgggggaacacagtgaatgtctctagtcgtatggacagcacgggggtccccgaccgaatccaggtg

SEQ ID NO: 33353 - DNA, 829 bp, Macaca Mulatta
caagctgatatttttcgtccacctttaaaggaaaatgaagccagtccagtttgtagcagcacccttacagaactggacttttcatggtcctggagccagtggccaggcagctgccaattggctagcaggatttggaaggggtcccacaccacccaccttgctgggcatcaggcaaaatgcaaacaccacaggcagaagaaggctattggtcttagacgagttcaaaatggagaaaagaatcagcagaatgttctatataatgacttttctctttctaaccttgtggggcccctacctggtggcctgttattggagagttttcgcaagagggcctgtagtaccggggggatttctaacagctgctgtctggatgagttttgcccaagcaggaatcaatccttttgtctgcattttctccaacagggagctgaggcgctgtttcagcacaacccttctttactgcagaaaatccaggttaccaagggaaccttactgtgttatatgagggagcatctgtaaatctttagccttgtgaaaactaaccttctctgctgagcaattgtggcccatagccatatcttgagaagaaattcaagaatggaatcagcagttttaaggatttgggcaacattctgcagtctttgcaatagttcacctataatcctattttaaatctcagagtgatcctgctgactgccagcaaaggtttgtaattaagaaaggactgaaccactgccctaagtttctttatgtggtcaaaaactagataatgaaagtagcaggtgctaagtatcagtgctaaatgctctgtatgtcactacatatgaaa

SEQ ID NO: 33354 - DNA, 2625 bp, Macaca Mulatta
  misc_feature (1)...(2625): n = A,T,C or G
ctgaggtcccggtcagccggcctcatgctgcaaagccagtgaactcaggtcgggcttctcagctgcgnnnnnnnnnnnnnnnnnnnnnnnnnnnnnnnnnnnnnnnnnnnnnnnnnnnnnnnnnnnnnnnnnnnnnnnnnnnnnnnnnnnnnnnnnnnnnnnnnnnnnnnnnnnnnnnnnnnnnnnnnnnnnnnnnnnnnnnnnnnnnnnnnnnnnnnnnnnnnnnnnnnnnnnnnnnnnnnnnnnnnnnnnnnnnnnnnnnnnnnnnnnnnnnnnnnnnnnnnnnnnnnnnnnnnnnnnnnnnnnnnnnnnnnnnnnnnnnnnnnnnnnnnnnnnnnnnnnnnnnnnnnnnnnnnnnnnnnnnnnnnnnnnnnnnnnnnnnnnnnnnnnntcagaacatattctgggacatggcggtagtcctgaaagcaactcaggaggcacctgctgcttcaccccttggcagctactcgttaccagggactctggccaagagtgagatactggagactcatgggaccatgaactttctaggtnnnggtgatgaaaccaagaacctacagttactggttccaaaaactgagatatgtgaggaagctgaaaaacccctcatcatatcagaaagaatccagaaagctgatcctcaaggacctgagttaggagaagcttgtgaaaaaggaaacatgttaaagaggcagagaataaagagggaaaagaaagatttcagacaagtgatagtgaatgaccgtcagttatctgaaagcttcaaagaagaagaaaaccagaaatgtaagaaatctgggggaaaatacagccttaattctggcgctgttaaaaatccaaaaacccagcttgggcaaaagccttttacatgtagcgtgtgtgggaaaggatttagtcagagtgcaaacctcgttgtgcatcagcgaatccacactggagagaaaccctttgaatgtcatgagtgtgggaaggccttcattcaaagtgcaaacctcgttgtgcatcagagaatccacactggacagaaaccttatgtttgctcaaaatgtgggaaagccttcactcagagttcaaatcttactgtacatcaaaaaatccactccttagaaaaaacttttaagtgcagtgaatgtgagaaagcctttagttacagctcacaacttgctcggcaccagaaagggcacattacagaaaaatgctatgaatgtaatgaatgtgggaaaacatttactaggagctcaaacctcattgtccaccannnnnnnnnnnnnnnnnnnnnnnnnnnnnnnnnnnnnnnnnnnnnnnnnnnnnnnnnnnnnnnnnnnnnnnnnnnnnnnnnnnnnnnnnnnnnnnnnnnnnnnnnnnnnnnnnnnnnnnnnnnnnnnnnnnnnnnnnnnnnnnnnnnnnnnnnnnnnnnnnnnnnnnnnnnnnnnnnnnnnnnnnnnnnnnnnnnnnnnnnnnnnnnnnnnnnnnnnnnnnnnnnnnnnnnnnnnnnnnnnnnnnnnnnnnnnnnnnnnnnnnnnnnnnnnnnnnnnnnnnnnnnnnnnnnnnnnnnnnnnnnnnnnnnnnnnnnnnnnnnnnnnnnnnnnnnnnnnnnnnnnnnnnnnnnnnnnnnnnnnnnnnnnnnnnnnnnnnnnnnnnnnnnnnnnnnnnnnnnnnnnnnnnnnnnnnnnnnnnnnnnnnnnnnnnnnnnnnnnnnnnnnnnnnnnnnnnnnnnnnnnnnnnnnnnnnnnnnnnnnnnnnnnnnnnnnnnnnnnnnnnnnnnnnnnnnnnnnnnnnnnnnnnnnnnnnnnnnnnnnnnnnnnnnnnnnnnnnnnnnnnnnnnnnnnnnnnnnnnnnnnnnnnnnnnnnnnnnnnnnnnnnnnnnnnnnnnnnnnnnnnnnnnnnnnnnnnnnnnnnnnnnnnnnnnnnnnnnnnnnnnnnnnnnnnnnnnnnnnnnnnnnnnnnnnnnnnnnnnnnnnnnnnnnnnnnnnnnnnnnnnnnnnnnnnnnnnnnnnnnnnnnnnnnnnnnnnnnnnnnnnnnnnnnnnnnnnnnnnnnnnnnnnnnnnnnnnnnnnnnnnnnnnnnnnnnnnnnnnnnnnnnnnnnnnnnnnnnnnnnnnnnnnnnnnnnnnnnnnnnnnnnnnnnnnnnnnnnnnnnnnnnnnnnnnnnnnnnnnnnnnnnnnnnnnnnnnnnnnngaactgtgtattctaatatttctggttaagtggtgactaggtaaggaaaccacttggggtatcagttcaacaattcacttatgaacgtttataagctttccatntcctaggtaatttttagaaagtcagtcaaaacaaaaaaactttactgaaaatggacagaaataggaaatggactttttccttactgtctatacctcttgaaccttggtattgtaaagatctggggacctctgagtctattctgaccattccctagtctgcatggccaagcactcaaggattgatggacaccacacactagctatattcatttgcccagatcaacagctccttctccaaacatctcaagcccccaattcctatcacattccatttgggtgagatgcaactaacagccccttcctggataaaggagtcaaagaataaagcttgcctagaggc

SEQ ID NO: 33355 - DNA, 538 bp, Macaca Mulatta
atgagtataccaggttagatatcgaaatgtttttaaacttgacaatcattacacgtgtaacagatttgaaatcgttagtcactattgttattgtttacagaccgattaatgaatatttcctctatgttattcctcctctccctcccattgcatggctcacacctctctgtctgttaaactgacgaccacggacaccttgtctcaatgttgtctgaagtcttactcgtctgaaaggctttggttgactactacttgtatctacagatgagctagaaggaggatcctggctggtggaggggagatctgactcatcagatgcttgacaggctcttcttcctgctggctatcaatttctaggcctgcttctgaactaataccttcagattctgcctccacaaatacttcatctccatcatcacctgttgctgtttcatttgttgtagataaagtgccagtggatgtagtcaccattggaacagattgagaggcatgttccgaagcatcagaggtggtgctctcagtaatacagtcactgggg

SEQ ID NO: 33356 - DNA, 1230 bp, Macaca Mulatta
  misc_feature (1)...(1230): n = A,T,C or G
gggtggatccatcctgctggttttactgtattccctccatgtcgaagtaggcctgtgaaaagctcatacaggcctcatgtgaagtgtccaccctttctgaaaatctttcttgttcaaaacagcaacaaccctttgttaacttttacagtgacttttagaggaggggagtttggaaattgtaaaatgttatagattgttgcctatttcctgctgaaagtaaatgtttttaaaaagtatcatataaagctgaatacaagttagtttggggggagatcctttcctacccaaagtcataaatatattctttactgccttgtagaaattttatactttttgcctttcacattatgtcttataatctgtcctgaaactgatttttttgtgaaaaattatgaagctaagaaattccaatttataacatctttttccataattttcacaaagttgggttggtcctccccgccacctaatatttacattgcaaaaaaggttcccattccccttgctttcccccaaggatgcagattttgtgtataaaccaacctggcccccttctttatttctcatatgaaacttaaaaaagatttgttaatctgagtggtataaccgacaagcactatgctacggagacacttaccacttcctttttgagaaattggagntacctctgtcgcctataacttcatccctcgagataacagcacgcgggcacacaccaatatctcacctcgatattatctagtgggtacacncnctattaaaaaaatatcgctatattaaacaaataaagaaacagggccctctttgtcacattaatatatcacctgaaaagttttcaccacccttagcgaaagattatatagtatcccacccaccgataccaccgctacatttatcttgtgccccgaagaataaatgacgggggtgttctctcgtgggaattaagatctaaaattcgactacctactacgtagaaaaatttgccgctctctccgctcccgatataaagtattgtcgatagattataaacactaccaatcttcatctcaagctaccccgccacactttaatatatagatagcactgtggctcgaaataattttccccccctaaatatttatctcctcccccacaccagtgagaaaacgtgtatgttctccccaactccccaaccgggngtgcaacacgcgattatcacttttagggaagaccagaacaaggctataagca

SEQ ID NO: 33357 - DNA, 2060 bp, Macaca Mulatta
  misc_feature (1)...(2060): n = A,T,C or G
agactattgcccagaagaaaagatgtttggttttcacaagccaaagatgtaccgaagtatagagggctgctgtatttgcagagctaagtcctccagttctcgattcactgacagtaaacgctatgaaaaggacttccagagctgttttgnnnnnnnnnnnnnnnnnnnnnnnnnnnnnnnnnnnnnnnnnnnnnnnnnnnnnnnnnnnnnnnnnnnnnnnnnnnnnnnnnnnnnnnnnnnnnnnnnnnnnnnnnnnnnnnnnnnnnnnnnnnnnnnnnnnnnnnnnnnnnnnnnnnnnnnnnnnnnnnnnnnnnnnnnnnnnnnnnnnnnnnnnnnnnnnnnnnnnnnnnnnnnnnnnnnnnnnnnnnnnnnnnnnttctgatgctcacagtaccacctcaagtgcctccccagctcaatctccttgttacagtaaccagtccgatgacggctcagatacagagatggcttctggttctaacagaacaccagnnnnnnnnnnnnnnnnnnnnnnnnnnnnnnnnnnnnnnnnnnnnnnnnnnnnnnnnnnnnnnnnnnnnnnnnnnnnnnnnnnnnnnnnnnnnnnnnnnnnnnnnnnnnnnnnnnnnnnnnnnnnnnnnnnnnnnnnnnnnnnnnnnnnnnnnnnnnnnnnnnnnnnnnnnnnnnnnnnnnnnnnnnnnnnnnnnnnnnnnnnnnnnnnnnnnnnnnnnnnnnnnnnnnnnnnnnnnnnnnnnnnnnnnnnnnnnnnnnnnnnnnnnnnnnnnnnnnnnnnnnnnnnnnnnnnnnnnnnnnnnnnnnnnnnnnnnnnnnnnnnnnnnnnnnnnnnnnnnnnnnnnnnnnnnnnnnnnnnnnnnnnnnnnnnnnnnnnnnnnnnnnnnnnnnnnnnnnnnnnnnnnnnnnnnnnnnnnnnnnnnnnnnnnnnnnnnnnnnnnnnnnnnnnnnnnnnnnnnnnnnnnnnnnnnnnnnnnnnnnnnnnnnnnnnnnnnnnnnnnnnnnnnnnnnnnnnnnnnnnnnnnnnnnnnnnnnnnnnnnnnnnnnnnnnnnnnnnnnnnnnnnnnnnnnnnnnnnnnnnnnnnnnnnnnnnnnnnnnnnnnnnnnnnnnnnnnnnagttgtacgtaatatttaagatgctgagtatttcataggaaagctgaatgctgctgtaaagtgctctttaagtcnnnnnnnntaaagcagaatcaaaagctcctctttgggaaatggcaagtctttaggacaggcgagaccctgtatgaatagtaccaaagcattaccgcacggtagagagcacactctattaaaaatgttaagctatctgaaaaataaaatgtgcaagtcttcaggatggcacaaaacaaaggttaatgctttttggggcacatttcttagagggcttgctgagtgtgtaaatataattgacttttgtttgtgttacatgactttgatgaccattgaaaatctgcacaattcagtttcagctctggattacttccgttgacctttgtgaaggtttttatctgtgtagaatgggtgtttgacttgttttagcctattaagtttttattattttctttcactctgtattaaaagtaaaatttactaaaagaaaagaggtttgtgttcatgttaaatggttttggtttggcttcttttagtcaggctttctgaacattgagatatcctgaacttagcactcttcaatcctaagatccccatgaaaagcctctcactggaacccaaaccacagtgtgctcttactgcctcttttctgaatagtcagcaaaagcatcgccagttcagtcttttcagaatgagggagaagcatttgcctgccttgtcataacaagactcagtgcttattttttaaactgcattttaaaaattgggtagtataataataacaaggagtaagccaccttttataggcaccctgtagttttatagttcttaatctaaacattttataattccttcttttggaaaaaacctacatgctacaagccaccatatgcacagactatacagtgagttgagttggctctcccacaagtctttgagg

SEQ ID NO: 33358 - DNA, 407 bp, Macaca Mulatta
gccaggagcatctgcatgtggtacttctcttttccctcagttgatctttcttatatgatattctagatactatagaactcaatttgtcagattcagtataagctcagattttgttacctgtcttttaataataaaaattttgtcaaatcaaataaagatcaatggatgttctgtataatcagtttttacttaaagcatttttctttttgccaactaaaaaggttcatcctagttccttatggaaaaactgctctgctgccctgtggacagttggcatcttaaaacgtgtcttaagacatgacacacttgcttcaacatattaaccctattaacgggatattgtggtcatagtgatggcagtggatggcagcagtggcccaaagggggttgagggggagccgtgatag

SEQ ID NO: 33359 - DNA, 91 bp, Macaca Mulatta
gaagatgcaagtggaccaggaggaaccacatgttgaagaacaacagcagcagacaccagcagaaaataaggcagagtctgaagaaatggag

SEQ ID NO: 33360 - DNA, 100 bp, Macaca Mulatta
gaagctggaatgccttctccagaatggaccaagaggaaaaagcagactttgaaaattgggcatggagggactctagacagcgcagcccgaggagttctgg

SEQ ID NO: 33361 - DNA, 529 bp, Macaca Mulatta
gtggaaataaaccctatcagtgtcgctgtttgtgggaaggcctttacaaagagctcaacccttactcgacatcagagaattcatactggagaaaaaccctatcactgtaagaaatgtgggaaagcctttcggcacagctcaggccttgttgaacatcagagactccatactggggaaaaaccttataaatgtaatgaatgtgggaaagcttttccccaaagttcagcccttaaacaacataagaaaattcataacaaagaaagagccacgaaatgtagttagtgtggcaaattgtgcagagtagtttattccttctgaccgtcatagaggagacattaaataaattatgcatttaacagaaatactctgtgtacttctgagagaatacctcacttgtgaggatattcattgtgaggtttgtactagtgaaatatttgaataagctaaatgtatgtcagtacggaagtagttatagcatactgcgtgctaattgaaaagaatgaggtggagctgtaaatactgtacaaag

SEQ ID NO: 33362 - DNA, 547 bp, Macaca Mulatta
gcctgggctcactctactgtctaccactgcctttctggccaaagccaaggtcatagcagctcacattcactggtttttgggcaggggtcagtgttggggcccttgtgattaggactgggaagctccattttggtgcttaatctgatcatcccatcttggttttgtgcttgtttattctcttctctcaaaagctggccagcaaatcggctgaagaaggcaaacagattccagacccgctgtccacggacctgtgagctgctgctgactagggctgcatgggagagccagggaggggagtttctggaagaggagagccatgggtggaacaccaaagcctcacagagtgggagactctccccatcagttgtcctcacttagaggagacagaggagccagtcaggtcccagagcttgagtgctaacaagcccagcatcccctggggctgtgatcatggtggatgaggaagcctcaatgtagattcctgaacgcaaggaaccagcaagaatgccttctcccagtgtgctctccccaacatcctaggcacagc

SEQ ID NO: 33363 - DNA, 661 bp, Macaca Mulatta
tttggaatagcctctcttcagtgtcacagagatgcaaccaatagacagaaaccagaggtaatggccacttcatccacatgaggagatatcagcatctcaacctctcatgccctttcaatcctagcacccactagatattttcagaacagaaaaacaaaactggaaaatacattgtttggtcttgtgtttctttacagaggtacctgagggaggagagacgtaaatctcttcatcactaagactgaactgtgtaactagcagcctctggcttattccctactccctgtccctcaggataaaatgttgatattgctcattttcctcatttccaacattgttttaaaacaactacttcttttacaggcttgaaaaatctcaaataaacgctaagaaaagggagtaggaagaacaaggagttgagcccttgaaagatgacattggtcttcttgccttcataatacttggccctctctcctcagaagggcaatgttggtacaaaattccatcttggccactttggaggagttatcttcattagccacatccatcctttaatccaacacacacctgcagtgattactgtgcaactattttgcttaaattttttcatttgaaaaatgtatttcaaagtccaacaactttttaatataaattatgactc

SEQ ID NO: 33364 - DNA, 3799 bp, Macaca Mulatta
  misc_feature (1)...(3799): n = A,T,C or G
gaacatccagagtctgtcccctgtgaagaagaagaagatggtgcctggggctctgggggtccccgctgacctggcccctgttgacgtcgagttctcctttcccaagttctcccgcctgcgccgaagcctcaaagctgaggctgccaagggtcctctcccggctgcccctgcccgccggcgcctccagctgcctcggctgcgtgtacgagaagtggccgaagaggctcaggcagcccggctggccgctgctgctcctccccccaggaaggccaaggtgnnnnnnnnnnnnnnnnnnnnnnnnnnnnnnnnnnnnnnnnnnnnnnnnnnnnnnnnnnnnnnnnnnnnnnnnnnnnnnnnnnnnnnnnnnnnnnnnnnnnnnnnnnnnnnnnnnnnnnnnnnnnnnnnnnnnnnnnnnnnnnnnnnnnnnnnnnnnnnnnnnnnnnnnnnnnnnnnnnncgcctgctgtggaggctccagccgtggggatccaggtcccccaggtggagctgcctgccttaccctcactgcccgctctgcctccacttccctgcctagagacccgggaaggggctgtgtcggtagtagtgcccaccctggatgtggcagcaccgactgtgggggtggacctggccttgccgggtgcagaggtggaggcccggggagaggcacctgaggtggccctgaagatgccccgccttagtttcccccgatttggggctcgagcaaaggaagttgctgaggccaaggtagccaagggcatccctgaggccagggtgaaaggtcccagacttcgaatgcccacctttgggctttccctcttggagccccggcctgctgctcctgaagttgtagagagcaagctgaagctgcccaccatcaagatgccctcccttggcatcggagtgtcagggcctgaggtcaaggtgcccaagggacctgaagtgaagctccccaaggctcctgaggtcaagcttccaaaagtgcccgaggcagctcttccagaggttcgactcccagaggtggagctccccaaggtgtcagagatgaagctcccaaaggtgccagagatggctgtgccggaggtgcggcttccagaggtgcagctgccgaaagtcccagagatgaaactcccaaaggtgccagagatggctgtgccagaggtgcggcttccagaggtgcagctgcccaaagtgtcagagatgaaactcccaaaggtgccagagatggctgtgccagaggtgcggcttccagaggtgcagctgcccaaagtgtcagagatgaaactcccaaaggtgccagagatggctgtgccggaggtgcggcttccagaggtgcagctgccgaaagtcccagagatgaaagtccctgagatgaagcttccaaaggtgcctgagatgaaacttcgtgagatgaaactccccgaagtgaaactcccgaaggtgcctgagatggccgtgcccgatgttcacctcccagaggtgcagctgccgaaagccccagagatgaaactccctaaaatgcccgagatggctgtgccagaggttcgacttcccgaggtgcagctgccaaaagtctcagagatgaaactccccaaggtgcctgagatggccgtgcccgatgtacacctcccagaggtgcagctgcccaaggtctccgaaatgaaagtccctgacgtgaagctcccggaggtaaaactccccnnnnnnnnnnnnnnnnnnnnnnnnnnnnnnnnnnnnnnnnnnnnnnnnnnnnnnnnnnnnnnnnnnnnnnnnnnnnnnnnnnnnnnnnnnnnnnnnnnnnnnnnnnnnnnnnnnnnnnnnnnnnnnnnnnnnnnnnnnnnnnnnnnnnnnnnnnnnnnnnnnnnnnnnnnnnnnnnnnnnnnnnnnnnnnnnnnnnnnnnnnnnnnnnnnnnnnnnnnnnnnnnnnnnnnnnnnnnnnnnnnnnnnnnnnnnnnnnnnnnnnnnnnnnnnnnnnnnnnnnnnnnnnnnnnnnnnnnnnnnnnnnnnnnnnnnnnnnnnnnnnnnnnnnnnnnnnnnnnnnnnnnnnnnnnnnnnnnnnnnnnnnnnnnnnnnnnnnnnnnnnnnnnnnnnnnnnnnnnnnnnnnnnnnnnnnnnnnnnnnnnnnnnnnnnnnnnnnnnnnnnnnnnnnnnnnnnnnnnnnnnnnnnnnnnnnnnnnnnnnnnnnnnnnnnnnnnnnnnnnnnnnnnnnnnnnnnnnnnnnnnnnnnnnnnnnnnnnnnnnnnnnnnnnnnnnnnnnnnnnnnnnnnnnnnnnnnnnnnnnnnnnnnnnnnnnnnnnnnnnnnnnnnnnnnnnnnnnnnnnnnnnnnnnnnnnnnnnnnnnnnnnnnnnnnnnnnnnnnnnnnnnnnnnnnnnnnnnnnnnnnnnnnnnnnnnnnnnnnnnnnnnnnnnnnnnnnnnnnnnnnnnnnnnnnnnnnnnnnnnnnnnnnnnnnnnnnnnnnnnnnnnnnnnnnnnnnnnnnnnnnnnnnnnnnnnnnnnnnnnnnnnnnnnnnnnnnnnnnnnnnnnnnnnnnnnnnnnnnnnnnnnnnnnnnnnnnnnnnnnnnnnnnnnnnnnnnnnnnnnnnnnnnnnnnnnnnnnnnnnnnnnnnnnnnnnnnnnnnnnnnnnnnnnnnnnnnnnnnnnnnnnnnnnnnnnnnnnnnnnnnnnnnnnnnnnnnnnnnnnnnnnnnnnnnnnnnnnnnnnnnnnnttttgggctggttcgaagggaaggaagccagaagttcaagggtgagcgtgcccagccccggggaaaaaggctgagtccacggctgtgccagcttaagttccccgaggtggagctggtcacactgggcgcccaggaagaaggggaaggcagagggggctgtggccgtcagtggaatgcagctgtcaggcctgaaggtgtccacagccaggcaggtggtcaccgagggccatgaggcggggctgaggatgcctccgctgggcatctccctgccccaggtggagctgaccggctttggggaggtgggtaccccagggcagcaagctgagagtacggccccttcagcagaggacacagcaggctgcagggttcaggtgccccaggtgaccctgtctctgcctggagcccaggttgcaggtggggagctgttggtgggtgagggtgtcttcaagatgcccaccgtgacagtgccccagcttgagctggacgtggggctaagccgagaggcacaggcagaagaggtggccacaggcaagggtgggctgaggctgaagttgcccacactggggactggagctggggtggggggcgagagtgctgaggagcagcccccaggggacgagcgtaccttccgcctctcactgcctgacgtggagctctcaccacccgggggcaaccacgccgagtaccaggtggcagacggggagggggaggctggacacaagctcaaggtacggctgccccggtttggcctggcgtgggccannnnnnnnnnnnnnnnnnnnnnnnnnnnnnnnnnnnnnnnnnnnnnnnnnnnnnnnnnnnnnnnnnnnnnnnnnnnnnnnnnnnnnnnnnnnnnnnnnnnnnnnnnnnnnnnnnnnnnnnnnnnnnnnnnnnnnnnnnnnnnnnnnnnnnnnnnnnnnnnnnnnnnnnnnnnngggtccgcttgccacgtgtaggcctggcgaccccttctaaagcctctcgggggcaggagggcgacgcagctcccaagtgccccgtcagagagaagtcaccaaggttccgcttccccagggtgtccctaagccccaaggcccggagtgggagtggggacc

SEQ ID NO: 33365 - DNA, 121 bp, Macaca Mulatta
aggctacgggtcgcgcgagcggccggcgctatggggctgagccgtgtgcgggccgttttctttgacttggataacactctcatcgacactgccggggcgagcaggagaggcatgttggagg

SEQ ID NO: 33366 - DNA, 654 bp, Macaca Mulatta
  misc_feature (1)...(654): n = A,T,C or G
gacatttccgtgggatagggaagatagcaagaagaaaagtaaactccacagaagtgtcattccactggcgttttgatattggctttgctgccagtctcccatttgtgacctatgccatccatctataatgaaggaggataccaacatttcttcctaatattctagaatccccaactcctgaaaacccctctctcaattaatactttgctgttgaaatgttgtgaaatgttaagtgtctggaattttttttttctaagaaaaactattaaagtacttcctagtagggttcttggccttttggttggttttttgggtttgtttttttgcatgtggcaaccttttttgcttctttttgctttgtatactcttgcgttgaaaatagtatttgagtcttttaattataaatactcagatnnnnnnnnnnnnnnnnnnnnnnnnnnnnnnnnnnnnnnnnnnnnnnnnnnnnnnnnnnnnnnnnnnnnnnnnnnnnnnnnnnnnnnnnnnnnnnnnnnnnnnnnnnnnnnnnnnnnnnnnnnnnnnnnnnnnnnnnnnnnnnnnnnnnnnnnnnnnnnnnnnnnnnnnnnnnnnnnnnnnnnnnnnnnnnnnnnnnnnnnnnnnnnnnnnnnnnnnnnnnnnnnnnnnnnnnnnnnnnna

SEQ ID NO: 33367 - DNA, 1565 bp, Macaca Mulatta
  misc_feature (1)...(1565): n = A,T,C or G
aaaagggcattattcatgtggtttcggttgagaagagtctctcagagctttccctgaagccatttcaaattgtactaatacgttaaattatgtattcaagatgctttatttagcatttagaaccccagctagacttatactttcactaaagccagaggcagaccaatttagggaacagattttgttctttggttttgtgatacatctgtaattcacagctgctagcatgacctcacatcactgcataggaccctgaaatcatatctcctggtcagttcacgaaaaagaacagaggcttgactcttgtccagaagttacttccctcttgactaaaggtttccccatagggtagacattgctacttaactttgcctgcaacccttttttgttnnnnnnnnnnnnnnnnnnnnnnnnnnnnnnnnnnnnnnnnnnnnnnnnnnnnnnnnnnnnnnnnnnnnnnnnnnnnnnnnnnnnnnnnnnnnnnnnnnnnnnnnnnnnnnnnnnnnnnnnnnnnnnnnnnnnnnnnnnnnnnnnnnnnnnnnnnnnnnnnnnnnnnnnnnnnnnnnnnnnnnnnnnnnnnnnnnnnnnnnnnnnnnnnnnnnnnnnnnnnnnnnnnnnnnnnnnnnnnnnnnnnnnnnnnnnnnnnnnnnnnnnnnnnnnnnnnnnnnnnnnnnnnnnnnnnnnnnnnnnnnnnnnnnnnnnnnnnnnnnnnnnnnnnnnnnnnnnnnnnnnnnnnnnnnnnnnnnnnnnnnnnnnnnnnnnnnnnnnnnnnnnnnnnnnnnnnnnnnnnnnnnnnnnnnnnnnnnnnattcctttacctcttggcattcatgagagagatgccaagttcagtgtgaatttttcttggtgctgtgtagagaaatggagtctgtgcacttactgaagagtcccaaaaggtggagatcattttcatttattgccatcataaagattctccaccattcaagatgcttgtgtacagggctacttgggaaactaaagtgttggaggaggcaggggctgaaggtgtcaaaacctcctcagtaggctaaccactttctcccctttggaccatctgccatctttccccagtgtttcccatggtgtttttgcatccagagttgacaacaactcaatttggccttgaatttactcagttttatagattaaaaatgtgcattttatataaaaatgcatttnnnnnnnnnnnnnnnnnnnnnnnnnnnnnnnnnnnnnnnnnnnnnnnnnnnnnnnnnnnnncacactttaaatctctatatgacagcatttttgaggttttatatctgtcagtgtaccctcaactgcctcctttttgcagagaatgatccccacaagaactggtctaagaacactgtctgctcatggtttatacttaaaatccaagataccaccacataacanaggttgggattttcagagtccttgatttctgagctganaccttaacaaatagggaatttggcagggaagacacctgggtttttaattcagaatcctatttatatactgttaaaatttgaggtactgtagtttatataaaagtc

SEQ ID NO: 33368 - DNA, 786 bp, Macaca Mulatta
gaccccagtgctcaggcacctcgctctagaggcttctgactcctggggctttggggcttaccacatatgcagtccctcccaggaacctgttggagaggcaggacctgctgctttggaagagtgcggctgaaccggggccttgcatccctgtttggccagagcaaggatctggcctggagaggcccatcctataccccttattagagccatgatagcctacagagtgaggtgaggtgctcccaccttcccagatggttcctttctgccccttcctggaaggaaaggtaaggctgccaatagcccactggcaccagccagacctcactcttgaccaacctctcggggccgggggttccttcctggggcactgtgacctggttttgctttgaaaccaataaagagcagagggaacccagcagttctgagttctgagccagccctacctcaggctggctgttgagacaagctacaattttcatttttgtaaaaataaagcttgattgttcacagatctggttcctcactggctgaatagttccagaaggccccaggagaagggaacaggagacccaagctcagggttgtgtgtgctgctgaaacgacaagactagcctcatggctctgtatcccaaagaacaaaggtttctttttttcaggaacagttgccattgatgacctattctttagcctttggggtgtggagggtcacctgtggtttgcagaggggactgtggaaagggtccaggctgctgggagctcagttgttacctgtggtgacccctaccc

SEQ ID NO: 33369 - DNA, 3369 bp, Macaca Mulatta
  misc_feature (1)...(3369): n = A,T,C or G
ccttcccaccatggattgccaagaaaatgagtactgggaccaatggggacggtgtgtcacctgccaacggtgtggtcctggacaggagctatccaaggnnnnnnnnnnnnnnnnnnnnnnnnnnnnnnnnnnnnnnnnnnnnnnnnnnnnnnnnnnnnnnnnnnnnnnnnnnnnnnnnnnnnnnnnnnnnnnnnnnnnnnnnnnnnnnnnnnnnnnnnnnnnnnnnnnnnnnnnnnnnnnnnnnnnnnnnnnnnnnnnnnnnnnnnnnnnnnnnnnnnnnnnnnnnnnnnnnnnnnnnnnnnnnnnnnnnnnnnnnnnnnnnnnnnnnnnnnnnnnnnnnnnnnnnnnnnnnnnnnnnnnnngtgccttccagttgagcttagtggaggcagatgcacccacagtgccccctcaggaggccgcacttgttgcactggtgagcagcctgctagtggtgtttaccctggccttcctggggctcttcttcctctactgcaagcagttcttcaacagacattgccagcgtgngaggttcgctgaagtttcaggctgataaaacagcagaggaggaatctctcttccccatggcacccagcaaggagaccagtcctgagccccaaatgagtgagagcatctttcagacccagccacttaaccctatcctcgaggacgactgcagctcgactagtggcttccccacacaggattcctttaccacggcctcctgcgcctcagagagccactcccactgggtccacaaccccatcgaatgcacagagctggacctgcaaaagttttccagctctgcctcctatactggagctgagaccttgaggggaaacacaaccgaaagcactggagacagactggagctcaatgtgacctttgaagttcccagcccttaactctaatgaggtnnnnnnnnnnnnnnnnnnnnnnnnnnnnnnnnnnnnnnnnnnnnnnnnnnnnnnnnnnnnnnnnnnnnnnnnnnnnnnnnnnnnnnnnnnnnnnnnnnnnnnnnnnnnnnnnnnnnnnnnnnnnnnnnnnnnnnnnnnnnnnnnnnnnnnnnnnnnnnnnnnnnnnnnnnnnnnnnnnnnnnnnnnnnnnnnnnnnnnnnnnnnnnnnnnnnnnnnnnnnnnnnnnnnnnnnnnnnnnnnnnnnnnnnnnnnnnnnnnnnnnnnnnnnnnnnnnnnnnnnnnnnnnnnnnnnnnnnnnnnnnnnnnnnnnnnnnnnnnnnnnnnnnnnnnnnnnnnnnnnnnnnnnnnnnnnnnnnnnnnnnnnnnnnnnnnnnnnnnnnnnnnnnnnnnnnnnnnnnnnnnnnnnnnnnnnnnnnnnnnnnnnnnnnnnnnnnnnnnnnnnnnnnnnnnnnnnnnnnnnnnnnnnnnnnnnnnnnnnnnnnnnnnnnnnnnnnnnnnnnnnnnnnnnnnnnnnnnnnnnnnnnnnnnnnnnnnnnnnnnnnnnnnnnnnnnnnnnnnnnnnnnnnnnnnnnnnnnnnnnnnnnnnnnnnnnnnnnnnnnnnnnnnnnnnnnnnnnnnnnnnnnnnnnnnnnnnnnnnnnnnnnnnnnnnnnnnnnnnnnnnnnnnnnnnnnnnnnnnnnnnnnnnnnnnnnnnnnnnnnnnnnnnnnnnnnnnnnnnnnnnnnnnnnnnnnnnnnnnnnnnnnnnnnnnnnnnnnnnnnnnnnnnnnnnnnnnnnnnnnnnnnnnnnnnnnnnnnnnnnnnnnnnnnnnnnnnnnnnnnnnnnnnnnnnnnnnnnnnnnnnnnnnnnnnnnnnnnnnnnnnnnnnnnnnnnnnnnnnnnnnnnnnnnnnnnnnnnnnnnnnnnnnnnnnnnnnnnnnnnnnnnnnnnnnnnnnnnnnnnnnnnnnnnnnnnnnnnnnnnnnnnnnnnnnnnnnnnnnnnnnnnnnnnnnnnnnnnnnnnnnnnnnnnnnnnnnnnnnnnnnnnnnnnnnnnnnnnnnnnnnnnnnnnnnnnnnnnnnnnnnnnnnnnnnnnnnnnnnnnnnnnnnnnnnnnnnnnnnnnnnnnnnnnnnnnnnnnnnnnnnnnnnnnnnnnnnnnnnnnnnnnnnnnnnnnnnnnnnnnnnnnnnnnnnnnnnnnnnnnnnnnnnnnnnnnnnnnnnnnnnnnnnnnnnnnnnnnnnnnnnnnnnnnnnnnnnnnnnnnnnnnnnnnnnnnnnnnnnnnnnnnnnnnnnnnnnnnnnnnnnnnnnnnnnnnnnnnnnnnnnnnnnnnnnnnnnnnnnnnnnnnnnnnnnnnnnnnnnnnnnnnnnnnnnnnnnnnnnnnnnnnnnnnnnnnnnnnnnnnnnnnnnnnnnnnnnnnnnnnnnnnnnnnnnnnnnnnnnnnnnnnnnnnnnnnnnnnnnnnnnnnnnnnnnnnnnnnnnnnnnnnnnnnnnnnnnnnnnnnnnnnnnnnnnnnnnnnnnnnnnnnnnnnnnnnnnnnnnnnnnnnnnnnnnnnnnnnnnnnnnnnnnnnnnnnnnnnnnnnnnnnnnnnnnnnnnnnnnnnnnnnnnnnnnnnnnnnnnnnnnnnnnnnnnnnnnnnnnnnnnnnnnnnnnnnnnnnnnnnnnnnnnnnnnnnnnnnnnnnnnnnnnnnnnnnnnnnnnnnnnnnnnnnnnnnnnnnnnnnnnnnnnnnnnnnnnnnnnnnnnnnnnnnnnnnnnnnnnnnnnnnnnnnnnnnnnnnnnnnnnnnnnnnnnnnnnnnnnnnnnnnnnnnnnnnnnnnnnnnnnnnnnnnnnnnnnnnnnnnnnnnnnnnnnnnnnnnnnnnnnnnnnnnnnnnnnnnnnnnnnnnnnnnnnnnnnnnnnnnnnnnnnnnnnnnnnnnnnnnnnnnnnnnnnnnnnnnnnnnnnnnnnnnnnnnnnnnnnnnnnnnnnnnnnnnnnnnnnnnnnnnnnnnnnnnnnnnnnnnnnnnnnnnnnnnnnnnnnnnnnnnnnnnnnnnnnnnnnnnnnnnnnnnnnnnnnnnnnnnnnnnnnnnnnnnnnnnnnnnnnnnnnnnnnnnnnnnnnnnnnnnnnnnnnnnnnnnnnnnnnnnnnnnnnnnnnnnnnnnnnnnnnnnnnnnnnnnnnnnnnnnnnnnnnnnnnnnnnnnnnnnnnnnnnnnnnnnnnnnnnnnnnnnnnnnnnnnnnnnnnnnnnnnnnnnnnnnnnnnnnnnnnnnnnnnnnnnnnnnnnnnnnnnnnnnnnnnnnnnnnnnnnnnnnnnnnnnnnnnnnnnnnnnnnnnnnnnnnnnnnnnnnnnnnnnnnnnnnnnnnnnnnnnnnnnnnnnnnnnnnnnnnnnnnnnnntcttgagctatatacatgtgtagatagtgacatggctgtgtttgtttatgatactctgcaaacatttcatattggccaataaacataaatatatccaa

SEQ ID NO: 33370 - DNA, 895 bp, Macaca Mulatta
  misc_feature (1)...(895): n = A,T,C or G
ggggaggcacagcggacacggggactccaagatggcgtcagtcgtaccagtgaaggacaagaaacttctggaggtcaaactgggggagctgccaagctggatcttgatgcgggacttcagccctagtggcattctcggagcatttcaaagaggttactaccggtactacaacaagtacattaacgtgaagaaggggagcatctcggggattaccatggtgctggcatgctatgtgctcttcaactacagcatttcctacaagcatctcaagcacgagcggctccgcaaataccactgaagaggacacactgtgcaccacccccgaccccatgaccttggcctgagcccctccgtgaggaacacaatctcgattgttgctgaatcctttcatgtcctaatgggaattaacctccaaataaaagatgactggtnnannannnnnnnnnnnnnnnnnnnnnnnnnncnnnnnnnnnnnnnnnnnnnnnnnnnnnnnnnnnnaaaaattggaacaaacataaaaaaaagaggggaaaccctgtgtggggcccctttggcccnnnnnnnnnnnnnnnnnnnnnnattgttttgggccggcgcggccccagtgggggaagggaaattgggccaaaagcttttttcccaaaggagaacctgggggtgaaaaaaaggggctggaaaatccccccccaagaaaaaaacccccccggggcggcaaccccaaagcttttttggaaacaatccccgaaggggaggttttgtgggaggctttttattggggggtctcttaccccggggggatttccaaagtgggaagccctaaattactaaaaattgagccccccccccgccggggatatttctgtttgagagaaaaagtgggggggactcctccaag

SEQ ID NO: 33371 - DNA, 763 bp, Macaca Mulatta
cactggatcagcaatgatgaccctatgcagtactggagaagttggcattttctgatatagaaagaggctttccttggtatcgtgttatcatgtgtcatcatctatgcattagagttgatgtgttttgtactagtgtcacagcataaaatcatattacaagtacttaaggattcagggtctcttgatagaattatcatagctctatattgaatgaaagccactgtgcttatgttttgattggaaattcctttagtgtcaattttttggaagccaatgatgttcgccactgatacattcatagaagtgtattatgttttcatgaaattttgctttaggtgacactatgcacgcagttcatttctagttcttgatagaactgcacttaattctcagtagtagtcttgactttttaagggctgtgctatagtaagttctcccttactgttaaaacctaattaaatacgctctagaattttctaagacagtgctctggatcctctaaatgtgaattttgatgtaataatggctaataaaattatattgaaacagtgttttatagtaagttttttccaaagttttctatgtttggctcaactagggcagtatcatcagctctataatgtaaaataaattttctttcttttgaggtattctgtaaaagtagttgggaaaaatattatgtaaaataataagactcttccaaagtcttaataaaaacatcaacattgaaaacagtttttataggttgcccaaaattatttct

SEQ ID NO: 33372 - DNA, 245 bp, Macaca Mulatta
cagccccgagccatgatgaagactttgtccagcgggaactgcacgctcagtgtgcccgccaagaactcataccgtatggtggtgctgggcgcctctcgggtgggcaagagctccattgtgtctcgctttctcaatgggcgcttcgaggaccagtacacacccaccatcgaggacttccaccgcaaggtgtacaacatccgcggcgacatgtaccagctggacatcctggatacctccggcaacca

SEQ ID NO: 33373 - DNA, 651 bp, Macaca Mulatta
ttcccgctggggcgctgggcagccctctctgcagctgcccctctcgggccctggttgccagcacgttggcacttccagatgccactcttctttccggcttgcatgttgtttttcttttttaaaggaggtgacgcgaagttactggtgattctgtgcatttctcccagccagaggcacctggcacagacgttgcagggcctgggtttcgggatccgagctcggcaagtccagcgaggccctgcccgaaagaggccgcccagctcccagatggaggggaagaggaggccggattgaacgcattaatgagtttttctcctaaaactgtgtgttttgtcattgcttataatgcatatgtgcttagaaataaacaggtttcatgtggactcgataaacctggctttattccaaagcaccctcatgaacgtggatgggacctccagctgctgccagacgatcacgcagaacaggctccacagaggagctccttgcagagcggcggccaccaggtgtcacagcaggcactcgctgtcctcatcagactctccccagaggccaccctgggccccaaaggccctgccccgggaaactcgggagccggcaggaacggccgtgggcaggagggcaggggcgtgagcgccccacagtgggagc

SEQ ID NO: 33374 - DNA, 653 bp, Macaca Mulatta
  misc_feature (1)...(653): n = A,T,C or G
ggctcttccatgaacctcaaggactaattgggagagcggcgaggggggccatcattcaaagccccgggctacaaacatgacatcaagtacaactgctgcgaggagatctaccccgacatcacatactcgctgtacatccggcgcctgcccttgttctacaccatcaacctcatcatcccctgcctgctcatctccttcctcactgtgctcgtcttctacctgccctccgactgcggtgagaaggtgaccctgtgcatttccgtcctcctttccctgacagtgtttctcctggtgatcactgagaccatcccttccacctcgctagtcatccccctgattggagagtacctcctgttcaccatgattttcgtaaccctgtccatcgtcatcactgtcttcgtgctcaacgtgcactacagaaccccgactacacacacaatgccctcatgggtgaagaccgtattcttgaacctgctccccagggtcatgngataaaaatctccaatttcagtgctaacctcacaagaagctctagttctgaatctgttgatgctgtgctgtccctctctgctttgtcaccagaaatcaaagaagccatccaaagtgtcaagtatattgctgaaaatatgaaagcacaaaatgaagccaaagag

SEQ ID NO: 33375 - DNA, 2778 bp, Macaca Mulatta
  misc_feature (1)...(2778): n = A,T,C or G
ggtagtcctgatgtcggctaccatcaactgtaaagagtttgcagactactttgccgttcctgttcaaaacaagatgaatcctgcatatatttttgaagtggaaggcaagccccattcagttgaagagtattatcttaatgatttggggcacattcatcatagcaagnnnnnnnnnnnnnnnnnnnnnnnnnnnnnnnnnnnnnnnnnnnnnnnnnnnnnnnnnnnnnnnnnnnnnnnnnnnnnnnnnnnnnnnnnnnnnnnnnnnnnnnnnnnnnnnnnnnnnnnnnnnnnnnnnnnnnnnnnnnnnnnnnnnnnnnnnnnnnnnnnnnnnnnnnnnnnnnnnnnnnnnnnnnnnnnnnnnnnnnnnnnnnnnnnnnnnnnnnnnnnnnnnnnnnnnnnnnnnnnnnnnnnnnnnnnnnnnnnnnnnnnnnnnnnnnnnnnnnnnnnnnnnnnnnnnnnnnnnnnnnnnnnnnnnnnnnnnnnnnnnnnnnnnnnnnnnnnnnnnnnnnnnnnnnnnnnnnnnnnnnnnnnnnnnnnnnnnnnnnnnnnnnnnnnnnnnnnnnnnnnnnnnnnnnnnnnnnnnnnnnnnnnnnnnnnnnnnnnnnnnnnnnnnnnnnnnnnnnnnnnnnnnnnnnaaggccgtgctggacgagtgtctagagggtactgttaccggctggtacacaaggatttctgggacaactccatccctgatcatgttgttcctgagatgttnnnnnnnnnnnnnnnnnnnnnnnnnnnnnnnnnnnnnnnnnnnnnnnnnnnnnnnnnnnnnnnnnnnnnnnnnnnnnnnnnnnnnnnnnnnnnnnnnnnnnnnnnnnnnnnnnnnnnnnnnnnnnnnnnnnnnnnnnnnnnnnnnnnnnnnnnnnnnnnnnnnnnnnnnnnnnnnnnnnnnnnnnnnnnnnnnnnnnnnnnnnnnnnnnnnnnnnnnnnnnnnnnnnnnnnnnnnnnnnnnnnnnnnnnnnnnnnnnnnnnnnnnnnnnnnnnnnnnnnnnnnnnnnnnnnnnnnnnnnnnnnnnnnnnnnnnnnnnnnnnnnnnnnnnnnnnnnnnnnnnnnnnnnnnnnnnnnnnnnnnnnnnnnnnnnnnnnnnnnnnnnnnnnnnnnnnnnnnnnnnnnnnnnnnnnnnnnnnnnnnnnnnnnnnnnnnnnnnnnnnnnnnnnnnnnnnnnnnnnnnnnnnnnnnnnnnnnnnnnnnnnnnnnnnnnnnnnnnnnnnnnnnnnnnnnnnnnnnnnnnnnggtggttgacttatacgaagaattgaagactagaatctcacagttcaacatgcatgttgattctcggcgacctgtcatggaccaagagtatatatataagcagcgattcatcctacaggtncaggttgtcttggcaggtgctttctatccaaattactttactttcggacagcctgatgaggagatggcggtgagggagctggctggcaaggaccccaagacaactgtnnnnnnnnnnnnnnnnnnnnnnnnnnnnnnnnnnnnnnnnnnnnnnnnnnnnnnnnnnnnnnnnnnnnnnnnnnnnnnnnnnnnnnnnnnnnnnnnnnnnnnnnnnnnnnnnnnnnnnnnnnnnnnnnnnnnnnnnnnnnnnnnnnnnnnnnnnnnnnnnnnnnnnnnnnnnnnnnnnnnnnnnnnnnnnnnnnnnnnnnnnnnnnnnnnnnnnnnnnnnnnnnnnnnnnnnnnnnnnnnnnnnnnnnnnnnnnnnnnnnnnnnnnnnnnnnnnnnnnnnnnnnnnnnnnnnnnnnnnnnnnnnnnnnnnnnnnnnnnnnnnnnnnnnnnnnnnnnnnnnnnnnnnnnnnnnnnnnnnnnnnnnnnnnnnnnnnnnnnnnnnnnnnnnnnnnnnnnnnnnnnnnnnnnnnnnnnnnnnnnnnnnnnnnnnnnnnnnnnnnnnnnnnnnnnnnnnnnnnnnnnnnnnnnnnnnnnnnnnnnnnnnnnnnnnnnnnnnnnnnnnnnnnnnnnnnnnnnnnnnnnnnnnnnnnnnnnnnnnnnnnnnnnnnnnnnnnnnnnnnnnnnnnnnnnnnnnnnnnnnnnnnnnnnnnnnnnnnnnnnnnnnnnnnnnnnnnnnnnnnnnnnnnnnnnnnnnnnnnnnnnnnnnnnnnnnnnnnnnnnnnnnnnnnnnnnnnnnnnnnnnnnnnnnnnnnnnnnnnnnnnnnnnnnnnnnnnnnnnnnnnnnnnnnnnnnnnnnnnnnnnnnnnnnnnnnnnnnnnnnnnnnnnnnnnnnnnnnnnnnnnnnnnnnnnnnnnnnnnnnnnnnnnnnnnnnnnnnnnnnnnnnnnnnnnnnnnnnnnnnnnnnnnnnnnnnnnnnnnnnnnnnnnnnnnnnnnnnnnnnnnnnnnnnnnnnnnnnnnnnnnnnnnnnnnnnnnnnnnnnnnnnnnnnnnnnnnnnnnnnnnnnnnnnnnnnnnnnnnnnnnnnnnnnnnnnnnnnnnnnnnnnnnnnnnnnnnnnnnnnnnnnnnnnnnnnnnnnnnnnnnnnnnnnnnnnnnnnnnnnnnnnnnnnnnnnnnnnnnnnnnnnnnnnnnnnnnnnnnnnnnnnnnnnnnnnnnnnnnnnnnnnnnnnnnnnnnnnnnnnnnnnnnnnnnnnnnnnnnnnnnnnnnnnnnnnnnnnnnnnnnnnnnnnnnnnnnnnnnnnggtgtgtgtggattgagaaggagagcatcaactctgtcattatcagtgacgcccctgaagaccttcaccagagaatgctggttgcagcttccctgtccatcaatgcgactgg

SEQ ID NO: 33376 - DNA, 370 bp, Macaca Mulatta
  misc_feature (1)...(370): n = A,T,C or G
cggtttaagcggaagcatcttactgccatcgactgccagcatttggctcggagtcacttggctgtgacccagcccttcggtcagagatggacaaacagagatccgaaccatggtctctatcctaaacccagaacaaaaagagggagtaggggtnggtcagggacgtcaaagatgtatccctgagttcttcctagcaggcaagcggccgtgcaccaatgacatggccaaaagcaattctgttggccaggacagctgtcaggactctgagggtgacatgatctttcctgcagagagcagctgtgcactgcctcaggaaggcagtggagaagcatggctgggctcatcagggtctgccccgccctccaggaag

SEQ ID NO: 33377 - DNA, 1565 bp, Macaca Mulatta
gggggggctttccggcggtgcttgtgagcccggtagccatgtcgtatcctgctgatgattatgagtcggaggcggcttatgacccctacgcttatccgagcgactatgatatgcacacaggagatccaaagcaggaccttgcttatgaacgtcagtatgaacagcaaacctatcaggtgatccctgaggtgatcaaaaacttcatccagtatttccacaaaactgtctcagatttgattgaccagaaagtgtatgagctacaggccagtcgtgtctccagcgatgtcattgaccagaaggtgtatgagatccaggacatctatgagaacagctggaccaagctgactgaaagattcttcaagaatacaccttggcccgaggctgaagccattgctccacaggttggcaatgatgctgtcttcctgatattatacaaagaattatactacaggcacatatatgccaaagtcagtgggggaccttccttggagcagaggtttgaatcctattacaactactgcaatctcttcaactacattcttaatgccgatggtcctgctcctcttgaactacccaaccagtggctctgggatatcatcgatgagttcatctaccagtttcagtcattcagtcagtaccgctgtaagactgccaagaagtcagaggaggagattgactttcttcgttccaatcccaaaatctggaatgttcacagtgtcctcaatgtccttcattccctggtagacaaatccaacatcaaccgacagttggaggtatacacaagcggatgtgacccgagagtgtggctggggagtatgggcggcgtccctctacaaatgcttggttacttgcagcctggtggggctcctccgcctgcactccctgtgatgagattactaccaggggtatcaagggtgctggagaacatcgaactgaaccagaagagtatgtattcccgcgtgccagagtgccaggtcaccacatactattatgttgggtttgcatatttgatgatgcgtcgctaccaggatgccatccgggtcttcgccaacatcctcctctacatccagaggaccaagagcatgtttcagaggaccacatataagtatgagatgattaacaagcagaatgagcagatgcatgcgctgctggccattgccctcactatgtaccccatgcgtattgatgagagcattcacctccagctgcgggagaaatacggggacaagatgctgcgcatgcagaaaggtgacccacaagtctatgaagaacttttcagttactcctgccccaagttcctatcgcctgtagtgcccaactatgataatgtgcaccccaactaccacaaagagcccttcctgcagcagctgaaggtgttttctgatgaagtgcagcagcaggcccagctttccaccatccgcagcttcctcaagctctacaccaccatgcctgtggccaagctggctggcttcctggacctcacagagcaggagttccggatccagcttcttgtcttcaaacacaagatgaagaatctggtgtggaccagcggcatctcagccctg

SEQ ID NO: 33378 - DNA, 385 bp, Macaca Mulatta
acctgtgattgcagcccctgtcttactcaagtaccaattcagtgataaagggagatgagagcagagtagtgtggcagatgtttattgaactaaaggaggagagctgagctgagcccagcctgatcacctcctcagagactcagcattgtgaattgcccccacagggtcatttttatacagcatgaagtagccctgcacctgggcaggactgatctgggttgtagcttgaaggacacgttctgcaaagtcctcagctaaggaaggtgcctgccctggatagaacctctggaacatctgggacagctgccagtgtgagcagtagcccacatactccttcaggtccactcgcccggggcgtatcagggcggggtccagcctgagagaa

SEQ ID NO: 33379 - DNA, 1034 bp, Macaca Mulatta
gggaagtcatctggtttaacattaaatgaaatgttattgtctgatgtctagatttgagttgataatttgtttacctttcttcagggaagaactgctaaagctttgaggtcactacaatttacaaatccaggaaggcaaactgaatttgctccagaaactggtaaaagagaaaaaagaaggcttacaaaaaatgcaaccgctggttcagacagacaagtgataccagcaaagagtaaggtctatgatagccaaggtctcctgatttttagtgggatggacctctgtgactgccttgatgaagattgcttaggatgtttctatgcttgtcctgcctgtggttctaccaagtgtggagctgaatgccgctgtgaccgcaagtggctgtatgagcaaattgaaattgaaggaggagaaataattcataataaacatgctggataatctgtggtaccaaactgtggggcctttaaaggtcattatttctaaaattctgttactcttaagatatattttaagcttgattgtcatatgacaaagattttaaaaccacctcagtgtgccctgatttttcatcttgggtgctttaagattcactatttgatataaattcagataggctatttttcggcctattgagcctgtcctggatcaatgtttagcaagtaggggtgtagacagtccctcctatttggcatgtgttcccgtggtcacaaatttcattgacctagatttcatttaaacaccagtttccttaccgggaaggaaaagaaactggtaaggaaactgttgttaaaatctaggttaaaattttagttagcgcagtataactcttgagtaattacatgaagtacaaacttctctgctagttcttcagtctacaaatcactatgtaaataacagatatacttcatgattaataaccagtcatgttgactgctttcagattcttccagtggtttgtccctgtgtatctgttattcagttcacttacagcagggcacatagttatgctgtcactttgtcatccacttgaa

SEQ ID NO: 33380 - DNA, 117 bp, Macaca Mulatta
tatttacgtgttacagacaggtattaataacaatttcataaatacaggcaaatacatataaacatatacatacccctttcccaagtcagtgctgctagcttctcccaccctcctctc

SEQ ID NO: 33381 - DNA, 591 bp, Macaca Mulatta
  misc_feature (1)...(591): n = A,T,C or G
gaagaaaattctgaaagccaaagtccacaaagtaggttgccatcaccaagcgaacaggacattgggctgggcttaaacagcagtagtttgtcaaattcccattcacagctgcaccctggtgatactgactcagtccagccctctcctgagaaaccaaactccgactccttgtctctggcacccataactcccatgacaccaatgacccctgtttcagaatgttgtggaattgtacctcaactacannnnnnnnnnnnnnnnnnnnnnnnnnnnnnnnnnnnnnnnnnnnnnnnnnnnnnnnnnnnnnnnnnnnnnnnnnnnnnnnnnnnnnnnnnnnnnnnnnnnnnnnnnnnnnnnnnnnnnnnnnnnnnnnnnnnnnnnnnnnnnnnnnnnnnnnnnnnnnnnnnnnnnnnnnnnnnnnngtgaagagcagtctcgacttgcagcgagaaaatatgctcgtgtggtgcagaagcttgggttccctgccagattcctcgattttaaaattcagaacatggttggaagctgtgatgtgagatttcccatcaggctggaaggtttggtgttaacccatcagcagttcagtag

SEQ ID NO: 33382 - DNA, 723 bp, Macaca Mulatta
tattatccccagcctctgctcatttgttcccaaattcaatacatggtcaaagcctctgggtccttttttaacatctctcacttgtgtcattctctccattcccataaacctcaacaactgctcaaagtcctgcttgaccccttgttgccagtctttgaaatgtttcttgcatatgactgcctcattaccttcctaaaatctagttcactcgcctactcaagaagacacagggacctactgtggtctattagataagttcacatttcttctctttactaagctctctcaattcctttaccaccactcccttgtataattccgtcatccgaattagatctatctccctacacatccctgcctctccaccccatatgaacatagaattcttagttccaatgttacacctaaaaacatgtcaaacagggtgacctccttccaccacctgcactgtggagttacccacacccttcatcacaagcaacttctgacctcatgaagaacaaagactgtagcattaacatatgagtcttaagctcaggacacaatctacctgtggctgagaaccttttcctgataaccaattcatgtgttcatagcagatacagaaatgaagaaggcaaggtccttaattctatgacaggagacaaaaccggaaaaataatcataataccaaaatagaaaggagtgaacgtcacgagaaatcagagaaatctgatggaaaat

SEQ ID NO: 33383 - DNA, 523 bp, Macaca Mulatta
tctgacaattttcttcaattatctgaggcttgaaattgacctttcctgtttgaaagggagtggttgttatttttagacagcatgcacatggttttttatgcggccacagctttcaaaattttcagttctactgtgccattgaattccctgataatctgaggtggaaccatatgttgctaatgtagtttcaatttcttattattacagttagtttcagagtgtggacatatgaatcacaatagatcttatcaacttttttattcgggttgccatctatggtattcgttttacaatttttgagtaccagctatgtgctgtgatgcaaggtagagtacagatatggataatatccaagtgctccttgatagaacttattatgtagggagggaggacaaataataacagagaatgaatggccaggggaaagaagtacaacagtaggagagccttctagagcctaaggatggggaatccaccttagagctccatatgtaatagagatatataacacaggtagcttttc

SEQ ID NO: 33384 - DNA, 342 bp, Macaca Mulatta
ctgatgggctgagggagctcctagaagactgttgggatgcagacccagaagcacggctgacggctgagtgtgtacagcagcgcctggctgccctggcccatcctcaggagagcccctttccggagagctgtccacgtggctgcacacctctctgcccagaagactgtacttcaactcctgcccctaccatcctgccctgtaggcctcagcggagtgcctgccacttcaatgttcagcaaggcccttgttccaggaatcctcagcctgcctgtaccctttctcctatgtaaatatgcagtttatgtgtaatcaatgtacatgccaacctaaacatggcgattg

SEQ ID NO: 33385 - DNA, 2341 bp, Macaca Mulatta
  misc_feature (1)...(2341): n = A,T,C or G
agggaactacgagctggtcagtttgttgctgagccgaggcgctgaccccctcctcagcatgctcgaggcccacggcatgggttcctccctccatgaggacatgaactgcttcagccactcagctgcccacggccacaggnnnnnnnnnnnnnnnnnnnnnnnnnnnnnnnnnnnnnnnnnnnnnnnnnnnnnnnnnnnnnnnnnnnnnnnnnnnnnnnnnnnnnnnnnnnnnnnnnnnnnnnnnnnnnnnnnnnnnnnnnnnnnnnnnnnnnnnnnnnnnnnnnnnnnnnnnnnnnnnnnnnnnnnnnnnnnnnnnnnnnnnnnnnnnnnnnnnnnnnnnnnnnnnnnnnnnnnnnnnnnnnnnnnnnnnnnnnnnnnnnnnnnnnnnnnnnnnnnnnnnnnnnnnnnnnnnnnnnnnnnnnnnnnnnnnnnnnnnnnnnnnnnnnnnnnnnnnnnnnnnnnnnnnnnnnnnnnnnnnnnnnnnnnnnnnnnnnnnnnnnnnnnnnnnnnnnnnnnnnnnnnnnnnnnnnnnnnnnnnnnnnnnnnnnnnnnnnnnnnnnnnnnnnnnnnnnnnnnnnnnnnnnnnnnnnnnnnnnnnnnnnnnnnnnnnnnnnnnnnnnnnnnnnnnnnnnnnnnnnnnnnnnnnnnnnnnnnnnnnnnnnnnnnnnnnnnnnnnnnnnnnnnnnnnnnnnnnnnnnnnnnnnnnnnnnnnnnnnnnnnnnnnnnnnnnnnnnnnnnnnnnnnnnnnnnnnnnnnnnnnnnnnnnnnnnnnnnnnnnnnnnnnnnnnnnnnnnnnnnnnnnnnnnnnnnnnnnnnnnnnnnnnnnnnnnnnnnnnnnnnnnnnnnnnnnnnnnnnnnnnnnnnnnnnnnnnnnnnnnnnnnnnnnnnnnnnnnnnnnnnnnnnnnnnnnnnnnnnnnnnnnnnnnnnnnnnnnnnnnnnnnnnnnnnnnnnnnnnnnnnnnnnnnnnnnnnnnnnnnnnnnnnnnnnnnnnnnnnnnnnnnnnnnnnnnnnnnnnnnnnnnnnnnnnnnnnnnnnnnnnnnnnnnnnnnnnnnnnnnnnnnnnnnnnnnnnnnnnnnnnnnnnnnnnnnnnnnnnnnnnnnnnnnnnnnnnnnnnnnnnnnnnnnnnnnnnnnnnnnnnnnnnnnnnnnnnnnnnnnnnnnnnnnnnnnnnnnnnnnnnnnnnnnnnnnnnnnnnnnnnnnnnnnnnnnnnnnnnnnnnnnnnnnnnnnnnnnnnnnnnnnnnnnnnnnnnnnnnnnnnnnnnnnnnnnnnnnnnnnnnnnnnnnnnnnnnnnnnnnnnnnnnnnnnnnnnnnnnnnnnnnnnnnnnnnnnnnnnnnnnnnnnnnnnnnnnnnnnnnnnnnnnnnnnnnnnnnnnnnnnnnnnnnnnnnnnnnnnnnnnnnnnnnnnnnnnnnnnnnnnnnnnnnnnnnnnnnnnnnnnnnnnnnnnnnnnnnnnnnnnnnnnnnnnnnnnnnnnnnnnnnnnnnnnnnnnnnnnnnnnnnnnnnnnnnnnnnnnnnnnnnnnnnnnnnnnnnnnnnnnnnnnnnnnnnnnnnnnnnnnnnnnnnnnnnnnnnnnnnnnnnnnnnnnnnnnnnnnnnnnnnnnnnnnnnnnnnnnnnnnnnnnnnnnnnnnnnnnnnnnnnnnnnnnnnnnnnnnnnnnnnnnnnnnnnnnnnnnnnnnnnnnnnnnnnnnnnnnnnnnnnnnnnnnnnnnnnnnnnnnnnnnnnnnnnnnnnnnnnnnnnnnnnnnnnnnnnnnnnnnnnnnnnnnnnnnnnnnnnnnnnnnnnnnnnnnnnnnnnnnnnnnnnnnnnnnnnnnnnnnnnnnnnnnnnnnnnnnnnnnnnnnnnnnnnctttggtgcctgggcttccagagtacctcccatcaggactatcggcttgctcagttagcagcagagggcatttcctcagctgatggtttctgcgctaagtctggcatggaggggtaggggatggggtactgtgtaggaatggcctcagctcttgttttgctgtggttttaggggccaaagtaaatgggtggattctggaacctcaggcctaaactaggttgcctttgtggggccaggaagcagagccccctggtcaagtctcttcgctcctttaatggaggattgagagctgggcaaacacttcccactgggaactgtggctcttggagataaaggacgggtcattgatggaaaataagggccaagagaagaggcctttctgttgtgtcccctcccggccttgccctcgaattctgcaggctccaggctcccctgacacctgtcgtatttatggaccagacactggggcagcatcaggcacggcctgtctg

SEQ ID NO: 33386 - DNA, 640 bp, Macaca Mulatta
tgcagctcaaccacaccgccaacgaagttcgcgcgcaagcaggtgactggcttcaaaaaggagtatcagaaggtgggccagtccttccgcggcctcagccaggcctttgagctggaccagcaggccttctcggtgggcctgaaccaggccatcgccttcaccggagatgcctatgacgccattggcgagctcttcgcggagcagcccaggcaggacctggatcccgtcatggacctattagcactgtatcaggggcatctggccaacttcccggacatcatccacgttcagaaaggagctcttaccaaagtcaaggagagtaggcgacacgtggaggaagggaagatggaggtgcagaaggctgacggcattcaggatcgctgtaacactatttcttttgccactttggctgaaattcaccacttccatcagattcgagtaagagactttaaatcacagatgcagcatttcttacaacaacaaataatatttttccaaaaagttacccagaagttggaagaagctcttcacaaatatgatagtgtttaatgactggaccttggattgtggactttttcagttcaaggataatttctacagccaaataaaaactgctgtcaaagagctattgccaactatc

SEQ ID NO: 33387 - DNA, 820 bp, Macaca Mulatta
ggggagccatcaaaatggcggtgttcgggtatgaggctggggccaagctgagggattcaggtgtggtgccggtggtaactgaggaagcgcccaaggatgtcaagatgacagcatctatgcatggtcaacccagtccttctctagaagatgcaaaactcagaagaccaatgatcatagaaatcatagaaaaaaattttgactatcttagaaaagaaatgacaccaaatatatatcaaacgacgtcatttggaacaacagctggtttctctggaatattctcaaactttctgttcagacgctgcttcaaggttaaacacgatgctttgaaaacatatgcatcattggctacacttccatttttgtctactgtagttacttacaagcttcttgtaattgatcctttgtattcagaaaatataagcaaggaaaactgtgttttcagaagttcactgatcggcatagtttgtggtgttttctatcccagttctttggcttttactaaaaatggacgtctggcaactaagtatcataccgttccactgccaccaaaaggaggggttttactccattggataaggctttgtcaaacacaaatgaaattaatggtgattcctctagtctttcagactatgtttggaatattaaatggtctataccattatgcaatatttgaagggacacttgagaaaactatacatgaagagtaaccaaaaaaatgaatggttgctcacttagcagaaatgagtttttataaagaggactcaggcatttgctgaaaagagttaaaagtaactgaacagataatttgtttccggggcct

SEQ ID NO: 33388 - DNA, 2539 bp, Macaca Mulatta
  misc_feature (1)...(2539): n = A,T,C or G
gatccagatccagttcaggagcttacctatgatttacgaagccagtgtgatgcaatcagggtgacaaaaaccgtccgtcccttcagtatggtatgctgtcctgtcaatgagaatgcagccgccctcatagtgagtgatggcagggtcatgatatgggaactcaagtctgcagtttgtaatcgaaatnnnnnnnnnnnnnnnnnnnnnnnnnnnnnnnnnnnnnnnnnnnnnnnnnnnnnnnnnnnnnnnnnnnnnnnnnnnnnnnnnnnnnnnnnnnnnnnnnnnnnnnnnnnnnnnnnnnnnnnnnnnnnnnnnnnnnnnnnnnnnnnnnnnnnnnnnnnnnnnnnnnnnnnnnnnnnnnnnnnnnnnnnnnnnnnnnnnnnnnnnnnnnnnnnnnnnnnnnnnnnnnnnnnnnnnnnnnnnnnnnnnnnnnnnnnnnnnnnnnnnnnnnnnnnnnnnnnnnnnnnnnnnnnnnnnnnnnnnnnnnnnnnnnnnnnnnnnnnnnnnnnnnnnnnnnnnnnnnnnnnnnnnnnnnnnnnnnnnnnnnnnnnnnnnnnnnnnnnnnnnnnnnnnnnnnnnnnnnnnnnnnnnnnnnnnnnnnnnnnnnnnnnnnnnnnnnnnnnnnnnnnnnnnnnnnnnnnnnnnnnnnnnnnnnnnnnnnnnnnnnnnnnnnnnnnnnnnnnnnnnnnnnnnnnnnnnnnnnnnnnnnnnnnnnnnnnnnnnnnnnnnnnnnnnnnnnnnnnnnnnnnnnnnnnnnnnnnnnnnnnnnnnnnnnnnnnnnnnnnnnnnnnnnnnnnnnnnnnnnnnnnnnnnnnnnnnnnnnnnnnnnnnnnnnnnnnnnnnnnnnnnnnnnnnnnnnnnnnnnnnnnnnnnnnnnnnnnnnnnnnnnnnnnnnnnnnnnnnnnnnnnnnnnnnnnnnnnnnnnnnnnnnnnnnnnnnnnnnnnnnnnnnnnnnnnnnnnnnnnnnnnnnnnnnnnnnnnnnnnnnnnnnnnnnnnnnnnnnnnnnnnnnnnnnnnnnnnnnnnnnnnnnnnnnnnnnnnnnnnnnnnnnnnnnnnnnnnnnnnnnnnnnnnnnnnnnnnnnnnnnnnnnnnnnnnnnnnnnnnnnnnnnnnnnnnnnnnnnnnnnnnnnnnnnnnnnnnnnnnnnnnnnnnnnnnnnnnnnnnnnnnnnnnnnnnnnnnnnnnnnnnnnnnnnnnnnnnnnnnnnnnnnnnnnnnnnnnnnnnnnnnnnnagaggaatacctacacaccgaagttgggtgaggaagattcgttttgctcctggtaaaggaaatcaaaaattaatagcaatgtacaatgatggagccgaagtgtgggataccaaagaggtnnnnnnnnnnnnnnnnnnnnnnnnnnnnnnnnnnnnnnnnnnnnnnnnnnnnnnnnnnnnnnnnnnnnnnnnnnnnnnnnnnnnnnnnnnnnnnnnnnnnnnnnnnnnnnnnnnnnnnnnnnnnnnnnnnnnnnnnnnnnnnnnnnnnnnnnnnnnnnnnnnnnnnnnnnnnnnnnnnnnnnnnnnnnnnnnnnnnnnnnnnnnnnnnnnnnnnnnnnnnnnnnnnnnnnnnnnnnnnnnnnnnnnnnnnnnnnnnnnnnnnnnnnnnnnnnnnnnnnnnnnnnnnnnnnnnnnnnnnnnnnnnnnnnnnnnnnnnnnnnnnnnnnnnnnnnnnnnnnnnnnnnnnnnnnnnnnnnnnnnnnnnnnnnnnnnnnnnnnnnnnnnnnnnnnnnnnnnnnnnnnnnnnnnnnnnnnnnnnnnnnnnnnnnnnnnnnnnnnnnnnnnnnnnnnnnnnnnnnnnnnnnnnnnnnnnnnnnnnnnnnnnnnnnnnnnnnnnnnnnnnnnnnnnnnnnnnnnnnnnnnnnnnnnnnnnnnnnnnnnnnnnnnnnnnnnnnnnnnnnnnnnnnnnnnnnnnnnnnnnnnnnnnnnnnnnnnnnnnnnnnnnnnnnnnnnnnnnnnnnnnnnnnnnnnnnnnnnnnnnnnnnnnnnnnnnnnnnnnnnnnnnnnnnnnnnnnnnnnnnnnnnnnnnnnnnnnnnnnnnnnnnnnnnnnnnnnnnnnnnnnnnnnnnnnnnnnnnnnnnnnnnnnnnnnnnnnnnnnnnnnnnnnnnnnnnnnnnnnnnnnnnnnnnnnnnnnnnnnnnnnnnnnnnnnntggcgacgaatatgattgcctatggcaaactggcagncagagggcgttcagttgctctgtctgatagacaaggctgcagatgcctgtcgctacctgcagacatacggcgagtggaatcgggctgcatggctggcgaaagtnnnnnnnnnnnnnnnnnnnnnnnnnnnnnnnnnnnnnnnnnnnnnnnnnnnnnnnnnnnnnnnnnnnnnnnnnnnnnnnnnnnnnnnnnnnnnnnnnnnnnnnnnnnnnnnnnnnnnnnnnnnnnnnnnnnnnnnnnnnnncagcatgcgatactttgatagagcggccttatttgtggaagcttgcctcaagtatggagcatttgaagtcactgaggacacagatatcctttgcaa

SEQ ID NO: 33389 - DNA, 220 bp, Macaca Mulatta
tcagaccccgggggagggcagaggggagtggggagggaaggaaaccatgaacaggtgaatctctgcacctgggctcagcctgagctggggaggaggaaaaaaacacgtggggtccacccagaagaggccataaacaaccgggaagccaggccccactggcatgagctggggagaggcaccgcccggggtcctgccgccctaggggcctgggtaggcggag

SEQ ID NO: 33390 - DNA, 2126 bp, Macaca Mulatta
  misc_feature (1)...(2126): n = A,T,C or G
cggaccctttggggctgaatgcgaccccactgccccaagactcaagcttggtggaaacccccccggctgagaacaagcccagaaagcggcagctctcggaagagcagccaagcggcaatggtgtgaagaagcccaagnagattgaaatcccagtgacacccacaggccagtcggtgcccagctcccccagtgtcccaggaaccccaacgctgaagatgtggggtacgtcccctgaagataaacagcaggcagctctcctgcgacccactgagnggtctactgggacctggacatccagaccaatgctgtcatcaagcaccgggggccttcagaggtgctgcccccgcaccctgaagtggagctgctccgctctcagctcatcttgaagcttcggcagcactaccgggagctgtgccagcagcgagagggnnnnnnnnnnnnnnnnnnnnnnnnnnnnnnnnnnnnnnnnnnnnnnnnnnnnnnnnnnnnnnnnnnnnnnnnnnnnnnnnnnnnnnnnnnnnnnnnnnnnnnnnnnnnnnnnnnnnnnnnnnnnnnnnnnnnnnnnnnnnnnnnnnnnnnnnnnnnnnnnnnnnnnnnnnnnnnnnnnnnnnnnnnnnnnnnnnnnnnnnnnnnnnnnnnnnnnnnnnnnnnnnnnnnnnnnnnnnnnnnnnnnnnnnnnnnnnnnnnnnnnnnnnnnnnnnnnnnnnnnnnnnnnnnnnnnnnnnnnnnnnnnnnnnnnnnnnnnnnnnnnnnnnnnnnnnnnnnnnnnnnnnnnnnnnnnnnnnnnnnnnnnnnnnnnnnnnnnnnnnnnnnnnnnnnnnnnnnnnnnnnnnnnnnnnnnnnnnnnnnnnnnnnnnnnnnnnnnnnnnnnnnnnnnnnnnnnnnnnnnnnnnnnnnnnnnnnnnnnnnnnnnnnnnnnnnnnnnnnnnnnnnnnnnnnnnnnnnnnnnnnnnnnnnnnnnnnnnnnnnnnnnnnnnnnnnnnnnnnnnnnnnnnnnnnnnnnnnnnnnnnnnnnnnnnnnnnnnnnnnnnnnnnnnnnnnnnnnnnnnnnnnnnnnnnnnnnnnnnnnnnnnnnnnnnnnnnnnnnnnnnnnnnnnnnnnnnnnnnnnnnnnnnnnnnnnnnnnnnnnnnnnnnnnnnnnnnnnnnnnnnnnnnnnnnnnnnnnnnnnnnnnnnnnnnnnnnnnnnnnnnnnnnnnnnnnnnnnnnnnnnnnnnnnnnnnnnnnnnnnnnnnnnnnnnnnnnnnnnnnnnnnnnnnnnnnnnnnnnnnnnnnnnnnnnnnnnnnnnnnnnnnnnnnnnnnnnnnnnnnnnnnnnnnnnnnnnnnnnnnnnnnnnnnnnnnnnnnnnnnnnnnnnnnnnnnnnnnnnnnnnnnnnnnnnnnnnnnnnnnnnnnnnnnnnnnnnnnnnnnnnnnnnnnnnnnnnnnnnnnnnnnnnnnnnnnnnnnnnnnnnnnnnnnnnnnnnnnnnnnnnnnnnnnnnnnnnnnnnnnnnnnnnnnnnnnnnnnnnnnnnnnagtggcgggaaccccccacaccagcgctcacccgcatggagcagagccgcttcaaacgccaccagttgatcctgcctgcctttgagcacgagtaccgcagtggctcccagcacatctgcaagaagnggaggaaatgcactacaaggccgtccacaacacggccgtgctcttcctacagaacgaccctggctttgccaagtgggtgccaacgcctgaacggctgcaggagctgagcgctgcctaccggcagtcaggccgcagccacagctctggttcttcctcatcgtcctcctcggatgccaaggaccgggactcgggccgtgagcagggccctagccgcgagcctcaccccacttaacataccctgcggggaggaggagccccaggggtgctggtctggactgctgggactcaggcccctggggcctgacagggaccccgctgccactgacataggaagattatggttctgccagggctcccctccctgcctgtccccaactcctcacctcaaacttcctccaagtcccatgtatataggtcccgatgccttcccaaccccacccctcatcctgttgccaccttgtttcatttgtaaaaggaaatacagaaa

SEQ ID NO: 33391 - DNA, 772 bp, Macaca Mulatta
ggggaaaaaggactaactcaatgtcagacacttcttttgtctgctgttttggctgtctgctgtctcatagaaaatgtcagcatttacccatgtctctcaattactgtcctttttatttatattttcaaagttgaaatatgacctgtttgcttgaatattaataaatatatgcactgaatgtgtttgccgataattctgaatactacatatatattttaagtatgactcattgagtatgcacagagaaatgtatgtgtatacacataaaatatcataggcatatgaagtacgaatacgatgttcactggtctgtaaatgagtccatatgaacactttatttatttgatatgtatggcttctgcatttcagagatgatttacacaatgaagaaagtacatgcactttgggtttccatatgcctgatgcttaatcttgcccctgctcctcttaatgctgattctgaggaagatgaagaatacacaattatcacagatactgagttgccaccactgaaacttatgcattcattttgtgcattcaagccagatgatggcccatgtaaagcaatcatgaagagatttttcttcaatattttcactcgacagtgtgaagaatttatatatggggggatgtggcaggaaatcagaatcgatttgaaagtatggaagagtgcaaaaaagtgtgtacaagagataatgtaaacagggattatacagacggcattgcaacaagaaaaagcagatttctgcttttttggagaaaaatcctggaa

SEQ ID NO: 33392 - DNA, 645 bp, Macaca Mulatta
  misc_feature (1)...(645): n = A,T,C or G
gtctagtagnnactgccggctatctttccgaggtcacattccgaccccntattcttcaagctgtttgattgggctaaaacagaagatgccccaaaggacaggttgttgacattttacaacttggcagattgcattgctgaaaagctgaaagggctttttacgctgtttgccggccacttagtgaagccttttgctgacaccttgaaccaggtgaacatctccaaaacagatgaagcattttttgactctgaaaatgaccctgaaaagtgctgcttgctgttgcagtttattttgaactgtttatacaaaatcttcctttttgatacccagcattttataagtaaagagagagcagaagccttgatgatgcctctggtggatcagctggaaaacaggcttgggggagaagagaaattccaggaacgggtgacaaagcagctgataccgtgcatcgcgcagttttcggtggccatggcggatgactctctttggaaaccactgaactaccagattctgctaaagaccagagatgcctcgcctaaggttcgatttgctgctttgattactgtgttagcactggctgaaaaactaaaggagaattatatngtcttgctagcagaatccattcctttcttagcagagttg

SEQ ID NO: 33393 - DNA, 649 bp, Macaca Mulatta
tttcattttgactctgcgattctgtactgttataaacaaacccaatatgatgcattttaaggtggagtacagtaagatgtgtgggttttgctgtatttttcttttctggaacagtgggaatcagtgcttttcatttaaggctactgcatgcatcacttctgcatttattgtaattttttaaaaacatcaccttttatagttgggtgagcagattttgtcctgcatctgtccaatttatttgctttttaaacattagcctatggtagtaatttatgtagaataaaagcattaaaaagaagcaaatcatttgcactctaatttgtggtacaatattgcttattgtgactttggcatgcatttttgcaaacaaaatgctgtaagatttatactactgataattttgctttatttgtatacatatagagtatgcacatttgggactgcatttctagaaacatactgcaataggctatctgagcaaaacacctgtaaccaaaaaagtgaagataagaaaatactcttaaagccgagtatttcctaattgtatagaatcttacagcatctttgacaaacatctcccagcaaaagtgccggttagacaggtttgttgaacaatatagtagaaaaactgattctggttaatctcttt

SEQ ID NO: 33394 - DNA, 667 bp, Macaca Mulatta
  misc_feature (1)...(667): n = A,T,C or G
aggagaaatgctgcgcaagaaacgaagggagaaggatggccacaaagatccgctcctggtggaggtgagtcggcnnnnnnnnnnnnnnnnnnnnnnnnnnnnnnnnnnnnnnnnnnnnnnnnnnnnnnnnnnnnnnnnnnnnnnnnnnnnnnnnnnnnnnnnnnnnnnnnnnnnnnnnnnnnnnnnnnnnnnnnnnnnnnnnnnnnnnnnnnnnnnnnnnnnnnnnnnnnnnnnnnnnnnnnnnnnnnnnnnnnnnnnnnnnnnnnnnnnnnnnnnnnnnnnnnnnnnnnnnnnnnnnnnnnnnnnnnnnnnnnnnnnnnnnnnnnnnnnnnnnnnnnnnnnnnnnnnnnnnnnnnnnnnnnnnnnnnnnnnnnnnnnnnnnnnnnnnnnnnnnnnnnnnnnnnnnnnnnnnnnnnnnnnnnnnnnnnnnnnnnnnnnnnnnnnnnnnnnnnnnnnnnnnnnnnnnnnnnnnnnnnnnnnnnnnnnnnnnnnnnnnnnnnnnnnnnnnnnnnnnnnnnnnnnnnnnnnnnnnnccaaaaggaaggaccacagcagacatttctgcccccagaaaggcagggctagaaaccacggaggccatggaagtgatgggtgcccttgtggccagtagacaatcacctgaaggatctgacttccagaaggtggg

SEQ ID NO: 33395 - DNA, 128 bp, Macaca Mulatta
gctgacctccaaataccgttaagctggagcctcggtggccatgcttcttgccccttgggcgtcccgccaggccctcctcccctccttgcaccggcccttcctggtctttgaataaagtctgagtgggc

SEQ ID NO: 33396 - DNA, 410 bp, Macaca Mulatta
ggggagggcggcggggcgcgcgggctcagcgcgcgggtgagatgtggactatattagagtatctatataaatatatatttccctggttcctgtcccttttccctgccccaacttcttccttgcgtctaggattgtactctctctgccccccagcccagtcccagtcccttcccgagtccctagtgcatggaataaagtggttattaaatccccgtgtgtccccgagccaggggcctgcctttatctcgacgtccacgcccactttcccttcccttctgtctcccattctcagtcctgctctccatggcccaagccccggggcagacaggtaagtaaagaacagagcagggcggcaactgagatcgaaatataaaccaggtggaaaaagagagcgatagggtagggggaga

SEQ ID NO: 33397 - DNA, 806 bp, Macaca Mulatta
tacatatataatagtcaaatatcattcacttttcttcattagcttttagtgtctttgccataagacctccttctaatctaccaagaatgaattctttcaattcttcatgcgtgcccttttcatatacttattttattttttaccataatcttatagcacttgcatcgttattaagcccttatttgttttgtgtttcattggtctctatctcctgaagctaacacatttcatagtctacattttagtttctaaagccaataagaatttattacaaatcagaactttggaggcaaatctttctgcatgaccaaagtgataaattcctgttgaccttcccacacagtcctcgtactctgacccatagcattcttgtttgctttgaaaatatttgtccaattgagtagctgcatgctgttcacccaggtgttgtaacacaattttatggattgaattatgaagctacttattcatacttatatatcccacctaaactacctttttgttccccttccttaattgtattgttttcccacatgtaattatcatgtagtttatatcttcctaataaggtgtggtctgtttgtctgaacaaaatgctagactttctggagtgataagctggtgacaaatattctctctgcagctgtaagcaagtcacttaatctttctacctcttttttctatctgccaaattgagataatgatttaaccagttagaagaggtagtgtgaatattagtttatattactctcattcttttgacatgaactatgcctatgtaatgtttttatttgctcagttggctg

SEQ ID NO: 33398 - DNA, 879 bp, Macaca Mulatta
  misc_feature (1)...(879): n = A,T,C or G
ggagatcatttggcatttagctgtgatgttgctaaagaacatgatgttcaaaatacatttgaagagatggagaaacatttaggtcgagtaaatttcttggtaaatgcagctggtattaacagnngggatagtcttttagtaagaacaaaaactgaagatatggtatctcagcttcatactaacctcttgggttccatgctgacctgtaaagctgccatgagggctatgattcaacaacagggagggtctattgttaatgtaggnnnnnnnnnnnnnnnnnnnnnnnnnnnnnnnnnnnnnnnnnnnnnnnnnnnnnnnnnnnnnnnnnnnnnnnnnnnnnnnnnnnnnnnnnnnnnnnnnnnnnnnnnnnnnnnnnnnnnnnnnnnnnnnnnnnnaggattcgtacacacagatatgacaaaagacttgaaagaagaacatttaaagaaaaaaattcctcttggaaggtttggagaaactattgaggtggcacatgcggttgtgtttcttttagaatcaccatatgttacagggcatgttctggtagtggatgggggattacagctcattttgtaatttatagattattcagttataggggtggttagcatcaggggcacactttggctacagattagacaattatgcctacatgggtaacatttgctaatcaaacttgctgatgctacaaatgttaatttctgtctttataaaaatatgtctgaaaagaactaatgagtgacannnnnnnnnnnnnnnnnnnnggtctaagttacagcagtgttgttttgtttaaaaagccttcatgagatacaatgcacataccatataaattacacatttaaaatatacaagacggtggttttaacatatttaaat

SEQ ID NO: 33399 - DNA, 405 bp, Macaca Mulatta
tgatgacataatttttgtgtagtttatttatcttgtacatatgtattttgaaatcttttaaacctgaaaaataaatagtcatttattgttgagtatgtgtttatcctgaatgtgtgtctgggagtaaactggccagagaggtatataatcagaacgttaaaatatttggaattgttgtcctttagtttgccaacttcccagcaccgctagggactctgaatgtttgacacagatgtaaaatagctgtagaaacaattcaattacccttacgctttcagggatgatagcttttctgaggtcttaaaataatgtggtaagaagataatagatccttttgcaaatttatttttttgcagctttcactttttgtgatttacatagctgaccagaattctgtgataaaac

SEQ ID NO: 33400 - DNA, 505 bp, Macaca Mulatta
  misc_feature (1)...(505): n = A,T,C or G
aaagcaaggaggccaccaagcagaccctacgagataccttcctcttggacctcaaatcccctcctttccctgtcgagatacctgacaggttgcccgctgcctcctgggaggggcaggagtcctgctggaacaagcagacttccaagagccaagagactcagcttgggggaacatatggagagcaactggttcctgacctgtgcaaccaatctgagtccagtggagaagnnnnnnnnnnnnnnnnnnnnnnnnnnnnnnnnnnnnnnnnnnnnnnnnnnnnnnnnnnnnnnnnnnnnnnnnnnnnnnnnnnnnnnnnnnnnnnnnnnnnnnnnnnnnnnnnnnnnnnnnnnnnnnnnnnnnnnnnnnnnnnnnnnnnnnnnnnnnnnnnnnnnnnnnnnnnnnnnnnnnnnnnnnnnnnnnnnnnnnnnnnnnnnnnnnnnnnnggatcagcctccaacttcagctttttccggtggatgaggtctctcttgctcccatcctgcag

SEQ ID NO: 33401 - DNA, 526 bp, Macaca Mulatta
  misc_feature (1)...(526): n = A,T,C or G
cccacatgtccaggctccagacctgcaacgagttcacaagcggatccaggatatcgtgggaattctgcgtgattttggggctcagcgggaggaagggcggtctcgttctgaatacctgaaccggctcaagaaggatctggccacttactactcctatggagacttcctgcttggcaagctcatggacctcttccctctgtctgagnagctggtggagttcttagaagctaatgaggtgcctcggcccgtcaccctccggaccaataccttgaaaacccgacgccgagaccttgcccaggnnnnnnnnnnnnnnnnnnnnnnnnnnnnnnnnnnnnnnnnnnnnnnnnnnnnnnnnnnnnnnnnnnnnnnnnnnnnnnnnnnnnnnggtgccacccccgagtacctggctgggcactacatgctgcagggagcctccagcatgctgcccgtcatggccttggcaccccaggaacatgagcggatcctggacatgtgttgtgcccctggaggaaagaccagctacatg

SEQ ID NO: 33402 - DNA, 387 bp, Macaca Mulatta
  misc_feature (1)...(387): n = A,T,C or G
aagagattcattctcctgctggttgtaatggaaatgaatttcaatgccaccctgatggtaannnnnnnnnnnnnnnnnnnnnnnnnnnnnnnnnnnnnnnnnnnnnnnnnnnnnnnnnnnnnnnnnnnnnnnnnnnnnnnnnnnnnnnnnnnnnnnnnnnnnnnnnnnnnnnnnnnnnnnnnnnagggagatgcatcaacaaagcatgggtgtgtgatggagacattgattgtgaagatcagtcagatgaagatgactgtgacagtttcttgtgtggaccacccaaatatccttgtgctaatgacacctcagtctgcctgcagccagagaaactctgcaatgggaaaaaggattgtcctgatggctctgatgaaggcgatctctgtg

SEQ ID NO: 33403 - DNA, 4836 bp, Macaca Mulatta
  misc_feature (1)...(4836): n = A,T,C or G
agaaacattcctggatccgaacactgccccgtcgacgacctagagagagcctagctcccagcccactgagtggcttcagcctcgctggnnnnnnnnnnnnnnnnnnnaagagggaagcaaaggagtcagggatggctcttcctcannacggttgacatttagggatgtggccatagaattctctcaggaggagtggaaatgcctggaccctgctcagaggactctatacagggatgtgatgttggagaactactggaacctggtttctctgggnnnnnnnnnnnnnnnnnnnnnnnnnnnnnnnnnnnnnnnnnnnnnnnnnnnnnnnnnnnnnnnnnnnnnnnnnnnnnnnnnnnnnnnnnnnnnnnnnnnnnnnnnnnnnnnnnnnnnnnnnnnnnnnnnnnnnnnnnnnnnnnnnnnnnnnnnnnnnnnnnnnnnnnnnnnnnnnnnnnnnnnnnnnnnnnnnnnnnnnnnnnnnnnnnnnnnnnnnnnnnnnnnnnnnnnnnnnnnnnnnnnnnnnnnnnnnnnnnnnnnnnnnnnnnnnnnnnnnnnnnnnnnnnnnnnnnnnnnnnnnnnnnnnnnnnnnnnnnnnnnnnnnnnnnnnnnnnnnnnnnnnnnnnnnnnnnnnnnnnnnnnnnnnnnnnnnnnnnnnnnnnnnnnnnnnnnnnnnnnnnnnnnnnnnnnnnnnnnnnnnnnnnnnnnnnnnnnnnnnnnnnnnnnnnnnnnnnnnnnnnnnnnnnnnnnnnnnnnnnnnnnnnnnnnnnnnnnnnnnnnnnnnnnnnnnnnnnnnnnnnnnnnnnnnnnnnnnnnnnnnnnnnnnnnnnnnnnnnnnnnnnnnnnnnnnnnnnnnnnnnnnnnnnnnnnnnnnnnnnnnnnnnnnnnnnnnnnnnnnnnnnnnnnnnnnnnnnnnnnnnnnnnnnnnnnnnnnnnnnnnnnnnnnnnnnnnnnnnnnnnnnnnnnnnnnnnnnnnnnnnnnnnnnnnnnnnnnnnnnnnnnnnnnnnnnnnnnnnnnnnnnnnnnnnnnnnnnnnnnnnnnnnnnnnnnnnnnnnnnnnnnnnnnnnnnnnnnnnnnnnnnnnnnnnnnnnnnnnnnnnnnnnnnnnnnnnnnnnnnnnnnnnnnnnnnnnnnnnnnnnnnnnnnnnnnnnnnnnnnnnnnnnnnnnnnnnnnnnnnnnnnnnnnnnnnnnnnnnnnnnnnnnnnnnnnnnnnnnnnnnnnnnnnnnnnnnnnnnnnnnnnnnnnnnnnnnnnnnnnnnnnnnnnnnnnnnnnnnnnnnnnnnnnnnnnnnnnnnnnnnnnnnnnnnnnnnnnnnnnnnnnnnnnnnnnnnnnnnnnnnnnnnnnnnnnnnnnnnnnnnnnnnnnnnnnnnnnnnnnnnnnnnnnnnnnnnnnnnnnnnnnnnnnnnnnnnnnnnnnnnnnnnnnnnnnnnnnnnnnnnnnnnnnnnnnnnnnnnnnnnnnnnnnnnnnnnnnnnnnnnnnnnnnnnnnnnnnnnnnnnnnnnnnnnnnnnnnnnnnnnnnnnnnnnnnnnnnnnnnnnnnnnnnnnnnnnnnnnnnnnnnnnnnnnnnnnnnnnnnnnnnnnnnnnnnnnnnnnnnnnnnnnnnnnnnnnnattcacagcttgcaaatcattgaagaattcatactggcgagacaaccttacaagtgtaatgagtgtgggaaagccttcagtgttcgttcaagtctgactacccatcaggcaatccactctggagagaagccttacaaatgtattgaatgtggcaagagcttcactcaaaaatcacaccttagaagtcatcggggaattcattaaagagagaaaccttacaagtgtaatgaatgtgggaaagtcttcgctcaaacgtcacaacttgcaaggcactggagagttcatactggagaaaaaccttacaagtgtaatgactgtggcagagcctttagtgatcgttcaagcctaacttttcatcaggcaatacatactggagagaaaccttacaaatgtcatgaatgcggcaaggtttttaggcacaattcataccttgcaactcatcggcgaattcatacgggagagaaaccttacaagtgtaatgagtgtggcaaagcctttagtatgcattcaaacctaactacccataaggtcatccacactggagagaagccttacaaatgtaatgaatgtggcaaggtcttcactcaaaattcacaccttgcaaatcatcaaaggactcacaccggagagaaaccttaccgatgcaatgagtgtgggaaagccttcagtgttcgttcaagcctaaccacccatcaggcaatccatactgggaaaaaaccttacaaatgtaacgaatgtggcaaggtctttactcaaaatgcgcacctggcaaatcaccgaagaattcatactggagagaaaccttacaggtgtacagagtgtgggaaagcctttagggtaaggtcaagtctaactacccatatggcaatccacactggagaaaaacgttacaaatgtaatgagtgtggcaaggtcttcaggcagagttcaaatcttgcaagtcatcacagaatgcataccggagagaaaccttacaaatgagntgtggtgaggtcattaggtacaattcactcttttcacatcaattaattcattcttgacagaatnnnnnnnnnnnnnnnnnnnnnnnnnnnnnnnnnnnnnnnnnnnnnnnnnnnnnnnnnnnnnnnnnnnnnnnnnnnnnnnnnnnnnnnnnnnnnnnnnnnnnnnnnnnnnnnnnnnnnnnnnnnnnnnnnnnnnnnnnnnnnnnnnnnnnnnnnnnnnnnnnnnnnnnnnnnnnnnnnnnnnnnnnnnnnnnnnnnnnnnnnnnnnnnnnnnnnnnnnnnnnnnnnnnnnnnnnnnnnnnnnnnnnnnnnnnnnnnnnnnnnnnnnnnnnnnnnnnnnnnnnnnnnnnnnnnnnnnnnnnnnnnnnnnnnnnnnnnnnnnnnnnnnnnnnnnnnnnnnnnnnnnnnnnnnnnnnnnnnnnnnnnnnnnnnnnnnnnnnnnnnnnnnnnnnnnnnnnnnnnnnnnnnnnnnnnnnnnnnnnnnnnnnnnnnnnnnnnnnnnnnnnnnnnnnnnnnnnnnnnnnnnnnnnnnnnnnnnnnnnnnnnnnnnnnnnnnnnnnnnnnnnnnnnnnnnnnnnnnnnnnnnnnnnnnnnnnnnnnnnnnnnnnnnnnnnnnnnnnnnnnnnnnnnnnnnnnnnnnnnnnnnnnnnnnnnnnnnnnnnnnnnnnnnnnnnnnnnnnnnnnnnnnnnnnnnnnnnnnnnnnnnnnnnnnnnnnnnnnnnnnnnnnnnnnnnnnnnnnnnnnnnnnnnnnnnnnnnnnnnnnnnnnnnnnnnnnnnnnnnnnnnnnnnnnnnnnnnnnnnnnnnnnnnnnnnnnnnnnnnnnnnnnnnnnnnnnnnnnnnnnnnnnnnnnnnnnnnnnnnnnnnnnnnnnnnnnnnnnnnnnnnnnnnnnnnnnnnnnnnnnnnnnnnnnnnnnnnnnnnnnnnnnnnnnnnnnnnnnnnnnnnnnnnnnnnnnnnnnnnnnnnnnnnnnnnnnnnnnnnnnnnnnnnnnnnttgcttttaaaatcaagtattgtcggaattagcatttgggagtggcaaaaaacaatgtaaaaccatgatgtcactcaccattctgataatgttcagggtgcctttctcctaccagccgagtactgtggcttagaagaaagaaatggtctatcaactgaacatgaaatggagcaggccaagaccctaggacattgggatttttgtgggaggagagtaataggtaattagacactgattgtgtggtagaaatactgcaggggaaaaggtcgcccccttatccattaaagagcaatacctgttgtttagcaaagagtgatgaaaaattgatcttgtttttgaaattgaagagagaggccaggcgcagtggctcacacttgtaatcccagcactttgggaggctgaggcaggtggatcacctgaggtcgggagtttgagaccagcctgaccaacatggagaaaccccatctctactaaaaatacaaaattagctgggcatgttggtaggtgcctgtaatcccagctacttgggaggctgaggcaggagaatcgcttgaacccgggaggcggaggttgtggtgagccaagatcatgccattgcactccagcctgggcaacaagaacaaaactccatctaaaaaagaaagaaagtgaagagagagtagtcagagtgaagagtttaatcaacagaagtagagtaacatattctttagtagaactcacattatctgcttaaagcacactttgctaatgttttattcagaatgtatcatagatataatgttttaactaatagaatggtttttctctatgaatgaatcacattctttctgccaacatagttttatcctgtctcagtaggatacttcataacataatannnnnnnnnnnnnnnnnnnnnnnnnnnnnnnnnnnnnnnnnnnnnnnnnnnnnnnnnnnnnnnnnnnnnnnnnnnnnnnnnnnnnnnnnnnnnnnnnnnnnnnnnnnnnnnnnnnnnnnnnnnnnnnnnnnnnnnnnnnnnnnnnnnnnnnnnnnnnnnnnnnnnnnnnnnnnnnnnnnnnnnnnnnnnnnnnnnnnnnnnnnnnnnnnnnnnnnnnnnnnnnnnnnnnnnnnnnnnnnnnnnnnnnnnnnnnnnnnnnnnnnnnnnnnnnnnnnnnnnnnnnnnnnnnnnnnnnnnnnnnnnnnnnnnnnnnnnnnnnnnnnnnnnnnggccgggcgcggtggctcacacctgtaatcccagaactttgggagg

SEQ ID NO: 33404 - DNA, 156 bp, Macaca Mulatta
cagctcagacaccaagttcttggctcttgcataaacagcaggccaaacaaatgtttctcaggcaaggtttcataggcgtgagctggagcaaaagcaagagagcagcgcccaagaaaggaaaatcaatgtgtaactctacttgcagcagtttataga

SEQ ID NO: 33405 - DNA, 675 bp, Macaca Mulatta
gaaaaccaggccagatgttcttcctttccggtgacaggattcagcgggacccgtcctggatggagctcgcttccggaggtcctcctcgtcatcgacaactcccacgtctgccaactctttgtacaggtttttactggatgatcaggattgtgccatccatgccgacaacgtcaatcgtcatgaaaacagaaggtatatccccttcctgccaggaactggacgggatattgatacgggatcaattcctggtgtggatcagttaattgaaaaatttgatcaaaaacctgggcttcagagaagaggaaggactgggaagcgaaacagaattaatccagatgacaggaaaagatccagaagcgtggatagcgcctttccttttggcctccaagggaactccgagtacctgactgaattcagtaggaacttgggcaagtcaaacgaacacctcctccggccttcccaggtgtgcccgcagcggccactgtctcaggagcgccgtgggaaacagagcgtgggccgtacctttgcaaagctgcagggagcagcgcacggggctccatgtgcccactccaggcctccccagcagaatacagatgggaaagttctggaaaccaaaggtactcaggaaggtacagtgatccgtgcgccctcccttggtgcacagagtaaaaagga

SEQ ID NO: 33406 - DNA, 822 bp, Macaca Mulatta
ggactttctgccgagacttatctaaaccagaagttgaatatgattgtgatgctcccagtcacaactcagaaaaaaagaaaactgaaggccttgttaaattaacacctatagataaaaggaagtgtgaacgcctacttttatttctttactgccacgaaatgagcctggcttttcaagaccctgttcctctaactgtgcctgattattacaaaataattaaaaatccaatggatttgtcaaccatcaagaaaagactacaagaagattattccatgtactcaaaacctgaagattttgtagctgattttagattgatctttcaaaactgtgctgaattcaatgagcctgattcagaagtagccaatgctggtataaaacttgaaaattattttgaagaacttctaaagaacctctatccagaaaaaaggtttcccaaaccagaattcaggaatgaatctgaagataataaatttagtgatgattcagatgatgactttgtacagccccggaagaaacgcctcaaaagcattgaagaacgccagttgcttaaataatatgcagcaccactagcttgtgctggtttttagattttttttgttttcaaaaaaaccatttgtcagtaatttaacatcactacaaagaagagtttgtgactactctgatctccgttttggacgtttactagactttgatttcccttattagcccttttctgttaacctctttatccctaaaaaaaaagaaatgaatgggaagaaagaaaatgtgagaagaaggaaaaaaggatggaaggaaaaaaagatgggaggaaagaaccatttt

SEQ ID NO: 33407 - DNA, 93 bp, Macaca Mulatta
cccgcagctcgtggccatgatcgtgaaccacctcaagagccaagggctcttagaccagttccgcagagactgcctggccgacgtggacaccaa

SEQ ID NO: 33408 - DNA, 254 bp, Macaca Mulatta
aagaaatggatctcgaagagccggagggctgtatgccagacctggaccccaggcaggaggaggccggtggctctcagagcagctccagctcctcggagccaggcgagagcctccccagtgccagtgaccaggtgctgtgtctcagcaggggtggcgcgggtaccacaacagcctcggaacccactcctccggccccccatgaggaacaccttttttttgagaccaaagaaaatgaccccatggacagccgtcag

SEQ ID NO: 33409 - DNA, 481 bp, Macaca Mulatta
acaagatgacagagtcgcttactttttattattttaaaagcacttgttccctgtaaattgtaaggaactttgtaactaaagttctgttctaatattttattatttatcacctaaaaaagaagagtgggtgtatggtgacatttcacttgagagtgagtcacaaatataatacagaatgtttttcaactatgggttttaaaagtaacccaaatgctgtacttcttaaaaccaagaaaaaaaaaatttctttttctactccgtggatgaacagcagcattgtgtttgaatgaggagaatcagagcatacatcctatcactgaaattttaaagtggtaccagtttctccaaaattaagattagtagtgcgaagtgaaatgtttgaagtgaattttaaaacttatcttttaatgtaaagtctatggtttagtaacgatctattgtataaacattctaatttgcatctccattgatcgaagacatt

SEQ ID NO: 33410 - DNA, 1295 bp, Macaca Mulatta
  misc_feature (1)...(1295): n = A,T,C or G
ctgtgctttcaggagactgaagccaaggataccagcagagccaacatttgcttcaagttcctgggcctgctgacagcgtgcaggatgctgatggaaactggcagaggctgctgtgccctggccatcctgctggcaattgtggacatccagtctggtggnggatgcattaacatcaccagctcagctttccaggaaggaacacaactgaacttaatctgcactgtgtggcataagaaagaagaggctgaggggttggtagtgtttttgtgcaaggacaagtctagagactgttttcctgagaccagtttaaaacagctgagacttaaaagggatcctgggatagatggtgtggtgaaatatcatcnnnnnnnnnnnnnnnnnnnnnnnnagtcacacctgtcgcacagtggggacctaccagtgttgtgccacaagccagaagtcaggtatccgccttcagggccatttcttctcccttctagtcacagnnnnnnnnnnnnnnnnnnnnnnnnnnnnnnnnnnnnnnnnnnnnnnnnnnnnnnnnnnnnnnnnnnnnnnnnnnnnnnnnnnnnnnnnnnnnnnnnnnnnnnnnnnnnnnnnnnnnnnnnnnnnnnnnnnnnnnnnnnnnnnnnnnnnnnnnnnnnnnnnnnnnnnnnnnnnnnnnnnnnnnnnnnnnnnnnnnnnnnnnnnnnnnnnnnnnnnnnnnnnnnnnnnnnnnnnnnnnnnnnnnnnnnnnnnnnnnnnnnnnnnnnnnnnnnnnnnnccaagaatctgtggaaatataagctggggcaaatcagtgtgatccttgattttgctgctcaccatcagagcaaacctgccttcttccctcctaagctccagtaaataaacaaaacagttttcaccaaagtggctggtatagtcctcaaatattggataaatatgtgcgtttttgtaccccagaacaatttttcctccctcctgctcaacatagtaaaataagtcaaacaaaatgagaacaccaaatttggggggaataattttttatttaacactgtaaaggaaagagaaagaaaacaagcagagataggtaggacagaaaggaagacagccagacccagtgactgacttggcatgaaaatgaggaaatgcagacagacctcaacattcaaaaacatccacacagcactgctggaggaagaggaagatctgtgcagaccaggagcaccacaggctacaactgcccagcttcaactcaacacttgttaacctctttggtcatttctctttttaaataaatgcccatagcagta

SEQ ID NO: 33411 - DNA, 305 bp, Macaca Mulatta
  misc_feature (1)...(305): n = A,T,C or G
gccagctactgcctcatcgacagcttcctaggggactcggagctcatcggggacctgacccagtgtgtggactgtgtgattcctccagaggggtccctcttgcaggnnnnnnnnnnnnnnnnnnnnnnnnnnnnnnnnnnnnnnnnnnnnnnnnnnnnnnnnnnnnnnnnnnnnggtggcagcaacggaaggttggtggcggctggggacgcccgaggccgtgctgctcccctggctggtggggtccctgccgccgcagaccgctcgcgactacccggtgtacctgccgcacgggagccccacgg

SEQ ID NO: 33412 - DNA, 770 bp, Macaca Mulatta
ggacccttggcacccaaaggtaagctactcctaatgtaataggctaagagagcagaaaggacttcacacctgcaagggctacagcacccttctccactctatccccctgcaaccctgggagtcacccctgggcaggataggaccctccaactccaacagcagtgtcctgcagggcgcaaatcccgcaaaaagaaatccaaggccacacagccgagtcctgaggacagagtggaggtatcgctgcctgctcccacctcctcttcccctgcactctccaaccctggctgcccctcctaggcagctgccttaccctaagagggcggggggaatagtgcgccctaaccaacctctaaactgctctctgagcccctcagggacccgtgtctcctccatccaggacccttcgcctccaagcaaagcccctttccaggacacgaagggcaaagagagaccttcctgagaggactgcaactcagctgcctaaggggcccagcctccagcaggacccaaaagttcccacagtgcccaagaaggggagaaaaaagggccaacaggcggctttcggccaccgcataccccggaaagtcaagggttgaaaccccatctttggacccgggaagggaacctcctccctctttatcagagaagggtctttctttttttgaacttccccccttttccttgtcttggccccgaaaactttaggggttctaaaaatccttggggaacctgggcaattattctaaaaggggccaaatacaggacccctc

SEQ ID NO: 33413 - DNA, 2540 bp, Macaca Mulatta
  misc_feature (1)...(2540): n = A,T,C or G
agctacagaaccaggagtcggtgcgcgcgctgctgaagcgcacggaggcagagctgagcatgcgcgtgtcggaggcggcgaggcggcaggaggacccgctgcagcggcagcgcaccctggtggaggaggagcggctgcgctatctcaacgacgaggaacttattacccagcagctcaannnnnnnnnnnnnnnnnnnnnnnnnnnnnnnnnnnnnnnnnnnnnnnnnnnnnnnnnnnnnnnnnnnnnnnnnnnnnnnnnnnnnnnnnnnnnnnnnnnnnnnnnnnnnnnnnnnnnnnnnnnnnnnnnnnnnnnnnnnnnnnnnnnnnnnnnnnnnnnnnnnnnnnnnnnnnnnnnnnnnnnnnnnnnnnnnnnnnnnnnnnnnnnnnnnnnnnnnnnnnnnnnnnnnnnnnnnnnnnnnnnnnnnnnnnnnnnnnnnnnnnnnnnnnnnnnnnnnnnnnnnnnnnnnnnnnnnnnnnnnnnnnnnnnnnnnnnnnnnnnnnnnnnnnnnnnnnnnnnnnnnnnnnnnnnnnnnnnnnnnnnnnnnnnnnnnnnnnnnnnnnnnnnnnnnnnnnnnnnnnnnnnnnnnnnnnnnnnnnnnnnnnnnnnnnnnnnnnnnnnnnnnnnnnnnnnnnnnnnnnnnnnnnnnnnnnnnnnnnnnnnnnnnnnnnnnnnnnnnnnnnnnnnnnnnnnnnnnnnnnnnnnnnnnnnnnnnnnnnnnnnnnnnnnnnnnnnnnnnnnnnnnnnnnnnnnnnnnnnnnnnnnnnnnnnnnnnnnnnnnnnnnnnnnnnnnnnnnnnnnnnnnnnnnnnnnnnnnnnnnnnnnnnnnnnnnnnnnnnnnnnnnnnnnnnnnnnnnnnnnnnnnnnnnnnnnnnnnnnnnnnnnnnnnnnnnnnnnnnnnnnnnnnnnnnnnnnnnnnnnnnnnnnnnnnnnnnnnnnnnnnnnnnnnnnnnngccccgataccgcacagagaagccctccaagtnnnnnnnnnnnnnnnnnnnnnnnnnnnnnnnnnnnnnnnnnnnggcctgaccaccacacgcactggagaggtggtggtcaccagcaagaaggactcggccttcatcaannnnnnnnnnnnnnnnnnnnnnnnnnnnnnnnnnnnnnnnnnnnnnnnnnnnnnnnnnnnnnnnnnnnnnnnnnnnnnnnnnnnnnnnnnnnnnnnnnnnnnnnnnnnnnnnnnnnnnnnnnnnnnnnnnnnnnnnnnnnnnnnnnnnnnnnnnnnnnnnnnnnnnnnnnnnnnnnnnnnnnnnnnnnnnnnnnnnnnnnnnnnnnnnnnnnnnnnnnnnnnnnnnnnnnnnnnnnnnnnnnnnnnnnnnnnnnnnnnnnnnnnnnnnnnnnnnnnnnnnnnnnnnnnnnnnnnnnnaggccactaaaccatctaaagagatgagcgggtcgaatgagacctcgagcccagtctcagaaaagccctcggcttccagaacctctatccctgtattgacttcctttggggcaaggaattcttccatctccttctagaagcccctcaccccgctgccctgcctgtccccctcccttactcctgccatttctcccctctcttcccttcatctccaccccaccctactctccagaccccctgaggggtgcgccctgcagaggagggtgtggccctcagctccctctacccatcctctgttggtgnnnnnnnnnnnnnnnnnnnnnnnnnnnnnnnnnnnnnnnnnnnnnnnnnnnnnnnnnaacagtaaaactaaaaaccaaacacaccaccttccttgatctgttctcagctggcctctcactggccgcccctgtcacgtctctccctcttctctttcaccactctttcccctcagtccatcccgaagctcctgcacccccttcccgccttcccctcacttcccaagaatactccaaacaaactctgnnnnnnnnnnnnnnnnnnnnnnnnnnnnnnnnnnnnnnnnnnnnnnnnnnnnnnnnnnnnnnnnnnnnnnnnnnnnnnnnnnnnnnnnnnnnnnnnnnnnnnnnnnnnnnngggagactggccttggagaccccctactccctgtccaagctcggacaagactgcgacctcctctgtggctgctctgcctcctcccactcacaccccactgggcctggagtagagacggacaggctggagactaggccggagcttgagaggcctcagggtgggtgtgaggccatggagtctgcgtccctggggaggcgctggcctcctgggcctcgccgtcctgtggggagtggaggacagaagccctttggtctgctggctgtggagggtgggttgcacggacagctggacatcggggacactgccttgggagagggcggcccggacgggtatttggtacttttagtttcctgatttagcactttaaatggcattaacttatttaatgggggtggggtgggcaagaatgaggggcctagaaaaccaggttttgtggcctgcagttgggggaagggtctggtttgagggaaatgggagggtcgagagggtcttga

SEQ ID NO: 33414 - DNA, 243 bp, Macaca Mulatta
cgtacaatattattgttttacttttcagcaaatatgaaaaaaatgtgttttatttcatgggagtaaaatatactgcatacaaattggtctggattctttctgccctcctctgtcactaacttggccagggcatctcagtcactgcttcctaaaccagtttcctctgcctgcctagttaaacatacaaggcagcaatccttatttaaatttagtagaaataaattatagccattcgtcagaaac

SEQ ID NO: 33415 - DNA, 818 bp, Macaca Mulatta
ccagccccgagtgcactgatgtctgcagcgccgccctcccttgtcagtgctgtgtgggagtgccaggcacagcaccatccctgagcttgcgccgactggggagggcctggggcctgccgggagacacctgtgggaggcctgagagacagctgtaccttggaggtggcctggtggaggacagactccaccagccagctaggagggggtctggggtcctgtcctggggagggaagagcagactcttgtgatatccttggggtctccagatagcccaccaggggttgggagggtgagcagggacagggcgcccccactgacttgggaccttcctcctccaggcccaccccttagcacccaggacatctgggccccccgcccccagcactgtctagtctggctgcttggccatcactcccagcctggttcccactcctgtgccttctggggacgggccctcaaggacagcatgttgacaaatcaggcccagctctatcgctgtggggagggagataggctgctggcgacagaaagggctctttgagaaggccactctgcctggagtgggggcgccgggcactgtcccccaaggtcgcggcagaggagataggggcctgtcctttacaaacaccctaccttccactcggcttccacaaggcgggcagcccagctcctggcagcacccatgacgcgggacctgcctctcaccagcctgaccctggtactgtccgccctgggggctctgctggggactgaggccctcagagcagaagaaccagctgtgggcacgggtggcctcatcttccgagaagacctggact

SEQ ID NO: 33416 - DNA, 296 bp, Macaca Mulatta
gaactgtctctgagtgccatctccctccccttctggtccacagatgttctccaccacctcatcatgatgttggggatctgtgccatgttgtaggagttagccaggcagctgctgctcctccacccacaatcatcctcagcaaatgacaaacacatttattgtgctgccgaaaagaacaaacagaagaccacattgttggggagcagagaatagcactttgccaaatatgcgctccaaacatttctgtgaattcggtgatgctttcttctttctaagaaaaagttagattacttcct

SEQ ID NO: 33417 - DNA, 1434 bp, Macaca Mulatta
attaaatagaatggaatggccaataagggttcaacaaaaatgggaggacctgggcagcaaaagcccaaatattcaaaacccccggtggaaatgacactttctgtggaggtttacttttccttctttgctatcttcccctatccccacggaaaatgtctgcccaccatgtaaagccccagtagcagggagcttaggctccagtcttcccccttgggtagaaaaaggagtgaagggaacatcactcctgagtttccatgctttcttcttcctctccttgaggtggttcttctgtattctcctcttcttcctctccttccttcttctctggtggcttctcataagccttttctgaaggtgttactatcactccatcccaggtagatatttcagaagcaagatagctggcatcaccctcctggccaaggatcttcctaaagccaccatgtgagaggattcggacgagagtctgagctgtgtaacagaccatgtcctgctgttctagggtcatgactgtgtgtactctgaagttgccactctcacaggggtcagtgatacccactgaacctggcaggaacagtcctgcagccagaatctgcaagcagcgtctgtatgcaacgtttagggccaaaggctgtctggtggggttgttcatcacagcataatggcctagtaggtcaaggatccagggtgtgaggggctcaaagccaggaaaacgaatcctcaagtccttcagtagtctgatgagaactttaactgtggactgagaagcattttcctcgaaccagcgggcatgtcggatggctgctaaggcactctgcaataccttgatatccaaatggagttctgggtccagttttcgaagattgggtggcactgttgtaatgagaatcttcactgtagcatcagaagaactgatttcaaagccagtttcgttggtcagcatggttaaaacttcagaaggatcctgtgctcttaggctttccacaactttgttccccagggcagcaacagcttccaatgttggcaggatcttaagtatcaccaccaggtcagccacattgtgtcctgtagtcattgtcccctttttataggatcccacctgtcgaacttcttcaatttgcacttcaaatgtccctggagccacaatcagattatcaatcacattgtttatttttgtcaccagagaaaggatagatgcctgttcagcagaattaggagccaggtcctgattcctcttcagcaaggcctcactgaaggaggtttcatcaggtgctggcttgacccgggggaaggccatttcacacaaatagaagtcaaatgggatatgtggtacaaagggcctgaaccctcctcctgggcctcctctggaaccaaagcgcccaccacgaccacggcctctgtcacccctcatagcgccttggacacgaacaatgg

SEQ ID NO: 33418 - DNA, 90 bp, Macaca Mulatta
gtgaaaggcagcctgggaatgaacattgttagttctatctttgccttcattggagtgattctgctggtggtggatatgtgcatccatggg

SEQ ID NO: 33419 - DNA, 181 bp, Macaca Mulatta
taatgcatgcccatgttacaaaattcaaatgatacagaaaagtattcttacaaaaggtgaatctccttcccctttgccttcaggtctctcagttcttcccagagacaacttgggttttttcaagaaatagtccacatatacttatggatatatctattttacacactcaaccctgccacac

SEQ ID NO: 33420 - DNA, 376 bp, Macaca Mulatta
ccggtccgggtgccacctctccctgcttgggcgccgccgcgcgagcgcttcccttccccctgcgagcgcccggataatgtctgagaatgtccccctctgggacgcttagcagctattatgtcgactcgatcataagtcacgagagtgaggacgcgcctccagccaagtttccttctggccagtacgcgagcccgcggcagccgggccacgcggagcacctggagttcccctcgtgcagcttccagcccaaagcgccggtgttcggcgcctcctgggcgccgctgagcccgcacgcgtccgggagcctcccgtcggtctaccacccttacatccagccccagggcgtcccaacggccgagagcaggtacctccgcac

SEQ ID NO: 33421 - DNA, 376 bp, Macaca Mulatta
  misc_feature (1)...(376): n = A,T,C or G
actgnnnnnnnnnnnnnntnnnnnnnnnnnnnnnnnnnnnnnnnnnnnnnnnnnnnnnnnnnnnnnnnttctactaaaattacaaaaattagctgatcatggtggtggnnnnnnnnnnnnnnnnnnnnnnnannnnnnnnnnnnnnnnnnnnnnnnnnnnnnnnnnnntnnnnnnnnnnnnnnnttgagatcccatcactgcactcctgactgggcgacggagcaagactccaactgnnnnnnnnnnnnnnnnnnnnnnnnnnnnnnnnnccaaatagacttgggacgccccatgtgagatgatgtgcttatttgatcgtggaagctggaaatggctgtttggggtttggggccagtggttctccctgtccaggcc

SEQ ID NO: 33422 - DNA, 2739 bp, Macaca Mulatta
  misc_feature (1)...(2739): n = A,T,C or G
tcagtatctggcaccaattctgacccagtcatttgtgatccctggctcttgtgatatgcggaagatttccaggcagtttttgtggaacacctccccgtccagctctaatcaagcaccatataaacaagaaattgcctggtcaaacctgtgaggactatattctgactgccaaaaagatcaatactgacaccagaatggcagctactctcaagtcgttaaaacttttaagataccgagcactttgcagtccttctgcctgtggtgcagcccgaagtgtatcatactggaatgtgagcagcaaacagcatgggggacaggaccctccagaacacattagcctctgccattctgccaaaagagttaagaacatttgtagcaccttctcttctcggaggatcctcacaaccagcagtgcctgcccaggtttggaattcagcaagacttcttcctctaaggccagcactttgcagctggactcacccagggccacaagagttgatgaagaggatgtagaagtttttgattcctttgcaaacatccgagttttcctacagctaagaccagaataccgtgttcacagctataacgcatccgagacttctcagctcctgtctgtttcagaaagtgaactaattttgcacaaagtcacagtttatcagaataaactgcaggcccaagtcattgttgattatttgtgtaagctgagctctttgcctgcagagcagcatcctgtcttgctgcgcagtaccagctttgctctgctctgccagctgagtgtgaagaagatacagctctttgatacccaagatctgatcaatgttttgaaagcttttgtcattttaggaatccctcactcccattcaatgctagatgtgtatgagaccaaatgttgccatcaagtatgggagatgagtatggatcagctccttttggtggctgatctctggaggtacttaggccgcaaaatacctcggtttttaaacattttttctagttatcttaatttgcactggaaagatctatccttgtctcagcttgttcacttaatttatgttataggtgaaaatcgtcaggtatcccaggacctaatgcaaaaattggaatcattgatccttaaatatatagatttgatcaatttagaggaggttggtaccatctgtttggggttctttaaatcaaagactagtctctctgaatttgtcatgcggaaaattggagaaggggcttgtgctaacatgcagcatctgagtagtnnnnnnnnnnnnnnnnnnnnnnnnnnnnnnnnnnnnnnnnnnnnnnnnnnnnnnnnnnnnnnnnnnnnnnnnnnnnnnnnnnnnnnnnnnnnnnnnnnnnnnnnnnnnnnnnnnnnnnnnnnnnnnnnnnnnnnnnnnnnnnnnnnnnnnnnnnnnnnnnnnnnnnnnnnnnnnnnnnnnnnnnnnnnnnnnnnnnnnnnnnnnnnnnnnnnnnnnnnnnnnnnnnnnnnnnnnnnnnnnnnnnnnntttggaactctgtaccataagccacccaatgcagaagaattttactccagcctgataaatgagattcacagaaagatgcctgaattcaaccagtacccagaacacctgcccacctgcctgctaggcctggcattttcagagtactttccagtagagttaattgattttgctctcagtccagggtttgtcaggttagctcaggagagaaccaagtttaacctcattaaggaactgtataccctcgacggtacagttggcattgagtgtccagattacagaggcaatcgtcttagtactcaccttcagcaagaggggtctgaatttctgtggaatttagcagagaaggatatgaactcaaagcctgaattcttagaaactctctttttacttgagaccatgttgggggggccccagtacgtcaagcaccatatgattttgcctcatacccgatcttctgacttagaggtccagcttgatgttaacctgaagccattaccatttaatagagaagccacaccagctgaaaatgtagccacattaaggcttaagcatgtgggagtcagccttacagatgatttgatgaatcagttactaaaagggaaagcaagaggacatttccagggcaaaactgagtcagagcctgggcagcagcccatggagttagagaataaggcagctgtacctttggggggcttcctttgcaatgtagcagataaatcaggggccatggagatggctggcctgtgcccctcagcctgcatgcagaccccaggaatgaagctggctattcagttcacaaacaggaaccaatattgctatggctccagggatctccttggactgcacagtatgaagaggcggcagctggctcggcttggctaccgtgtggtagagttatcctactgggaatggttcccactactgaaacgaactcgcttagaaaagttggcatttcttcatgagaaagtattcacctctgctctctgaagggcatttaggggcatttctatgacaaagctgtaggtgtatactgtaccaggtgttgcaaaatgattataaaagccagaatgtaagtttggcaataaaatagtctattgaggagacttagttgtgtccaaggcagattagagctagtgtatgttactgtgaattgtaatgtagttggattgtacaaattgctgcaaatgtatacatattactcttagtaaataataaacatcttaatatgtcctacggtca

SEQ ID NO: 33423 - DNA, 1092 bp, Macaca Mulatta
  misc_feature (1)...(1092): n = A,T,C or G
gcagtctcctgaacccagcagccatctatgccaacaaggagatcagcctgcgtgacgttgaggtctatggctttgactacgactacactctggcccagtatgcagatgcactgcaccccgagatcttcggcgccgcccgtgacatcctgatcgagcactacaagtacccaggggggattcggaagtatgactacaaccccagctttgccatccgtggcctccactatgacattcagaagagccttctgataaagattgacgccttccactacgtgcagctggggacagcctacaggggcctccagcctgtgccagatgaggaagtgatcgagctgtatgggggcacccagcacatcccactataccagatgagtggcttctatggcaagggtccctccattaagcagttcatggacatcttctcgctgccggagatggctctgctgtcctgcgtggtggactacttcctgggccacagcctggagtttgaccaagcgcacctctacaaggatgtgacagacgccatcctagaagtgcatgtgaaggtcctcatgtaccagtggatcgagcaggacatggagaagtacatcctgagaggggacgagacgtttgccgtcctgagttgcctggtggcccatgggaaacagctgttcctcatcaccaacagtcctttcagcttcctagactaagggatgcggcacacggtgggtcccgattggcgccagctcttcgatgtggtggtagtccaggcagacaagnnnnnnnnnnnnnnnnnnnnnnnnnnnnnnnnnnnnnnnnnnnnnnnnnnnnnnnnnnnnnnnnnnnnnnnnnnnnnnnnnnnnnnnnnnnnnnnnnnnnnnnnnnnnnnnnnnnnnnnnnnnnnnnnnnnnnnnnnnnnnnnnnnnnnnnnnnnnnnnnnnnnnnnnnnnnnnnnnnnnnnnnnnnnnnnnnggatctcatgctgcggcatggctggcgcacgggtgccatcatccctgagctggagcgtgagatccgcatcatcaacacagagcagtacatgcactcgctgacgtggcagcaagcactcacggggctgctggagcgcatgca

SEQ ID NO: 33424 - DNA, 2593 bp, Macaca Mulatta
  misc_feature (1)...(2593): n = A,T,C or G
cgtgtgcagcttccgggtttatcacaaccgtggaccctgcccgggctccgaccccggggcgtgtgggcatgaacgtgttcagaaacgttcccatccccctgccctttcaaagctacttagagaggggggacgtgaaccactggatgggaaatcaagaactgctttattaagcagtttgccctttggagtggattttagagttattacccgaatgtgctatnnnnnnnnnnnnnnnnnnnnnnnnnnnnnnnnnnnnnnnnnnnnnnnnnnnnnnnnnnnnnnnnnnnnnnnnnnnnnnnnnnnnnnnnnnnnnnnnnnnnnnnnnnnnnnnnnnnnnnnnnnnnnnnnnnnnnnnnnnnnnnnnnnnnnnnnnnnnnnnnnnnnnnnnnnnnnnnnnnnnnnnnnnnnnnnnnnnnnnnnnnnnnnnnnnnnnnnnnnnnnnnnnnnnnnnnnnnnnnnnnnnnnnnnnnnnnnnnnnnnnnnnnnnnnnnnnnnnnnnnnnnnnnnnnnnnnnnnnnnnnnnnnnnnnnnnnnnnnnnnnnnnnnnnnnnnnnnnnnnnnnnnnnnnnnnnnnnnnnnnnnnnnnnnnnnnnnnnnnnnnnnnnnnnnnnnnnnnnnnnnnnnnnnnnnnnnnnnnnnnnnnnnnnnnnnnnnnnnnnnnnnnnnnnnnnnnnnnnnnnnnnnnnnnnnnnnnnnnnnnnnnnnnnnnnnnnnnnnnnnnnnnnnnnnnnnnnnnnnnnnnnnnnnnnnnnnnnnnnnnnnnnnnnnnnnnnnnnnnnnnnnnnnnnnnnnnnnnnnnnnnnnnnnnnnnnnnnnnnnnnnnnnnnnnnnnnnnnnnnnnnnnnnnnnnnnnnnnnnnnnnnnnnnnnnnnnnnnnnnnnnnnnnnnnnnnnnnnnnnnnnnnnnnnnnnnnnnnnnnnnnnnnnnnnnnnnnnnnnnnnnnnnnnnnnnnnnnnnnnnnnnnnnnnnnnnnnnnnnnnnnnnnnnnnnnnnnnnnnnnnnnnnnnnnnnnnnnnnnnnnnnnnnnnnnnnnnnnnnnnnnnnnnnnnnnnnnnnnnnnnnnnnnnnnnnnnnnnnnnnnnnnnnnnnnnnnnnnnnnnnnnnnnnnnnnnnnnnnnnnnnnnnnnnnnnnnnnnnnnnnnnnnnnnnnnnnnnnnnnnnnnnnnnnnnnnnnnnnnnnnnnnnnnnnnnnnnnnnnnnnnnnnnnnnnnnnnnnnnnnnnnnnnnnnnnnnnnnnnnnnnnnnnnnnnnnnnnnnnnnnnnnnnnnnnnnnnnnnnnnnnnnnnnnnnnnnnnnnnnnnnnnnnnnnnnnnnnnnnnnnnnnnnnnnnnnnnnnnnnnnnnnnnnnnnnnnnnnnnnnnnnnnnnnnnnnnnnnnnnnnnnnnnnnnnnnnnnnnnnnnnnnnnnnnnnnnnnnnnnnnnnnnnnnnnnnnnnnnnnnnnnnnnnnnnnnnnnnnnnnnnnnnnnnnnnnnnnnnnnnnnnnnnnnnnnnnnnnnnnnnnnnnnnnnnnnnnnnnnnnnnnnnnnnnnnnnnnnnnnnnnnnnnnnnnnnnnnnnnnnnnnnnnnnnnnnnnnnnnnnnnnnnnnnnnnnnnnnnnnnnnnnnnnnnnnnnnnnnnnnnnnnnnnnnnnnnnnnnnnnnnnnnnnnnnnnnnnnnnnnnnnnnnnnnnnnnnnnnnnnnnnnnnnnnnnnnnnnnnnnnnnnnnnnnnnnnnnnnnnnnnnnnnnnnnnnnnnnnnnnnnnnnnnnnnnnnnnnnnnnnnnnnnnnnnnnnnnnnnnnnnnnnnnnnnnnnnnnnnnnnnnnnnnnnnnnnnnnnnnnnnnnnnnnnnnnnnnnnnnnnnnnnnnnnnnnnnnnnnnnnnnnnnnnnnnnnnnnnnnnnnnnnnnnnnnnnnnnnnnnnnnnnnnnnnnnnnnnnnnnnnnnnnnnnnnnnnnnnnnnnnnnnnnnnnnnnnnnnnnnnnnnnnnnnnnnnnnnnnnnnnnnnnnnnnnnnnnnnnnnnnnnnnnnnnnnnnnnnnnnnnnnnnnnnnnnnnnnnnnnnnnnnnnnnnnnnnnnnnnnnnnnnnnnnnnnnnnnnnnnnnnnnnnnnnnnnnnnnnnnnnnnnnnnnnnnnnnnnnnnnnnnnnnnnnnnnnnnnnnnnnnnnnnnnnnnnnnnnnnnnnnnnnnnnnnnnnnnnnnnnnnnnnnnnnnnnnnnnnnnnnnnnnnnnnnnnnnnnnnnnnnnnnnnnnnnnnnnnnnnnnnnnnnnnnnnnnnnnnnnnnnnnnnnnnnnnnnnnnnnnnnnnnnnnnnnnnnnnnnnnnnnnnnnnnnnnnnnnnnnnnnnnnnnnnnnnnnnnnnnnnnnnnnnnnnnnnnnnnnnnnnnnnnnnnnnnnnnnnnnnnnnnnnnnnnnnnnnnnnnnnnnnnnnnnnnnnnnnnnnnnnnnnnnnnnnnnnnnnnnnnnnnnnnnnnnnnnnnnnnttctatcatgatgcagagaagacggaacggagtgaagccatgtatgcctacggcagcagaaagagatgaaatcttgagagcaatgggaaagatgccctattgaatgtttgcattaaaagtatttatataactt

SEQ ID NO: 33425 - DNA, 1662 bp, Macaca Mulatta
  misc_feature (1)...(1662): n = A,T,C or G
aggtgctgatcgtccacacgaatcacctcacttccctgcttcccaaatcctgcagcctcctgagtctggcaaccatcaaggnnnnnnnnnnnnnnnnnnnnnnnnnnnnnnnnnnnnnnnnnnnnnnnnnnnnnnnnnnnnnnnnnnnnnnnnnnnnnnnnnnnnnnnnnnnnnnnnnnnnnnnnnnnnnnnnnnnnnnnnnnnnnnnnnnnnnnnnnnnnnnnnnnnnnnnnnnnnnnnnnnnnnnnnnnnnnnnnnnnnnnnnnnnnnnnnnnnnnnnnnnnnnnnnnnnnnnnnnnnnnnnnnnnnnnnnnnnnnnnnnnnnnnnnnnnnnnnnnnnnnnnnnnnnnnnnnnnnnnnnnnnnnnnnnnnnnnnnnnnnnnnnnnnnnnnnnnnnnnnnnnnnnnnnnnnnnnnnnnnnnnnnnnnnnnnnnnnnnnnnnnnnnnnnnnnnnnnnnnnnnnnnnnnnnnnnnnnnnnnnnnnnnnnnnnnnnnnnnnnnnnnnnnnnnnnnnnnnnnnnnnnnnnnnnnnnnnnnnnnnnnnnnnnnnnnnnnnnnnnnnnnnnnnnnnnnnnnnnnnnnnnnnnnnnnnnnnnnnnnnnnnnnnnnnnnnnnnnnnnnnnnnnnnnnnnnnnnnnnnnnnnnnnnnnnnnnnnnnnnnnnnnnnnnnnnnnnnnnnnnnnnnnnnnnnnnnnnnnnnnnnnnnnnnnnnnnnnnnnnnnnnnnnnggagcagtcccggctggagcagggcctgagtgagcaccagcgccacctcgacgcagagcggcagcggctgcaggagcagctgaagcagacagaacagaacatctccagccggatccagaagctgctgcaggagaatcagagnnnnnnnnnnnnnnnnnnnnnnnnnnnnnnnnnnnnnnnnnnnnnnnnnnnnnnnnnnnnnnnnnnnnnnnnnnnnnnnnnnnnnnnnnnnnnnnnnnnnnnnnnnnnnnnnnnnnnnnnnnnnnnnnnnnnnnnnnnnnnnnnnnnnnnnnnnnnnnnnnnnnnnnnnnnnnnnnnnnnnnnnnnnnnnnnnnnnnnnnnnnnnnnnnnnnncagcatggccgaaatggatgaacgattccagcagattctgtcgtggcagcaaatggatcagaacaaagccatcagccagatcctgcaggannnnnnnnnnnnnnnnnnnnnnnnnnnnnnnnnnnnnnnnnnnnnnnnnnnnnnnnnnnnnnnnnnnnnnnnnnnnnnnnnnnnnnnnnnnnnnnnnnnnnnnnnnnnnnnnnnnnnnnnnnnnnnnnnnnnnnnnnnnnnnnnnnnnnnnnnnnnnnnnnnnnnnnnnnnnnnnnnnnnnnnnnnnnnnnnnnnnnnnnnnnnnnnnnnnnnnnnnnnnnnnnnnnnnnnnnnnnnnnnnnnnnnnnnnnnnnnnnnnnnnnnnntgcaggaagagggcatggagcgccagctggtggccctcctggaggagctgtcggctgagcactacctgcccatctttgcgcaccaccgcctctcactggacctgctgagccaaatgagccccggggacctggccaaggnnnaggtgggcgtctcagaagctggcctgcagcatgagatcctccggagagtccaggaactgctggatgcagccaggatccagcca

SEQ ID NO: 33426 - DNA, 585 bp, Macaca Mulatta
gaaagcagtcagtaccctcccaatggcccccctcgaaggtctccactctcctctgggctcctccttgcctaatgcagggggtcaccgctggagaagaaccaccactgtcctcgatgtgtcccaagcctggagcaaatcgttcctcttggctctcccagccctattacagaaatcattcctgggtttctgtccctccgaggctcaccaggtgtagttggctttgttctttgagggtattagcccttctactttctttctcacccaccctgtaccctcttctgtgtgtctttgctatcccccttccctcccaccactcatgtgcatgagcaaatgtgcaactaaaccctgggactttgcagtcaaatgaagctgagcttcccacatccccttcttcggtttgccatgagacgatgtggggtttccactgtgtgtctgtcatcacctctttgtctttttttcctaaccctgatctcatacttgtatagaataataacaacagttgtacttccaccaaaggcatgtggcatatttaccaatttcatgtattctgaacaaaggcaaaaaatacaaattcctaccactaaa

SEQ ID NO: 33427 - DNA, 823 bp, Macaca Mulatta
ggggaggcctgctgggaagagggatgtaagagagaagacagccgtgactgagtaaggctgcagtggagagccagatttcagctggaagtggctctcagccctggttgcacattaaaattgcaggggagggcttgtaaacataccatttcctggtcctagcccctggacattctgactcagtctgaggtggagcttggacataggacaacttgcctttgctgattttgaagagagttgtgctatgatgtggcaaaagagtttcattccaggagtttatattacaagttggcagtggagcagctgcagagccatcccgaggcacaggaagctctgggccctcctctcaacatccattatctcaagctcaccgatagggaaaacttcgtggacattgctgatgccaagttgaagattcctgtctctggatccaagtcagagggccttctctacgtccactcctccagaggtggcccctttcagaggtggcaccttgacgaggtctttttagagctcaaggatggtcagcagattcctgtgttcaagctcagtggggaaaacggtgacgaagtgaaaaaggagtagagacgacccagaagacccagcagacccagcgtgcttctagtccatccttccctcatctctaccatatgcccactgggggtggtggcccattctgagtggcaagacactccctgcaaacccagtttttcccagccacaagcggggatgatttgtatgttgccaaccaacatggggaaatttttgggttataaatttccaaactttgggttcaaccaaacgaaatgggtttattttggtccac

SEQ ID NO: 33428 - DNA, 196 bp, Macaca Mulatta
  misc_feature (1)...(196): n = A,T,C or G
aatgactttagcagggctgtggctgaggagtacttgtccttcttccagtttggaggccagagcctggaccgagccctccggnggagcttcctccaggccttggtgctcagtggggagactcaggaacgggagcgaatcctctaccagttctccagacgcttccaccactgcaatctgggggtcttcccctcagtag

SEQ ID NO: 33429 - DNA, 1622 bp, Macaca Mulatta
  misc_feature (1)...(1622): n = A,T,C or G
aacatgacctcaaggagcttcttgtcaatgagaagaccaagctgatgcctggcaaagnnnnnnnnnnnnnnnnnnnnnnnnnnnnnnnnnnnnnnnnnnnnnnnnnnnnnnnnnnnnnnnnnnnnnnnnnnnnnnnnnnnnnnnnnnnnnnnnnnnnnnnnnnnnnnnnnnnnnnnnnnnnnnnnnnnnnnnnnnnnnnnnnnnnnnnnnnnnnnnnnnnnnnnnnnnnnnnnnnnnnnnnnnnnnnnnnnnnnnnnnnnnnnnnnnnnnnnnnnnnnnnnnnnnnnnnnnnnnnnnnnnnnnnnnnatggttcaatggaagagactctgccggcagcattacttgtgggccctgggctgctatatgctgctggccattgtggctctgaaactttctttaaggttgaagtgtgactctgaccacttgggtctggagtccagggaattacaaagccagtactgtaggaatatctggaataatnnnnnnnnnnnnnnnnnnnnnnnnnnnnnnnnnnnnnnnnnnnnnnnnnnnnnnnnnnnnnnnnnnnnnnnnnnnnnnnnnnnnnnnnnnnnnnnnnnnnnnnnnnnnnnnnnnnnnnnnnnnnnnnnnnnnnnnnnnnnnnnnnnnnnnnnnnnnnnnnnnnnnnnnnnnnnnnnnnnnnnnnnnnnnnnnnnnnnnnnnnnnnnnnnnnnnnnnnnnnnnnnnnnnnnnnnnnnnnnnnnnnnnnnnnnnnnnnnnnnnnnnnnnnnnnnnnnnnnnnnnnnnnnnnnnnnnnnnnnnnnnnnnnnnnnnnnnnnnnnnnnnnnnnnnnnnnnnnnnnnnnnnnnnnnnnnnnnnnnnnnnnnnnnnnnnnnnnnnnnnnnnnnnnnnnnnnnnnnnnnnnnnnnnnnnnnnnnnnnnnnnnnnnnnnnnnnnnnnnnnnnnnnnnnnnnnnnnnnnnnnnnnnnnnnnnnnnnnnnnnnnnnnnnnnnnnnnnnnnnnnnnnnnnnnnnnnnnnnnnnnnnnnnnnnnnnnnnnnnnnnnnnnnnnnnnnnnnnnnnnnnnnnnnnnnnnnnnnnnnnnnnnnnnnnnnnnnnnnnnnnnnnnnnnnnnnnnnnnnnnnnnnnnnnnnnaggtagtgggggacacattacttccaaccaacaagaagaaggatcctcccccttataatttaactatgtttacagggaatgcgtatattgtggcttcccgagattttgtccaacatgttttgaagaaccctaaatcccgacaactgattgaatgggtaaaagacacctatagccctgatgaacacctctgggccacccttcagcgtgcacggtggatgcctggctctgttcccaaccaccccaagtacgacatctcagacatgacttctattgccaggctggtcaagtggcaggatcatgagggagacatcgataagggtgctccttatgccccttgctctggaatccaccagcgggctgtctgtgtttatggggctggggacttgcactggatgcttcaaaaccatcacctgttggccaacaagtttgacccaaaggtagatgataatgctcttcagtgcttagaagagtacctacgttataaggccatctatgggactgaactttga

SEQ ID NO: 33430 - DNA, 194 bp, Macaca Mulatta
ttcctagccgctggcggacccgatggggcgtcctgcgagggttcggcgagggttctgccaggatagtagcagtgcgcccaaggagtgagaggcacccggggctactggagccagaccctcaacccgccctagtggtaggcgaggaataacgaaagccacgtattcccatttctctagtggctaatgacattaaa

SEQ ID NO: 33431 - DNA, 521 bp, Macaca Mulatta
ctggcttactggttattcagatcatttttcctgttcaggtatctgcaggtatccctattcagcaaagatcttttttcaggatggcaatcttctgatataatttaaaaacattttttcattttttgaaatagagaatattttactatttttgtgaaaatagagttttggttatcactttcttccttaaaataattccttctgttaatttgtaaaagcacatttcatgctttacctgtgagattccctgacccctacacacacacccacttaagtaaagttcccgtcagttggcagcatggagagggtgacctggctgctgctttaccatggtaccagcatctctggagcatcttagtttcaggaccataatgcttatgaagatccccaaacagcttaggtgatgtagcttatatctctgataattacaattagcttatatctctgtattaaaattaaatactgagatattttaaaaacatttatttgacatataacagtaataaactaataacttgctaaca

SEQ ID NO: 33432 - DNA, 1166 bp, Macaca Mulatta
  misc_feature (1)...(1166): n = A,T,C or G
tcgaggccatctcctggcgccgctgtacggccatcgtggctaaacaggtactgctgggccggaaggtggtggtcgtacgctgcgaaggcatcaacatttctggcaatttctacagaaacaagttgaagtacctggctttcctccgcaagcggatgaacaccaacccttccagaggcccctaccacttccgggcccccagccgcatcttctggcggaccgtgcgagggcctgctgtccgtcacccaacaggcatgctgcctcacaagaccaagcgaggccaggctgccctggaccgcctcaaggtgtttgacggcatcccaccgccctacgacaagaaaaagcggatggtggttcctgctgccctcaaggtcgtgcgtctgaagcctacgagaaagtttgcctatctggggcgcctggctcacgaggttggctggaagtaccaggcagtgacagccaccttggaggagaagaggaaggagaaagccaagatccactacaggaagaagaagcagctcatgaggttacggaaacaggctgagaagaacgtggagaagaaaattgacaaatacacacaggtcctcaagacccacggactcctggtctgagcccaataaagactgttaattcctcaaaaagagccgtgccnnnnnnnnnnnnnnnnnnnnnnnnnnnnnnnngnnnnnnnnnnnnnnnnnnnnnnnntacttaatttggcgcttatattgagctgattttacaatttcacttggccgttcgannnnnnnnnnnnnnggggcttccctttcgcagctgcgtatannnnnnnnnnnnnnnnnnnnnnnnnnnnnnnnnnnnnnnnnnnnnnnnnnnnnnnnnnnnnnnnnnnnnnnnnnnnnnnnnnnnnnnnnnntccccaaacagttgacgcagccttgaattgtgcgaaatgtgcaaatttgtaacgcgttaactatttgcgttaaaaattcgcgtttaaacttttgtgttaaactcagcgtcaatttttaaaaccaagtaaggccggaaantcgcgcaagaatccctttataaattcagaaagaaatagaaccgagaataggcgttgacgtgttgttcccagttttgtgaacaagaagtccacctattaaagaaaccgtggactccagacgtcaaaggggcgaaaaacc

SEQ ID NO: 33433 - DNA, 1432 bp, Macaca Mulatta
  misc_feature (1)...(1432): n = A,T,C or G
cccaagagacttcgagatagacaagctttgttccctgccaaagtgacaaatgtcagcttgctggaaaagactgaccgaagtgagagtggtgagaagattatgacctctgaaannnnnnnnnnnnnnnnnnnnnnnnnnnnnnnnnnnnnnnnnnnnnnnnnnnnnnnnnnnnnnnnnnnnnnnnnnnnnnnnnnnnnnnnnnnnnnnnnnnnnnnnnnnnnnnnnnnnnnnnnnnnnnnnnnnnnnnnnnnnnnnnnnnnnnnnnnnnnnnnnnnnnnnnnnnnnnnnnnnnnnnnnnnnnnnnnnnnnnnnnnnnnnnnnnnnnnnnnnnnnnnnnnnnnnnnnnnnnnnnnnnnnnnnnnnnnnnnnnnnnnnnnnnnnnnnnnnnnnnnnnnnnnnnnnnnnnnnnnnnnnnnnnnnnnnnnnnnnnnnnnnnnnnnnnnnnnnnnnnnnnnnnnnnnnnnnnnnnnnnnnnnnnnnnnnnnnnnnnnnnnnnnnnnnnnnnnnnnnnnnnnnnnnnnnnnnnnnnnnnnnnnnnnnnnnnnnnnnnnnnnnnnnnnnnnnnnnnnnnnnnnnnnnnnnnnnnnnnnnnnnnnnnnnnnnnnnnnnnnnnnnnnnnnnnnnnnnnnnnnnnnnnnnnnnnnnnnnnnnnnnnnnnnnnnnnnnnnnnnnnnnnnnnnnnnnnnnnnnnnnnnnnnnnnnnnnnnnnnnnnnnnnnnnnnnnnnnnnnnnnnnnnnnnnnnnnnnnnnnnnnnnnnnnnnnnnnnnnnnnnnnnnnnnnnnnnnnnnnnnnnnnnnnnnnnnnnnnnnnnnnnnnnnnnnnnnnnnnnnnnnnnnnnnnnnnnnnnnnnnnnnnnnnnnnnnnnnnnnnnnnnnnnnnnnnnnnnnnnnnnnnnnnnnnnnnnnnnnnnnnnnnnnnnnnnnnnnnnnnnnnnnnnnnnnnnnnnnnnnnnnnnaagcagtgccagaggcgcacctccaatgtgggcgagagcaacctgtggcccctgaacaagttcctgccaggctcccggttgcttgtgtaaaactcaaagtttggatctgtgtttcctggggaaagtttttatcttttacatgtctgggggtgattgtgaaaccgcatatttttacctcagagaaaaaaatcattgtttaggtttggtgctttcattagattgcttgttaagcccttattgaattcactcctgcctttctcccacccccacttatttcctatactcgtctctgatggcagtgaaggtgtctaaatggtcctgagggctacaacctgctgcacaggggctgggaaggggacccagattcattatggctgctggggtactgctgacccagccctgctgctgcttcgtgaatttgtgtacaaaacttttttcgtctgtaatgaatagtggcaataataaatattttctaa

SEQ ID NO: 33434 - DNA, 106 bp, Macaca Mulatta
cagaattgctcagccaccaaaagtaactaccttcgaggtactggtccctacccaccttccatggactggcggaaaaaaggaaattttgtctcacctgtagaaaaat

SEQ ID NO: 33435 - DNA, 3950 bp, Macaca Mulatta
  misc_feature (1)...(3950): n = A,T,C or G
caacctgagccgccgcactagcacgctgacccggcccaaggtgcccccgccagcgccccccagcaagcccaaggaggctgaggagggccctacgggggccagtgagagccaggactccccacggaagctcaagtatgaggaacctgagtatgacatccctgcattcggctttgactcagagcccgagctgagcgaggagcctgtggaggacagagcctcaggggagaggcggcctgcccagccccaccggccctcgccggcctcttctctgcagcgggcccgcttncaggtgggtgagtcttctgaggacgtggccctggaagaggagaccatctatgagaatgagggcttccggncatatgcagaggacaccctgtcagccagaagctcctctggngacagtgactccccaggcagctcctcgctgtccctggccaggnaaaactccccccaaatcagctcccccaaagcatcattcactcctaaagcttcagggcagaaaaaaatgcccagggcagaactgggggaagaaaccactcctcagcctccttttnnnnnnnnnnnnnnnnnnnnnnnnnnnnnnnnnnnnnnnnnnnnnnnnnnnnnnnnnnnnnnnnnnnnnnnnnnnnnnnnnnnnnnnnnnnnnnnnnnnnnnnnnnnnnnnnnnnnnnnnnnnnnnnnnnnnnnnnnnnnnnnnnnnnnnnnnnnnnnnnnnnnnnnnnnnnnnnnnnnnnnnnnnnnnnnnnnnnnnnnnnnnnnnnnnnnnnnnnnnnnnnnnnnnnnnnnnnnnnnnnnnnnnnnnnnnnnnnnnnnnnnnnnnnnnnnnnnnnnnnnnnnnnnnnnnnnnnnnnnnnnnnnnnnnnnnnnnnnnnnnnnnnnnnnnnnnnnnnnnnnnnnnnnnnnnnnnnnnnnnnnnnnnnnnnnnnnnnnnnnnnnnnnnnnnnnnnnnnnnnnnnnnnnnnnnnnnnnnnnnnnnnnnnnnnnnnnnnnnnnnnnnnnnnnnnnnnnnnnnnnnnnnnnnnnnnnnnnnnnnnnnnnnnnnnnnnnnnnnnnnnnnnnnnnnnnnnnnnnnnnnnnnnnnnnnnnnnnnnnnnnnnnnnnnnnnnnnnnnnnnnnnnnnnnnnnnnnnnnnnnnnnnnnnnnnnnnnnnnnnnnnnnnnnnnnnnnnnnnnnnnnnnnnnnnnnnnnnnnnnnnnnnnnnnnnnnnnnnnnnnnnnnnnnnnnnnnnnnnnnnnnnnnnnnnnnnnnnnnnnnnnnnnnnnnnnnnnnnnnnnnnnnnnnnnnnnnnnnnnnnnnnnnnnnnnnnnnnnnnnnnnnnnnnnnnnnnnnnnnnnnnnnnnnnnnnnnnnnnnnnnnnnnnnnnnnnnnnnatccagcagtgaagatgaggaacgggtccgacagtgcggttcaggccccagtcggtgttgtgtccccaccaccaaggacaccacctgtctggcgccctgccgaggaatgagtcactcacgccccccgatgccttccgaggcgtccgacggaactcctcctttagcactgctcgctccgctgctgccgaggccaagggccgcctggccgaacgggccgccagccagggttcagactcacccctgctgtccgcccagcgcaacggcatccccgtgtcccccgtgcgccccaagcccattgagaagtctcagttcatccacaacaacctcaaagacgtgtatgtctctatcgcggactacgagggggatgaggagacagcaggcttccaggagggagtgtccatggaggttctggagaggaaccctaatggctggtggtactgccagatcctggatggtgtgaagcccttcaaaggctgggtgccttccaactaccttgagaaaaagaactannnnnnnnnnnnnnnnnnnnnnnnnnnnnnnnnnnnnnnnnnnnnnnnnnnnnnnnnnnnnnnnnnnnnnnnnnnnnnnnnnnnnnnnnnnnnnnnnnnnnnnnnnnnnnnnnnnnnnnnnnnnnnnnnnnnnnnnnnnnnnnnnnnnnnnnnnnnnnnnnnnnnnnnnnnnnnnnnnnnnnnnnnnnnnnnnnnnnnnnnnnnnnnnnnnnnnnnnnnnnnnnnnnnnnnnnnnnnnnnnnnnnnnnnnnnnnnnnnnnnnnnnnnnnnnnnnnnnnnnnnnnnnnnnnnnnnnnnnnnnnnnnnnnnnnnnnnnnnnnnnnnnnnnnnnnnnnnnnnnnnnnnnnnnnnnnnnnnnnnnnnnnnnnnnnnnnnnnnnnnnnnnnnnnnnnnnnnnnnnnnnnnnnnnnnnnnnnnnnnnnnnnnnnnnnnnnnnnnnnnnnnnnnnnnnnnnnnnnnnnnnnnnnnnnnnnnnnnnnnnnnnnnnnnnnnnnnnnnnnnnnnnnnnnnnnnnnnnnnnnnnnnnnnnnnnnnnnnnnnnnnnnnnnnnnnnnnnnnnnnnnnnnnnnnnnnnnnnnnnnnnnnnnnnnnnnnnnnnnnnnnnnnnnnnnnnnnnnnnnnnnnnnnnnnnnnnnnnnnnnnnnnnnnnnnnnnnnnnnnnnnnnnnnnnnnnnnnnnnnnnnnnnnnnnnnnnnnnnnnnnnnnnnnnnnnnnnnnnnnnnnnnnnnnnnnnnnnnnnnnnnnnnnnnnnnnnnnnnnnnnnnnnnnnnnnnnnnnnnnnnnnnnnnnnnnnnnnnnnnnnnnnnnnnnnnnnnnnnnnnnnnnnnnnnnnnnnnnnnnnnnnnnnnnnnnnnnnnnnnnnnnnnnnnnnnnnnnnnnnnnnnnnnnnnnnnnnnnnnnnnnnnnnnnnnnnnnnnnnnnnnnnnnnnnnnnnnnnnnnnnnnnnnnnnnnnnnnnnnnnnnnnnnnnnnnnnnnnnnnnnnnnnnnnnnnnnnnnnnnnnnnnnnnnnnnnnnnnnnnnnnnnnnnnnnnnnnnnnnnnnnnnnnnnnnnnnnnnnnnnnnnnnnnnnnnnnnnnnnnnnnnnnnnnnnnnnnnnnnnnnnnnnnnnnnnnnnnnnnnnnnnnnnnnnnnnnnnnnnnnnnnnnnnnnnnnnnnnnnnnnnnnnnnnnnnnnnnnnnnnnnnnnnnnnnnnnnnnnnnnnnnnnnnnnnnnnnnnnnnnnnnnnnnnnnnnnnnnnnnnnnnnnnnnnnnnnnnnnnnnnnnnnnnnnnnnnnnnnnnnnnnnnnnnnnnnnnnnnnnnnnnnnnnnnnnnnnnnnnnnnnnnnnnnnnnnnnnnnnnnnnnnnnnnnnnnnnnnnnnnnnnnnnnnnnnnnnnnnnnnnnnnnnnnnnnnnnnggcaatgccacaggtgccccagttgatggaggatccctgtgccaggagccaacctggtcttcccgaggggcagtgccccagtgaagacagaagtaagagaataaagttccctgcaggtcctctgtcacctttgggttgtgtttttcaattgttgacatttcagaggggaccctccagaagcctagccggcttcccccaaggactcccccttcgctgggagtggatttccacacgtgcctttgattttggacagatcgggcctcacagccaccgattcagctgccagggtccctggactgggggttcgtgttttctatagaggaggaaaggccctccctcaccctactccccacccaggcagggcagcatgggacccagcgtctcagtgccttcaaannnnnnnnnnnnnnnnnnnnnnnnnnnnnnnnnnnnnnnnnnaggccttgcctgggcaaccccgagcccctgtccttcgccatacactgatacctggcagctagagcaaatggctcgtgttctttgttgaaggcctgtggtgagactgttttgtttccttttgttttgtgagtctgtttaaaattgaaattanttattttcttctgctggacagnattaaatagagcaggatgttgagttaatctgctagattgcagtactaatggtagtgtttagtgt

SEQ ID NO: 33436 - DNA, 107 bp, Macaca Mulatta
atttttattgtgagagatggcttgttggaatggctggccaatgtttgaacatctagttagtctcaagtactatataacagtaatattcacactgattaggtgagaac

SEQ ID NO: 33437 - DNA, 6352 bp, Macaca Mulatta
  misc_feature (1)...(6352): n = A,T,C or G
gttcttcctttgttctgtttatgtgccaatgtgcacagagaagatcaacatccccattggcccgtgcggcggcatgtgcctttcagtcaagagacgctgtgaacccgtcctgaaggaatttggatttgcctggccagagagtctgaactgcagcaaattcccaccacagaacgaccacaaccacatgtgcatggaagggccaggtgatgaagaggtgcccttacctcacaaaacccccatccagcctggggaagagtgtcactctgtgggaaccaattctgatcagtacatctgggtgaaaaggagcctgaactgtgttctcaaatgtggctatgatgctggcttatacagccgctcagccaaggagttcaccgatatctggatggctgtgtgggccagcctgtgcttcatttccactgccttcacagtactgaccttcctgatcgattcttctaggttttcctaccctgagcgccccatcatatttctcagtatgtgctataatatttatagcattgcttatattgtcaggctgactgtaggccgggaaaggatatcctgtgattttgaagaggcagcagaacctgttctcatccaagaaggacttaagaacacaggatgtgcaataattttcttgctgatgtacttttttggaatggccagctccatttggtgggttattctgacactcacttggtttttggcagcaggactcnnnnnnnnnnnnnnnnnnnnnnnnnnnnnnnnnnnnnnnnnnnnnnnnnnnnnnnnnnnnnnnnnnnnnnnnnnnnnnnnnnnnnnnnnnnnnnnnnnnnnnnnnnnnnnnnnnnnnnnnnnnnnnnnnnnnnnnnnnnnnnnnnnnnnnnnnnnnnnnnnnnnnnnnnnnnnnnnnnnnnnnnnnnnnnnnnnnnnnnnnnnnnnnnnnnnnnnnnnnnnnnnnnnnnnnnnnnnnnnnnnnnnnnnnnnnnnnnnnnnnnnnnnnnnnnnnnnnnnnnnnnnnnnnnnnnnnnnnnnnnnnnnnnnnnnnnnnnnnnnnnnnnnnnnnnnnnnnnnnnnnnnnnnnnnnnnnnnnnnnnnnnnnnnnnnnnnnnnnnnnnnnnnnnnnnnnnnnnnnnnnnnnnnnnnnnnnnnnnnnnnnnnnnnnnnnnnnnnnnnnnnnnnnnnnnnnnnnnnnnnnnnnnnnnnnnnnnnnnnnnnnnnnnnnnnnnnnnnnnnnnnnnnnnnnnnnnnnnnnnnnnnnnnnnnnnnnnnnnnnnnnnnnnnnnnnnnnnnnnnnnnnnnnnnnnnnnnnnnnnnnnnnnnnnnnnnnnnnnnnnnnnnnnnnnnnnnnnnnnnnnnnnnnnnnnnnnnnnnnnnnnnnnnnnnnnnnnnnnnnnnnnnnnnnnnnnnnnnnnnnnnnnnnnnnnnnnnnnnnnnnnnnnnnnnnnnnnnnnnnnnnnnnnnnnnnnnnnnnnnnnnnnnnnnnnnnnnnnnnnnnnnnnnnnnnnnnnnnnnnnnnccaatgattttgctgcagactttggaatgatccaaaatggaacagccagttagaggctttcaaagctgtgaaaaatcaaaaacgttgatcactttagcaggttgcagcttggagcgtggaggtcctgcctagagtccaggaagtccagggcgatactgttttcccctgcagggtgggatttgagctgtgggttggtaacttgcagggagaaagattaacttttttaaccctttacaattttaaatactaactgggtctttcagatagcaacgcaatctataaacactggaaacgctgggttcagagaagtgttacaagagttttatagtttggctgatctaacataaacatcttctgtggtgcactgtgtgcagtttagaactttgtggnnnnnnnnnnnnnnnnnnnnnnnnnnnnnnnnnnnnnnnnnnnnnnnnnnnnnnnnnnnnnnnnnnnnnnnnnnnnnnnnnnnnnnnnnnnnnnnnnnnnnnnnnnnnnnnnnnnnnnnnnnnnnnnnnnnnnnnnnnnnnnnnnnnnnnnnnnnnnnnnnnnnnnnnnnnnnnnnnnnnnnnnnnnnnnnnnnnnnnnnnnnnnnnnnnnnnnnnnnnnnnnnnnnnnnnnnnnnnnnnnnnnnnnnnnnnnnnnnnnnnnnnnnnnnnnnnnnnnnnnnnnnnnnnnnnnnnnnnnnnnnnnnnnnnnnnnnnnnnnnnnnnnnnnnnnnnnnnnnnnnnnnnnnnnnnnnnnnnnnnnnnnnnnnnnnnnnnnnnnnnnnnnnnnnnnnnnnnnnnnnnnnnnnnnnnnnnnnnnnnnnnnnnnnnnnnnnnnnnnnnnnnnnnnnnnnnnnnnnnnnnnnnnnnnnnnnnnnnnnnnnnnnnnnnnnnnnnnnnnnnnnnnnnnnnnnnnnnnnnnnnnnnnnnnnnnnnnnnnnnnnnnnnnnnnnnnnnnnnnnnnnnnnnnnnnnnnnnnnnnnnnnnnnnnnnnnnnnnnnnnnnnnnnnnnnnnnnnnnnnnnnnnnnnnnnnnnnnnnnnnnnnnnnnnnnnnnnnnnnnnnnnnnnnnnnnnnnnnnnnnnnnnnnnnnnnnnnnnnnnnnnnnnnnnnnnnnnnnnnnnnnnnnnnnnnnnnnnnnnnnnnnnnnnnnnnnnnnnnnnnnnnnnnnnnnnnnnnnnnnnnnnnnnnnnnnnnnnnnnnnnnnnnnnnnnnnnnnnnnnnnnnnnnnnnnnnnnnnnnnnnnnnnnnnnnnnnnnnnnnnnnnnnnnnnnnnnnnnnnnnnnnnnnnnnnnnnnnnnnnnnnnnnnnnnnnnnnnnnnnnnnnnnnnnnnnnnnnnnnnnnnnnnnnnnnnnnnnnnnnnnnnnnnnnnnnnnnnnnnnnnnnnnnnnnnnnnnnnnnnnnnnnnnnnnnnnnnnnnnnnnnnnnnnnnnnnnnnnnnnnnnnnnnnnnnnnnnnnnnnnnnnnnnnnnnnnnnnnnnnnnnnnnnnnnnnnnnnnnnnnnnnnnnnnnnnnnnnnnnnnnnnnnnnnnnnnnnnnnnnnnnnnnnnnnnnnnnnnnnnnnnnnnnnnnnnnnnnnnnnnnnnnnnnnnnnnnnnnnnnnnnnnnnnnnnnnnnnnnnnnnnnnnnnnnnnnnnnnnnnnnnnnnnnnnnnnnnnnnnnnnnnnnnnnnnnnnnnnnnnnnnnnnnnnnnnnnnnnnnnnnnnnnnnnnnnnnnnnnnnnnnnnnnnnnnnnnnnnnnnnnnnnnnnnnnnnnnnnnnnnnnnnnnnnnnnnnnnnnnnnnnnnnnnnnnnnnnnnnnnnnnnnnnnnnnnnnnnnnnnnnnnnnnnnnnnnnnnnnnnnnnnnnnnnnnnnnnnnnnnnnnnnnnnnnnnnnnnnnnnnnnnnnnnnnnnnnnnnnnnnnnnnnnnnnnnnnnnnnnnnnnnnnnnnnnnnnnnnnnnnnnnnnnnnnnnnnnnnnnnnnnnnnnnnnnnnnnnnnnnnnnnnnnnnnnnnnnnnnnnnnnnnnnnnnnnnnnnnnnnnnnnnnnnnnnnnnnnnnnnnnnnnnnnnnnnnnnnnnnnnnnnnnnnnnnnnnnnnnnnnnnnnnnnnnnnnnnnnnnnnnnnnnnnnnnnnnnnnnnnnnnnnnnnnnnnnnnnnnnnnnnnnnnnnnnnnnnnnnnnnnnnnnnnnnnnnnnnnnnnnnnnnnnnnnnnnnnnnnnnnnnnnnnnnnnnnnnnnnnnnnnnnnnnnnnnnnnnnnnnnnnnnnnnnnnnnnnnnnnnnnnnnnnnnnnnnnnnnnnnnnnnnnnnnnnnnnnnnnnnnnnnnnnnnnnnnnnnnnnnnnnnnnnnnnnnnnnnnnnnnnnnnnnnnnnnnnnnnnnnnnnnnnnnnnnnnnnnnnnnnnnnnnnnnnnnnnnnnnnnnnnnnnnnnnnnnnnnnnnnnnnnnnnnnnnnnnnnnnnnnnnnnnnnnnnnnnnnnnnnnnnnnnnnnnnnnnnnnnnnnnnnnnnnnnnnnnnnnnnnnnnnnnnnnnnnnnnnnnnnnnnnnnnnnnnnnnnnnnnnnnnnnnnnnnnnnnnnnnnnnnnnnnnnnnnnnnnnnnnnnnnnnnnnnnnnnnnnnnnnnnnnnnnnnnnnnnnnnnnnnnnnnnnnnnnnnnnnnnnnnnnnnnnnnnnnnnnnnnnnnnnnnnnnnnnnnnnnnnnnnnnnnnnnnnnnnnnnnnnnnnnnnnnnnnnnnnnnnnnnnnnnnnnnnnnnnnnnnnnnnnnnnnnnnnnnnnnnnnnnnnnnnnnnnnnnnnnnnnnnnnnnnnnnnnnnnnnnnnnnnnnnnnnnnnnnnnnnnnnnnnnnnnnnnnnnnnnnnnnnnnnnnnnnnnnnnnnnnnnnnnnnnnnnnnnnnnnnnnnnnnnnnnnnnnnnnnnnnnnnnnnnnnnnnnnnnnnnnnnnnnnnnnnnnnnnnnnnnnnnnnnnnnnnnnnnnnnnnnnnnnnnnnnnnnnnnnnnnnnnnnnnnnnnnnnnnnnnnnnnnnnnnnnnnnnnnnnnnnnnnnnnnnnnnnnnnnnnnnnnnnnnnnnnnnnnnnnnnnnnnnnnnnnnnnnnnnnngaaacctgcagtaaataggtatgattgtagcttcctcagaaatcccttggcctccagagattaaacataaatgcaatggcacctccatccagcgtcctttctggtagactcctttctcctgcttatataggccaaacctcagggcagggaaacatgggagtagaatggtgctggccagaaccatctgcttgatcttcttggttgattcatatcctctttcctttatggagacccacttcctgatcgctgagactatttctgaactggcaacttacttgggcctgaaactggagaannnnnnnnnnnnnttaatttcagagatgctctctgattttcctcttccaggtcactctctcacctgcactccccaaactcaggttctgggaagctcgtgtgtctagactctgattttagattctgttcagcacctttagctctatattctctggctccccgcatcctcatggtcactgaattaaatgcttattgtgttgagaaccaagctgggacctgaggacacaaagatgagctcagcagtctgagccctagaggaacagactcagggatttcaccaggccggtacaatatttgatttctggtgaggtggccacagctgcagttagggaagggagccacagagcacagactgtcaaaggaacctcttttgtgtttgtttgtttgnnnnnnnnnnnnnnnnnnnnnnnnnnnnnnnnnnnnnnnnnnnnnnnnnnnnnnnnnnnnnnnnnnnnnnnnnnnnnnnnnnnnnnnnnnnnnnnnnnnnnnnnnnnnnnnnnnnnnnnnnnnnnnnnnnnnnnnnnnnnnnnnnnnnnnnnnnnnnnnnnnnnnnnnnnnnnnnnnnnnnnnnnnnnnnnnnnnnnnnnnnnnnnnnnnnnnnnnnnnnnnnnnnnnnnnnnnnnnnnnnnnnnnnnnnnnnnnnnnnnnnnnnnnnnnnnnnnnnnnnnnnnnnnnnnnnncacctggcctggaaggaacctcttaaaatcagtttacatcttgtattttgttctgtgatggaggacactggagagagttgctattccagtcaatcatgtcgagtcactggactctgaaaatcctattggttcctttattttatntgagttcccatctgggtttgtattatgtcttgcaaatgacctgagttatcactattcctccagggttaggtcatagatcttggaaactacttagagagcattttgctcctaccaaggatcagatactagagccctacataatggatttcatttcactctagcctacatagagctttctgttgctgtctcttgccatgcacttgtgcagtgattacacacttgacagtaccaggagacaaatgacttgtagatgccccgacatgcctgttccccttggcaagctcagttgccctgatagtagcctgtttctgtttctgatctaccttttttctcttatttgcattagccaatttccagaatttacccaggcaatttgtagaggacttttttggggtcctgtatgagccatgtcctcaaagcttttatacctccttgctctcctacaatattcagtacatgaccactgtcatcctagaaggcttctggaaagaggggcaagagccactctgtcccacaaaggttgggtccatcttctctcccaggttgtgaaagttttcaaattgtacaagtaggctggggccctgacttggctgtgggcatggggaggggtaagctgctttctagatctctccctgcgagacggggaggtgtttctgaattttgtctacctc

SEQ ID NO: 33438 - DNA, 1780 bp, Macaca Mulatta
  misc_feature (1)...(1780): n = A,T,C or G
gacacgtcttctgggggtcccgcacgtgcttatccagttggtggcctttgctattacctgtcctctccagaatcttttggctctgtgttagaagacccggtccatgcagttgtatacatagtgttcatgctgggctcctgtgcattcttctccaaaacgtggattgaggtctcaggttcctctgccaaagatgtngttgcaaagcagctgaaggagcagcagatggtgatgagaggccaccgagagacctccatggtccatgaactcaatcggtnnnnnnnnnnnnnnnnnnnnnnnnnnnnnnnnnnnnnnnnnnnnnnnnnnnnnnnnnnnnnnnnnnnnnnnnnnnnnnnnnnnnnnnnnnnnnnnnnnnnnnnnnnnnnnnnnnnnnnnnnnnnnnnnnnnnnnnnnnnnnnnnnnnnnnnnnnnnnnnnnnnnnnnnnnnnnnnnnnnnnnnnnnnnnnnnnnnnnnnnnnnnnnnnnnnnnnnnnnnnnnnnnnnnnnnnnnnnnnnnnnnnnnnnnnnnnnnnnnnnnnnnnnnnnnnnnnnnnnnnnnnnnnnnnnnnnnnnnnnnnnnnnnnnnnnnnnnnnnnnnnnnnnnnnnnnnnnnnnnnnnnnnnnnnnnnnnnnnnnnnnnnnnnnnnnnnnnnnnnnnnnnnnnnnnnnnnnnnnnnnnnnnnnnnnnnnnnnnnnnnnnnnnnnnnnnnnnnnnnnnnnnnnnnnnnnnnnnnnnnnnnnnnnnnnnnnnnnnnnnnnnnnnnnnnnnnnnnnnnnnnnnnnnnnnnnnnnnnnnnnnnnnnnnnnnnnnnnnnnnnnnnnnnnnnnnnnnnnnnnnnnnnnnnnnnnnnnnnnnnnnnnnnnnnnnnnnnnnnnnnnnnnnnnnnnnnnnnnnnnnnnnnnnnnnagacatgggaccttgctggcatgtctccttcacaatcaggcgtgggaatatctggcttaggactgtttttctctttaagacaccattgttttcccctattttaaaagtgatttttttaaggacagaacttcttccaaaagagagggatggctttcccagaagacactcccggccatctgtggatttgtctgtgtgcacctgttggctcttctagctgactcttctggttggacttagagtttgcctgtttctgctagctccatgtttagtccacttgggtcatcagctctaccaaactgagcctggccaagctagggggacagacccttgcagtgatgtccatttgtctagattctgccagtcatcactggatgcatctccctcgcggctgccctagcaaggggagacgtggtggtggctatcagacatggacagaaactgacttagtgctcacaagccactacaccttctgggctgaagatcacccagctgtattttcagttttcttaccatgcttaggactgcacacaagtgagcagacgccaccaacttcctttctgcatcaccagtgtcgtcagcagagaggacagtgcaggctcaaggtcggtagtgaagtcaggttcggggtgcgtgggctgtggtggtggtgatcagttgctccagtgtttgaaataagaagactcatgtttatatctggaataagttctgtttgtgctgacaggtggcccaggtcctggggatgggcaccatccctctgtccttgagggagtcccctcttaggacaggcactgcctggcagcaagggcagcagagttggatactgagatcctgaggagcttgaggtttcgagctggctttagacattggtgggaccaa

SEQ ID NO: 33439 - DNA, 260 bp, Macaca Mulatta
caggactgtcctagagcttggcagtggcgccggcctcacaggcctggccatctgcaagatgtgccgcccccgggcatacatcttcagcgactgtcacagccgggtcctcgagcagctccgagggaatgtccttctcaatggcctctcgttggaggcagacatcactgccaacttagacagccccagggtgacagtggcccagctggactgggacgtcacgacagtccgtcagctctctgccttccagccagatgttgtca

SEQ ID NO: 33440 - DNA, 255 bp, Macaca Mulatta
gaaaaatatgtcgtaactgcaagtgtggccaagaagaacatgatgtcctcttgagcaatgaagaggatcgaaaagtgggaaaactttttgaagacaccaagtataccaccctgattgcaaaactaaagtcagatggaattcccatgtataaacgcaatgttatgatattgaccaatccagttgctgccaagaagaatgtctccatcaatacagttacctatgagtgggcacctcctgtccagaatcaggcattgg

SEQ ID NO: 33441 - DNA, 1701 bp, Macaca Mulatta
  misc_feature (1)...(1701): n = A,T,C or G
tttataatctgcaccagaagaatggcttcacatgtatgctcatcggggagatctttgagctcatgnnnnnnnnnnnnnnnnnnnnnnnnnnnnnnnnnnnnnnnnnnnnnnnnnnnnnnnnnnnnnnnnnnnnnnnnnnnnnnnnnnnnnnnnnnnnnnnnnnnnnnnnnnnnnnnnnnnnnnnnnnnnnnnnnnnnnnnnnnnnnnnnnnnnnnnnnnnnnnnnnnnnnnnnnnnnnnnnnnnnnnnnnnnnnnnnnnnnnnnnnnnnnnnnnnnnnnnnnnnnnnnnnnnnnnnnnnnnnnnnnnnnnnnnnnnnnnnnnnnnnnnnnnnnnnnnnnnnnnnnnnnnnnnnnnnnnnnnnnnnnnnnnnnnnnnnnnnnnnnnnnnnnnnnnnnnnnnnnnnnnnnnnnnnnnnnnnnnnnnnnnnnnnnnnnnnnnnnnnnnnnnnnnnnnnnnnnnnnnnnnnnnnnnnnnnnnnnnnnnnnnnnnnnnnnnnnnnnnnnnnnnnnnnnnnnnnnnnnnnnnnnnnnnnnnnnnnnnnnnnnnnnnnnnnnnnnnnnnnnnnnnnnnnnnnnnnnnnnnnnnnnnnnnnnnnnnnnnnnnnnnnnnnnnnnnnnnnnnnnnnnnnnnnnnnnnnnnnnnnnnnnnnnnnnnnnnnnnnnnnnnnnnnnnnnnnnnnnnnnnnnnnnnnnnnnnnnnnnnnnnnnnnnnnnnnnnnnnnnnnnnnnnnnnnnnnnnnnnnnnnnnnnnnnnnnnnnnnnnnnnnnnnnnnnnnnnnnnnnnnnnnnnnnnnnnnnnnnnnnnnnnnnnnnnnnnnnnnnnnnnnnnnnnnnnnnnnnnnnnnnnnnnnnnnnnnnnnnnnnnnnnnnnnnnnnnnnnnnnnnnnnnnnnnnnnnnnnnnnnnnnnnnnnnnnnnnnnnnnnnnnnnnnnnnnnnnnnnnnnnnnnnnnnnnnnnnnnnnnnnnnnnnnnnnnnnnnnnnnnnnnnnnnnnnnnnnnnnnnnnnnnnnnnnnnnnnnnnnnnnnnnnnnnnnnnnnnnnnnnnnnnnnnnnnnnnnnnnnnnnnnnnnnnnnnnnnnnnnnnnnnnnnnnnnnnnnnnnnnnnnnnnnnnnnnnnnnnnnnnnnnnnnnnnnnnnnnnnnnnnnnnnnnnnnnnnnnnnnnnnnnnnnnnnnnnnnnnnnnnnnnnnnnnnnnnnnnnnnnnnnnnnnnnnnnnnnnnnnnnnnnnnnnnnnnnnnnnnnnnnnnnnnnnnnnnnnnnnnnnnnnnnnnnnnnnnnnnnnnnnnnnnnnnnnnnnnnnnnnnnnnnnnnnnnnnnnnnnnnnnnnnnnnnnnnnnnnnnnnnnnnnnnnnnnnnnnnnnnnnnnnnnnnnnnnnnnnnnnnnnnnnnnnnnnnnnnnnnnnnnnnnnnnnntgctcagatggatgttcgccagcatggtcatccccagnncagtggctgtctgctgggcagacagaggcctcagtgtaccagcaagccgaggatggaaagacagagttgtcactcatgcactttgccatcaccaaccctggctggcagccaccgcgtgagagcacagccttcctaggcttcctcaaggagcaggttcagcgggatggagcagctgctagcctcgcccaagggggtctgctccctgaaaatgccctctttacgtctatccagtccttacaatctgagtct

SEQ ID NO: 33442 - DNA, 730 bp, Macaca Mulatta
  misc_feature (1)...(730): n = A,T,C or G
acagcccagacctcgnatctaaaaaaagggagccaagagaaaggctgtatcagagataccagtctcatgatgatagttctgacaattcagaatgcagctttcctttcaaatacacgtatggcgtaaatgcatggaaacactgggtcaaaactaggcaacttgatgaagatcttctggtattagatgagttaaaatcttctaaatcagtaaagttaaaagaggatctactctctcacaccacagctgagcttaactatgggttagctcattttgtcaatgagatccgacggccaaatggagagaattatgcacctgacagcatctattacctttgccttggaatacaggagtacttgggtggaagtaatcgaaaagacaacatatttattgatcctggataccaaacatttgagcaagaattgaataaaatactgcgaagctggcaaccaagcatacttccagatgggtcaatattctctcgagttgaagaagactatctctggaggataaaacaactaggatcacactctccagtagctcttctgaacacactgttctactttaacactaagtattttggcctgaaaacagtggaacaacacttaagactttcctttggccactgtgtttaggcattggaaaaaaatcctttaacgatggaaaacaaagcgtgtcttcgatacaagtgtctccttatgtggacagatatgaagagaaattctactggaaa

SEQ ID NO: 33443 - DNA, 579 bp, Macaca Mulatta
  misc_feature (1)...(579): n = A,T,C or G
gggaggagattggagtctgaatggatctgttttccaagagattctgagaaattttttgtattcaacagttggaaagctctctattctagctgataaaacttcccttttttttgatgtagatgcagatattctatacagttctggttgtctttttactagggactggttaactttttatgataaaaattccaaataaaaaattttatttttcttggggaaaatttttgggcttttcccccaattttattccttttaaaaatcccccttggaagccaaatttttggggtttgggccnnnnnnnnnnnnnnnnnnnnnnnnnnttgggaaacaatgttttaaatttccccccaaaaacacccactttnnnnnnnnnnnnnnnnnnnnnnnnnnnnnnnnnnnnnnnnnnnnnnagnnnnnnnnnnnnnnnnnnnnnnnnnnnnnnnnnnnncannnnnnnnnnnnnnnnnnnnnngcgccgccacnnnnnnnnnnnnnnnnnnnnnnnnnnnnnnnnnnnnnnnnnnnnnnnnnnnnnnnnnnnnnnnnnnnnnnagaaaaatatttgttttctctttcttt

SEQ ID NO: 33444 - DNA, 859 bp, Macaca Mulatta
  misc_feature (1)...(859): n = A,T,C or G
ccggccgaggctttctctggctgggtctggtcctgagctccgtctgcgtcgctctcggatgcgagacgcaggccaactcgaccacannnnnnnnnnnnnnnnnnnnnnnnnnnnnnnnnnnnnnnnnnnnnnnnnnnnnnnnnnnnnnnnnnnnnnnnnnnnnnnnnnnnnnnnnnnnnnnnnnnnnnnnnnnnnnnnnnnnnnnnnnnnnnnnnnnnnncagcaagcagtgtgcgccccgagccgcgtttctttcctcactggcaggagacctgacaccacccgcctgtacgacttcaactcctactggagggtgcacgctggaaacttctccaccatcccccagtacttcaaggagaatggctatgtgaccatgtcggtgggaaaagtctttcaccctgnnnnnnnnnnnnnnnnnnnnnnnnnnnnnnnnnnnnnnnnnnnnnnnnnnnnnnnnnnnnnnnnnnnnnnnnnnnnnnnnnnnnnnnnnnnnnnnnnnnnnnnnnnnnnnnnnnnnnnnnnnnnnnnnnnnnnnnnnnnnnnnnnnnnnnnnnnnnnnnnnnnnnnnnnnnnnnnnnnnnnnnnnnnnnnnnnnnnnnnnnnnnnnnnnnnnnnnnnnnnnnnnnnnnnnnnnnnnnnnnnnnnnnnnnnnnnnnnnnnnnnnnnnnnnnnnnnnnnnnnnnnnnnnnnnnnnnnnnnnnnnnnnnnncttggagaaatcaccttggcccccgattccgaggtccctgatggcctaccccctgtggcgtacaacccctggatggacatcaggcaacgggaagatgtccaagccttaaacatcagtgtgccatatggcccaattcctgtggagtttcag

SEQ ID NO: 33445 - DNA, 2213 bp, Macaca Mulatta
  misc_feature (1)...(2213): n = A,T,C or G
cttctccttttacacanaatagcccctgataccgtgttacagccttgtctcagccacctcaaggataatcactaaattctgcctaaaggactgaggaacggtgtctggaaaagggcaagaatatcacagcatgggcatgagtagcttgaaattgctgaagtatgtcctgtttttcttcaacttgctcttttggatctgtggctgctgcattttgggctttgggatctacctgctgatccacaacaacttcggagtgctcttccataacctcccctccctcacgctgggcaatgtgtttgtcattgtgggctccattatcatggtagttgccttcctgggctgcatgggctctatcaaggaaaacaagtgcctgcttatgtcgttcttcatcctgctgctgattatcctccttgccgaggtgatcttggccatcctgctctttgtatatgaacagaagctgaatgagtatgtggctaagggtctgaccgacagcatccaccgttaccactcagacaatagcaccaaggcagcgtgggactccatccagtcatttctccggtgctgtggtataaatggcacgagtgattggaccagtggcccaccagcatcttgcccctcagatccaaatgtggagggttgctacgcgaaagcaagactgtggtttcattccaatttcctgtatatcggaatcatcaccatctgtgtatgtgtgatcgaggtgttggggatgtcctttgcactgaccctgaactgccagattgataaaaccagtcagagcatagggctatgatctgcagttgtcctgtggtgaagagacttgtttcatctctggaaatgcaaaaccatttatagcatgaagtcctaaatgatcacctgctggatgatcctcctcccagcctttccctttttaggttcctgtcttatacaaccagagaaatgggtgttggccatgcacatcccacctcaggcagcaagacaatctttcacccactgatggcagcaaccatgtctctcaaagtggtgaaactaatatctgagcatttttgagacatgagaggcaaagagaaactggatctaatggcccaacatcaaagggtgaacccaggatatgaatttttgcatcttcccattgtcgaattagtctccagcctctaaatcatgcccagtcttctccccaacgtcaagcaagagacaagttgaagggaattctggggccaggctcactggaccattgtcgcaaccttctgtttctctttgactaagagccctggctacaggaattacacagttatctttctccaaagggcaagatctcatttcaatttctttattagagggccttattgatgtgttctaaatctttccagacaaaaactatccagtgatttatatcctaacttcaaccaataacttagctgataatcacagtaagaagacttctggtattatctcctctatcaagataagattttgcttaatgtacctatttttactccttcaataaaatcaaacacagttttatttattctacagacagaacaacaagcgaaacattcctaaaaaacatataaccattgttccatgggcacgccaacttcgggtccctcttctaagaaaaacgatcttcttccgttgagcagcccactattctcgatattttttgtgccacccccgccccgggatgtaccccacctgactttataggacgtttaaaaaagcgtttcgggaaaaaaccacttttaggggtacactacctaactaaaaagcaccagaggaagtatctcaaccccaccataaggagaggacgacacaaaatcccccttngaggggcctccccatgtagatgaaagtgcacaaagttatgggtttnttgggcgggaaaaacgttcttctcggaatcccacgtttaataatagaaacacaataaatatcctccccccggcggaggcgcggggagaantatcccaccctacagtctagtctagttccttttcgatataacaataaattctccacacatcaatccggcctcgttatattatatgtataagagtttcatcttatacatatgggggggaaatccttcatattgaaaatctggtaaaggaaatgtatcccttagacgcagtgagacagctctccgacttatatgatacgattatatcacaatgtctcggcagaatcatcttggtacaacgcaggcgtctatgcgt

SEQ ID NO: 33446 - DNA, 128 bp, Macaca Mulatta
cagcacctgcagatggggccctgcgcctatgagatcaggcagttcctggactgttcgaccactcagagtgacctgtccctgtgtgagggcttcagcgaggccctgaagcagtgcaagtacaaccatgg

SEQ ID NO: 33447 - DNA, 77 bp, Macaca Mulatta
agtggcaggttctgaataaggcaaagagtcatattccggaactggagcaaaccctggataatttgttgaagctgaaa

SEQ ID NO: 33448 - DNA, 363 bp, Macaca Mulatta
gaagaagttgctcgtcaacaggctgcaggaccacttgagagaaatattcaactggaatctcgaggattagcttcacgggctgacctgagcattcccggtctcagtgaacaatgtgtgttagtagaccatagagaaaggaatacggacacactggggttacaggtaggcaagagagtgtgtccattcaagtcagagaaggtggtggtggaggacacggttcctataataccaaaggagaaacatgcaaaagaagaggactcgagtatagactatgatctaagcctcccagacacagtcacccaggaagattatgtgaccacaagattgtgatacttgaaggaggaagcgtttaccatacacata

SEQ ID NO: 33449 - DNA, 1923 bp, Macaca Mulatta
aaggaaatcagtaactgttgaaggaaataccacaaacgccctccttccaggctgactaatggcttatgggagcaaatgagccacagaaacgatacgagcaactgctgttctttcaaaatacccaggcagaggaactggcagacgatgggcagcactgaacaaacaactgagatcctgttgtgcctatcacctgtggaagttgctaatcttaaggaaggaatcaatttctttcgtaataagagcactggcaaagactacatcttgtacaagagtaagagccgactgagggcatgcaagaatgtgtgcaagcaccaaggaggcctgttcataaaagatatcgaggatttagctggaaggtctgttagatgcacaaagcataactggaaattagatgtgagcaccatgaagtatatcaaccctccagaaagcttctgtcaagatgagctggttgttgaaatggatgaaaacaacggacttttacttttagaactgaatcctcctaacccttgggactcagagcccagatctcctgaagagttggattttggagaagtccagataacatacctcactcacgcctgcatggacctcaagttaggagacaagagaatggtgtttgacccttggttaatcggtcctgcttttgcccgaggatggtggttgctccatgagcctccatctgattggctggagaggctgtgccaggcagacctcatttacatcagtcatctgcactcggaccacctgagttaccccacactgaaaaagcttgctgggagaagaccagatattcccatttatgttggaaacacagaaaggcctgtattttggaatctgaatcagagcggtgtccagttgactaatatcaatgtcgtgccatttggaatatggcagcaggtggacaaaaatcttcgattcatgatcttgatggatggtgttcatcctgagatggacacttgcattattgtggagtacaaaggtcataaaatactgaatacagtggactgcaccagacccaatgggggaaggctccctacgaaggttgctctaatgatgagtgattttgctggaggagcatcaggctttccaatgactttcagtggtggaaaatttactgaggaatggaaagcccaatttattaaaacagaaaggaagaagctcctgaactacaaggctcagctggtgaagaacctgcaaccccgaatttattgtccctttgctgggtattttgtggaatctcacccatcagacaagtacatcaaagaaacaaacaccaaaaatgacccaaatgaactcaacaatcttatcaagaaaaactctgatgtgataacatggacccctcgacctggagccacccttgatctgggaagaatgctgaaggatccaacagacagcaagggcatcatagagcctccagaagggaccaaaatttacaaggattcctgggattttgaaccttatttggaaatcttgaatgctgctgtaggagatgaaatatttcttcattcatcctggataaaagaatacttcacttgggctggatttaaagattacaaccttgtggtcaggatgattgagacagatgaggacttcaatccttttcctggaggatatgactatttggttgactttctagatttatccttcccaaaagaaagaccacaacgagaacatccctatgaggaaatccgtagccgggtggatgtcatcagacacgtggtgaagaatggtctactctgggacgagttgtatataggattccaaacacggctccagcgggatcctgacatataccatcacctgttttggaatcattttcaaataaaacttcccctcacgccacccaactggaggtcattcctgacgtgctgtgagcagaacgggcctgggatttcgcaggaatgcaaaaccacatgaaaattt

SEQ ID NO: 33450 - DNA, 557 bp, Macaca Mulatta
  misc_feature (1)...(557): n = A,T,C or G
ggaatttatatcccagtggactgcctgaagaatactccttcttgacgacgtttcgaatgactggaagcacactcaaaaagaactggaacatttggcagattcaggattcctctgggaaggaacaagttggcataaagattaatggccaaacacaatctgttgcattttcatacaagggactggatggaagtctccaaacggcagccttttcgaatttgccctccttgtttgattcccagtggcataagatcatgattggcgtggagaggagtagtgctactctttttgttgactgcaacaggattgaatctttacctataaagccaagaggcccaattgacaccgatggctttgctgtgctgggaaaacttgcagataatcctcaagtttctgttccannnnnnnnnnnnnnnnnnnnnnnnnnnnnnnnnnnnnnnnnnnnnnnnnnnnnnnnnnnnnnnnnnnnnnnnnnnnnnnnnnnagaggtccccctggcgagcagggtcctccagggcctccgggcccccctggagttccgggcatagacggcatcgacg

SEQ ID NO: 33451 - DNA, 284 bp, Macaca Mulatta
cttggggacggagagttgagcaggtccacagcgggcagcaaaggccagagcagagcaagtgcgtgggcaaaggtgaggttgggggtacatccaggaatattctgaggactcagtctggaaacaggaagctagtgatggatctgttggagaggccatggtggaagccgaggaaggcaggcttgtggcttatgggtgccaagtggggcctggggaagccactgttgtccgtgacactcctgtcaacatggcaaccctggccgagcagggctccagagcccaggcag

SEQ ID NO: 33452 - DNA, 3941 bp, Macaca Mulatta
  misc_feature (1)...(3941): n = A,T,C or G
cagcctccatctactacaacatttgtgctgaatcaaataaatcatcttccacccttgggatctaccattgtaatgactaaaacaccacctgtaacaaccaacaggcaaaccatcactttaactaagtttatccagactactgcaagcacacgcccgtcagtctcagcaccaacagtacgaaatgccatgacttgtgcaccttcaaaagaccaagttcagctgaaggatctactgaaaaataatagtcttaatgaactcatgaaactaaagccgcctgctaatattgctcagccagtagcaacagcagctannnnnnnnnnnnnnnnnnnnnnnnnnnnnnnnnnnnnnnnnnnnnnnnnnnnnnnnnnnnnnnnnnnnnnnnnnnnnnnnnnnnnnnnnnnnnnnnnnnnnnnnnnnnnnnnnnnnnnnnnnnnnnnnnnnnnnnnnnnnnnnnnnnnnnnnnnnnnnnnnnnnnnnnnnnnnnnnnnnnnnnnnnnnnnnnnnnnnnnnnnnnnnnnnnnnnnnnnnnnnnnnnnnnnnnnnnnnnnnnnnnnnnnnnnnnnnnnnnnnnnnnnnnnnnnnnnnnnnnnnnnnnnnnnnnnnnnnnnnnnnnnnnnnnnnnnnnnnnnnnnnnnnnnnnnnnnnnnnnnnnnnnnnnnnnnnnnnnnnnnnnnnnnnnnnnnnnnnnnnnnnnnnnnnnnnnnnnnnnnnnnnnnnnnnnnnnnnnnnnnnnnnnnnnnnnnnnnnnnnnnnnnnnnnnnnnnnnnnnnnnnnnnnnnnnnnnnnnnnnnnnnnnnnnnnnnnnnnnnnnnnnnnnnnnnnnnnnnnnnnnnnnnnnnnnnnnnnnnnnnnnnnnnnnnnnnnnnnnnnnnnnnnnnnnnnnnnnnnnnnnagtttaaatatggaaaaatttcttccaaacataatgggagtgtgaaaaagggtgttatttttgctacttactcttcacttattggtgaaagccagtctggcggcaagtacaaaactaggttaaaacaacttctgcattggtgtggtgatgacttcgatggagtnnnnnnnnnnnnnnnnnnnnnnnnnnnnnnnnnnnnnnnnnnnnnnnnnnnnnnnnnnnnnnnnnnnnnnnnnnnnnnnnnnnnnnnnnnnnnnnnnnnnnnnnnnnnnnnnnnnnnnnnnnnnnnnnnnnnnnnnnnnnnnnnnnnnnnnnnnnnnnnnnnnnnnnnnnnnnnnnnnnnnnnnnnnnnnnnnnnnnnnnnnnnnnnnnnnnnnnnnnnnnnnnnnnnnnnnnnnnnnnnnnnnnnnnnnnnnnnnnnnnnnnnnnnnnnnnnnnnnnnnnnnnnnnnnnnnnnnnnnnnnnnnnnnnnnnnnnnnnnnnnnnnnnnnnnnnnnnnnnnnnnnnnnnnnnnnnnnnnnnnnnnnnnnnnnnnnnnnnnnnnnnnnnnnnnnnnnnnnnnnnnnnnnnnnnnnnnnnnnnnnnnnnnnnnnnnnnnnnnnnnnnnnnnnnnnnnnnnnnnnnnnnnnnnnnnnnnnnnnnnnnnnnnnnnnnnnnnnnnnnnnnnnnnnnnnnnnnnnnnnnnnnnnnnnnnnnnnnnnnnnnnnnnnnnnnnnnnnnnnnnnnnnnnnnnnnnnnnnnnnnnnnnnnnnnnnnnnnnnnnnnnnnnnnnnnnnnnnnnnnnnnnnnnnnnnnnnnnnnnnnnnnnnnnnnnnnnnnnnnnnnnnnnnnnnnnnnnnnnnnnnnnnnnnnnnnnnnnnnnnnnnnnnnnnnnnnnnnnnnnnnnnnnnnnnnnnnnnnnnnnnnnnnnnnnnnnnnnnnnnnnnnnnnnnnnnnnnnnnnnnnnnnnnnnnnnnnnnnnnnnnnnnnnnnnnnnnnnnnnnnnnnnnnnnnnnnnnnnnnnnnnnnnnnnnnnnnnnnnnnnnnnnnnnnnnnnnnnnnnnnnnnnnnnnnnnnnnnnnnnnnnnnnnnnnnnnnnnnnnnnnnnnnnnnnnnnnnnnnnnnnnnnnnnnnnnnnnnnnnnnnnnnnnnnnnnnnnnnnnnnnnnnnnnnnnnnnnnnnnnnnnnnnnnnnnnnnnnnnnnnnnnnnnnnnnnnnnnnnnnnnnnnnnnnnnnnnnnnnnnnnnnnnnnnnnnnnnnnnnnnnnnnnnnnnnnnnnnnnnnnnnnnnnnnnnnnnnnnnnnnnnnnnnnnnnnnnnnnnnnnnnnnnnnnnnnnnnnnnnnnnnnnnnnnnnnnnnnnnnnnnnnnnnnnnnnnnnnnnnnnnnnnnnnnnnnnnnnnnnnnnnnnnnnnnnnnnnnnnnnnnnnnnnnnnnnnnnnnnnnnnnnnnnnnnnnnnnnnnnnnnnnnnnnnnnnnnnnnnnnnnnnnnnnnnnnnnnnnnnnnnnnnnnnnnnnnnnnnnnnnnnnnnnnnnnnnnnnnnnnnnnnnnnnnnnnnnnnnnnnnnnnnnnnnnnnnnnnnnnnnnnnnnnnnnnnnnnnnnnnnnnnnnnnnnnnnnnnnnnnnnnnnnnnnnnnnnnnnnnnnnnnnnnnnnnnnnnnnnnnnnnnnnnnnnnnnnnnnnnnnnnnnnnnnnnnnnnnnnnnnnnnnnnnnnnnnnnnnnnnnnnnnnnnnnnnnnnnnnnnnnnnnnnnnnnnnnnnnnnnnnnnnnnnnnnnnnnnnnnnnnnnnnnnnnnnnnnnnnnnnnnnnnnnnnnnnnnnnnnnnnnnnnnnnnnnnnnnnnnnnnnnnnnnnnnnnnnnnnnnnnnnnnnnnnnnnnnnnnnnnnnnnnnnnnnnnnnnnnnnnnnnnnnnnnnnnnnnnnnnnnnnnnnnnnnnnnnnnnnnnnnnnnnnnnnnnnnnnnnnnnnnnnnnnnnnnnnnnnnnnnnnnnnnnnnnnnnnnnnnnnnnnnnnnnnnnnnnnnnnnnnnnnnnnnnnnnnnnnnnnnnnnnnnnnnnnnnnnnnnnnnnnnnnnnnnnnnnnnnnnnnnnnnnnnnnnnnnnnnnnnnnnnnnnnnnnnnnnnnnnnnnnnnnnnnnnnnnnnnnnnnnnnnnnnnnnnnnnnnnnnnnnnnnnnnnnnnnngattataacaacatagggaaattcttaaatagaattttaggcatggaggtacatcagcagaacgcattatttcagtattttgcggacacacttactgcagttgttcaaaatgccaaaaaaaatggaagatacgatatgggaatcttagnagatcttggttctggagatgaaaaggtgaggaagagtgatgttaaaaagtttctgactccagggtattcaacctctggccacgtagaattatacacanattagtgtagagaggggaatgtcatgggaggaagctaccaagatttgggctgagctgacaggaccagacgatggcttttacttgtcattgcaannnnnnnnnnnnnnnnnnnnnnnnnnnnnnnnnnnnnnnnnnnnnnnnnnnnnnnnnnnnnnnnnnnnnnnnnnnnnnnnnnnnnnnnnnnnnnnnnnnnnnnnnnnnnnnnnnnnnnnnnnnnnnnnnnnnnnnnnnnnnnnnnnnnnnnnnnnnnnnnnnnnnnnnnnnnnnnnnnnnnnnnnnnnnnnnnnnnnnnnnnnnnnnnnnnnnnnnnnnnnnnnnnnnnnnnnnnnnnnnnnnnnnnnnnnnnnnnnnnnnnnnnnnnnnnnnnnnnnnnnnnnnnnnnnnnnnnnnnnnnnnnnnnnnnnnnnnnnnnnnnnnnnnnnnnnnnnnnnnnnnnnnnnnnnnnnnnnnnnnnnnnnnnnnnnnnnnnnnnnnnnnnnnnnnnnnnnnnnnnnnnnnnnaggtttgatcattccggcaaattgtgtgtctcctcttgtaaatctcctatcaacttcagaccagtctcaacagcttgcggtccaacagaaacagctatggcaacagcatcaccctcagagcatcaccaacttgagcaacgca

SEQ ID NO: 33453 - DNA, 401 bp, Macaca Mulatta
  misc_feature (1)...(401): n = A,T,C or G
tcagaactaaccactgttcaacaacaactaattagggagacgctcatatcatggctgcaagctcagnnnnnnnnnnnnnnnnnnnnnnnnnnnnnnnnnnnnnnnnnnnnnnnnnnnnnnnnnnnnnnnnnnnnnnnnnnnnnnnnnnnnnnnnnnnnnnnnnnnnnnnnnnnnnnnnnnnnnnnnnnnnnnnnnnnnnnnnnnnnnnnnnnnnnnnnnnnnnnnnnnnnnnnnnnnnnnnnnnnnnnnnnnnnnnnnnnnnnnnnnnnnnnnnnnnnnnnnnnnnnnnnngctcgtaggaatactctcataaaagataccatgagggaacagtgcattccaaatctggtggaatcatggtaccaaatattacaaaattatcagtatactaattctgaagt

SEQ ID NO: 33454 - DNA, 268 bp, Macaca Mulatta
cagcatgaagaactgaccaaattggttttgatgcttgggggatcatagagtatttatgtctgcttttctaaatctgtgttataacagctctaaaatttgttgtttggtaagaagttgggcatcgcttgggtctttaaacacatcagtgcttccacattcatctatgtatttattattcagaagtgttattttaatatttattgctaccttctgtgaatgctcagctcctgttgggttcattaaggaaaaatgtgtctgaaagcacaga

SEQ ID NO: 33455 - DNA, 764 bp, Macaca Mulatta
  misc_feature (1)...(764): n = A,T,C or G
gggatggagtccagcagatttctttggaggatgctctttccagccaagaggtggaggttgcctatatctgcagtgagagctccagccatgaggactacatcaggcagttccttaatgctggcaagcacgtccttgtggaataccccatgacactgtcgttggcggccgctcaggaactgtgggagctggctgagcagaaaggaaaagtcttgcacgaggagcatgttgaactcttgatggaggaatttgcattcctgaaaaaagaagtggtggggaaagacctgctgaaagggtcactcctcttcacagctggcccgttggaagaagagcggtttggcttccctgcattcagtggcatctctcgcctgacctggctggtctccctctttggggagctttctcttgtgtctgccactttggaagagcgaaaggaagatcagtatatgaaaatgacagtgtgtctggagacagagaagaaaagtccactgtcatggattgaagaaaaagggcctggtttaaaacgaaacagatatttaagcttccatttcaagtctgggtccctggagaatgtgccaaatgtaggagtgaataagaatatatttctgaaagatcaaaatatatttgtccagaaactcttgggccagttctctgagaaagaactggctgctgaaaagaaacgcatcctgcactgcctgggggcttggcagaagaaatccnagaaatattggctgtttccaagggaagtatagaaggaaggaaggtga

SEQ ID NO: 33456 - DNA, 211 bp, Macaca Mulatta
tatggggctctgtcctgcacccctcagggatggcgacagcaggcctgacacaggctgatgccagctgggagtcttgctgaccctgccccgggtccgaggatgtcaataaagtgctgtccagtgacctcttcagcctgccaggggcctgatgggaggtatggccacacccacaagggtgattgccagagccatgtggacagctgttccaggg

SEQ ID NO: 33457 - DNA, 5781 bp, Macaca Mulatta
  misc_feature (1)...(5781): n = A,T,C or G
gacacccccagcccagaagggggctgtaccactcccaaccatcagtgggcacagggagctggtcctgtcctcaccagaggacctcacacaggactttgaggagatgaagcgtgaggagagggctttgctggctgaacaaagggacatgggactaggagataagccattccctctagacactgcagaggagggacccccaagtacagctatccaggcaacaccaccctgtgttccagggctgggacaagaagaacatgtgatgaaggagaaagaggttgtcccagaggtccctgaggaacaaggcagcaaggacagaggcctagactctggggctgaaacagaggaagagaaagatacctgggaggaaaagaaacagagggaatcagagaggctcccagacagaacagaagccagagaggaaagtgaacctgaagtaaaggaggatgtgatagaaaaggctgagttagaagaaatggaggaggtacacccttcagatgaggaggaagaggatgcgacaaaagctgagggtttttaccaaaaacatatgcaggaagccttgaaggtaactccaaggagcagggaggcttttgggggtcgggaattgggactccagggcaaggcccctgagaaggagacctcgtcattcctaagcagcctgaccacacctgcaggagccactgagcannnnnnnnnnnnnnnnnnnnnnnnnnnnnnnnnnnnnnnnnnnnnnnnnnnnnnnnnnnnnnnnnnnnnnnnnnnnnnnnnnnnnnnnnnnnnnnnnnnnnnnnnnnnnnnnnnnnnnnnnnnnnnnnnnnnnnnnnnnnnnnnnnnnnnnnnnnnnnnnnnnnnnnnnnnnnnnnnnnnnnnnnnnnnnnnnnnnnnnnnnnnnnnnnnnnnnnnnnnnnnnnnnnnnnnnnnnnnnnnnnnnnnnnnnnnnnnnnnnnnnnnnnnnnnnnnnnnnnnnnnnnnnnnnnnnnnnnnnnnnnnnnnnnnnnnnnnnnnnnnnnnnnnnnnnnnnnnnnnnnnnnnnnnnnnnnnnnnnnnnnnnnnnnnnnnnnnnnnnnnnnnnnnnnnnnnnnnnnnnnnnnnnnnnnnnnnnnnnnnnnnnnnnnnnnnnnnnnnnnnnnnnnnnnnnnnnnnnnnnnnnnnnnnnnnnnnnnnnnnnnnnnnnnnnnnnnnnnnnnnnnnnnnnnnnnnnnnnnnnnnnnnnnnnnnnnnnnnnnnnnnnnnnnnnnnnnnnnnnnnnnnnnnnnnnnnnnnnnnnnnnnnnnnnnnnnnnnnnnnnnnnnnnnnnnnnnnnnnnnnnnnnnnnnnnnnnnnnnnnnnnnnnnnnnnnnnnnnnnnnnnnnnnnnnnnnnnnnnnnnnnnnnnnnnnnnnnnnnnnnnnnnnnnnnnnnnnnnnnnnnnnnnnnnnnnnnnnnnnnnnnnnnnnnnnnnnnnnnnnnnnnnnnnnnnnnnnnnnnnnnnnnnnnnnnnnnnnnnnnnnnnnnnnnnnnnnnnnnnnnnnnnnnnnnnnnnnnnnnnnnnnnnnnnnnnnnnnnnnnnnnnnnnnnnnnnnnnnnnnnnnnnnnnnnnnnnnnnnnnnnnnnnnnnnnnnnnnnnnnnnnnnnnnnnnnnnnnnnnnnnnnnnnnnnnnnnnnnnnnnnnnnnnnnnnnnnnnnnnnnnnnnnnnnnnnnnnnnnnnnnnnnnnnnnnnnnnnnnnnnnnnnnnnnnnnnnnnnnnnnnnnnnnnnnnnnnnnnnnnnnnnnnnnnnnnnnnnnnnnnnnnnnnnnnnnnnnnnnnnnnnnnnnnnnnnnnnnnnnnnnnnnnnnnnnnnnnnnnnnnnnnnnnnnnnnnnnnnnnnnnnnnnnnnnnnnnnnnnnnnccccaagaacctgtcaaacctcacaaagatgaggtgctcagatatcctgacagaagcctctctcctgacgatgcagaatccctctctgtcctcagcgtggcctccccagacactgccaaccaagagcccacccccaagtctccctgtggcctgacagagcagtacctacacacagaccgttggccagaggtatctccagaagacacccagtcactttctctgtcagaagagagtcccagcaaggagacctccctggatgtctcttctaagcaactctctccagaaagccttggcaccctccagtttggggaactaaaccttgggaaggaagaaacggggcatctgatgcaggccgaggatacctctcaccacgcagctcccatgtctgttccagagccccatgcagccacagtgtcacctcccacagacgggacgactcgatactctgcacagacaaacatcacagatgagagccttgacaggaaatcacctgccagctcattctctcactctacaccttcaggaaatgggaagtacttacctggggcgatcacaagccctggtgaacacattctgacacctgagagctccttctccaagagtcctgagtctttgccaagccctgccttggaggacattgccatannnnnnnnnnnnnnnnnnnnnnnnnnnnnnnnnnnnnnnnnnnnnnnnnnnnnnnnnnnnnnnnnnnnnnnnnnnnnnnnnnnnnnnnnnnnnnnnnnnnnnnnnnnnnnnnnnnnnnnnnnnnnnnnnnnnnnnnnnnnnnnnnnnnnnnnnnnnnnnnnnnnnnnnnnnnnnnnnnnnnnnnnnnnnnnnnnnnnnnnnnnnnnnnnnnnnnnnnnnnnnnnnnnnnnnnnnnnnnnnnnnnnnnnnnnnnnnnnnnnnnnnnnnnnnnnnnnnnnnnnnnnnnnnnnnnnaaagacaaggccctggaacagaaggataagatcccagaagagaaagacaaagccttagaacaaaaggacacagccctggaacagaaggacaaggctctggaaccaaaagataaagacttagaacaaaaggaccgggtcctggaaaagaaggataagatcccagaagagatagacaaagccttagatcaaaaagtcagacgtgttgaacataaggctccagaggacacggtcactgaaatgaagggcagagacctagaacagacagacaaagcccctgaacagaaacaccaggcccaggaacaaaaggataaaatctcagaaaagaaggatcaggccttagaacaaaagtactgggctttgggacagaaggatgaagccctggaacaaaacattaaggctctggaagagaaggaccaaactcaggagcaggagagcctactgcaggaggataaaaccaggaaaccaaagatgctagaggaaaaatccccagaaaaggtcaaggccatggaagagaagttagaagctcttctggagaagaccaaagctctgggcctggaagagagcctagtgcaggagggcaaggccagaaagcaggaagagaagtactggagggggcaggatgtggtccaggagtggcgagaaacatctcctaccagagaagagccggttggagaacagaaagagcttgccccggcatgggaggacacatctcctgagcaggacaataggtattggagaggcagagaggatgtggccttggaacaggacacatactggagggagctaagctgtgagcggaaagtctggttccctcacgagctggatggtcagggggcccgcccacgctacactgaggaacgggaaagtactttcctagatgagggcccagacgatgagcaagaagtgcccccgcgggaacacacaacccggagcccctgggcctcagacttcaaggatttccaggaatcctccccacagaaggggctggaggtggagcgctggcttgctgaatccccagttgggttgccaccagaggaagaggacaaactgacccgctctccctttgagatcatctcccctccggcttccccacctgagatggttggacaaagggttccttcagccccaggacaagagagtcctatcccagaccctaagctcatgccacccatgaaaaatgaacccactaccccctcatggctggctgacatcccaccctgggtgcgcaaggacagacccctccccccnnnnnnnnnnnnnnnnnnnnnnnnnnnnnnnnnnnnnnnnnnnnnnnnnnnnnnnnnnnnnnnnnnnnnnnnnnnnnnnnnnnnnnnnnnnnnnnnnnnnnnnnnnnnnnnnnnnnnnnnnnnnnnnnnnnnnnnnnnnnnnnnnnnnnnnnnnnnnnnnnnnnnnnnnnnnnnnnnnnnnnnnnnnnnnnnnnnnnnnnnnnnnnnnnnnnnnnnnnnnnnnnnnnnnnnnnnnnnnnnnnnnnnnnnnnnnnnnnnnnnnnnnnnnnnnnnnnnnnnnnnnnnnnnnnnnnnnnnnnnnnnnnnnnnnnnnnnnnnnnnnnnnnnnnnnnnnnnnnnnnnnnnnnnnnnnnnnnnnnnnnnnnnnnnnnnnnnnnnnnnnnnnnnnnnnnnnnnnnnnnnnnnnnnnnnnnnnnnnnnnnnnnnnnnnnnnnnnnnnnnnnnnnnnnnnnnnnnnnnnnnnnnnnnnnnnnnnnnnnnnnnnnnnnnnnnnnnnnnnnnnnnnnnnnnnnnnnnnnnnnnnnnnnnnnnnnnnnnnnnnnnnnnnnnnnnnnnnnnnnnnnnnnnnnnnnnnnnnnnnnnnnnnnnnnnnnnnnnnnnnnnnnnnnnnnnnnnnnnnnnnnnnnnnnnnnnnnnnnnnnnnnnnnnnnnnnnnnnnnnnnnnnnnnnnnnnnnnnnnnnnnnnnnnnnnnnnnnnnnnnnnnnnnnnnnnnnnnnnnnnnnnnnnnnnnnnnnnnnnnnnnnnnnnnnnnnnnnnnnnnnnnnnnnnnnnnnnnnnnnnnnnnnnnnnnnnnnnnnnnnnnnnnnnnnnnnnnnnnnnnnnnnnnnnnnnnnnnnnnnnnnnnnnnnnnnnnnnnnnnnnnnnnnnnnnnnnnnnnnnnnnnnnnnnnnnnnnnnnnnnnnnnnnnnnnnnnnnnnnnnnnnnnnnnnnnnnnnnnnnnnnnnnnnnnnnnnnnnnnnnnnnnnnnnnnnnnnnnnnnnnnnnnnnnnnnnnnnnnnnnnnnnnnnnnnnnnnnnnnnnnnnnnnnnnnnnnnnnnnnnnnnnnnnnnnnnnnnnnnnnnnnnnnnnnnnnnnnnnnnnnnnnnnnnnnnnnnnnnnnnnnnnnnnnnnnnnnnnnnnnnnnnnnnnnnnnnnnnnnnnnnnnnnnnnnnnnnnnnnnnnnnnnnnnnnnnnnnnnnnnnnnnnnnnnnnnnnnnnnnnnnnnnnnnnnnnnnnnnnnnnnnnnnnnnnnnnnnnnnnnnnnnnnnnnnnnnnnnnnnnnnnnnnnnnnnnnnnnnnnnnnnnnnnnnnnnnnnnnnnnnnnnnnnnnnnnnnnnnnnnnnnnnnnnnnnnnnnnnnnnnnnnnnnnnnnnnnnnnnnnnnnnnnnnnnnnnnnnnnngacttggccctagctccggctccaagcctgcctggagacatgggtgatggcaccctgccgtgccacctggagtgctcaggggcagccatggagaacccgaacaccatccagggtccctctgaggacagaaaaaaaaatggcccaactgaaagcagccctaaccccccaggccctgccccagccaaggctgaaaacgaagaggctgcggcttgtcctgcctgggaacgtggagcctggcctgaaggagctgagaggagctcccggcctgacacactgctctcccctgagcagccactgtgtcctacagggggctccgggggtccatccagcagtgcctctcccgaggtcgaa

SEQ ID NO: 33458 - DNA, 668 bp, Macaca Mulatta
cttccctgtccctgtgttaatagtccagaagcctccctatgcaggatagggtgggtaaggtaattatcagcttcggcttagcccaaagctgccctggtactgcagacgggagtactggatttgtcagaacatcagagaaatgatgacccctgccttcctttgctgtcaggctattttctgcctcatggcccttgtttctgtcttttgtaggttcttgtacaagccatcaaggaggcaaaggagcagcacccagacatgtcagtgaccaaggtggtcgtccaccaggagaccgaaattgctgatgaatgagctcaggtactgggcgttcctgctgggactgagggggcccactgtcccagcctgagagggctctggatgggaccctcggacacactgggagcccatccccccaaagaggtgtccaccctgggacttgataaaggcaaaggagaggctgatgaggaagatataggaaattattaagtatttagctccaactaaagcagcctgtaacagtgccagcagtattgggtaagaggagggacccaaacttgggtataagcccccagtcacctcctgtcctgagtcttcatgcatcctgctggaaatccacttcaccttcccctctcttctctctactgctctgctcgctgctgtctcaagtctct

SEQ ID NO: 33459 - DNA, 478 bp, Macaca Mulatta
  misc_feature (1)...(478): n = A,T,C or G
atggcgtggcagggactagcggccgagttcctgcaggtgccggcggtgacgcgggcttacaccgcagcctgtgtcctcaccactgcggcggtgnnngttccgctattgccgcatgctggaagagggctccttccgcggccgcacggccgacttcgtcttcatgtttctcttcgggggcgtccttatgaccnnnnnnnnnnnnnnnnnnnnnnnnnnnnnnnnnnnnnnnnnnnnnnnnnnnnnnnnnnnnnnnnnnnnnnnnnnnnnnnnnnnnnnnnnnnnnnnnnnnnnnnnnnnnnnnnnnnnnnnnnnnnnnnnnnnnnnnnnnnnnnnnnnnnnnnnnnnnnnnnnnnnnnnnnnnnnnnnnnnnnnnnnnnnnnnnnnngggattgccgtgggccacatctactacttcctggaggatgtcttccccaaccagcctggaggcaagaggctcctgctgacccccggcttcctg

SEQ ID NO: 33460 - DNA, 1938 bp, Macaca Mulatta
  misc_feature (1)...(1938): n = A,T,C or G
gacaaagtctactcaaactcaggattcgtttcagcgagcagatgaggaaaagactgaacagggttgaacactggaacttcataccagaaagaccttgcagatatgaagagaaattaaagagacagcacgacaaaaatgaaaatttacaaatattttcagttgcccatacaaaaatccttactgtagatagaagccataaaaatgttgaatttggccaaaagttctacctgaaatcagtcttcattaagcaccagagatttgctagagaaaaaactccnnnnnnnnnnnnnnnnnnnnnnnnnnnnnnnnnnnnnnnnnnnnnnnnnnnnnnnnnnnnnnnnnnnnnnnnnnnnnnnnnnnnnnnnnnnnnnnnnnnnnnnnnnnnnnnnnnnnnnnnnnnnnnnnnnnnnnnnnnnnnnnnnnnnnnnnnnnnnnnnnnnnnnnnnnnnnnnnnnnnnnnnnnnnnnnnnnnnnnnnnnnnnnnnnnnnnnnnnnnnnnnnnnnnnnnnnnnnnnnnnnnnnnnnnnnnnnnnnnnnnnnnnnnnnnnnnnnnnnnnnnnnnnnnnnnnnnnnnnnnnnnnnnnnnnnnnnnnnnnnnnnnnnnnnnnnnnnnnnnnnnnnnnnnnnnnnnnnnnnnnnnnnnnnnnnnnnnnnnnnnnnnnnnnnnnnnnnnnnnnnnnnnnnnnnnnnnnnnnnnnnnnnnnnnnnnnnnnnnnnnnnnnnnnnnnnnnnnnnnnnnnnnnnnnnnnnnnnnnnnnnnnnnnnnnnnnnnnnnnnnnnnnnnnnnnnnnnnnnnnnnnnnnnnnnnnnnnnnnnnnnnnnnnnnnnnnnnnnnnnnnnnnnnnnnnnnnnnnnnnnnnnnnnnnnnnnnnnnnnnnnnnnnnnnnnnnnnnnnnnnnnnnnnnnnnnnnnnnnnnnnnnnnnnnnnnnnnnnnnnnnnnnnnnnnnnnnnnnnnnnnnnnnnnnnnnnnnnnnnnnnnnnnnnnnnnnnnnnnnnnnnnnnnnnnnnnnnnnnnnnnnnnnnnnnnnnnnnnnnnnnnnnnnnnnnnnnnnnnnnnnnnnnnnnnnnnnnnnnnnnnnnnnnnnnnnnnnnnnnnnnnnnnnnnnnnnnnnnnnnnnnnnnnnnnnnnnnnnnnnnnnnnnnnnnnnnnnnnnnnnnnnnnnnnnnnnnnnnnnnnnnnnnnnnnnnnnnnnnnnnnnnnnnnnnnnnnnnnnnnnnnnnnnnnnnnnnnnnnnnnnnnnnnnnnnnnnnnnnnnnnnnnnnnnnnnnnnnnnnnnnnnnnnnnnnnnnnnnnnnnnnnnnnnnnnnnnnnnnnnnnnnnnnnnnnnnnnnnnnnnnnnnnnnnnnnnnnnnnnnnnnnnnnnnnnnnnnnnnnnnnnnnnnnnnnnnnnnnnnnnnnnnnnnnnnnnnnnnnnnnnnnnnnnnnnnnnnnnnnnnnnnnnnagagaaaccttatgaatgtaacgcatgtgggaaactctttagccagaggtcatccctcatgaatcattataaaattcatactgaagaggactccttaaaagccgatatgcatgtgtgaaaaccttaaaccaaagctcatcagagaatacatgcttgagagtgatttattaaatataatgactatgagaaaacgtgtacttctcaccagatactaagttttaagaataaactttagctatataataactatcgggaaagcttttatgcttgtcagtttttaaaatatcccaagacagttcactgttgcagacattgaaattggccatttgtaagataaaaggtatgtttagaaatctctctatataatatatgctatctatgacatgcaaaaatgagaacagtctgggtgtggaggtgctgaatttttcattagaaaaacaattgtgtaagctactattatataaatataagtatatttattccagcagacattt

SEQ ID NO: 33461 - DNA, 793 bp, Macaca Mulatta
ttctcttttgtccgtactcacgaaagtctcatccttttttcagggggggcctttagcactcactgtctgttgtacattcttttgtggtctccttctccctcagatttaacagtttctggtacaggtttctgcctctttctttgtttgatccactgaaacaggcttttctcccaggctttagctgcacaaatttgggtggaaatttttgtctgaggtctaaaagtaaagcatccacacgttgtctctgaaaaatagagcttggttcttctttccttttggctttaggtctgactttatcttgctcttcgtgatctttgaagtgccaccaataacctttggaaggatgatatcgacagtatgacatagcttcatcaaaagctgactgaataccatgcactgcagtaagcactctagagtttataactgatcccaagtctggtgcctgatagatcactccagcaatgatatagtaatcagctagtgggataacttgggcaggggactgccgctgttgcttccgaatgatgaaaagaatgggctcttgagcatgcaaaaggatgtattcgattccaaccatctgattcaagtgttctaatgttagcctctgcattttgaccacttcattattacatgttctgtcataaaaaggattacttctttctgaaaagtaatccaggacactaccactgttcaaaatagggatccaagagctgtcaacccaagaaattcccagcagattgtctcggatatccacccccgccataattcagaaagcgttcacaggttctccccc

SEQ ID NO: 33462 - DNA, 350 bp, Macaca Mulatta
ggtggtgggcggggccctcgccccctcggactctgaggacccctttctggatgagtgcccctccgacgtcctgcctgagcaagagggcgtttgcctgcccctgagcaggcacacagtggacatgctgcaatgtctgcgcttccctggcctggccccgccacacacacgggccccctccccactgggccccacccgcgaccccgtggccacttttctggaaacttgtcgggagcctggcagccagccagcaggacccgcctccctgcgggccgagttcctgcccccatctgtggcttccatcaaagtgtcagcggagctgctcagggctgccttgaaggacggccactcag

SEQ ID NO: 33463 - DNA, 2572 bp, Macaca Mulatta
  misc_feature (1)...(2572): n = A,T,C or G
aggaacatccccaggctccaagatggccctgcagagctccttcacttgttggaatgggacagtcctccagcttgggcaggcctgtgacttccaccaggactgcgcccagggagaagacgagagccagatatgccgnggaaactccctgtgggtttttactgcaacttcgaagatggcttctgtggctgggaccaaggcacactctcacctcacactcctcagtggcaggtcaggacnnnnnnnnnnnnnnnnnnnnnnnnnnnnnnnnnnnnnnnnnnnnnnnnnnnnnnnnnnnnnnnnnnnnnnnnnnnnnnnnnnnnnnnnnnnnnnnnnnnnnnnnnnnnnnnnnnnnnnnnnnnnnnnnnnnnnnnnnnnnnnnnnnnnnnnnnnnnnnnnnnnnnnnnnnnnnnnnnnnnnnnnnnnnnnnnnnnnnnnnnnnnnnnnnnnnnnnnnnnnnnnnnnnnnnnnnnnnnnnnnnnnnnnnnnnnnnnnnnnnnnnnnnnnnnnnnnnnnnnnnnnnnnnnnnnnnnnnnnnnnnnnnnnnnnnacaggttctggctgcagatggttgcatggtggggacaaggatccagagccatcgtggcttttgacaatatttccatcagcctggattgctacctcaccanttagtggagaggacaagatcctacagaatacagcacccaaatcaagaaacctgtttgagagaaacccaaacaaggagctgaaacccggggaaaattcaccacgacagacgcccatctttgaccctacagnnnnnnnnnnnnnnnnnnnnnnnnnnnnnnnnnnnnnnnnnnnnnnnnnnnnnnnnnnnnnnnnnnnnnnnnnnnnnnnnnnnnnnnnnnnnnnnnnnnnnnnnnnnnnnnnnnnnnnnnnnnnnnnnnnnnnnnnnnnnnnnnnnnnnnnnnnnnnntacagcatctcgggctacggagctgctggcgggaaaggcgggaagaacaccatgatgcggtcccacggcgtgtctgtgctgggcatcttcaacctggagaaagacgacacgctgtacatcctggttgggcagcagggagaggacgcctgccccagtnnnnnnnnnnnnnnnnnnnnnnnnnnnnnnnnnnnnnnnnnnnnnnnnnnnnnnnnnnnnnnnnnnnnnnnnnnnnnnnnnnnnnnnnnnnnnnnnnnnnnnnnnnnnnnnnnnnnnnnnnnnnnnnnnnnnnnnnnnnnnnnnnnnnnnnnnnnnnnnnnnnnnnnnnnnnnnnnnnnnnnnnnnnnnnnnnnnnnnnnnnnnnnnnnnnnnnnnnnnnnnnnnnnnnnnnnnnnnnnnnnnnnnnnnnnnnnnnnnnnnnnnnnnnnnnnnnnnnnnnnnnnnnnnnnnnnnnnnnnnnnnnnnnnnnnnnnnnnnnnnnnnnnnnnnnnnnnnnnnnnnnnnnnnnnnnnnnnnnnnnnnnnnnnnnnnnnnnnnnnnnnnnnnnnnnnnnnnnnnnnnnnnnnnnnnnnnnnnnnnnnnnnnnnnnnnnnnnnnnnnnnnnnnnnnnnnnnnnnnnnnnnnnnnnnnnnnnnnnnnnnnnnnnnnnnnnnnnnnnnnnnnnnnnnnnnnnnnnnnnnnnnnnnnnnnnnnnnnnnnnnnnnnnnnnnnnnnnnnnnnnnnnnnnnnnnnnnnnnnnnnnnnnnnnnnnnnnnnnnnnnnnnnnnnnnnnnnnnnnnnnnnnnnnnnnnnnnnnnnnnnnnnnnnnnnnnnnnnnnnnnnnnnnnnnnnnnnnnnnnnnnnnnnnnnnnnnnnnnnnnnnnnnnnnnngtgtcgcccaccccggagccgcacctgccactctcactgatcctctccgtggtgacctctgccctcgtggctgccctggtcctggctttctccggcatcatgattgnnnnnnnnnnnnnnnnnnnnnnnnnnnnnnnnnnnnnnnnnnnnnnnnnnnnnnnnnnnnnnnnnnnnnnnnnnnnnnnnnnnnnnnnnnnnnnnnnnnnnnnnnnnnnnnnnnnnnnnnnnnnnnnnnnnnnnnnnnnnnnnnnnnnnnnnnnnnnnnnnnnnnnnnnnnnnnnnnnnnnnnnnnnnnnnnnnnnnnnnnnnnnnnnnnnnnnnnnnnnnnnnnnnnnnnnnnnnnnnnnnnnnnnnnnnnnnnnnnnnnnnnnnnnnnnnnnnnnnnnnnnnnnnnnnnnnnnnnnnnnnnnnnnnnnnnnnnnnnnnnnnnnnnnnnnnnnnnnnnnnnnnnnnnnnnnnnnnnnnnnnnnnnnnnnnnnnnnnnnnnnnnnnnnnnnnnnnnnnnnnnnnnnnnnnnnnnnnnnnnnnnnnnnnnnnnnnnnnnnnnnnnnnnnnnnnnnnnnnnnnnnnnnnnnnnnnnnnnnnnnnnnnnnnnnnnnnnnnnnnnnnnnnnnnnnnnnnnnnnnnnnnnnnnnnnnnnnnnnnnnnnnnnnnnnnnnnnnnnnnnnnnnnnnnngagacattgctgccagaaactgcctcttgacctgtccaggccctggaagagtggccaagattggagacttcgggatggcccgagacatctacagg

SEQ ID NO: 33464 - DNA, 512 bp, Macaca Mulatta
  misc_feature (1)...(512): n = A,T,C or G
ctccaagacttccttgctgtgaggctcgtgtggaccccagagcatgcacaggctnnnnnnnnnnnnnnnnnnnnnnnnnnnnnnnnnnnnnnnnnnnnnnnnnnnnnnnnnnnnnnnnnnnnnnnnnnnnnnnnnnnnnnnnnnnnnnnnnnnnnnnnnnnnnnnnnnnnnnnnnnnnnnnnnnnnnnnnnnnnnnnnnnnnnnnnnnnnnnnnnnnnnnnnnnnnnnnnnnnnnnnnnnnnnnnnnnnnnnnnnnnnnnnnnnnnnnnnnnnnnnnnnnnnnnnnnnnnnnnnnnnnnnnnnnnnnnnnnnnnnnnnnnnnnnnnnnnnnnnnnnnnnnnnnnnnnnnnnnnnnnnnnnnnnnnnnnnnnnnnnnnnnnnnnnnnnnnnnnnnnnnnnnnnnnnnnnnnnnnnnnnngctgtccgagatttggtggagaggcatcaggctagcgtgggccgctcccagtcgttttcccaccatgcagccttccaggagccacgtcatgagg

SEQ ID NO: 33465 - DNA, 246 bp, Macaca Mulatta
gtagccagggggaattgtgtggccagctgtctctctgggatgggtcaggaggcctggaggcttcccggggaaagaggtgtggagaaggagagaacatggcccaggccctttccttccccctgtgctgacagcattgctgtaggggtggcctgctgccctcccctggccctcatgttcccccggggctggggtccgcctgcctgtgctgtgcttgcgacgtgcatcaataaaccaccatggcctgag

SEQ ID NO: 33466 - DNA, 1385 bp, Macaca Mulatta
  misc_feature (1)...(1385): n = A,T,C or G
cgcgcagcgctgcgggggaggcgcccgcgccgacgcggggcccatggccaggaccaccagccannnnnnnnnnnnnnnnnnnnnnnnnnnnnnnnnnnnnnnnnnnnnnnnnnnnnnnnnnnnnnnnnnnnnnnnnnnnnnnnnnnnnnnnnnnnnnnnnnnnnnnnnnnnnnnnnnnnnnnnnnnnnnnnnnnnnnnnnnnnnnnnnnnnnnnnnnnnnnnnnnnnnnnnnnnnnnnnnnnnnnnnnnnnnnnnnnnnnnnnnnnnnnnnnnnnnnnnnnnnnnnnnnnnnnnnnnnnnnnnnnnnnnnnnnnnnnnnnnnnnnnnnnnnnnnnnnnnnnnnnnnnnnnnnnnnnnnnnnnnnnnnnnnnnnnnnnnnnnnnnnnnnnnnnnnnnnnnnnnnnnnnnnnnnnnnnnnnnnnnnnnnnnnnnnnnnnnnnnnnnnnnnnnnnnnnnnnnnnnnnnnnnnnnnnnnnnnnnnnnnnnnnnnnnnnnnnnnnnnnnnnnnnnnnnnnnnnnnnnnnnnnnnnnnnnnnnnnnnnnnnnnnnnnnnnnnnnnnnnnnnnnnnnnnnnnnnnnnnnnnnnnnnnnnnnnnnnnnnnnnnnnnnnnnnnnnnnnnnnnnnnnnnnnnnnnnnnnnnnnnnnnnnnnnnnnnnnnnnnnnnnnnnnnnnnnnnnnnnnnnnnnnnnnnnnnnnnnnnnnnnnnnnnnnnnnnnnnnnnnnnnnnnnnnnnnnnnnnnnnnnnnnnnnnnnnnnnnnnnnnnnnnnnnnnnnnnnnnnnnnnnnnnnnnnnnnnnnnnnnnnnnnnnnnnnnnnnnnnnnnnnnnnnnnnnnnnnnnnnnnnnnnnnnnnnnnnnnnnnnnnnnnnnnnnnnnnnnnnnnnnnnnnnnnnnnnnnnnnnnnnnnnnnnnnnnnnnnnnnnnnnnnnnnnnnnnnnnnnnnnnnnnnnnnnnnnnnnnnnnnnnnnnnnnnnnnnnnnnnnnnnnnnnnnnnnnnnnnnnnnnnnnnnnnnnnnnnnnnnnnnnnnnnnnnnnnnnnnnnnnnnnnnnnnnnnnnnnnnnnnnnnnnnnnnnnnnnnnnnnnnnnnnnnnnnnnnnnnnnnnnnnnnnnnnnnnnnnnnnnnnnnnnnnnnnnnnnnnnnnnnnnnnnnnnnnnnnnnnnnnnnnnnnnnnnnnnnnnnnnnnnnnnnnnnnnnnnnnnnnnnnnnnnnnnnnnnnnnnnnnnnnnnnnnnnnnnnnnnnnnnnngggcctgccccagaggtcaggcagcaacatagagcagtacatccatgatttggactcgaactcctttgaactggacttacagttttccgaagatgagaagaggttgttactggagaagcaggctggcggaaacccttg

SEQ ID NO: 33467 - DNA, 406 bp, Macaca Mulatta
actgcaggcagcctgaacccacctttgtgctcaagccccagtgggaaagtccccaactcctgctaggtacaggtggaggagtagctaccccctttctgcaggcacacactcaaaagctaaggagacttgagaatctctaggaagcttctgagttacagggctgatgcaggcctggtagccccaatgtaggttgtccttactgagacctgagttcccaacactgtgtgaggcacaggatagatgatttagtgttcaccaggccctgccctcaaggagcctgacaggggaacgaagaggctccaggaaacaggacaatgcatttacagatccaagaattcttcactctaagagtcaaaagtggaattgcagggaaaaaagacgaaggagaaggcaacaaaggattaat

SEQ ID NO: 33468 - DNA, 554 bp, Macaca Mulatta
  misc_feature (1)...(554): n = A,T,C or G
agttttaagataaaattggctgcggcattggcaagatgtcgaatcaagcatgatgccctttcaatttaccacatccttccagaaacagttaggaaacaggaactaagggcctccactttaccactttatgcttggataaatacttgtaaaatcagncagccctgaagaagtttataataatttgaagagaagaggctataataaagtcaagtctgtattgcatattgatgataaagtctttgctgnnnnnnnnnnnnnnnnnnnnnnnnnnnnnnnnnnnnnnnnnnnnnnnnnnnnnnnnnnnnnnnnnnnnnnnnnnnnnnnnnnnnnnnnnnnnnnnnaggacaaatctcgaagtcttgctgtccattctgtaaaggctttattaaatatggatgatgatatcttaatggtcaatacagggtcatggtacacagttgcccatatgtcaattttaacaaataataatacctcaaaagtatttgtgtgtggagtacaatcacaagctaaggatcctgacttgaagacccttttcacaaaaatgggatgtaaaa

SEQ ID NO: 33469 - DNA, 753 bp, Macaca Mulatta
ttctgagcacaaacgttcagtaacctaaaaatgaagaaaaattcccatcacgtgtctcagtagggcctaaaggagagaagtagtgtgggaacccctgctttggtatggagagtcacggccccttgacccagaccgagaccgtgagtagccatagctggtgcttctctcaggataaactcggatgtaggaagtttcaccctcatgagagcggaatttggtgtcatccagtttacgcagggcatattccatatcttcttttctgagatactcgaccatccccactccatccttctgcacatcagcataacagacatccccagcttctcgcatgtgatccttcaggtcctgccagctgcctgatggaggaagtcctgaaacaagaactcggaaatcagatcttctttgtaggaggcccattcctcccaccatcggggccacccaccccgacctccataagtcctggggaactccacacgaagccgacactggccataatcataaccatttcttccataaatagcatcctctgcatcttcgggggtctttcgaagcgcacgaaggcgaagggcacgaggccgtgccggttcttgagctcgatctcgcggatgcggccgtacttgtagaagaggtcctccaggtccttctcgcgcacgtcggtcggaaggttccccacgtagatgcgcccgtcgccctcgccgccgcgctcgtccgcccagcccgacatccgcaccgacgacgccgcgggcccgccgc

SEQ ID NO: 33470 - DNA, 3437 bp, Macaca Mulatta
  misc_feature (1)...(3437): n = A,T,C or G
ccaggacattcccctgacacccatcttcacggacaccgtgatattccgaattgctccgtggatcatgacccccaacatcctgcctcctgtgtcggtnnnnnnnnnnnnnnnnnnnnnnnnnnnnnnnnnnnnnnnnnnnnnnnnnnnnnnnnnnnnnnnnnnnnnnnnnnnnnnnnnnnnnnnnnnnnnnnnnnnnnnnnnnnnnnnnnnnnnnnnnaggatgagattgagtttggctacatcgaggccccccacaaaggcttccccgtggtgctggactccccccgaaatggaaaccaaaaggacttnnnnnnnnnnnnnnnnnnnnnnnnnnnnnnnnnnnnnnnnnnnnnnnnnnnnnnnnnnnnnnnnnnnnnnnnnnnnnnnnnnnnnnnnnnnnnnnnnnnnnnnnnnnnnnnnnnnnnnnnnnnnnnnnnnnnnnnnnnnnnnnnnnnnnnnnnnnnnnnnnnnnnnnnnnntctggtggtcggaggatgaccaaggtggtgcgtgacttcctgaaggcccagcaggtgcaggcgcccgtggagctctactcggactggctgactgtgggccacgtggatgagttcatgtcctttgtccccatccctggcacaaagnnnnnnnnnnnnnnnnnnnnnnnnnnnnnnnnnnnnnnnnnnnnnnnnnnnnnnnnnnnnnnnnnnnnnnnnnnnnnnnnnnnnnnnnnnnnggcttgggtgggatgagcagcaaacgaatcaccatcaacaagattctgtccaacgagagcctcgtgcaagagaacctgtacttnnnnnnnnnnnnnnnnnnnnnnnnnnnnnnnnnnnnnnnnnnnnnnnnnnnnnnnnnnnnnnnnnnnnnnnnnnnnnnnnnnnnnnnnnnnnnnnnnnnnnnnnnnnnnnnnnnnnnnnnnnnnnnnnnnnnnnnnnnnnnnnnnnnnnnnnnnnnnnnnnnnnnnnnnnnnnnnnnnnnnnnnnnnnnnnnnnnnnnnnnnnnnnnnnnnnnnnnnnnnnnnnnnnnnnnnnnnnnnnnnnnnnnnnnnnnnnnnnnnnnnnnnnnngacatttctgcctaccacaagtttctgggggaagtccactgcggcaccaacgtccgcaggaagccctttaccttcaagtggtggcacatggtgccctgacctgccaggggccctggtgtttgcctccttccctgagttctccagacccctcacatgcccagagccttctgctgacatggactggacagccccgctgggagacctttgggacatggggtgggatttggggtgtctgtgccttgccctccctgagcggggcctcagtgtcctctgaagccatccccagtgagcctcgactctgtccctgctgaaaatagctgggccagtgtctctatagccctgacataaggaacaaaacaaaacacagcaaaccatgtgcccaaaccgttccccaaagaattttgagtctctagtctgacactgaatgaggggagaagggaaggagattctgggatcgccagttcttccagcagccatgctctgaaaatcaaggtagaatccatggaaagggaccccaggaccccaggaccctagacgtatcttgaactgccatcatcatttcaaatccacctcccttagggtttccaggtggccacctccaannnnnnnnnnnnnnnnnnnnnnnnnnnnnnnnnnnnnnnnnnnnnnnnnnnnnnnnnnnnnnnnnnnnnnnnnnnnnnnnnnnnnnnnnnnnnnnnnnnnnnnnnnnnnnnnnnnnnnnnnnnnnnnnnnnnnnnnnnnnnnnnnnnnnnnnnnnnnnnnnnnnnnnnnnnnnnnnnnnnnnnnnnnnnnnnnnnnnnnnnnnnnnnnnnnnnnnnnnnnnnnnnnnnnnnnnnnnnnnnnnnnnnnnnnnnnnnnnnnnnnnnnnnnnnnnnnnnnnnnnnnnnnnnnnnnnnnnnnnnnnnnnnnnnnnnnnnnnnnnnnnntcctcctcccactgccttgactttcttcctttttattcctgatgccatctgtccaggcagctagacaagaacttgttcaccagcagccagaatcaggccttccctggggcataataagtgaccagcccctcgtcccagacaccacatccaacacataaggaccctggcctgccctccagcccaacagccagttttgggtcagctgccagcttaggggtggtttgattatcccattgaaattcaccagtgcatttgccaaagaccctctcatttggacatacccagattcattcctggctccaagtgaaaagactcaatttcaatctttaaaagttcctttagggccagaagaataaaggaattataatcccattttgaagaaccaatttataaccaatgaaaaggttataatgtaattatattcttggaggaacaagattttcatttgggattatttctttcaaccattcaacaaacatttgttgtatgcccctaagcgccaggcacggcattgggctctgcaaacacagtggttagtagcaatctggacctggtccctactggcatggaacccatcagtccccaacatgcaaagttcacatttaaaggccagcccctgccccttcagtgatgcgttctttagaaatgccagcccactatattcagaaattcatcctcagggcacaaaacttccagcaagtcactgtcatggtgaaatgggcnnnnnnnnnnnnnnnnnnnnnnnnnnnnnnnnnnnnnnnnnnnnnnnnnnnnnnnnnnnnnnnnnnnnnnnnnnnnnnnnnnnnnnnnnnnnnnnnnnnnnnnnnnnnnnnnnnnnnnnnnnnnnnnnnnnnnnnnnnnnnnnnnnnnnnnnnnnnnnnnnnnnnnnnnnnnnnnnnnnnnnnnnnnnnnnnnnnnnnnnnnnnnnnnnnnnnnnnnnnnnnnnnnnnnnnnnnnnnnnnnnnnnnnnnnnnnnnnnnnnnnnnnnnnnnnnnnnnnnnnnnnnnnnnnnnnnnnnnnnnnnnnnnnnnnnnnnnnnnnnngacagtgtgtctttatagatttttctaaggctttccccaatgatgtcggtaatttctgatgtttctgaagctcccaggactcacacaccgtttcccatctcacttgcccacccagtgtgacgaccctcggtgtggatgtacccctgtggactcatggctcttccccacccccactttctataaatgtaggcctagaatatgcttctctgttgcaaaactcagctaagttcctgtttccaccttgatgttgaaatatcctatgtaagagggcagggggtgtcgtgaagatggcaagaagaacacagtttcaaatttctggaaaagagcctgtggtagagatctaaagatgtttagggaagagctcgactaaagaacaatgaaataaatggtccaaggggaagt

SEQ ID NO: 33471 - DNA, 387 bp, Macaca Mulatta
agagaccttttctttcacagatgtgagaagcctcaggatgattgcccatggtgttcaggagcagggagctctgatgaggtgctggggataaaaggaaggagggaacactgggcagaaccagagagatgggacatggtagtctgtggcccagaccccagagcagagtaacttgctcccatgactcttcccaaatgtgtccagtcccgagtaaggtagcttccccacgtcttggcccacagccccagggaggctgtgtgtgcatcatgaaccactctgttctgggcctccccgaggacctctcttgggtgtgtgccctttttcaagcctgtttagatgggggagtgcccatgccctgtgtgaaatgcccagatgccaaagaataacacc

SEQ ID NO: 33472 - DNA, 390 bp, Macaca Mulatta
  misc_feature (1)...(390): n = A,T,C or G
agtggtggggttcgnnnnnnnnnnnnnnnnnnnnnnnnnnnnnnngcctcatgtgatcatcacgctcggcctccannnnnnnnnnnnnnnnnnnnnnnnnnnnacacacctggcctgcccactagttttagaatcaattgattttttctctgaatctattattgttaggtggttactaacgataaatggtgattttctgattctgtttccttctgcgtgtgttagttggcattctactctaaagaagagctgtgtcttatccatcccttctttctttataaccagcatggtctcagggattttaattctgtgggtaatagtctatcactaccaagcatgagccactgtgcccggccttgtcataatcaatgtagaggcccaacgagtctc

SEQ ID NO: 33473 - DNA, 612 bp, Macaca Mulatta
  misc_feature (1)...(612): n = A,T,C or G
atgcgggtccggatagggctgacgctgctgctctgtgcggtgctgctgagctcggcctcggcgtcctcgnnnnnnnnnnnnnnnnnnnnnnnnnnnnnnnnnnnnnnnnnnnnnnnnnnnnnnnnnnnnnnnnnnnnnnnnnnnnnnnnnnnnnnnnnnnnnnnnnnnnnnnnnnnnnnnnnnnnnnnnnnnnnnnnnnnnnnnnnnnnnnnnnnnnnnnnnnnnnnnnnnnnnnnnnnnnnnnnnnnnnnnnnnnnnnnnnnnnnnnnnnnnnnnnnnnnnnnnnnnnnnnnnnnnnnnnnnnnnnnnnnnnnnnnnnnnnnnnnnnnnnnnnnnnnnnnnnnnnnnnnnnnnnnnnnnnnnnnnnnnnnnnnnnnnnnnnnnnnnnnnnnnnnnnnnnnnnnnnnnnnnnnnnnnnnnnnnnnnnnnnnnnnnnnnnnnnnnnnnnnnnnnnnnnnnnnnnnnnnnnnnnnnnnnnnnnnnnnnnnnnnnnnnnnnnnnnnnnnntgaagaagaggctgctaagagacggcagatgcaggaagcagaaatgatgtatcaaactggaatgaaaatccttaatggaagcaataagaaaagccaaaaaagaga

SEQ ID NO: 33474 - DNA, 517 bp, Macaca Mulatta
  misc_feature (1)...(517): n = A,T,C or G
taaaatccaaatcccacttgaagcaactgaagagaagaagaaggttggattcagatgctgccaacaccatagaaagtcagagcatttccccagaccatgacaaagaacctaaagagaagagatcctcagggcagaatgagcaagagttgaaatgcagcatttaagagacatgtccagtggcctttggaaaggtggtggggatccacttctgaagggaggggtatgtctgtctcccagtctgggcagaggagtgctatgcagaattttgtgcatagcagaaaagctcccaccattttctttnnnnnnnnnnnaaagtctcatgttctctataatagaaacagcaggtcttgtcagctccttgtatggctgatgtgtctggaaatgatgtcgttcaagaaagcatttttttttctttgaatcttaaaggttctattattanaggaggcacagattccacatttttatacatgaggatctttttttgtggtgaataccaggactgactgcatccctttaa

SEQ ID NO: 33475 - DNA, 849 bp, Macaca Mulatta
  misc_feature (1)...(849): n = A,T,C or G
aagctgcctgcagcagaaggccgtgctgctggtggcccacccgccctgcccaagcccagctgccagtatgcccgccctggaggacagcgaggatgcccccgtgcggtgcaggccggagcccctcggccctccggaggagctgcagacaccggatggcgctgtgcgggtgctgttcctgtccaaaggcagcagccgggcacacattcccgcaccgctggagcagggcgtggtggccgccttcaagcagctgtacaagcgcgagctgctacggttggctgtgtcctgcgccagcggctccccgctggacttcatgcgcagcttcatgctcaaggacatgctctacctggccggcctctcctgggacctggtgcaggcgggcagcattgagcgctgctggctgctgggcctgagggccgccttcgagccccggccgggcgaggacagtgctgggcagccggcccaggctgaggaagctgatgagcacagcagggtgctcagcgacctcactcacctggcggctctggcctacaagtgcctggctcccgaggaggttgcagagtggctgcatctggacgatgatgggggtccacccgagggctgccgggaggaggtgggcccagccctgccccctgcagcccctccggccccagccagcctgctttctgccannnnnnnnnnnnnnnnnnnnnnnnnnccaccgagtacggagggacctcggtgcccactgccggggaggctgtgcgcgggctagagacagctctgcggtggaggagagccaggaccccagagaggtggggccactgagtttagggagctgcgctcacttatcagcatggcccggaggctggg

SEQ ID NO: 33476 - DNA, 203 bp, Macaca Mulatta
agactgaagatttgaaaatacatccatgaacatttcaacatggaacaaagaattatagttccttctctggtgatatccataaagaagtagttatgaaatgtttaaaaccaaaggcaaatagtgttatactcttattttttaattaatctgaggaaaggaggtatttagaaactgatgatggtaccactgcaaaaagcattcaa

SEQ ID NO: 33477 - DNA, 501 bp, Macaca Mulatta
cctcctcccgcctgtgtttccttgaggtccaagctgtcatctcagtctcatacatgctgggagcactcaggccacgggtccgataactcccgagttggctgccttccctcactatgtagcccagggccctgtactcaaatacacttcacccaggagctggcatgtgaggcccctgcagcctccacctgctccatagtcagaatcatatctggtggaacaggaggtggtggcgctttcgccattacactttggagtgcaatctctcttctctgaggaaagtggaaacgctcactcacttgtggtctgagctccttgagaaacccggcgatatgcaaagatgagccaggggcagtgaggacccagcctactggtcttacaactcgtggtggtgtagccaaaacctgtcacaggttagaccagacgggcagggaccatccccctggctgccatgctgagatgaccctgtgggaaccgccttccctgagaatggccagccaggac

SEQ ID NO: 33478 - DNA, 2798 bp, Macaca Mulatta
  misc_feature (1)...(2798): n = A,T,C or G
cagctggtgcagcatgaggtgctgtgctccatgaccaacacttacgaggtcttagagttcttgggccgagggacatttgggcaagtggtcaagtgctggaaacggggcaccaatgagattgtagccatcaagatcctgaagaaccatccgtcctatgcccgacaaggtcagattgaagtgagcatcctggcccggttgagcacggagagtgccgatgactataacttcgtccgggcctacgaatgctttcagcacaagaaccacacgtgcttggtcttcgagatgttggagcagaacctctatgactttctgaagcaaaacaagtttagccccttgcccctcaaatacattcgcccagttctccagcaggtagccacagccctgatgaaactcaaaagcctaggtcttatccatgctgacctcaaaccagaaaacatcatgctggtggatccatctagacaaccatacagagtcaaggtcatcgactttggttcagccagccacgtgtccaaggctgtgtgctccacctacttgcagtcacgttactacaggcaagtggcaaatgctgaaaatnctcctgaaattattcttgggttaccattttgtgaagctattgatatgtggtcactgggctgtgtgatagctgagctgttcctgggatggcctctttatcctggtgcttcagaatatgatcagntcagattcgttatatttcacaaacacaaggcttgccagctgaatatcttctcagtgccggaacaaaaacaaccaggtttttcaacagagatcctaatttggggtacccactgtggaggcttaagnagacacctgaagaacatgaactggagactggaataaaatcaaaagaagcccggaagtacatttttaattgcttagatgacatggctcaggtganaggtgaatatgtccacagacctagagggaacagatatgttggcagagaaggcagaccgaagagaatatattgatcttttaaagaaaatgctcacaattgatgcagataagagaattacccctctaaaaactcttaaccatcagtttgtgacaatgactcaccttttggattttccacatagcaatcantgttaagtcttgttttcagaacatggagatctgcaagcggagggttcacatgtatgatacagtgagtcagatcaagagtcctttcactacacatgttgctccaaatacaagcacaaatctaaccatgagcttcagcaatcagctcaatacagtgcacaatcaggnaggccagtgttctagcttccagttctactgcagcagctgctactctttctctggctaattcagatgtctcgctactaaactaccagtcagctttgtacccatcatctgccgcaccagttcctggagttgcccagcagggtgtttccttgcagcctggaaccacccagatttgcactcagacagatccattccannnnnnnnnnnnnnnnnnnnnnnnnnnnnnnnnnnctggactacaagcaacagcaaagcattctggattccctgtgaggatggataatgctgtaccaattgtaccccaggcaccagctgctcagccactacagattcagtcaggagttcttacgcaggncagggaagctgtacaccactaatggtagcaactctccaccctcaagtagccaccatcacaccgcagtatgcggtgccctttactctgagctgcgcagccggccggccggcgctggttgaacagactgctgctgtactgngcaggcgtggcctggagggactcagcaaattctcctgccttcaacttggcaacagttgcctggggtagctctacacaactctgtccagcccacagcaatgattccagaggccatggggagtggccagcagctagccgactggaggcaagtgnnnnnnnnnnnnnnnnnnnnnnnnnnnnnnnnnnnnnnnnnnnnnnnnnncttgctgactaaccatgtgacactgaccactgctcagcctctgaatgttggtgttgcccatgatgtcagacaacagcaatccagctccctcctttagaagaagaataagcagtcagctccagtctcttccaagtngtcctctctagatgttctgccttcccaagtctattctctggttgggagcagtcccctccgcaccacatcttcttataattccttagtccctgtccaagatcagcatcagcccatcatcattccagatactcccagccctcctgtgagtgtcatcactatccgaagtgacactgatgaggaagaggacaacaaatacaagcccagtagnagctctagcctgaagccaaggtctaatgtcatcagttatgtcactgtcaatgattctccagactctgactcttctttgagcagcccttattcnnnnnnnnnnnnnnnnnnnnnnnnnnnnnnnnnnnnnnnnnnnnnnnnnnnnnnnnnnnnnnnnnnnnnnnnnnnnnnnnnnnnnnnnnnnnnnnnnnnnnnnnnnnnnnnnnnnnnnnnnnnnnnnnnnnnnnnnnnnnnnnnnnnnnnaggtctcctgagcaataagaccaagccagtagcttcagtgagtgggcagtcatctggatgctctatcacccccacagggtatcgagctcaacgcggggggaccggtgcagcacagccactcaaccttagccaggtaagcgctacgggctactgccttctctttgggccttgcactgttgttactttctggagaaccctgcttctggctggatgctgaataaagccaaatgaagccccttttgtgtcaaacaa

SEQ ID NO: 33479 - DNA, 180 bp, Macaca Mulatta
gaggcgtcccctttctccggggaggaagacgtgagtgaccctgaggccttgaggccgctgctgtccctgcagtggaagaacagggcggccagcttccaggccgagaggaagttcaacgcgacagctgcgcgcacggagccctactgcgccatctgcacgctcttctacccctactgccag

SEQ ID NO: 33480 - DNA, 120 bp, Macaca Mulatta
acaatctaatggtaaattgattacctgattagtgcttttctctttcatcacttgttctggatgtttcagtcagtttagtggaaggaagaaagcaaatggggaaactttttattcaaatat

SEQ ID NO: 33481 - DNA, 843 bp, Macaca Mulatta
aatcccttctcagatcaaatacttaacagactaaatgatttgaaaagcaaaaggttactggcttgtgtgttaaaacggaggtagggtggctttgatcttatctacttgtggtggagctgaagtcacaagagaacattaccgagctcctaccagaccccaccgggagacgccagtcactcaggagagatcagggtctttcacaatcagattcgacaaaaactaacatcccccaaaccacagcagtgccagtttccatgtcagaaacttccatccaaatgattgactcgcatctcatggaaaagccctggcttcagaaagaagtccactgcagatctattcaaggcaatacagacacagcgtttgtgtttttgcaacatgagttttgagttctaacacgctgtttgctctttttgtgtttttcctgttaggtgtttttggtgatataaggaatcctgttacctgccttaggagtggtgccatatgtcatccaggcttttgccctagaaggtataaacatatcggcgtctgtggtgtctctgcaataaaatgctgcaaaaagccatgaggaggccaagaagctgctgtaactgatgtggattcagaaagggttccctcatcagagatgtgcgacatgtaaacaaaattaaactgtggtgttcagatttacagaatcttgatcctagtcattgcggttatggtgtggtgctagtttgggcaggccaatctctaacatccttgggacacccttttctgctctccaggcaggggtcaaggatgccacagtggggcttggagtgctttccagggtcacaggcatctatatgatttggatcccttgacctt

SEQ ID NO: 33482 - DNA, 408 bp, Macaca Mulatta
atctacgagtgttcatgtacctcaaaacattaaaggaaaatgaacaaactgttaatattattgtacagaaccatggatttttttgaccatcttccaataaacataacaagtattgtgaatacattaaagttctactaacatgagttttaagagtttgcatatttcagaaatgatctggtgtgagtgcatggaaatattgcttaatttttcttcaatcattgagtgaaaaacctttaactttggcctgcaatagtcatttcattattttttcattttgtaaataatgttaagttttgtaataaaatagttatgttctgataccagtacagtttctatggttgtaattgaacttgagcagacttttagaggttaaaaattatgatttaaatcttactctgaaactctata

SEQ ID NO: 33483 - DNA, 4341 bp, Macaca Mulatta
  misc_feature (1)...(4341): n = A,T,C or G
gagctccagtcaatgttgctctagattcctctttcttcagagataatgaattattatagttcctagccctttcttcttctttttctttgnnnnnnnnnnnnnnnnnnnnnnntttgcttttgttgccgaggctggagtgcgatggtgctgattcctgatctcaggtgatccaactgcttcggccttnnnnnnnnnnnnnnnnnnnnnnnnnnnnnnnnacgtctggcccctagacctttcaatgaatttcagggaattgtgaaaattcctttgttgggataaccgcttaaatataattcaccaaccagggctcaaaaaactcagtatttctaatttccttagttagaaatagagttttttgtaatgtaaacaatttaaaaaattattttagaactgcaactattgggaatgagatgagcaggtgataagggcaaagcatttaaatctttctagtttacgcagcagtgacagccgcccatgcttttacccctctttctcagatggaaaggctcttgcacatttccactcacgagtgtcttgctctccttgacagtgtgtgggaagcccaagaatccggcagacgcagggcagcggatcctgggtggacacctggatgccaaaggcagctttccctggcaggctaagatggtttcccgccataatctcaccacaggggccacgctgatcaatgaacaatggctgctgaccacggctaaaaatctcttcctgatccattcagaaaatgcaacagtgaaagacattgcccctactttaacactctatgtggggaaaaagcagcttgtagagattgagaaggtggttctacaccctaactactcccaggtagatattgggctcatcaaactcaaacagaaggtgcctgttaatgagagagtgatgcccatctgcctaccttcaaaggattatgcagaagtagggcgtgtgggttacgtgtctggctggggcgaaatgccaattttaaatttactgaccatctgaagtatgtcatgctgcctgtggctgaccaatacaattgcataaagcactatgaaggcagcaaatgccccaaaaggaaggcaccgaagagccctgtaggggagcagcccatactgaatgaacacaccttctgtgccggcatgtctaagtaccaggaagacacctgcaatggcgatgcgggcactgcctcgacatggaggaggatacctggtatgcggctgggatcctaagctttgataagagctgtggtgtggctaagtatggtgtgtatgtaaaggtgacttccatccaggactgggttcagaaaaccatagccgagaactaatgcaagcctggccggaagcccttgcctgaaagcaagattccagcctggaagaggacaaagtggacgggaatggacaagagtggatgggataagatgtggtttgaagctgatgggtgccagccctgcgttgctgagtcaatcaataaagagctttcttttgactcatttctgtgttgtgttcagtcttgagacttctttattcactcctttatggtccagggtagccagaaggtatagagtctactgggatcatggaagagaacaccccaaacccactggaaatcccgaaggtgatacaaactcttccaccttagggaatcatgctcactgactgagtgcctattgaatgctaggccccagaaaggcaactgttgtccttgtgttacagagaaggaaacagagactcagagatggtaagtgagttgcttaaggttacatagccatgaaacaatgaagcagaactttgaacccagccctgtttgatacaaactcagagctcttttcactgtatcctgttgcctcttcaaagtgaattaggagaaaaggcgtggcctggtgaggaagaggctagttcaaagtgggatggggagaaagtgttttgacacagacagtacttcagagtttgggatctaacctaccagcactctggaaaacaaaagacgatgatgtaaaggcaggatctctggatgtgctgggtccaaatcacagcttggcccaaacatttgctaagtaatttaggcttcctggccatcagttcctggtctcttccatgaaggacttgagccagagtaatgtccctatcagcaataaccttccgggactctgtaaagagtgggaggtagagtccctgcctcagtacaagctgcttttcctacttggaacaaacccacccttcgccaggaatcaaatgcaagctggctgagcctcctctcctgatggcaggtcacgctatcaatggtctcccagaagaaaggttctggaactctgataaacagaagttcttctaatagaattttctcttgctataagccttcaataccaccaatcaccaatgcgccgccttcttatgccaaaatacagcccctcctttgcagggtgtaaaacgacactgatgtcactctctctcaccagggtctggccatctctctgaagctctcctcacaggcgccctgcagattcatcaataaacttctacaggttagcgctagtaggccaataagacctgtattctagaacctgtgagatagtagccagaaaccgggaaacaccaaacgcttaaaaaacgcctctcagaacacagtcagttacaccttttcctcttgtagttctctttagcaccaagtttcttggaagaagaaggcagtctccagttttcttaaagaattgtctgattgtattaagtggcttctggtaaaataacagtaagagaaaagctgtggcattctcttgatcgctcatcttctctaccttcctccccagcaccacctcctggcctcagcctgtgggcttctgcaaagtcatgtatcaggactaattagctagcatcaaattcctgctaattccagaagcagggacaaacctgttcgggagggacttaatgataaaattaggtataggtctatatgttaatcaaggaaaattctctacttccttaaacttactttaaatcctacaggagagccaaatccattctgatgtatagtcagaggaaggaaattgggggaaattacaagtttctccaatccatgtaaaattaagaaatcctggggaagttgtaaagagaaaacagtaccctattcccttgaaaggcagaataggtttataacctataatcgaaggtctccttcaggaagaacttcttaaaccctgtatgtcctcttacaacactccaatactgcctataaaaaagtcagacgggtcatatcgactactacaagacctttgagccattaaccaaatagtccagaccacccaccctgtcattcctaacccttacaccattatcagccagatccctcatgaccgccagtggttcacagtaatagacctcaaggatgacttctgggcttgccccttagctgaggatagctgggacgtatttgcttttgaatgtgaggaccctcactccagttggaagcaatagtagtgatggatgacagttctaccaagggtttacagctctccaaacctattcagtcaaattttgctgagtcctagagaatttcactctttcatcatccttatgtctactccaatatgtggacgacctgctatttccggaggcaccgaaagaccaagtaactgactagattctaaatttcctaaggaaaaaacggttatgggttcaaaaagtaaactccagctcgcagaacccgaggtaaaatacacagggcacttaacaagcaaagggaagcggaagatacggcccgaacaaattcaagggatcatatccttgccattgcctgagacaaaataaaaacttagaaaattcttggggctagttggaaattgttgcctgtggattgactcttatgccttaaagacaaagcctctatatctaaaactcacccaagaagggcccgacccctttctttggactccacaagaagtccagcaagttgagaaactaaaacatctacttataactgcccctgtcttagctctgccatccttagaacagccatttcacctttttgctaatataagcaaggggcagctatagagtactcactcaaaagcatgggggccatcgccagcccgcagcctttctgtcaagtattcttgacctagtaacccatgggtgacctgaatgtatctaatctatagcagcaactgctttattgacaaaagaaagtagaaaaataccctttgggggaagtctcattgtaagcacaccccatcaggttaaaaccattcttggccaaaaagcagggagatagcttacggattcaagaatcctaaaatatgaagctatcctattagaaaaaggtgatttaaccctaaccactgacaatgagctc

SEQ ID NO: 33484 - DNA, 3362 bp, Macaca Mulatta
  misc_feature (1)...(3362): n = A,T,C or G
atgagcgacatagtggagaagacgttgacggcgctgccgggactctttctgcagaaccagccaggtggtgggcccgcggccgccaaggcgtccttctcctcgaggctaggcagcctcgtccgcggcatcaccgccctcacctccaagcacgngaagaagaaaaattaatccagcaggaactgagtagtctgaaagcaactgtttctgctcctactacaacactgngaaaatgatgaaggaatgtatggtgagacttatatattgtgaaatgcttggatatgatgcttcctttggctatattcatgcaatcaagttagcccaacaaggaaacctcttagaaaaaagagtaggtnnnnnnnnnnnnnnnnnnnnnnnnnnnnnnnnnnnnnnnnnnnnnnnnnnnnnnnnnnnnnnnnnnnnnnnnnnnnnnnnnnnnnnnnnnnnnnnnnnnnnnnnnnnnnnnnnnnnnnnnnnnnnnnnnnnnnnnnnnnnnnnnnnnnnnnnnnnnnnnnnnnnnnnnnnnnnnnnnnnnnnnnnnnnnnnnnnnnnnnnnnnnnnnnnnnnnnnnnnnnnnnnnnnnnnnnnnnnnnnnnnnnnnnnnnnnnnnnnnnnnnnnnnnnnnnnnnnnnnnnnnnnnnnnnnnnnnnnnnnnnnnnnnnnnnnnnnnnnnnnnnnnnnnnnnnnnnnnnnnnnnnnnnnnnnnnnnnnnnnnnnnnnnnnnnnnnnnnnnnnnnnnnnnnnaggacaagtgaattaatgtatgatgttcttgatgaatccttacgaagagccgagttaaatcacaatgtcacatatgngctattttgtttgaatgtgtgcatacagtttattctatttatcctaaatcggaattacttgagaaggctgccaagtgcattggaaaatttgttctgtcacctaaaataaatctaaaatatttaggntaggactgaaggctcttacctatgttatccaacaggatcctactctggctcttcaacaccagatgacaataattgaatgtttagatcatcctgatcccattattaaaagagagnnnnnnnnnnnnnnnnnnnnnnnnnnnnnnnnnnnnnnnnnnnnnnnnnnnnnnnnnnnnnnnnnnnnnnnnnnnnnnnnnnnnnnnnnnnnnnnnnnnnnnnnnnnnnnnnnnnnnnnnnnnnnnnnnnnnnnnnnnnnnnnnnnnnnnnnnnnnnnnnnnnnnnnnnnnnnnnnnnnnnnnnnnnnnnnnnnnnnnnnnnnnnnnnnnnnnnnnnnnnnnnnnnnnnnnnnnnnnnnnnnnnnnnnnnnnnnnnnnnnnnnnnnnnnnnnnnnnnnnnnnnnnnnnnnnnnnnnnnnnnnnnnnnnnnnnnnnnnnnnnnnnnnnnnnnnnnnnnnnnnnnnnnnnnnnnnnnnnnnnnnnnnnnnnnnnnnnnnnnnnnnnnnnnnnnnnnnnnnnnnnnnnnnnnnnnnnnnnnnnnnnnnnnnnnnnnnnnnnnnnnnnnnnnnnnnnnnnnnnnnnnnnnnnnnnnnnnnnnnnnnnnnnnnnnnnnnnnnnnnnnnnnnnnnnnnnnnnnnnnnnnnnnnnnnnnnnnnnnnnnnnnnnnnnnnnnnnnnnnnnnnnnnnnnnnnnnnnnnnnnnnnnnnnnnnnnnnnnnnnnnnnnnnnnnnnnnnnnnnnnnnnnnnnnnnnnnnnnnnnnnnnnnnnnnnnnnnnnnnnnnnnnnnnnnnnnnnnnnnnnnnnnnnnnnnnnnnnnnnnnnnnnnnnnnnnnnnnnnnnnnnnnnnnnnnnnnggtagatgcttctttatcttttctggatggttttgtggctgaaggactcagtcagggtgcagcgccttacaaacctcaccatcaacgccaggaggaaaagctttctcaggaaaaagnnnnnnnnnnnnnnnnnnnnnnnnnnnnnnnnnnnnnnnnnnnnnnnnnnnnnnnnnnnnnnnnnnnnnnnnnnnnnnnnnnnnnnnnnnnnnnnnnnnnnnnnnnnnnnnnnnnnnnnnnnnngacaaatagcttgaagctggaaggtataaagaaattgtgggggaaagaaggctatcttcccaagaaggaaagcaaaactggtgatgaaagtggagctctgcctattcctcaagagagtataatggagaatgtagatcaagctataacaaaaaaggatcaatctcaagttcttacccaatctaaagaggagaaagaaaagcagctgctggcatcatcattatttgttgggctaggatcagaaagtacagtcaacctgngctgggaaaagcagatactgtctctcacaagttcagaaggaaatcaaaagtcaaggaagctaaaagtggcgaaacaaccagtactcataatatgacctgttcttcctttagttctttgtcaaatgtggcatatgaagatgactattacttgaatactttgcacgatagaggagacaaagaattaaagacattttctctcaattcagaacttttggattctgagtcactcacagaactgcccttggttgagaaattctcaaattgcagtctgtctacaccttcattgtttgctgataacagcatggaaatttttcaccctcctaaatctactgcagcctcagttgccaaggaaagctctttagcttcatcttttttggaagaaactactgaatacatacactcaaatgctatggaaatctgtaataatgaaaccatatcagtgtcttcttataaaatttggaaagatgattgtttattgatggtctggtcagtcactaataagagtggtttggaattgaaaagtgctaacctagaaatttttcctgcggaaaatttcaaggtnnnnnnnnnnnnnnnnnnnnnnnnnnnnnnnnnnnnnnnnnnnnnnnnnnnnnnnnnnnnnnnnnnnnnnnnnnnnnnnnnnnnnnnnnnnnnnnnnnnnnnnnnnnnnnnnnnnnnnnnnnnnnnnnnnnnnnnnnnnnnnnnnnnnnnnnnnnnnnnnnnnnnnnnnnnnnnnnnnnnnnnnnnnagaccattaaaaatctcaagtgaagactttgggaaactctggttatccttcgccaatgatgtgaaacaaaatgtaaaaatgtcagaatctcaagctgcacttccttctgcactaaagactctgcaacagaaactaagactccatattattgaaattataggntaggcaatgaagggctattggcctgtcagctgctcccatccatcccctgcttactgcattgccgagtttatgcagatgtattagccctgtggttcagatcctcctgctctactcttcctgactatttactgtatcagtgtcaaaaggtgatggagggatcctag

SEQ ID NO: 33485 - DNA, 770 bp, Macaca Mulatta
  misc_feature (1)...(770): n = A,T,C or G
ggatgtcaaatccaaatttagagtagacataaaattattatttttattaaaactgtggcatacgtataatacatacctaattctagtagtgagaactatctcttctatctctttaggttcaaaatggtgaatttctttattatacaaatgctttgttgtgagataacatcacacagttacaatggattttaaaggtttgtcttttttgggtggngtgggaagctgagagggntaattcaatacatggctgaaattacaaatatataaatacctcaatttccctaccatacaagaaaaaaacacctatcctgattgatcaagtcttttgaagaataatcactttcctttaaaacccccnnnnnnnnnnnnnnnnnnnnnnnnnnnnnnnnnnnnnnaattttttatttaaaccggccctaannnnnnnnnnnnnccnnnnnnnnnnnnnnnntcccgnnnnnnnnnnnnnnnnnnnnnnnnnnnnnnnnncctcnnnnnnnnnnnnnnnnnnnnnnnnnnnnnnnnnnnnnnnnnnnnnnnnggggtttttaannnnnnnnnnnnnnnnnnnnnnnnnnnnnnnnnnncgccctcaaaaaggcaaaaacccccttttttaaaaaatttcccgggggnnnnnnnnnnnnnnnnnnnnnnnnnnnnnnnnnnnnnnnnnnnnnnnnntggaaaaaccnnnnnnnnnnnnnnnnnnnnnnnnnnnnnnnnnnnnnnnnnnnnnntggnnnnnnnnnnnnnnacnnnnnnnnnnn

SEQ ID NO: 33486 - DNA, 766 bp, Macaca Mulatta
aacggaagttgccaacgtcttgacctctttcagatatgacaatggatgatgttcgggaatacgagaaaaacatgcatgaacaaaccaacataaaagtttgcaatcagcattcctcccctgtggatgacatagagagtcatgcccaaacaagtgtacgtagaatttttaaaacgtgttgcccaccctttcacaaatgcactcgtaaattgatcttggaaatactgcaggtgcccggttcccaaccttccatagaaacatgtcgtcacctagagcctgttgctgcagaacctgagctggatctaaattgggcagtgtcacctctcttttccagacatttcgatcccttaaagttgcttgacgtggaggttatttcggtcataaaaccaagaacatggagagtggaaacatttttgtgggactggtaaaacggcctgcaccgtaaaagagcagaggagtgaaaatggatgtcatatgtaaactagaataacatgtcagtaacttttaaaaacatagctaacactcacttattcagtcaagggagggcttctggctcatcagctattttaggtttctttacatttgctttgaaaagctttctgtggctctttatagctgttttacccaatcagttcctttttacttaggataatctcaagatgggctacagtctgtgcagacacacaggctgagcagtgaaggggtatgagctggggatgtgctgagctgcctagcagatccctgaacgtaggataagccttagagagcc

SEQ ID NO: 33487 - DNA, 812 bp, Macaca Mulatta
  misc_feature (1)...(812): n = A,T,C or G
gggaaaggcatattactttcagattctgatgtgtgagggaaaatactgtcacaatgaaaatcttgacaatttacttaacaagtaaccaatagttcatcaaaaccaacttgtacagactaatacatctttttcatagtattcagttttctcacctcttgctattgtatattgtagatttttttcactcatgtgttatttaatttacactgatctctgctattttaaccccccaaataagttatttgtcctttaaggttggttactataataccccttagtaagattccagtattaatttctgggcagtttgttctctgtatacgattgcaaatgataagcatttttgtgagtgaccacctttgcaatatgtttgttaatttacttcatgttgggttctttctgaaatgtacatctttacgtataaaaacctcacatttatttgatttacacttcctagtctacattacatgtggttgaaggttttatacattctatatgcttttactaaatatacaagatttactactagaaaatttggagaaagaacactaacacaggtacttgtgatttggttcctgttaatatttaaaacttggaaatttgtggtatttaaggtaagaagtccggtaattgaacaaagaaccggtgggttttttttgcctccccttgaggccttaaataaaatcacatccgggggtaatagggaaattggcttgggcccattggaattttggggtccacaaaaattcttggaaaataatatttaacccaaggtttttaccctgtgganaataataataacaccataaaac

SEQ ID NO: 33488 - DNA, 638 bp, Macaca Mulatta
aggtattcagaaacgtgaagccagcaattgtttcgcaattcggcattttgaaaacaaatttgccgtggaaactttaatttgttcttgaacagtcgagaaaaacattattgaggaaaattaataccacagcataatcccaccctttacattttgtgcagtgattattttttaaaatcttctttcatgtaagtagcaaacagggctttactatcttttcatctcattaattcaattaaaaccattaccttaaaatttttttctttccaagtgtggtgtcttttatatttgaattagtaactgtatgaagtcatagataatagtacatgtcaccttaggtagtaggaagaattacaatttctttaaatcatttatctggatttttatgttttattagcattttcaagaagacggattatctagagaataatcatatatatgcatacgtaaaaatggaccacagtgacttatttgtagttgttagttgccctgctacctagtttgttagagcatttgagcacacattttaattttcctctaattaaaatgtgcagtattttcagtatcatatttaactatttagagaatgatttccacctttatgttttaatatcctaggcatctgctgtaataatatttta

SEQ ID NO: 33489 - DNA, 620 bp, Macaca Mulatta
  misc_feature (1)...(620): n = A,T,C or G
ggggctggtgcgccagtgtcaccgccatggctgtcccgtgtttgctgcggcaaggacgagctggggccctgaaggctgtactccaggaagcccaggtgtttcgaggacttgcttctacggtttctttgtctgcggaatcagggaagaatgaaaagggtcagccacagaatcccaagaagcagagtccaccaaaaaagccggccccaatgcctgctgagccatttgacaacactacctacaagaacctccagcatcatgactacaccacgtacaccttcttagacctaaacctcgatctctccaaattcaggatgcctcagccctcctcaggccgggagtcacctcgacactgagggccctcgctgtgaagatgaaccttccactgtcttcgccgcatcctggagtgcaaaaataaaatccactcgagtaacaaagcccagtgtgcatcatcagtttcacttttacttgtttttttgagacagggtctcannnnnnnnnnnnnnncnnnnnnnnnnnnnncnnnnnnnnnnnnnnannnnnnnnnnnnnnnnnnnnnnnnnnnnnnnnnnnnnntnnnnnnnnnnnnnnnnnnnnnnnnnagtactcaccaccaggcccag

SEQ ID NO: 33490 - DNA, 2092 bp, Macaca Mulatta
  misc_feature (1)...(2092): n = A,T,C or G
gcaccgagttcttgacctgcggcagccgcctgcgctggctgctgccctgggcccagaatcgctccctgcagctgtcggagcgcacactctgtgcttaccccagcgccctgcatgcccaggccctgggcagcctccaggaggcccagctctgctgcgagggggccctggagctgcacacacaccatctcatcccgtccctacgccaagtgatgttccagggggatcgnnnnnnnnnnnnnnnnnnnnnnnnnnnnnnnnnnnnnnnnnnnnnnnnnnnnnnnnnnnnnnnnnnnnnnnnnnnnnnnnnnnnnnnnnnnnnnnnnnnnnnnnnnnnnnnnnnnnnnnnnnnnnnnnnnnnnnnnnnnnnnnnnnnnnnnnnnnnnnnnnnnnnnnnnnnnnnnnnnnnnnnnnnnnnnnnnnnnnnnnnnnnnnnnnnnnnnnnnnnnnnnnnnnnnnnnnnnnnnnnnnnnnnnnnnnnnnnnnnnnnnnnnnnnnnnnnnnnnnnnnnnnnnnnnnnnnnnnnnnnnnnnnnnnnnnnnnnnnnnnnnnnnnnnnnnnnnnnnnnnnnnnnnnnnnnnnnnnnnnnnnnnnnnnnnnnnnnnnnnnnnnnnnnnnnnnnnnnnnnnnnnnnnnnnnnnnnnnnnnnnnnnnnnnnnnnnnnnnnnnnnnnnnnnnnnnnnnnnnnnnnnnnnnnnnnnnnnnnnnnnnnnnnnnnnnnnnnnnnnnnnnnnnatgcccatcaatgcttccaatgcgctgacgctggctcaccagctgcgcgtgtacacagctgaggctgccagcttttcagacatgatggatgtagtctatgtggctcagatgatccagaaatttttgggttatgtcgaccagatcaaagagnnnnnnnnnnnnnnnnnnnnnnnnnnnnnnnnnnnnnnnnnnnnnnnnnnnnnnnnnnnnnnnnnnnnnnnnnnnnnnnnnnnnnnnnnnnnnnnnnnnnnnnnnnnnnnnnnnnnnnnnnnnnnnnnnnnnnnnnnnnnnnnnnnnnnnnnnnnnnnnnnnnnnnnnnnnnnnnnnnnnnnnnnnnnnnnnnnnnnnnnnnnnnnnnnnnnnnnnnnnnnnnnnnnnnnnnnnnnnnnnnnnnnnnnnnnnnnnnnnnnnnnnnnnnnnnnnnnnnnnnnnnnnnnnnnnnnnnnnnnnnnnnnnnnnnnnnnnnnnnnnnnnnnnnnnnnnnnnnnnnnnnnnnnnnnnnnnnnnnnnnnnnnnnnnnnnnnnnnnnnnnnnnnnnnnnngtggacctggcctccatccagctgcccccgagtctgttctcatcccttccggctgccctggctcccccggtgcctccagactgcaccctacaactgctcgtcttccgaaatggccgcctgttccgcagccacagcaacgcctcccgccctggagctgctgggcctggcaagaggcgtggcgtggccacccccgtcatcttcgcaggaaccagtnnnnnnnnnnnnnnnnnnnnnnnnnnnnnnnnnnnnnnnnnnnnnnnnnnnnnnnnnnnnnnnnnnnnnnnnnnnnnnnnnnnnnnnnnnnnnnnnnnnnnnnnnnnnnnnnnnnnnnnnnnnnnnnnnnnnnnnnnnnnnnnnnnnnnnnnnnnnnnnnnnnnnnnnnnnnnnnnnnnnnnnnnnnnnnnnnnnnnnnnnnnnnnggagctgagcgcctttcccagggaggtggggggcgcgggggcagggctgcaccctgtggtatacccctgcacagccctgctgctgctctgcctcttcgccaccatcatcacctacatcctcaaccacannnnnnnnnnnnnnnnnnnnnnnnnnnnnnnnnnnnnnnnnnnnnnnnnnnnnnnnnnnnnnnnnnnnnnnnnnnnnnnnnnnnnnnnnnnnnnnnnnnnnnnnnnnnnnnnnnnnnnnnnnnggtgggcatcaccctgcactactcctccctgtccacgctgctctggatgggggtgaaggcgcgagtgttccacaaggagctcacctggagggcaccccctccgcaagaaggggaccccgccctgcctgctcccagtcctatgctccgg

SEQ ID NO: 33491 - DNA, 133 bp, Macaca Mulatta
  misc_feature (1)...(133): n = A,T,C or G
gtcctgcacttcttcctggagtaccagtggttcgtggactttgctgtgtactcgggtggcgtgtacctcttcacagaggcctactactacgtgctgggtccagccaaggagactaacattgccgtgttcnggt

SEQ ID NO: 33492 - DNA, 440 bp, Macaca Mulatta
gacgtcctatgggagaaacagcttccagcaacaccccttaaaagtaacacagaggagtgactcacaggaacttctggaagaggaggaaagatcttgctgatttaacaggtcttgccgacatcaatgagagaatgcgggaccctcacaccagcctcacgagaacctggtggatacggctcatcccagagggtgccttggatcagcacctggggaaaaaaaagcagcacctgaaactggtcagcctgcagaggagagaagactgagcaagttttctccaaatttcacaacaggctttaccatgtggatgatataaccagtcgtcagtacatttctgtatagcaaatcacactttaaaaaaaccagccatgctagtgggcctgaggattacctttcattttcctcttttctctctggaaaatgatattgcaaaattgtaaaaa

SEQ ID NO: 33493 - DNA, 370 bp, Macaca Mulatta
  misc_feature (1)...(370): n = A,T,C or G
tgatccagaagcagggggacaagaacgtcactatgggtcagagcaatgcacgcatgaagttgaattgggctgtggcagctggagccaaggacccagnnnncaggccccgccgtggcgggcatcctctccatccagaacatgacgacattgctggccaatgcctccttgaacctgcattccaagaagcaagctgagctggaggagatctatgaaagcaacatccgcggtgtccgactcagacgcctgtcggccgtcaactccgtctttctgagccacaacaacaccaaggaactcaacttccccatcctgttcgccttctcccaccttgagtcctccggtgggaaggagggaagagaccctcctgccaagg

SEQ ID NO: 33494 - DNA, 774 bp, Macaca Mulatta
  misc_feature (1)...(774): n = A,T,C or G
tcctcttcctgaccgccctgatcttccgtagagaaagcaggtcgcgccggacctttcgtacaatccagaagaatagatccaactggccatggcaaaagccctggggatttctgattcatacccctgggcttccttcaggagggcttctccttccaaaatcctccccacctgtctnccaagaacagccttccctgcgcccaggccccttcctggcctcgtagactcagttagtccacagcctgctcacttcgtgggaatagttctccgccgagatagcccctctcgcctaactattatgtaagttgatttcccttcttttgttcctcttgtttgtgctatggcttgacccagcatgtcccctcaaatgaaagttctccccttgattttctgctcctgaaggcagggtgagttctctcctcaaagaagacttcaaaccatttaactggtttcttacgagccgtcaagcagcctgggtttggagatgctgtgaaagagagaaggaaaatcatgccgctcagttcctggagacagagccgtcatcagcatctcacttgtgatttttatctggaaaaggaaggaagaccccaacacagcaagctcagccttttagagaaggatctttccaaactgcaaacttcgctttgaaaactttagccctttaaggaatgaaatcatgtaggattttggaattctaaaaacattaaaatcagcttattggtacaggatagagaaagaaatctggtgcctgggggtccttgtgttcacccctagagt

SEQ ID NO: 33495 - DNA, 103 bp, Macaca Mulatta
ttagaagttgtctctggacatctcttgctcttttcttcttatgttggctcagggctaagctgagctcttcacagaataggggtagggggtggggagcacctgt

SEQ ID NO: 33496 - DNA, 249 bp, Macaca Mulatta
  misc_feature (1)...(249): n = A,T,C or G
tggctgagacttggggctggaagggcgcttcctccgcggttatgaacagcacgccaaagatggcaaggattacatcgcacttaaccgggacttgtgctcctggaccgnnnnnnnnnnnnnnnnnnnnnnnnnnnnnnnnnnnnnnnnnnnnnnnnnnnnnnnnnnnnnnnnnnngcctacctggagggcatgtgcgtggggtggctccgcagacaccaggagaacgggaaggagacgctgcagcgcgcg

SEQ ID NO: 33497 - DNA, 823 bp, Macaca Mulatta
cctaacctccaggggagaagggctcaggcaaacccaaatggacatctcagcaaagtcccatgagtggagcctatcgcagcagaaagagccccagctggtgagtggcagtgggtctgactggcccttcagggtgccagaagcagggcccaccagagggcgtctaggaatgtgcagacgaggatcacctctctagccactgcttgagctcagagctgggcttcagaacccaagagaagctggaggtaggaggctggctggggttgacatgtccaccttggtgtctctccttgagtctcagctagtactttctgcctctacttggctttctgacttggtcttcttttgtgtctcttcgcccttctgacaggtgacaatcctgctgtacctggcagaagtgatggttcggctgacttggcaccaggccatggatcctgacaaccactgcatcccctaccttacagggctgggggacctgctcggtactagcctcctggcactctgctttttcactgactggctactgaagagcaaagcagagctgggtgacatctcagaactggcatctggacctccctaactgggccctgctggtcccatttgctcattagaatttcctctcacatcagtgaggtacagaattcagtttctcccttcccaggtccttgggatggttgacccctgcctctgcagtagccttttgtgagtctgctaaggtagctctcacacacctcggctctggggttgatacctgagcccgcaatagagccctgaaatcgagagcacagcttgagtgtgtgaatatgatgtgtgcacatgcttaatg

SEQ ID NO: 33498 - DNA, 635 bp, Macaca Mulatta
  misc_feature (1)...(635): n = A,T,C or G
agttttggggttgtcttactctggagatgccaagtgtattttttctttctatgtaatnttagattcgctttacaatgtaaatcttcacattggagatatattggttggaccttgcccatcttcactctagccttcgtatttgtgaaggactcaaccaccttccttcttcaccccatgcttctcaccaaatttttgttgtcattgagggcacttggataactcaagttgatatttatagctgatcaatctataggtgtcccagaactatgctgcctaaagtgatcttggctccttaatggtccttttggccccttggatagttaacagctgagtcattctaatctcttctgtgttttcattgccttaaccacaaattgtggtgctttttgtatattttatgtataaatcacaaagttgaattctgactatttttaagacaaaagtctgttaaacttttttattgtaaagaatatttattatgcgaatctctattattttatggtatttattgcaaaagactgttgaaatgtactcatgtctgaatataacaaaatatcaatacttaacggaaaataaggtgacacgaagaaagtacacatgttaactataatgcagaaaatatattaattaatgaa

SEQ ID NO: 33499 - DNA, 380 bp, Macaca Mulatta
  misc_feature (1)...(380): n = A,T,C or G
agggagcttgtattttgaatatgctcaaggattttctgggtgaggagaaattccagaaaggaataattcagtacttaaagaagttcagctatagaaatgctaagaatgatgatttgtggagcagtctgtcaaatnnnnnnnnnnnnnnnnnnnnnnnnnnnnnnnnnnnnnnnnnnnnnnnnnnnnnnnnnnnnnnnnnnnngctcacctttctgggggaaaatgcagaggtcaaagagatgatgactacgtggactctccagaaaggaatccccctgctggtggttaaacaagacggacattcactccgactgcaacaggagcgcttcctccagggggttttccaggaggaccctgaatggagggccctgcaggagagg

SEQ ID NO: 33500 - DNA, 1931 bp, Macaca Mulatta
  misc_feature (1)...(1931): n = A,T,C or G
nagagactctgcgcagctacttttcccaatatggagaagtcgtagactgtgttatcatgaaagataaaaccaccaaccagtctcgaggctttgggtttgtcaaatttaaggacccaaactgtgtggggacggtgctggccagcagaccgcacacgctagacggccgaaannnnnnnnnnnnnnnnnnnnnnnnnnnnnnnnnnnnnnnnnnnnnnnnnnnnnnnnnnnnnnnnngcagaaaggacccaggagcgataacagtaaatcaaataagatatttgtcggtggaattcctcacaattgtggtgagacagagctcagggaatacttcaagaagtttggagtggnnggtcacagaggtagtcatgatctatgatgccgagaagcagaggccccgaggnnnnnnnnnnnnnnnnnnnnnnnnnnnnnnnnnnnnnnnnnnnnnnnnnnnnnnnnnnnnnnnnnnnnnnnnnnnnnnnnntggaagttaaacgagctgagcctcgcgacagcaagagccaagcgccgggacagccaggtgccagccagtgggggagcagggtcgtgcccaacgctgccaatggctgggcaggccagcccccgcccacgtggcagcaaggatacggcccgcaaggnnnnnnnnnnnnnnnnnnnnnnnnnnnnnnnnnnnnnnnnnnnnnnnnnnnnnnnnnnnnnnnnnnnnnnnnnnnnnnnnnnnnnnnnnnnnnnnnnnnnnnnnnnnnnnnnnnnnnnnnnnnnnnnnnnnnnnnnnnnnnnnnnnnnnnnnnnnnnnnnnnnnnnnnnnnnnnnnnnnnnnnnnnnnnnnnnnnnnnnnnnnnnnnnnnnnnnnnnnnnnnnnnnnnnnntccaccggccacccccggggcagcacctctggctttcccaccgcctccatctcaggccgccccggacatgagcaagcccccgacagctcagccagacttcccctatggtcagtatnnnnnnnnnnnnnnnnnnnnnnnnnnnnnnnnnnnnnnnnnnnnnnnnnnnnnnnnnnnnnnnnnnnnnnnnnnnnnnnnnnnnnnnnnnnnnnnnnnnnnnnnnnnnnnnnnnnnnnnnnnnnnnnnnnnnnnnnnnnnnnnnnnnnnnnnnnnnnnnnnnnnnnnnnnnnnnnnnnnnnnnnnnnnnnnnnnnnnnnnnnnnnnnnnnnnnnnnnnnnnnnnnnnnnnnnnnnnnnnnnnnnnnnnnnnnnnnnnnnnnnnnnnnnnnnnnnnnnnnnnnnnnnnnnnnnnnnnnnnnnnnnnnnnnnnnnnnnnnnnnnnnnnnnnnnnnnnnnnnnnnnnnnnnnnnnnnnnnnnnnnnnnnnnnnnnnnnnnnnnnnnnnnnnnnnnnnnnnnnnnnnnnnnnnnnnnnnnnnnnnnnnnnnnnnnnnnnnnnnnnnnnnnnnnnnnnnnnnnnnnnnnnnnnnnnnnnnnnnnnnnnnnnnnnnnnnnnnncggtatattgtaaacttttatgttaaagaaaaaatatacatttacaaattgtgagatttttaagagaaattttctacaatgtatactggcttattttttaatttaaaacagggtttccgtcggcactggtggaggggggtgcgctgttagtctcctcgctcctggctttgggggttgggacttggtggtccagaaactctgggagcttcaagaagaaatctactgagtgtgtttctgttttttgtttaattccttgcttttgtcaactgacctgcttggtagtgtctgaggtgaactgtgggggttgcgcacagccagccacgtggatcccacggcagcgccgaaccggaaccgagtaggaagccgttctccccaggcacgtggcttcagggcgtttcccattgaccagtttgaccctggtttgaataaagagaagtgcgtttggattagaaa

SEQ ID NO: 33501 - DNA, 1395 bp, Macaca Mulatta
  misc_feature (1)...(1395): n = A,T,C or G
ggtactaagggagggcatgccacaggctccaggccacagaggcaaagacatggaccctgttccacctgcccctgaaagtctcaagtgtcaccagaccccttctcatggacttgagagggtgggatggcacagagagagccagaagcacagannnnnnnnnnnnnnnnnnnnnnnnnnnnnnnnnnnnnnnnnnnnnnnnnnnnnnnnnnnnnnnnnnnnnnnnnnnnnnnnnnnnnnnnnnnnnnnnnnnnnnnnnnnnnnnnnnnnnnnnnnnnnnnnnnnnnnnnnnnnnnnnnnnnnnnnnnnnnnnnnnnnnnnnnnnnnnnnnnnnnnnnnnnnnnnnnnnnnnnnnnnnnnnnnnnnnnnnnnnnnnnnnnnnnnnnnnnnnnnnnnnnnnnnnnnnnnnnnnnnnnnnnnnnnnnnnnnnnnnnnnnnnnnnnnnnnnnnnnnnnnnnnnnnnnnnnnnnnnnnnnnnnnnnnnnnnnnnnnnnnnnnnnnnnnnnnnnnnnnnnnnnnnnnnnnnnnnnnnnnnnnnnnnnnnnnnnnnnnnnnnnnnnnnnnnnnnnnnnnnnnnnnnnnnnnnnnnnnnnnnnnnnnnnnnnnnnnnnnnnnnnnnnnnnnnnnnnnnnnnnnnnnnnnnnnnnnnnnnnnnnnnnnnnnnnnnnnnnnnnnnnnnnnnnnnnnnnnnnnnnnnnnnnnnnnnnnnnnnnnnnnnnnnnnnnnnnnnnnnnnnnnnnnnnnnnnnnnnnnnnnnnnnnnnnnnnnnnnnnnnnnnnnnnggtgagcctgcccacagcagagattgactgcagcctggcagagtacattgacgtgatctgngccattctagacatccctgtctacaagagtcggattcagtccctccatctgctgttttccctctactcagaattcaagaactcnnnnnnnnnnnnnnnnnnnnnnnnnnnnnnnnnnnnnnnnnnnnnnnnnnnnnnnnnnnnnnnnnnnnnnnnnnnnnnnnnnnnnnnnnnnnnnnnnnnnnnnnnnnnnnnnnnnnnnnnnnnnnnnnnnnnnnnnnnnnnnnnnnnnnnnnnnnnnnnnnnnnnnnnnnnnnnnnnnnnnnnnnnnnnnnnnnnnnnnnnnnnnnnnnnnnnnnnnnnnnnnnnnnnnnnnnnnnnnnnnnnnnnnnnnnnnnnnnnnnnnnnnnnnnnnnnnnnnnnnnnnnnnnnnnnnnnnnnnnnnnnnnnnnnnnnnnnnnnnnnnnnnnnnnnnnnnnnnnnnnnnnnnntggaatttctgagatcccatggagtttggattgggaggaaagcttaaaagatttcctttttgtgggagggatggaattgttttctttccttcgtaaagttagtgggtaaaaattttataaatcaa

SEQ ID NO: 33502 - DNA, 786 bp, Macaca Mulatta
taatcctatcgattccttacagggactaccaagcgatatgccatgaaagcttacatcgacaaagtagaagagctaattaaaaaatacgggatatgagtgactggatttggttactaggccatgtgtttctcctaaactgagacaatgccttgttttttctaataccatggatggtgggaattccggaaaataaccagttagcccagctactcaaggctgcttaccatacggctctaacagattagaggctaaaacgattactgaccttccttgagtagtttttatctgagatcaattaaaagtgtatttgttactttaaataactttagtgatctgagttcttgagatgacttgctctgtctgacctcagccttgcttcctttctctaaagacctctggtagtgcttcagctgcgtacctggtagggtatgaggcaggcggtcctgccctgcaccctggcccagggtgtgctggccctttgtggggaggaggaggatggtagaagtggcctttctcgcctccttcccagttcagccacactgaggaagatgaggcaggctggctgagaccacagtctgcaggtacttctgtcggggatgttcctgccccaggccctgtgcgaggcagggtttacagtgtttgaggtttgtctgaggcccagctggtcccttattccagagtgcacgagccagggtagaaaccctcatcaggaatggagtgtgaacctgacaggaggcgttccccaagtcccaggggaagccacagacagctgtctaggcaacagtt

SEQ ID NO: 33503 - DNA, 865 bp, Macaca Mulatta
  misc_feature (1)...(865): n = A,T,C or G
gcggttcagcgaggaagaatgcctccaacccagcccaatccaggccagtacgcactcaccaacggggaccccctcaacggccactgctacctgtccggctacatctcgctgctgctgcgcgccgagccctaccccacgtcgcgctacggcagccagtgcatgcagcccaacaacattatgggcatcgagaacatctgcgagctggtggtgcgcctgctcttcagcgccgtcgagtgggcccgcaacatccccttcttcccggatctgcagatcaccgaccaggtgtccctgctacgcctcacctggagcgagctgttcgtgctcaacgcggcccagtgctctatgccgctgcacgtggcgccgctgctggccgccgccggcctgcacgcctcgcccatgtccgccgaccgcgtcgtggccttcatggaccacatccgcatcttccaggagcaggtggagaagctcaaggcgctgcacgtcgactcggccgagtacagctgcctcaaagccatcgtgctgttcacgtcagncagacgcctgtggcctgtcggatgcggcccacatcgagagcctgcaggagaagtcgcagtgcgcactggaggagtacgtgaggagtcagtaccccaaccagcccagccgcttcggcaaactgctgctgcgactgccctcgctgcgcaccgtgtcctcctctgtcatcgagcagctcttcttcgtccgtttggtaggtaaaacccccatcgaaactctcatccgcgatatgttactgtctgggagcagcttcaactggccttacatgtccatccagtgctcctagaccttgggcgcttcccacctgcccccgtccccctagagactcagtggaccc

SEQ ID NO: 33504 - DNA, 832 bp, Macaca Mulatta
gggggcgctggcggaactgtgcgctttgagaccgtaaggagcgtgctgggagcccggaagggaaactacgcagcgaaggtgaccggggaccaagcatttcagatctgcttggtagacctggtgcaccaccaccatgttggctgcaaggcttgtgtgtctccggacactaccttctagggttttccacccagctttcaccaaggcctcccctgttgtgaagaattccatcacgaagaatcaatggctgttaacacccagcagggaatatgccaccaaaacaagaattgggatgcggcgtgggagaactggtcaagaactcaaagaggcagcatttgaaccatcaatggaaaaaatatttaaaattgatcagatgggaagatggtttgttgctggaggggctgctgttggtctgggagcattgtgctactatgggttgggactgtctaatgagattggagctattgaaaaggctgtaatttggcctcagtatgtgaaggatagaattcattccacctatatgtacttagcagggagtgttggtttaacagctttgtctgccatagcaataagcagaacgcctgttctcatgaacttcatgatgagaggctctttggtgacaattggtgtgacctttgccgccatgattggagctggaatgctggtacaatcaataccatatgaccagagcccaggcccaaaacatcttggctgggtgctacattctggtgtgaagggtgcaagggtggctcccctgaaaatattagggggtcctccttctcctcaaaactgcatggtaaacagcctggcatttttggggaggcctctcccctgg

SEQ ID NO: 33505 - DNA, 144 bp, Macaca Mulatta
ggctgaggaggacttgctcaggccgattccaaacattgtgctcgttcaatgcgtagaaatgatttgcatgatggcatgccgtgatcagaagtcatgcatgagatccatacaccacaggacactactaatctagtcccttgcatt

SEQ ID NO: 33506 - DNA, 723 bp, Macaca Mulatta
tttatttctgggtctcgccaggctggctctcacaggatcagactctatgagagggaggactacagaggccagatgatagagttcactgaggactgctcctctcttcaggaccgcttccacttcaatgaaatccactccctcaatgtgctggagggctcctgggtcctctatgagctgcccaactaccgaggacggcagtacctgctgacgccaggggactacaggcgctaccaggactgggggtccatgaatgccagagtgggctctctgaggagagtcatagatttctcctgaaatatgtcctcctttgtcatttcttaatttggaaactaataaaatattttctgtgtgttcctggcactgatttgcttgtgtctttactgtgccctacttctatcttattttatttacacacacaaggcaaatggcaaccaagatgtgtaatacatagataaaggaagttctcacaacagaaatacgtctttatattaagtagaacttaacagtttgccaaagtttcatagtacattaccttatttgattctctggcctttaaacagcttgccgcttcaaaccagattatcagaaatctgtttagatttcagtttttctctgaggcgtgaggacctgaaaacgtaggttcagatagtgtgacgaactttttcaatcagggattctgaacctgggtaccataaggcacgtccatttttgaattctctaaat

SEQ ID NO: 33507 - DNA, 464 bp, Macaca Mulatta
  misc_feature (1)...(464): n = A,T,C or G
gaacacgagggttattttggagctgttggagcactccttgagctgttgaagatcccctgatcgttacctggggaggggttcctgaaaccttccacncatgggatctgtggactttcatttctttaagagacttactcaatttcatgactgtgcactacctgaaacaaagtgagaaaggatgcgtgtatttttctaagtcatcaagataaatccttaagaattcagtctaaactagcaaccaggaaggaaagatatattaaaaacaacaaaaaagtggcccatgtccaagcagtgtgaggatttgctgtatataagttgcctgctttgtatttttgaatctctgcatcactcactggagatgctttagaagagagctgctctgtgttcagttgactgtggttttgtgtcctgtttgaacttgctgaaaatgtaaggctagagctacgaatagtgttaaaatctaa

SEQ ID NO: 33508 - DNA, 1083 bp, Macaca Mulatta
  misc_feature (1)...(1083): n = A,T,C or G
caggcggtggtggtgcctccaggtgggcggacagcctgtgggtctttggaggggagtttgcctctcccaccggagagcagttctaccactacaaggatctctggggcctgcatttggcccccaagacctgggaacaannnnnnnnnnnnnnnnnnnnnnnnnnnnnnnnnnnnnnnnnnnnnnnnnnnnnnnnnnnnnnnnnnnnnnnnnnnnnnnnnnnnnnnnnnnnnnnnnnnnnnnnnnnnnnnnnnnnnnnnnnnnnnnnnnnnnnnnnnnnnnnnnnnnnnnnnnnnnnnnnnnnnnnnnnnnnnnnnnnnnnnnnnnnnnnnnnnnnnnnnnnnnnnnnnnnnnnnnnnnnnnnnnnnnnnnnnnnnnnnnnnnnnnnnnnnnnnnnnnnnnnnnnnnnnnnnnnnnnnnnnnnnnnnnnnnnnnnnnnnnnnnnnnnnnnnnnnnnnnnnnnnnnnnnnnnnnnnnnnnnnnnnnnnnnnnnnnnnnnnnnnnnnnnnnnnnnnnnnnnnnnnnnnnnnnnnnnnnnnnnnnnnnnnnnnnnnnnnnnnnnnnnnnnnnnnnnnnnnnnnnnnnnnnnnnnnnnnnnnnnnnnnnnnnnnnnnnnnnnnnnnnnnnnnnnnnnnnnnnnnnnnnnnnnnnnnnnnnnnnnnnnnnnnnnnnnnnnnnnnnaggggcccaagtctgagaagaagaagcgcaggcggggcagaagagaggagcccgaaggtggcagcaagctggcgtgtgggggagctggcacgcaggcgcctgtggaggtggtcaaggaggtggtgaccgaggatgggaccgtggtcaccattaagcaggtgctctccgccccaggctcggcagggcagccccagtctgaggacgaagacagcctcgaggaggctggcagccccacacctgggccgtgtcctcgctccaacgccatgctggccgtgaagcacggggtgctctacgtctacgggggcatgtttgaggctggcgaccgccaggtcaccctcagcgacctgcactgcctggacctgcacaggatggaggcgtggaaggccttggtggagatggacccag

SEQ ID NO: 33509 - DNA, 823 bp, Macaca Mulatta
  misc_feature (1)...(823): n = A,T,C or G
agatggtcctggtgctgcccaggaacccacgtggctcgcagatgtcccagctgccatggaattcattgctgccactgaggtggctgtcgtaggcttcttccaggnnnnnnnnnnnnnnnnnnnnnnnnnnnnnnnnnnnnnnnnnnnnnnnnnnnnnnnnnnnnnnnnnnnnnnnnnnnnnnnnnnnnnnnnnnnnnnnnnnnnnnnnnnnnnnnnnnnnnnnnnnnnnnnnnnnnnnnnnnnnnnnnnnnnnnnnnnnnnnnnnnnnnnnnnnnnnnnnnnnnnnnnnnnnnnnnnnnnnnnnnnnnnnnnnnnnnnnnnnnnnnnnnnnnnnnnnnnnnnnnnnnnnnnnnnnnnnnnnnnnnnnnnnnnnnnnnnnnnnnnnnnnnnnnnnnnnnnnnnnnnnnnnnnnnnnnnnnnnnnnnnnnnnnnnnnnnnnnnnnnnnnnnnnnnnnnnnnnnnnnnnnnnnnnnnnnnnnnnnagattctctttattctggtggacagtggtatgaaagcaaatgggaaggtgatatcatttttcaaattaaaggagtctcaactgccagctttggcaatttaccggactctagatgatgagtgggatacactgcccaaagtagaagtttccatagagcatgtgcaaaacttttgtgatggattcctaagtggaaaattgttgngaaagaaaatcgtgaatcagaacaaaagactccaaaggtggaactctgacttctccttggtgctgcatatgaccaagtacctactttatgcaaaataaaaaggcacaactcagatctcagagacactacacaacaggatc

SEQ ID NO: 33510 - DNA, 259 bp, Macaca Mulatta
  misc_feature (1)...(259): n = A,T,C or G
tcagtccaaagcatttattaggaaaatgtacttaatgagtgggctacagcatatccttacaacagacagtgggagagagttgttctatctcgatatgtccaaaacaaaggggtcagggtatggagtttatgagggttcaagatatttggttnnnnnnnnnnnnnnnnnnnnnnnnnnnnngagcaacaacctgaataccttttcaaggctctggcttgggctcaagcctccaggggaaatgcagctggccaggtcacag

SEQ ID NO: 33511 - DNA, 3326 bp, Macaca Mulatta
  misc_feature (1)...(3326): n = A,T,C or G
cttttaggaactgtggaaggtgccatggacttgatcttgatcaattccctacctcttgtatctgatgccgaaacatctctcacctgcattgcctctgggtggcacccccatgagcccatcaccataggaagggactttgaagccttaatgaaccagcaccaggatccactggaagttactcaagannnnnnnnnnnnnnnnnnnnnnnnnnnnnnnnnnnnnnnnnnnnnnnnnnnnnnnnnnnnnnnnnnnnnnnnnnnnnnnnnnnnnnnnnnnnnnnnnnnnnnnnnnnnnnnnnnnnnnnnnnnnnnnnnnnnnnnnnnnnnnnnnnnnnnnnnnnnnnnnnnnnnnnnnnnnnnnnnnnnnnnnnnnnnnnnnnnnnnnnnnnnnnnnnnnnnnnnnnnnnnnnnnnnnnnnnnnnnnnnnnnnnnnnnnnnnnnnnnnnnnnnnnnnnnnnnnnnnnnnnnnnnnnnnnnnnnnnnnnnnnnnnnnnnnnnnnnnnnnnnnnnnnnnnnnnnnnnnnnnnnnnnnnnnnnnnnnnnnnnnnnnnnnnnnnnnnnnnnnnnnnnnnnnnnnnnnnnnnnnnnnnnnnnnnnnnnnnnnnnnnnnnnnnnnnnnnnnnnnnnnnnnnnnnnnnnnnnnnnnnnnnnnnnnnnnnnnnnnnnnnnnnnnnnnnnnnnnnnnnnnnnnnnnnnnnnnnnnnnnnnnnnnnnnnnnnnnnnnnnnnnnnnnnnnnnnnnnnnnnnnnnnnnnnnnnnnnnnnnnnnnnnnnnnnnnnnnnnnnnnnnnnnnnnnnnnnnnnnnnnnnnnnnnnnnnnnnnnnnnnnnnnnnnnnnnnnnnnnnnnnnnnnnnagcatgccaccatggtttttatgggccagattgtaagcttaggtgcagctgcagcaatggggagatgtgtgatcgcttccaaggatgtctctgctctccaggacggcagggactccagtgtgagagagaagnnnnnnnnnnnnnnnnnnnnnnnnnnnnnnnnnnnnnnnnnnnnnnnnnnnnnnnnnnnnnnnnnnnnnnnnnnnnnnnnnnnnnnnnnnnnnnnnnnnnnnnnnnnnnnnnnnnnnnnnnnnnnnnnnnnnnnnnnnnnnnnnnnnnnnnnnnnnnnnnnnnnnnnnnnnnnnnnnnnnnnnnnnnnnnnnnnnnnnnnnnnnnnnnnnnnnnnnnnnnnnnnnnnnnnnnnnnnnnnnnnnnnnnnnnnnnnnnnnnnnnnnnnnnnnnnnnnnnnnnnnnnnnnnnnnnnnnnnnnnnnnnnnnnnnnnnnnnnnnnnnnnnnnnnnnnnnnnnnnnnnnnnnnnnnnnnnnnnnnnnnnnnnnnnnnnnnnnnnnnnnnnnnnnnnnnnnnnnnnnnnnnnnnnnnnnnnnnnnnnnnnnnnnnnnnnnnnnnnnnnnnnnnnnnnnnnnnnnnnnnnnnnnnnnnnnnnnnnnnnnnnnnnnnnnnnnnnnnnnnnnnnnnnnnnnnnnnnnnnnnnnnnnnnnnnnnnnnnnnnnnnnnnnnnnnnnnnnnnnnnnnnnnnnnnnnnnnnnnnnnnnnnnnnnnnnnnnnnnnnnnnnnnnnnnnnnnnnnnnnnnnnnnnnnnnnnnnnnnnnnnnnnnnnnnnnnnnnnnnnnnnnnnnnnnnnnnnnnnnnnnnnnnnnnnnnnnnnnnnnnnnnnnnnnnnnnnnnnnnnnnnnnnnnnnnnnnnnnnnnnnnnnnnnnnnnnnnnnnnnnnnnnnnnnnnnnnnnnnnnnnnnnnnnnnnnnnnnnnnnnnnnnnnnnnnnnnnnnnnnnnnnnnnnnnnnnnnnnnnnnnnnnnnnnnnnnnnnnnnnnnnnnnnnnnnnnnnnnnnnnnnnnnnnnnnnnnnnnnnnnnnnnnnnnnnnnnnnnnnnnnnnnnnnnnnnnnnnnnnnnnnnnnnnnnnnnnnnnnnnnnnnnnnnnnnnnnnnnnnnnnnnnnnnnnnnnnnnnnnnnnnnnnnnnnnnnnnnnnnnnnnnnnnnnnnnnnnnnnnnnnnnnnnnnnnnnnnnnnnnnnnnnnnnnnnnnnnnnnnnnnnnnnnnnnnnnnnnnnnnnnnnnnnnnnnnnnnnnnnnnnnnnnnnnnnnnnnnnnnnnnnnnnnnnnnnnnnnnnnnnnnnnnnnnnnnnnnnnnnnnnnnnnnnnnnnnnnnnnnnnnnnnnnnnnnnnnnnnnnnnnnnnnnnnnnnnnnnnnnnnnnnnnnnnnnnnnnnnnnnnnnnnnnnnnnnnnnnnnnnnnnnnnnnnnnnnnnnnnnnnnnnnnnnnnnnnnnnnnnnnnnnnnnnnnnnnnnnnnnnnnnnnnnnnnnnnnnnnnnnnnnnnnnnnnnnnnnnnnnnnnnnnnnnnnnnnnnnnnnnnnnnnnnnnnnnnnnnnnnnnnnnnnnnnnnnnnnnnnnnnnnnnnnnnnnnnnnnnnnnnnnnnnnnnnnnnnnnnnnnnnnnnnnnnnnnnnnnnnnnnnnnnnnnnnnnnnnnnnnnnnnnnnnnnnnnnnnnnnnnnnnnnnnnnnnnnnnnnnnnnnnnnnnnnnnnnnnnnnnnnnnnnnnnnnnnnnnnnnnnnnnnnnnnnnnnnnnnnnnnnnnnnnnnnnnnnnnnnnnnnnnnnnnnnnnnnnnnnnnnnnnnnnnnnnnnnnnnnnnnnnnnnnnnnnnnnnnnnnnnnnnnnnnnnnnnnnnnnnnnnnnnnnnnnnnnnnnnnnnnnnnnnnnnnnnnnnnnnnnnnnnnnnnnnnnnnnnnnnnnnnnnnnnnnnnnnnnnnnnnnnnnnnnnnnnnnnnnnnnnnnnnnnnnnnnnnnnnnnnnnnnnnnnnnnnnnnnnnnnnnnnnnnnnnnnnnnnnnnnnnnnnnnnnnnnnnnnnnnnnnnnnnnnnnnnnnnnnnnnnnnnnnnnnnnnnnnnnnnnnnnnnnnnnnnnnnnnnnnnnnnnnnnnnnnnnnnnnnnnnnnnnnnnnnnnnnnnnnnnnnnnnnnnnnnnnnnnnnnnnnnnnnnnnnnntggtcctacggtgtgttactatgggagattgtcagcttaggnnnnnnnnnnnnnnnnnnnnnnnnnnnnnnnnnnnnnnnnnnnnnnnnnnnnnnnnnnnnnnnnnnnnnnnnnnnnnnnnnnnnnnnnnnnnnnnnnnnnnnnnnnnnnnnnnnnnnnnnnnnnnnnnnnnnnnnnnnnnnnnnnnnnnnnnnnnnnnnnnnnnnnnnnnnnnnnnnnnnnnnnnnnnnnnnnnagacctacgtgaataccacgctttatgagaagtttacttatgcaggaattgactgttctgctgaagaagcggccta

SEQ ID NO: 33512 - DNA, 358 bp, Macaca Mulatta
  misc_feature (1)...(358): n = A,T,C or G
cagataccaaggctattcgagattttattgaagtgggcagttcccttcgagctgagaaccaaagtacaacccttgcctggaccaggaagaaatatgccaatttcacaaatggtgaatattagagatatgtcagacagtgtactgtatcaaaacagaaactaccatttgacaccacggacctcattacatacagcatctagtacaatatacagtaatacaaatccgttaaggagtaatttttctcctcattttgcatcatcaaaccaattgagattatcacaaaaccaaaacaattaccagncagatttcaggaaaccttactgtgccttggattacagggtgttctagaaaaagagca

SEQ ID NO: 33513 - DNA, 2272 bp, Macaca Mulatta
  misc_feature (1)...(2272): n = A,T,C or G
gcctggtcgccttagtcgctggctcctccgagtggccttcgccgcccacctgcgccccgaccagagcgctgggtacgtcgccgtccggcccacgccgcgctcgcgctcccaggctctgggtaagtnnnnnnnnnnnnnnnnnnnnnnnnnnnnnnnnnnnnnnnnnnnnnnnnnnnnnnnnnnnnnnnnnnnnnnnnnnnnnnnnnnnnnnnnnnnnnnnnnnnnnnnnnnnnnnnnnnnnnnnnnnnnnnnnnnnnnnnnnnnnnnnnnnnnnnnnnnnnnnnnnnnnnnnnnnnnnnnnnnnnnnnnnnnnnnnnnnnnnnnnnnnnnnnnnnnnnnnnnnnnnnnnnnnnnnnnnnnnnnnnnnnnnnnnnnnnnnnnnnnnnnnnnnnnnnnnnnnnnnnnnnnnnnnnnnnnnnnnnnnnnnnnnnnnnnnnnnnnnnnnnnnnnnnnnnnnnnnnnnnnnnnnnnnnnnnnnnnnnnnnnnnnnnnnnnnnnnnnnnnnnnnnnnnnnnnnnnnnnnnnnnnnnnnnnnnnnnnnnnnnnnnnnnnnnnnnnnnnnnnnnnnnnnnnnnnnnnnnnnnnnnnnnnnnnnnnnnnnnnnnnnnnnnnnnnnnnnnnnnnnnnnnnnnnnnnnnnnnnnnnnnnnnnnnnnnnnnnnnnnnnnnnnnnnnnnnnnnnnnnnnnnnnnnnnnnnnnnnnnnnnnnnnnnnnnnnnnnnnnnnnnnnnnnnnnnnnnnnnnnnnnnnnnnnnnnnnnnnnnnnnnnnnnnnnnnnnnnnnnnnnnnnnnnnnnnnnnnnnnnnnnnnnnnnnnnnnnnnnnnnnnnnnnnnnnnnnnnnnnnnnnnnnnnnnnnnnnnnnnnnnnnnnnnnnnnnnnnnnnnnnnnnnnnnnnnnnnnnnnnnnnnnnnnnnnnnnnnnnnnnnnnnnnnnnnnnnnnnnnnnnnnnnnnnnnnnnnnnnnnnnnnnnnnnnnnnnnnnnnnnnnnnnnnnnnnnnnnnnnnnnnnnnnnnnnnnnnnnnnnnnnnnnnnnnnnnnnnnnnnnnnnnnnnnnnnnnnnnnnnnnnnnnnnnnnnnnnnnnnnnnnnnnnnnnnnnnnnnnnnnnnnnnnnnnnnnnnnnnnnnnnnnnnnnnnnnnnnnnnnnnnnnnnnnnnnnnnnnnnnnnnnnnnnnnnnnnnnnnnnnnnnnnnnnnnnnnnnnnnnnnnnnnnnnnnatataacaggaactgatgaccaagtacagcaagctatgaactctctcagggagattggatttattaactactatggaatgcaaagatttggaaccacagctgtccctacgtatcaggttggaagnnnnnnnnnnnnnnnnnnnnnnnnnnnnnnnnnnnnnnnnnnnnnnnnnnnnnnnnnnnnnnnnnnnnnnnnnnnnnnnnnnnnnnnnnnnnnnnnnnnnnnnnnnnnnnnnnnnnnnnnnnnnnnnnnnnnnnnnnnnnnnnnnnnnnnnnnnnnnnnnnnnnnnnnnnnnnnnnnnnnnnnnnnnnnnnnnnnnnnnnnnnnnnnnnnnnnnnnnnnnnnnnnnnnnnnnnnnnnnnnnnnnnnnnnnnnnnnnnnnnnnnnnnnnnnnnnnnnnnnnnnnnnnnnnnnnnnnnnnnnnnnnnnnnnnnnnnnnnnnnnnnnnnnnnnnnnnnnnnnnnnnnnnnnnnnnnnnnnnnnnnnnnnnnnnnnnnnnnnnnnnnnnnnnnnnnnnnnnnnnnnnnnnnnnnnnnnnnnnnnnnnnnnnnnnnnnnnnnnnnnnnnnnnnnnnnttcaagaagcctacagggaaatgctcacagctgacaatcttgatattgacaacatgagacacaaaattcgagattattccttgtcaggggcctaccgaaagatcattattcgtcctcagaatgttagctgnnnnnnnnnnnnnnnnnnnnnnnnnnnnnnnnnnnnnnnnnnnnnnnnnnnnnnnnnnnnnnnnnnnnnnnnnnnnnnnnnnnnnnnnnnnnnnnnnnnnnnnnnnnnnnnnnnnnnnnnnnnnnnnnnnnnnnnnntacttacgccaccatggccattcgagaagtgctaaaaatggataccagtatcaagaaccagacgcagctgaatacaacctggcttcgctgagcagtaccttgtccacagattagaaaatgcacacaagtgtttgcttcccggttccctgtgcatttttgtcttagttcagactcatatatggatttcaaatctttgtaataaaaaattatttgt

SEQ ID NO: 33514 - DNA, 850 bp, Macaca Mulatta
gggggtgggagcggcgccgagggagtgtacacgtcggttgcctaacaaccggccgtggactcctttggctatggcctccaactttaagaagacaaacatggcatcaagttcccagagaaaaagaatgagtcctaagcctgagcttactgaagagcagaagcaggagatccgggaagcttttgatcttttcgatgcggatggaactggcaccatagatgttaaagaacttaaggtggcaatgagggccctgggctttgaacctaagaaagaagaaattaagaaaatgataagtgaaattgacaaagaagggacaggaaaaatgaactttggtgactttttaactgtgatgacccagaaaatgtctgagaaagataccaaagaagaaatcctgaaagctttcaagctctttgatgatgatgaaactgggaagatttcgttcaaaaatctgaaacgcgtggccaaggagttgggtgagaacctgactgatgaggagctgcaggaaatgattgatgaagctgatcgagatggagatggagaggtcagtgagcaagagttcctgcgcatcatgaaaaagaccagcctctattaagatcagtgtcttctttttctactgcaagcacatgtaactagatttagtgcctgccattgtgtgaaatctggccttttgagaatacaaacttttcccccactgaacctcccctttatccactttaaatagtgacccttgaagtcctatttttagcctggttttggaaagtgttcctttgatattaacagttccctttgcaaaaatggaccctggcgaaatttaccctaatttctccaaaagcgccaacgctggagccccgct

SEQ ID NO: 33515 - DNA, 3310 bp, Macaca Mulatta
  misc_feature (1)...(3310): n = A,T,C or G
gttaccagtcaccttcaggccattcagaggaggaaagagaggggaatatgaagtcagccaagccccaagtgaaccacagtcagcatggggaaagccagcgggccttgagccccctgcagtctactctgagttctgctgcatctccttcccaagcatatgagacctatattgaaaatggactcatatgccttaaacacaaaattagaaacatcgagaaaaagaannnnnnnnnnnnnnnnnnnnnnnnnnnnnnnnnnnnnnnnnnnnnnnnnnnnnnnnnnnnnnnnnnnnnnnnnnnnnnnnnnnnnnnnnnnnnnnnnnnnnnnnnnnnnnnnnnnnnnnnnnnnnnnnnnnnnnnnnnnnnnnnnnnnnnnnnnnnnnnnnnnnnnnnnnnnnnnnnnnnnnnnnnnnnnnnnnnnnnnnnnnnnnnnnnnnnnnnnnnnnnnnnnnnnnnnnnnnnnnnnnnnnnnnnnnnnnnnnnnnnnnnnnnnnnnnnnnnnnnnnnnnnnnnnnnnnnnnnnnnnnnnnnnnnnnnnnnnnnnnnnnnnnnnnnnnnnnnnnnnnnnnnnnnnnnnnnnnnnnnnnnnnnnnnnnnnnnnnnnnnnnnnnnnnnnnnnnnnnnnnnnnnnnnnnnnnnnnnnnnnnnnnnnnnnnnnnnnnnnnnnnnnnnnnnnnnnnnnnnnnnnnnnnnnnnnnnnnnnnnnnnnnnnnnnnnnnnnnnnnnnnnnnnnnnnnnnnnnnnnnnnnnnnnnnnnnnnnnnnnnnnnnnnnnnnnnnnnnnnnnnnnnnnnnnnnnnnnnnnnnnnnnnnnnnnnnnnnnnnnnnnnnnnnnnnnnnnnnnnnnnnnnnnnnnnnnnnnnnnnnnnnnnnnnnnnnnnnnnnnnnnnnnnnnnnnnnnnnnnnnnnnnnnnnnnnnnnnnnnnnnnnnnnnnnnnnnnnnnnnnnnnnnnnnnnnnnnnnnnnnnnnnnnnnnnnnnnnnnnnnnnnnnnnnnnnnnnnnnnnnnnnnnnnnnnnnnnnnnnnnnnnnnnnnnnnnnnnnnnnnnnnnnnnnnnnnnnnnnnnnnnnnnnnnnnnnnnnnnnnnnnnnnnnnnnnnnnnnnnnnnnnnnnnnnnnnnnnnnnnnnnnnnnnnnnnnnnnnnnnnnnnnnnnnnnnnnnnnnnnnnnnnnnnnnnnnnnnnnnnnnnnnnnnnnnnnnnnnnnnnnnnnnnnnnnnnnnnnnnnnnnnnnnnnnnnnnnnnnnnnnnnnnnnnnnnnnnnnnnnnnnnnnnnnnnnnnnnnnnnnnnnnnnnnnnnnnnnnnnnnnnnnnnnnnnnnnnntcccaagaagcaaactccaaagtcttggacaccttatgtgcagagtgaacagaacaccaccaagtcatggaccactcccatgtgtgaagaacaggattcaaaacagccagagactccaaaatcctgggaaaacaatgacgagagtcaaaaatactcnnnnnnnnnnnnnnnnnnnnnnnnnnnnnnnnnnnnnnnnnnnnnnnnnnnnnnnnnnnnnnnnnnnnnnnnnnnnnnnnnnnnnnnnnnnnnnnnnnnnnnnnnnnnnnnnnnnnnnnnnnnnnnnnnnnnnnnnnnnnnnnnnnnnnnnnnnnnnnnnnnnnnnnnnnnnnnnnnnnnnnnnnnnnnnnnnnnnnnnnnnnnnnnnnnnnnnnnnnnnnnnnnnnnnnnngagtctgttctggactttgacaaaccttcaagtgcaattccatcgtcacaaccgccttcagctactccaggtagccccgtannnnnnnnnnnnnnnnnnnnnnnnnnnnnnnnnnnnnnnnnnnnnnnnnnnnnnnnnnnnnnnnnnnnnnnnnnnnnnnnnnnnnnnnnnnnnnnnnnnnnnnnnnnnnnnnnnnnnnnnnnnnnnnnnnnnnnnnnnnnnnnnnnnnnnnnnnnnnnnnnnnnnnnnnnnnnnnnnnnnnnnnnnnnnnnnnnnnnnnnnnnnnnnnnnnnnnnnnnnnnnnnnnnnnnnnnnnnnnnnnnnnnnnnnnnnnnnnnnnnnnnnnnnnnnnnnnnnnnnnnnnnnnnnnnnnnnnnnnnnnnnnnnnnnnnnnnnnnnnnnnnnnnnnncaaattatcatcctgatggaactattcaagtaagcaatggtagccttgccttttacccagcacagacgaatgtatttcccagacctactcagccatttgtcaatagccggggatctgttagaggatgtactcgtggtgggagattaataaccaattcctatcggtcccctggtggttataaaggtnnnnnnnnnnnnnnnnnnnnnnnnnnnnnnnnnnnnnnnnnnnnnnnnnnnnnnnnnnnnnnnnnnnnnnnnnnnnnnnnnnnnnnnnnnnnnnnnnnnnnnnnnnnnnnnnnnnnnnnnnnnnnnnnnnnnnnnnnnnnnnnnnnnnnnnnnnnnnnnnnnnnnnnnnnnnnnnnnnnnnnnnnnnnnnnnnnnnnnnnnnnnnnnnnnnnnnnnnnnnnnnnnnnnnnnnnnnnnnnnnnnnnnnnnnnnnnnnnnnnnnnnnnnnnnnnnnnnnnnnnnnnnnnnnnnnnnnnnnnnnnnnnnnnnnnnnnnnnnnnnnnnnnnnnnnnnnnnnnnnnnnnnnnnnnnnagccagaacctctaatctggcccctggaactttagaccaacctattgtgtttgatcttcttctgaacaacttaggagaaacttttgatcttcagcttggtagatttaattgcccagtgaatggcacttatgttttcatttttcacatgctaaagctggcagtgaatgtgccactgtatgtcaacctcatgaagaatgaatatgtcttggtatcagcctatgccaatgatggtgctccagaccatgaaactgctagcaatcatgcaattcttcagctgttccagggagaccagatatggttacgtctgcacaggggagcaatttatggaagtagctggaaatattctacgttttcaggctatcttctttatcaagattgaaagtcagtacagtattgacagtaaaaggatgatgttctaattagtgggattgaaggaaaagtagtccttgccttcatgactgattggtttaggaaaatgtttttgttcctagaggaaggaggaggtccttacttttttgttttccttcctaaggtgaaaaatcaagctgaatgacaattagcactaatctggcactttataaattgtgatgtagcctcgctagtcaagctgtgaatgtatattgtttgcacttaatccttaactgtattaacgttca

SEQ ID NO: 33516 - DNA, 3553 bp, Macaca Mulatta
  misc_feature (1)...(3553): n = A,T,C or G
agggaaaagaagccgcgacagcgcagtggggaccatgagaacctgatgaacgtggccttcagacaaggagatgttcagccgttcagttactagcttggcaacagatgctcctgccagcagtgagcagaatggggcactcaccaatggggacnnnnnnnnaggacagtactctgaccttcatgcagcattacgaggaagtccagacatcggcttcggatctgctagattcccaggacagcacggggaagccaaaatgtcatcagtgtagggagctgcccagaatccctcccgagagtgcagtggacaccatgctcacagtgagaagtgcggacggggaccagggcccggggatggaagggccctatgaagtgctcaaggacagctcctcccaagaaaacatggtggaggactgcttgtacgaaactgtgaaagagatcaaggaggtggctgcagctgcacacctggagaaaggccacactggcaaggcaaagcctacttccgcctcgaaagagctcccagggccccagactgaaggcaaagctgagtttgccgaatatgcctcggtggacagaaacaaaaagtgtcgccaaagtgttaatgtagagagtatccttggaaattcatgtgatctagaagaggaggccccaccacctgtccctgttaagcttctggacgagaatgaaaaccttcaggagaaggaagcgggagaggcggaagagagtgccacagacaggaccagtgaaactaacaagnagagatttagctcattgtcatacaagtctcgggaagaagaccccactctcacggaagaagagnnnnnnnnnnnnnnnnnnnnnnnnnnnnnnnnnnnnnnnnnnnnnnnnnnnnnnnnnnnnnnnnnnnnnnnnnnnnnnnnnnnnnnnnnnnnnnnnnnnnnnnnnnnnnnnnnnnnnnnnnnnnnnnnnnnnnnnnnnnnnnnnnnnnnnnnnnnnnnnnnnnnnnnnnnnnnnnnnnnnnnnnnnnnnnnnnnnnnnnnnnnnnnnnnnnnnnnnnnnnnnnnnnnnnnnnnnnnnnnnnnnnnnnnnnnnnnnnnnnnnnnnnnnnnnnnnnnnnnnnnnnnnnnnnnnnnnnnnnnnnnnnnnnnnnnnnnnnnnnnnnnnnnnnnnnnnnnnnnnnnnnnnnnnnnnnnnnnnnnnnnnnnnnnnnnnnnnnnnnnnnnnnnnnnnnnnnnnnnnnnnnnnnnnnnnnnnnnnnnnnnnnnnnnnnnnnnnnnnnnnnnnnnnnnnnnnnnnnnnnnnnnnnnnnnnnnnnnnnnnnnnnnnnnnnnnnnnnnnnnnnnnnnnnnnnnnnnnnnnnnnnnnnnnnnnnnnnnnnnnnnnnnnnnnnnnnnnnnnnnnnnnnnnnnnnnnnnnnnnnnnnnnnnncccaagcacatctccctccccctttctcaccgcccgcaaaagaccccatctgtcagtggtctcttctcattagtgaggaaggccaagctgtatggaaaaactgcactcaccaaggaccgcaaggcccccagcctgaactactgccattcggaaggaccaggtttttcttcccctctttccttttctctctgtctgctattgactttaaggctttttcccccttgaaatgtccagattcctgtggttcattccaaggaaattttcacacgaagcttggcctttgccttcaatgtaggtgttttaggatggcgacaaaccatggctgctgctttctgcccaggtcgccagtcctccccaaagagctgcgcgtcggcacctggggatctggaccctgcagctgaagggactggggagggacgtccctggagtctcttccatctttgttccctcttattttggcactctgtatcagcagcctctccccaaagtacttgaagtcaattttagatgctttattttatttttctagtcaaaaacgtgtttcccccagtgtttgaaaactcatccgagccttttcagtattttccatgagtattgtggtacttctatacttgtttaagcccagaactcattccttcaaaacagagagccttaatctttatgttgggacacagaccacatatttggatggcagccatgcgtccatctccgaagggctgtgcacgtgaatgtgtatttcccatggtctccactgcccacaccaacagtgtggcatctcataagttaactgctaccctaaggtaatctaagattaaaatgtaaacatttatttttgttatgtaagtttataagatgttttatgttcaatgcctaatttctcaaaagtgccagaaaaaaatgtatattaactgttttgattttatgtacaatgatttatactctcctttggaaaagatatcataaagcacataagctagatcattacaaggagctgttatctttttcctaatcaagtgtttaaaacactgatgggttttaaagactcacctttttaaatggtacttggagctcctgatccaaattacctagacccctagagaaataaatggaannnnnnnnnnnnnnnnnnnnnnnnnnnnnnnnnnnnnnnnnnnnnnnnnnnnnnnnnnnnnnnnnnnnnnnnnnnnnnnnnnnnnnnnnnnnnnnnnnnnnnnnnnnnnnnnnnnnnnnnnnnnnnnnnnnnnnnnnnnnnnnnnnnnnnnnnnnnnnnnnnnnnnnnnnnnnnnnnnnnnnnnnnnnnnnnnnnnnnnnnnnnnnnnnnnnnnnnnnnnnnnnnnnnnnnnnnnnnnnnnnnnnnnnnnnnnnnnnnnnnnnnnnnnnnnnnnnnnnnnnnnnnnnnnnnnnnnnnnnnnnnnnnnnnnnnnnnnnnnnnnnnnnnnnnnnnnnnnnnnnnnnnnnnnnnnnnnnnnnnnnnnnnnnnnnnnnnnnnnnnnnnctatggaaagacagcttttcctatattgataaagaaaaaaaaatgaggaaattatttcatcccattgtgacatctgtgactttttggatttaataatcttgctgtttttcttctttatgggcaaagaatataattgggaggatgaaatgtgttaaaaattgtagagaccagctcactggaatgtttttccatccctgtattcatggtttgactttgtgactgctctacattgcattcctgacattgcgaagtgagctatgttnnnnnnnnnnnnnngttgtgattattttgcaatcagcctggtctctcccatgaagatgtcatgagcataaacacaatcatcattgattagaagatcatagcagaatacccttggattagagagaagtttgcaccttgcatttctctgaattccagtctctcataagcactgctttgcctggtgattttcactgctttgtgttaatgactttgactcagcagcctctcacatgatggggttctttagtacatggtaacagccatgtcatcttacacacctaacattgtgcatgctgtagtgatatcctttataggcaccttacagctcaaaacttgtgtttcatttcatgccttacttatcaaaaaggcagggaagtaggtatgatctctaaag

SEQ ID NO: 33517 - DNA, 231 bp, Macaca Mulatta
  misc_feature (1)...(231): n = A,T,C or G
gcatcctgaacaattacctgatctggaacctagtgcaaaagacaacctcaagcctggaccgacgctttgagtctgcacaagagaagctgctggagaccctctatggcactaagaagnnagtcctgtgtgccgaggtggcagacctgcatctccaacacagatgacgcccttggcttcgctttgggctccctcttcgtgaaggccacatttgaccggcaaagcaaagaaatt

SEQ ID NO: 33518 - DNA, 855 bp, Macaca Mulatta
gggctctttccttgcctaacgcagccatggctcgtggtcccaagaagcatctgaagcgggtagcagctccaaagcattggatgctggataaattgaccggtgtgtttgctcctcgtccatccaccggtccccacaagttgagagagtgtctccccctcatcatcttcctaaggaacagacttaagtatgccctgacaggagatgaagtaaagaagatttgcatgcagcggttcattaagatcgatggcaaggtccgaactgatataacctaccctgctggattcatggatgtcatcagcattgacaagacgggagagaatttccgtctgatctatgacaccaagggtcgctttgctgtacatcgtattacacctgaggaggccaagtacaagttatgcaaagtgagaaagatctttgtgggcacaaaaggaatccctcatctggtgactcatgatggcccgcaccatccgctaccccgatccccctcatcaagggtgaaatgataccatttcagattgattttggagactgggaaagaattacttgattttcttcaaagttccgaaaactgggtaaacctgttgtaatgggggacctgggaaggtggctttaccttgggggaaaaaaattgtgatgtggaattcaccccaacctgaaggaagaagggccatccctggaggaatcttttttggacaatggcgtttccacaggtttaaaaaaatgccccaagtgggcccaaacaagacttttttgcccaattatccagaacattttttctcagaaacaattttttgggtttaatgtggcgaaaaaggggggcataaaatacacaagtgggagatctgtgaacagaac

SEQ ID NO: 33519 - DNA, 189 bp, Macaca Mulatta
gtggtgagctttttctctctcaagtcggactcggcgcccccctggatggtgctggctgtgctgtggtgctccatggcacagacgctgctgctgccctccttcatctggtcctgcgagcgctaccgcgccgacgtgcgcacagtgtgggagcaatgcgtggccatcatgtctgaagaggatggagatgac

SEQ ID NO: 33520 - DNA, 853 bp, Macaca Mulatta
gggggcaccagatttgtgacgaatagtccggattagaaaccaagcatctccttttgagtagggagtgagggaggtggtgcttagaaagatggtgctctggggttaggtcctcatgaccacttctgggtttctgccctgcccaccctctggagaaggtgggcactggattagttaacacgtttctagcagtcacttgatctctgtggctttggtttaaaagacagacacttgtccacatgggtttagagataagagttggctggtcaacttgagcatgttactgacagagggggtattggggttattttctgtgatgaacagcatgtcactaaacccggccttctgatattaaattttctccaaagcacacttatacaagcttagagtttcccccgattttgtcgggcgtcgaggtcgttccttaccgaactgccctgttcgcggtcgggctgcctgcccccctgtgctcctcggaaggccatggctgaccggggctggaacgtaaaccgcttggccagctttggacgccggtgggggtgtaggtccaccctgccgcgatgccacctttccgcctgccgccgccccccgcgctagtgcggcccttcccgcccctccgttcggcctccctcggccccgtttcccggctgcgttcgcgggggcggccggcgcactgtcgcggtccggcgaacctccacgcggttgatccctccgcgtgctctcccagttgcccccccgtgccctacactggggggggcgtgcaccgccagccggtgcggcaaccaccggcggcgcgggcctgtgcggaaggagggcacaagcgggttcggggcgaggcacccgcctcgcgcgcaat

SEQ ID NO: 33521 - DNA, 607 bp, Macaca Mulatta
  misc_feature (1)...(607): n = A,T,C or G
ggctgcatggctgagaggttgaaggaggagatcctcaacagggagaaaatggtggatgttttgcctggtcctgatgcctaccgtgaccttccccggnnnnnnnnnnnnnnnnnnnnnnnnnnnnnnnnnnnnnnnnnnnnnnnnnnnnnnnnnnnnnnnnnnnnnnnnnnnnnnnnnnnnnnnnnnnnnnnnnnnnnnnnnnnnnnnnnnnnnnnnnnnnnnnnnnnnnnnnnnnnnnnnnnnnnnnnnnnnnnnnnnnnnnnnnnnnnnnnnnnnnnnnnnnnnnnnnnnnnnnnnnnnnnnnnnnnnnnnnnnnnnnnnnnnnnnnnnnnnnnnnnnnnnnnnnnnnnnnnnnnnnnnnnnnnnnnnnnnnggggctgaaagaagtgacacttcttggtcagaatgttaatagttttcgggacaattcagaggtccagttcaacaatgcagtgtctaccaatctcagccgtggctttaccaccaactataaagccaagcaaggaggacttcgttttgctcatcttctggatcaggtctccagagtagatcctgaaatgaggatccgttttacctctccccaccccaaggattttcccgatgaggt

SEQ ID NO: 33522 - DNA, 748 bp, Macaca Mulatta
  misc_feature (1)...(748): n = A,T,C or G
gaggctgttctggctgttgcgggtggtgaccggcttattcatcggggctgcgatcctggnnnnnnnnnnnnnnnnnnnnnnnnnnnnnnnnnnnnnnnnnnnnnnnnnnnnnnnnnnnnnnnnnnnnnnnnnnnnnnnnnnnnnnnnnnnnnnnnnnnnnnnnnnnnnnnnnnnnnnnnnnnnnnnnnnnnnnnnnnnnnnnnnnnnnnnnnnnnnnnnnnnnnnnnnnnnnnnnnnnnnnnnnnnnnnnnnnnnnnnnnnnnnnnnnnnnnnnnnnnnnnnnnnnnnnnnnnnnnnnnnnnnnnnnnnnnnnnnnnnnnnnnnnnnnnnnnnnnnnnnnnnnnnnnnnnnnnnnnnnnnnnnnnnnnnnnnnnnnnnnnnnnnnnnnnnnnnnnnnnnnnnnnnnnnnnnnnnnnnnnnnnnnnnnnnnnnnnnnnnnnnnnnnnnnnnnnnnnnnnnnnnnnnnnnnnnnnnnnnnnnnnnnnnnnnnnnnnnnnnnnnnnnnnnnnnnnnnnnnnnnnnnnnnnnnnnnnnnnnnnnnnnnnnnnaggctgaaggctttcttcaccagagtgttgatgaagaccccatcctgtagtggagtcctgaggaaggtggactcctgagcccccgttaccggtccgtggccgacagtcctgagccccaggacattcccctatcagaggcttcctccaccaaggcatactgtaaggaggcacaccccgaagatcctgactgtgctctataa

SEQ ID NO: 33523 - DNA, 518 bp, Macaca Mulatta
  misc_feature (1)...(518): n = A,T,C or G
ggtgatgaacccttgggttctcgctccgactgctaaattcacttggcgggtccagcttctcgtggccttactcactacacggatcagaatccggagcagtcagttctttctattctgcagctcctgcggctgccgcgctgacttccctgtgtgcgggagggaactctgggcaggctggttttcttggaatgtgtttacgatattgaatgggacttgaacaggaagctggacgctgcagctggaactagcgtgccaangttatttatgattccatctgatatacataggagagaaagtgatagaagaattctgatggcaactgtatgatagaagctatataaagtcaagtgtccattttctttcaactatatttgagcatacccaggnnnnnnnnnnnnnnnnnnnnnnnnnnnnnnnnnnnnnnnnnnnnnnnnnnnnnnnnnnnnnnnnnnnnngacaaaacatggatgcatacacctgaagctttatctaaacatttcattccctataatgcaaag

SEQ ID NO: 33524 - DNA, 770 bp, Macaca Mulatta
  misc_feature (1)...(770): n = A,T,C or G
gaggtataaataactacatgtaaaattaatgcagttcccgnnnnnnnngatgtccacagaaggaggatttggtggtactagcagcagtgatgcccagcaaagcctacagtcattctggcctcgggtcatggaagaaatccggaatttaacagtnnnnnnnnnnnnnnnnnnnnnnnnnnnnnnnnnnnnnnnnnnnnnnnnnnnnnnnnnnnnnnnnnnnnnnnnnnnnnnnnnnnnnnnnnnnnnnnnnnnnnnnnnnnnnnnnnnnnnnnnnnnnnnnnnnnnnnnnnnnnnnnnnnnnnnnnnnnnnnnnnnnnnnnnnnnnnnnnnnnnnnnnnnnnnnnnnnnnnnnnnnnnnnnnnnnnnnnnnnnnnnnnnnnnnnnnnnnnnnnnnnnnnnnnnnnnnnnnnnnnnnnnnnnnnnnnnnnnnnncaggaggaggtgcgccagtctgtaactcctgccgagccagtccagtactatttcacgctggctcagcagcccaccgctgtccaagtccagggccagcagnnnnnnnnnnnnnnnnnnnnnnnnnnnnnnnnnnnnnnnnnnnnnnnnnnnnnnnnnnnnnnnnnnnnnnnnnnncagaccacacctgtgacaatgcaggttggagaaggtcagcaggtgcagattgtccaggcccagccacagggtcaagcccagcaggcccagagtagcactggacagaccatgcaggtgatgcagcagatcatcactaacacgggagagatccagcagatcccggt

SEQ ID NO: 33525 - DNA, 908 bp, Macaca Mulatta
atggacggggccaatgacagctccttgaagggctttgttctgatgggcatatctgaccatccccagctcggagatgatctttttcatagccatcgttttctcctattagctgaccctacttgggaactcagtcatcatcttgctttcctgcctggatgcccggctccacacacccatgtacttcttcctcagcaacctctcctccttggaccttgctttcactactagctcagtcccccaaatgctgatcaatttatggggaccagacaagaccatcagctatggtggctgcgtgacccagctctatgtcttcctttggctgggggccaccgagtgcatcctgctcatggtgatggcatttgaccactacgtggcagtgtgtcggcccctccgctacaccaccatcatgaacccccagctctgctggctgctggctgtgattgcctggctgggtggcttgggcaactctgtgatccagtcaacattcactctgcagctccccattgtgtgggcaccggagggtggagagcttcctctgtgaggtgcctgccaagatcaaagtggcctgtggcgacatgagcctcaaggaggctgtgctcaatggtgtctgcaccttcttcactgcagtcccactaagcatcatcctgatctcctactgcctcactgctcaggcagtgctgaaaatccactctgcagaggggaggcgaaaggcctttcaatacatgcctctcccacctgctggtggtgttcctcttctatggctcagccagctatggctatctgcttccggccaagaacaacaaacaggaccaagggcaagtttcatttccctgttctactcaatggtcacgcccatggggaatcctcccatccaccccctgcggaaattgaaatgaagggcgcactga

SEQ ID NO: 33526 - DNA, 434 bp, Macaca Mulatta
  misc_feature (1)...(434): n = A,T,C or G
tccggggatcctcgtgagatctcgggggtcccaccgccctgcgagccgcgccggcgccccgccagacccggaactgnnnnnnagaacgtcgggacctggttccctctttacatccctgggggcgcttcgtgtgaggttccacgggagaaggcgggcgagaggcacaggcggccacacacnnnnnnnnnnnnnnnnnnnnnnnnnnnnnnnnnnnnnnnnnnnnnnnnnnnnnnnnnnnnnnnnnnnnnnnnnnnnnnnnnnnnnnnnnnnnnnnnnnnnnnnnnnnnnnnnnnnnnnnnnnnnnnnnnnnnnnnnnnnnnnnnnnnnnnnnnnnnnnnnnnnnnnnnnnnnnnnnnnnnnnnnnnnnnnnnnnnnngaggctgttctggctgttgcgggtggtgaccggcttattcatcggggctgcgatcctg

SEQ ID NO: 33527 - DNA, 2104 bp, Macaca Mulatta
gggggatcgactagtggagggacagaccaagcacgcaaaacaaattgcaatataatgtgataagttctttaaaagaggtaagagcaacgtgctttgggagcagagaagagggagaaagcagtatcctgcctggatgagccaggggacacagaagacaagcccactatctcatttaatctttacaacactcttgcaaggttccctggttgtgaaaatacatgagataagtcatgaaggtcactatcatcctccttctgcttgcacaagtttcctgggccggaccgtttcaacagagaggcttatttgactttatgctagaagatgaggcttctgggataggcccagaacttcctgatgaccgcgactatgagccccctctaggcccagtgtgccccttccgctgtcaatgccatcttcgagtggtccagtgttctgacttgggtctggacaaagtgccaaaggatcttccccctgacacaactctgctagacctgcaaaacaacaaaataactgaaatcaaagatggagactttaagaacctgaagaaccttcacgcattgattcttgtcaacaataaaattagcaaaattagccctggagcatttacacctttggtgaagttggaacgactttatctgtccaagaatcagctgaaggaattgccagaaaaaatgcccaaaactcttcaggagctgcgtgcccatgagaatgagatcaccaaagtgcgaaaaactactttcaatggactgaaccagatgattgtcatagaactgggcaccaaatccgctgaagagctcaggaaattgaaaatgggggctttccagggaatgaagaagctctccctacatccgcattgctgataccaatatcaccagcattcctcaaggtcttcctccttcccttactgaattacatcttgatggcaacaaaatcagcagagttgatgcagctagcctgaaaggactgaataatttggctaagttgggattgagtttcaacagcatctctgttgtcgacaatggctctctggccaacacgcctcatctgagggagcttcacttggacaacaacaagcttaccagagtacctggtgggctggcagagcataagtacatccaggttgtctaccttcataacaacaatatctctgtagttggatcaagtgacttctgcccacctggacacaataccaaaaaggcttcttattcgggtgtgagtcttttcagcaacccggtccagtactgggagatacagccatccaccttcagatgtgtctacgtgcgctctgccattcaactcggaaactataagtaattctcaagaaagccctcatttttataacctggcaaaatcttgttaatgtcattgctaaaaaataaataaaagctagatactggaaacctaactgcaatgtggatgttttacccacatgacttattatgcataaagccaaatttccagtttaagtaattgcctacaataaaaagaaattttgcctgccattttcagatcatcttttgaagctttctgttgatgttaactgagctattagagatattcttatttcactaaatgtaaaatttggagtaaatatatatgtcaatatttagtaaagcttttctttttgaatttccagaaaaaaataaaaaagagttatggagtcttctgtaaattcacttggaggcagtttagcctctttttggaaataaagccaaatgccaaacactaacttctggattaatcccccattattacggggaaacccctcttttgaatgggggaaattccaatcaagggctcattttaaaaattttcgggtaagcgcccctcttttctggaacaaccaacctttacaaaattcccctccccaactatccctttgttataccaaccccccctaacggtggtacccaccccccccaaacccctttttttcctcccagtagaggaacaacctttggccctttggttggaccaaataaacaggatatttcccttctttcagaggctctcctcacccaaatgtctgtttttatacccctttcgtctgggggctgctagctcattgagacgtcccgggggaacacctcttcacactcgcgga

SEQ ID NO: 33528 - DNA, 142 bp, Macaca Mulatta
ttttccttccgtggactgcgctccacagctcctgagtggggtgcagcgtgtgttagcacaagccagaaatttggtcgtaaagatgctgtttctcttcacatttcttaaatggactgggcttcgaaaatcacttctgtaacac

SEQ ID NO: 33529 - DNA, 3114 bp, Macaca Mulatta
  misc_feature (1)...(3114): n = A,T,C or G
gagccccacaatgaagatccaggagcatcccagcctatctgacactaaacagcagaggaatcaagatgccggtgaccagcaggagagctttgtctccgaagtgccccagttggacctgactgcattgtgtgatgaaaagaactggnnnnnnnnnnnnnnnnnnnnnnnnnnnnnnnnnnnnnnnnnnnnnnnnnnnnnnnnnnnnnnnnnnnnnnnnnnnnnnnnnnnnnnnnnnnnnnnnnnnnnnnnnnnnnnnnnnnnnnnnnnnnnnnnnnnnnnnnnnnnnnnnnnnnnnnnnnnnnnnnnnnnnnnnnnnnnnnnnnnnnnnnnnnnnnnnnnnnnnnnnnnnnnnnnnnnnnnnggcggcgaagctcctccctggggtcctacgatgatgagcaagaggacctgacgcctgcccagctcacacgaaggattcagagccttaaaaagaagatccggaagtttgaagatagatttgaagaagagaagaagtacagannnnnnnnnnnnnnnnnnnnnnnnnnnnnnnnnnnnnnnnnnnnnnnnnnnnnnnnnnnnnnnnnnnnnnnnnnnnnnnnnnnntcaaaactaaagatatctgaagaggacctaactcccaggatgcggcagcgaagcaacacacttcccaagagttttggttcccagcttgagaaagaagatgagaagaagcaagagctggtagataaagcaataaagcccagtgttgaagccacgttggaatctattcagaggaagctccaggagaagcgagcggaaagcagccgtcctgaggacattaagnnnnnnnnnnnnnnnnnnnnnnnnnnnnnnnnnnnnnnnnnnnnnnnnnnnnnnnnnnnnnnnnnnnnnnnnnnnnnnnnnnnnnnnnnnnnnnnnnnnnnnnnnnnnnnnnnnnnnnnnnnnnnnnnnnnnnnnnnnnnnnnnnnnnnnnnnnnnnnnnnnnnnnnnnnnnnnnnnnnnnnnnnnnnnnnnnnnnnnnnnnnnnnnnnnnnnnnnnnnnnnnnnnnnnnnnnnnnnnnnnnnnnnnnnnnnnnnnnnnnnnnnnnnnnnnnnnnnnnnnnnnnnnnnnnnnnnnnnnnnnnnnnnnnnnnnnnnnnnnnnnnnnnnnnnnnnnnnnnnnnnnnnnnnnnnnnnnnnnnnnnnnnnnnnnnnnnnnacctgaactcctggaacacctccaggaaatgagagaagaaaagaaaaggattcgaaagaaaattcgggattttgaagacaacttnnnnnnnnnnnnnnnnnnnnnnnnnnnnnnnnnnnnnnnnnnnnnnnnnnnnnnnnnnnnnnnnnnnnnnnnnnnnnnnnnnnnnnnnnnnnnnnnnnnnnnnnnnnnnnnnnnnnnnnnnnnnnnnnnnnnnnnnnnnnnnnnnnnnnnnnnnnnnnnnnnnnnnnnnnnnnnnnnnnnnnnnnnnnnnnnnnnnnnnnnnnnnnnnnnnnnnnnnnnnnnnnnnnnnnnnnnnnnnnnnnnnnnnnnnnnnnnnnnnnnnnnnnnnnnnnnnnnnnnnnnnnnnnnnnnnnnnnnnnnnnnnnnnnnnnnnnnnnnnnnnnnnnnnnnnnnnnnnnnnnnnnnnnnnnnnnnnnnnnnnnnnnnnnnnnnnnnnnnnnnnnnnnnnnnnnnnnnnnnnnnnnnnnnnnnnnnnnnnnnnnnnnnnnnnnnnnnnnnnnnnnnnnnnnnnnnnnnnnnnnnnnnnnnnnnnnnnnnnnnnnnnnnnnnnnnnnnnnnnnnnnnnnnnnnnnnnnnnnnnnnnnnnnnnnnnnnnnnnnnnnnnnnnnnnnnnnnnnnnnnnnnnnnnnnnnnnnnnnnnnnnnnnnnnnnnnnnnnnnnnnnnnnnnnnnnnnnnnnnnnnnnnnnnnnnnnnnnnnnnnnnnnnnnnnnnnnnnnnnnnnnnnnnnnnnnnnnnnnnnnnnnnnnnnnnnnnnnnnnnnnnnnnnnnnnnnnnnnnnnnnnnnnnnnnnnnnnnnnnnnnnnnnnnnnnnnnnnnnnnnnnnnnnnnnnnnnnnnnnnnnnnnnnnnnnnnnnnnnnnnnnnnnnnnnnnnnnnnnnnnnnnnnnnnnnnnnnnnnnnnnnnnnnnnnnnnnnnnnnnnnnnnnnnnnnnnnnnnnnnnnnnnnnnnnnnnnnnnnnnnnnnnnnnnnnnnnnnnnnnnnnnnnnnnnnnnnnnnnnnnnnnnnnnnnnnnnnnnnnnnnnntcaaataccaagccaggccagcatgcttatggcaacctgtttggggctgttttgttgtggcactagccaaacataaaggggcttgcttaagtcctagcctgcatacagaggatcaggggagagaaggggcctgtgttcccagcctcctgagtacttaccagagtttaatttttaaaaaaatatctgcactaaaatacccaaactgacgggtaaatgtagccctcagagctcagcccaaggcagaatctaaatgacactattttcgagatcgtgtannnnnnnnnnnnnnnnngtcattctgtctggccaattataatttttttcaaagactgtcacaaagctgtctatattagacattttggagggaccaggaaatgtaagacaccaaatcatccatctcttcagtgtgcttgacgtcaccttgtgatgtgttgttactttaactcctgcgcctgcgctgaggacagcgggttctgggtccacctttgtgctctgcgaggccgagcccaggcatctgcccgcccgccatggctgaccagagaaggtgcttcaggagctctgcctttgacgacaagtgtcacaggatgaacacacagcagagccaccctcctgtatgttttgaaagttgccttcttaaagggcacagttttaaggaaaagaaaaagaatgtaaaactatactgaccagttttcagttttaaagggtcgtgagaaactggctggtctaatgggattgacagcaacattttccattgctgaagtgaggtagcagctctcctctgtcagctgcatgttaagtcaaggatggggaaaaagaatgcctttaagtttgctcttaatcgtatggaagcttgagctatgtgttggaagtgccctggttttaatcc

SEQ ID NO: 33530 - DNA, 279 bp, Macaca Mulatta
  misc_feature (1)...(279): n = A,T,C or G
gttgctttttaattaacacagcagatcgaataatcagagtttatgatggcagagaaatcttaacatgtggaagagatggagagcctgaacctatgcagaaattgcaggatttggtgaataggntaggaccccatggaagaaatgttgtttctctggggatggggaatacatcgtggcaggttctgcgcgacagcacgccctgtacatctgggagaagagcattggcaacctggtgaaaattctccatgggacgagaggagaactcctcttggatgtagc

SEQ ID NO: 33531 - DNA, 938 bp, Macaca Mulatta
ccggctctttccggccctgtctgtctccacagaggtccagttccggccgtaccgcacagatgacttcatcacgcgcctgtactacgagacacccaggttcacagtgctgaaccagacgtgggtcctgaaggctcgcgtcaatgactcggagcgcaaccccaacctgtcgtgcaagcgtacgctgtcctttcagctcctcctcaagagcaaggtcacagcaccactggagtgctccttcctgctgctcaagggcccctacgatgacgtgaggatcagccctgtcatctaccacttcgtcttcaccaacgagagcaacgagacggactacgtgccactgcccatcattgactccgtggagtgcaacaagctgctggccgccaagaacatcaacctgcggctcttcctgttccagatacagaagtagggcagggcctcaggacgcccaaggagctgacgggcagcatcccagcaccgctgccctgtccacctggctggcagctgcttcacgggactatctgatcattttagcaaaggaggagaacaaacgaagccaacacagggcaagtctgcatgtgtgcgtgacaggacccccgcctccggctcaccccccgacccctgcctcccctccttccgagggccgccagaggctgggctgacccgaagaggagatggtgcaccaggcaccccgaggctcagagacggtggcagcaaggaggccgagaggcacagcgaccctgccccagcccttcggtgcagtcaggcggcagggctgctccatccctgcgggttccggccgggcgcgggggccttgctgacgtcagacgggatatccgaatatctgatagcaattaaaaggcagccttgtttcgtactttctgttttgttcgaggggaaggcatggctgtgaatggacagcgtgggagctttggttggcctgg

SEQ ID NO: 33532 - DNA, 286 bp, Macaca Mulatta
ggatgtctatagatgtgtttgtttagaagtgggtacatattgaagataagactgttcttcagaatcatgttaactattgggttgtgactgaagtaatccagggtttgccttgaaaccattacattctacatttaccaaattaaacaaataaaactgtattaaatgttgcattcattttgtcatcttctttaaccagctcagattatttgatgtatagaactttgtgagaatgtgataaaaacccagaattggacacagtgataaaaagttgcttttaagaaagttg

SEQ ID NO: 33533 - DNA, 1463 bp, Macaca Mulatta
  misc_feature (1)...(1463): n = A,T,C or G
ttataggaactcctacaagaagaacatctgtgtggacatgctgcgagatggttatcataagtccttcacggagctcttcgctctgatggagcagtgggatgccctgagggaggctgcgagagtcaggtccctcttctggctgcagaagcccctggaggagcagcctgataaactggattacttctaccattacctgaccagggctgaggacgctgagagnnaagaatccttcgaagatgtatataacaacttgtatgctctggccctgttacttcaataaccctgaagacaagtgggtaaggaaccacttcttatgaacgatgttttaagattgctcagctgatcaaaattgacggtgggaagaaagaagccgaggcacacatgcatatgggtcttctctacgaggaagatggtnnnnnnnnnnnnnnnnnnnnnnnnnnnnnnnnnnnnnnnnnnnnnnnnnnnnnnnnnnnnnnnnnnnnnnnnnnnnnnnnnnnnnnnnnnnnnnnnnnnnnnnnnnnnnnnnnnnnnnnnnnnnnnnnnnnnnnnnnnnnnnnnnnnnnnnnnnnnnnnnnnnnnnnnnnnnnnnnnnnnnnnnnnnnnnnnnnnnnnnnnnnnnnnnnnnnnnnnnnnnnnnnnnnnnnnnnnnnnnnnnnnnnnnnnnnnnnnnnnnnnnnnnnnnnnnnnnnnnnnnnnnnnnnnnnnnnnnnnnnnnnnnnnnnnnnnnnnnnnnnnnnnnnnnnnnnnnnnnnnnnnnnnnnnnnnnnnnnnnnnnnnnnnnnnnnnnnnnnnnnnnnnnnnnnnnnnnnnnnnnnnnnnnnnnnnnnnnnnnnnnnnnnnnnnnnnnnnnnnnnnnnnnnnnnnnnnnnnnnnnnnnnnnnnnnnnnnnnnnnnnnnnnnnnnnnnnnnnnnnnnnnnnnnnnnnnnnnnnnnnnnnnnnnnnnnnnnnnnnnnnnnnnnnnnnnnnnnnnnnnnnnnnnnnnnnnnnnnnnnnnnnnnnnnnnnnnnnnnnnnactacaacaaagcttctcaacgctttcagcaagcttttgacacaacagtagagctaatgagcatgcctctgatggatgagacaaaagttcactatggaatagcaaaagctcatcagatgatgcttacagtgaacaactatatagagtctgcagatctcaccagcctcaactacctgctgtcatggaaggagagcagaggtgacattgaacctgatccagttactgnnnnnnnnnnnnnnnnnnnnnnnnnnnnnnnnnnnnnnnnnnnnnnnnnnnnnnnnnnnnnnnnnnnnnnnnnnnnnnnnnnnnnnnntgaaacttaaagcagcttttcacttaacatcaaagcgagaagaaatccatcatgtcaccttagacttcaatacttgtaatagaaacatgttacagacaatataaagttataaaaaaactgactgtgactcttttca

SEQ ID NO: 33534 - DNA, 513 bp, Macaca Mulatta
ttgaatttgcccttctgcggtcccagtgttatagacagctttttctgtgaccttccccttgtgattaaacttgcctgcaaggacacctacatcctacagctcctggtcattgctgacagtgggctcctgtcactggtctgcttcctcctcttgcttctctcctatggagtcataatattctcagttaggcaccgtgctgctagtcgatcctctaaggctttctctactctctcagctcacatcacagttgtgactctgttctttgctccatgtgtctttatctatgtatggcctttcagcagatactctgtagataaaattctttctgtgttttacacaattttcacacctctcttaaatcctattatttatacattaagaaatcaagaggtaaaagcagccattaaaaaaatactctgcatataaatgtaaaacatactttttagttgacacttttgaagagacactgtcttgtttgtttgaacatttaagaaactcatttttaatgtatca

SEQ ID NO: 33535 - DNA, 1668 bp, Macaca Mulatta
  misc_feature (1)...(1668): n = A,T,C or G
ctgacactatccaagccaaccctgtaccaacccatctctcattggtcaactctgcccaagccagccccatgccagttgactctgttgaagctgatcccactgcagttggctctgttctagctggccctgtacctgttgaccctgggttggttgaccttgcttcaaccagttcagaactggttgagcctctccctgctgggccagtgctgatcaacccagtcctggctgactcagcagcagttgaccctgcagtggttcccatctcagataacttgccaccagttgatgctgtcccatctggcccagcaccagttgatctagcactagttgaccctgttcctaatgacctgactgcagttgacccagtgctagttaagtccagaccaactgatcccagacgtgctgcagtgtcatcagccctggggggtccagccccccagctcctcctggagtcagagtccttggacccaccaaagaccatcatccctgaagtcaaagaggttgtggattctctgaaaattgaaagtggtaccagtgctacaacccatgaagccagacctcggcctctcagcttatctgaataccggcgacgaaggcagcaacgccaagcagaaacagaagagagaagtccccagcccccaactgggaagtggcctagccttccagagactcccacaggactggcagacatcccttgtcttgtcatcccaccagccccagccaagaagacagctctacagagaagccctgaagcgccccctgagacttgccttgtgcctgtaggtcccagccctgcttctcctggtcctgagccacctgtaagcaaatctgtggcctcagctctcactgagcannnnnnnnnnnnagatgccattgttggcgagaccttcctctcctgtgcagtctgtgtcccctggttgtgcccacacctcctgcaatgcctactgccctgtctttccctgcaggtgggctgggcataccccccagtctgccgccacctcccttgcagcctcctagtcttccagtgtctatgggtccagtcctacctgatccatttactcactatgcccccatgccaccctggccttgttatcctcctgtgtccccttctggctatccttgcctgccccccccaccgacagtgcccctagtgtctggtactcctggcgcctatgccatgcctcccacttgcaatgtgccttgggcacccccacctgccccagtctcaccttacagttccacctgtacctatgggtccttgggatggggcccagggcctcaacatgctccattctggtctactgtacccccgcctcctttgcctccagcctccgttgggagagctgttccccaagctaagatggagtctaggggcactccagctggccctcctgaaaatgtacttcccgtgtcgatgactcctcccctcagtgggctacctggccacggagctccacagatagagcctaccaaggtggaggtcaagccagtgcttgcatctccccatccgaaacataaggtgtctgccctggtgcaaagtccccggctgaaggctccagcggctccagcatgtgtgtctgctgaaggtgtgactgttgaggagcctgcatcagaggggctaaagcctgagacccaggagaccaggcccagggagaagccccccttgcc

SEQ ID NO: 33536 - DNA, 627 bp, Macaca Mulatta
ctcccggaagtggagggtctacacgaagcgccgctgggtctgggtgcccggaggcagcagcgttcgcggagttcgcccgccggcctccgatcgccatgtcggctttcgacaccaaccccttcgcggacccagtggatgtaaaccccttccaggatccctctgtgacccagctgacgaacgccccgcagggcggcctggcggaattcaaccccttctcagagacaaatgcagcgacaacagttcctgtcacacaactccctgggtcctcgcagccagcggttctccagccatcagtggaaccaacccagccgaccccccaggctgcggtgtctgcagcccaggcaggcctgcttcggcagcaggaagaactggacaggaaagctgctgagctggaacgcaaggagcgggagctgcagaacactgtagccaacttgcatgtgagagagaactggccccccctgccctcgtggtgccctgtgaagccctgcttctatcaggatttctccacagagatccctgccgactaccagcggatatgcaagatgctctactatctgtggatgttgcattcagtgactctgtttctgaacctgcttgcctgcctggcctcgttctcgggtgacagct

SEQ ID NO: 33537 - DNA, 929 bp, Macaca Mulatta
actcagtaaaagtgattctagcaatagtgatccactcagagtcagaagtctggcaggaactcgaacccccggcaagcacgcaactaaatcccgaaatacaaaaagtaacatcagtggacttcctattaagacttacttgcattgctggactagcaaaggaaaattgcactattgcacatcatattctattgtttactacaaaaatcatgtggtaactgattattacttctatttctcttttggtttctgcttttcccttcccccaacccctttgtaatggtttgggggcagactcttaaatatattgtgagttttctatttcactaatcataagaaaaactgttcttttgcaataataataaattaaacatgctgataccagaggctctttgctggagtccccagatgttaatttactttctgcaccccacttgggaatgcaatattggatgcaaagagaggtttctggtatacacagaaagctagatatgccgtaaaacatactctgtcgatctaattacagccttatttttgtatgccttttggccattctcctcctgcttaggcttccaaatgtttataaaggtaaaatggcagtttgaaatcaaatgtgacacaggcaaagcaatcaagcaccaggaagcgtttatgaggaaacaacacacacaagatgaattatttttgagattggcaggaagcaaaataaataggagcttaagaaagaacattttgcctgactgagaagcacaactgaaaccagtagccgctggggtgttaatggtagcattcttcttttggcaatacatttgacttgttcatgaatatattaatcagcattagggaaacgaattataactagacatctgctgttatcaccatagttttgtttaatttgcttccttttaaataaactcattggtgaaagtctt

SEQ ID NO: 33538 - DNA, 2869 bp, Macaca Mulatta
  misc_feature (1)...(2869): n = A,T,C or G
gctatcttggtgatccacaaagaaatgtcagagtacttaaaactcatttgctggccttacaaaatatggccaaacctaagcaagcagcctgctatttggttcgtattttgttctcccaggaaatcctgattaacaactcagtggatatccatttgaaagacagccagtcccttgacccacacaaaatggctgcattgagagnnnnnnnnnnnnnnnnnnnnnnnnnnnnnnnnnnnnnnnnnnnnnnnnnnnnnnnnnnnnnnnnnnnnnnnnnnnnnnnnnnnnnnnnnnnnnnnnnnnnnnnnnnnnnnnnnnnnnnnnnnaaactgttcgcaaaaataaaaagcttaccaaccctgttgcaccagcatctgcagacagaaatgaccatagggacagagatggtggtgaaggcagttcttggatgtttcagccaatgaattattctgaaatgagagaaaaggggaacttgcagccaaacagtaattctatccctgaagaaatgcaagagccttccactgataatccagaggaacctggtgaagcatggnnnnnnnnnnnnnnnnnnnnnnnnnnnnnnnnnnnnnnnnnnnnnnnnnnnnnnnnnnnnnnnnnnnnnnnnnnnnnnnnnnnnnnnnnnnnnnnnnnnnnnnnnnnnnnnnnnnnnnnnnnnnnnnnnnnnnnnnnnnnnnnnnnnnnnnnnnnnnnnnnnnnnnnnnnnnnnnnnnnnnnnnnnnnnnnnnnnnnnnnnnnnnnnnnnnnnnnnnnnnnnnnnnnnnnnnnnnnnnnnnnnnnnnnnnnnnnnnnnnnnnnnnnnnnnnnnnnnnnnnnnnnnnnnnnnnnnnnnnnnnnnnnnnnnnnnnnnnnnnnnnnnnnnnnnnnnnnnnnnnnnnnnnnnnnnnnnnnnnnnnnnnnnnnnnnnnnnnnnnnnnnnnnnnnnnnnnnnnnnnnnnnnnnnnnnnnnnnnnnnnnnnnnnnnnnnnnnnnnnnnnnnnnnnnnnnnnnnnnnnnnnnnnnnnnnnnnnnnnnnnnnnnnnnnnnnnnnnnnnnnnnnnnnnnnnnnnnnnnnnnnnnnnnnnnnnnnnnnnnnnnnnnnnnnnnnnnnnnnnnnnnnnnnnnnnnnnnnnnnnnnnnnnnnnnnnnnnnnnnnnnnnnnnnnnnnnnnnnnnnnnnnnnnnnnnnnnnnnnnnnnnnnnnnnnnnnnnnnnnnnnnnnnnnnnnnnnnnnnnnnnnnnnnnnnnnnnnnnnnnnnnnnnnnnnnnnnnnnnnnnnnnnnnnnnnnnnnnnnnnnnnnnnnnnnnnnnnnnnnnnnnnnnnnnnnnnnnnnnnnnnnnnnnnnnnnnnnnnnnnnnnnnnnnnnnnnnnnnnnnnnnnnnnnnnnnnnnnnnnnnnnnnnnnnnnnnnnnnnnnnnnnnnnnnnnnnnnnnnnnnnnnnnnnnnnnnnnnnnnnnnnnnnnnnnnnnnnnnnnnnnnnnnnnnnnnnnnnnnnnnnnnnnnnnnnnnnnnnnnnnnnnnnnnnnnnnnnnnnnnnnnnnnnnnnnnnnnnnnnnnnnnnnnnnnnnnnnnnnnnnnnnnnnnnnnnnnnnnnnnnnnnnnnnnnnnnnnnnnnnnnnnnnnnnnnnnnnnnnnnnnnnnnnnnnnnnnnnnnnnnnnnnnnnnnnnnnnnnnnnnnnnnnnnnnnnnnnnnnnnnnnnnnnnnnnnnnnnnnnnnnnnnnnnnnnnnnnnnnnnnnnnnnnnnnnnnnnnnnnnnnnnnnnnnnnnnnnnnnnnnnnnnnnnnnnnnnnnnnnnnnnnnnnnnnnnnnnnnnnnnnnnnnnnnnnnnnnnnnnnnnnnnnnnnnnnnnnnnnnnnnnnnnnnnnnnnnnnnnnnnnnnnnnnnnnnnnnnnnnnnnnnnnnnnnnnnnnnnnnnnnnnnnnnnnnnnnnnnnnnnnnnnnnnnnnnnnnnnnnnnnnnnnnnnnnnnnnnnnnnnnnnnnnnnnnnnnnnnnnnnnnnnnnnnnnnnnnnnnnnnnnnnnnnnnnnnnnnnnnnnnnnnnnnnnnnnnnnnnnnnnnnnnnnnnnnnnnnnnnnnnnnnnnnnnnnnnnnnnnnnnnnnnnnnnnnnnnnnnnnnnnnnnnnnnnnnnnnnnnnnnnnnnnnnnnnnnnnnnnnnnnnnnnnnncataccccataaatacacgcagttatcatttgtcaattaaaaataattttcttaaaagaaaaatacaattcgaccctaggcaagaagaaatttcaaattgtatatgcagattttgaatttggttaatattttgtggtatctgaaatattccctggactagaagcaaaaccacagaaacaaaactttacatttagaagaaaatttccagacttctattgctaactttattacattagtggttttcagaagtcatttaaagcagtcttgtctgatagaactttccaccatgatggaaatgtaaataaacataccacattaaaaatataaatttgcaatgtccaataggcttgtatggctattgagcacttaagatgtaactaattagacagaggaagtaaatttaaaattttctctcattttagctaattagaatttaaattgaaatagtcacaagtggatagtggctactgggttggatggcacagttcaaaatgccccttatttnnnnnnnnnnnnnttaaaagtcgttcccatggcttgaagaggaataacatacacataacttctttaaaatcacattttgtttgagatggagatcttgctatattgcccaggcttatctggaactcctgggctcaagagggaggatcacatttgactggacaaaataaattttatgaagatgttttgtactttatgttaaagtgga

SEQ ID NO: 33539 - DNA, 440 bp, Macaca Mulatta
cttctgtatcagaaatgaaacagaccctcaaattaactttccttcctcgtttcttgaggcttctgcttccaacaggcacctctaatcagaccttttctttgaaattcaagatttcttaatgctatttgcaagaccatttcacagaaaacattgactgtggctcttgccttctatgttcctttttaggtagaaacaattgtgacagcagtttgagctttgctggagagtgggatcatggggacaaaatgaaacctctctccaacttgctaatagatgtagccggggactccccatagcaaagggtctgtggccagttggcatccaggatggctgcaggtacactcgatggtcaggaagtttgcagatactcgccaaggcggagcacaaagtgctagccactggaaatgcatgacttctttctacccctactctattctgta

SEQ ID NO: 33540 - DNA, 849 bp, Macaca Mulatta
ggggtaagctctctaggcctgaccctccaggtgtcaatggacttgtgctactatttttttctattcttggtatcagtttaaaattcagacaaggcccacagaataagattttccatgcatttgcaaatctcagcgttatacgtatattctttttccatccacttgcaccatatcattaccatcactttttcatcattcctcagctactactcacattcatttaatggtttctgtaataaacattcttaagacagtatgggatgtcacttaacttttttttttaagctagagtcagggaatcaagccatgcttaatatttaacaatcacttgtatgtgtgtggaagagcttcttttgtttgtcatgtattggtacaagcagatacagtataaactcacaaacacagatttgaaaataatgcacatacagtgttcaaatttgaacctttctcatggatttttgtggtgtgggccaatatggtgtttacattatataattcctgctgtggcaagtaaagcacactttgtttttctcctaaaatgtttttccctgtgtatcctattatggatactggttttgttaattatgattctttattttctctcttttttttaggatatagcagtaatgctattactgaaatgaatgattttcctttttctgaaaatgtaatcattgatgcttgaaatgatagaattttttagtactgtaaaacaagcctttagtcattaatgtggaagagaccttagaaaaaaatggctttagagtggactattaaatgtgcctaaatgaattttggccagtaaactggcattcttgggtttgccctacttaatacacagtaattcag

SEQ ID NO: 33541 - DNA, 205 bp, Macaca Mulatta
tcctggctttaatgttgcctagattgctctgttctgttctgtacctctacctttctttctagggctatcccaccaaagatgaaacagttcctccacaacctcaaagataacctgcaagaagttctcccacaactggtagaaagtcaagtaagtttagaaaaaactttgcatcttgagcaatcttgagtcccagggtcaaggcata

SEQ ID NO: 33542 - DNA, 171 bp, Macaca Mulatta
catgtcaatgacaaatgaggatttgatgctctgatcctttctcatccctggtacccctccctgtctccccatttgtgatagttagatttgggggtcatctcttggttatttttgtaactttatgcaggacacttagaactctctagaatcccactgattttagtgggtctt

SEQ ID NO: 33543 - DNA, 825 bp, Macaca Mulatta
gatgggggtatacgcgctgcgggatggggttataacgaggggtcgggcgcgggtgtaagaatggggcagggcaagccgcgtggccctggcgtcgttgaagggggggtgtagttaggtggcaagaaaaagggggctcaggttgtcatattgtggaaaaggggcacggggacgctgtacgagaagcgaggttggatgccccgttggggaactcccatgggagtccagaggaggggaacgtgcctgttggtattcccaaggaaggagttcttcaggatatggccagtgtgctcggaatctagttggtcacgttaggagcccagagtccataggtgctctaaagggtggttgtggtggttgggaaaagcatcaggtgattcacggtgctgccgaactccacacacaaccagtcacagtgtccttcccatccatcttaacatgaggctcatttttacatttcagatatttgtacattttcacagtgtaatagggacatatgtcaagtagaagttccactcactatcaatcatgaagtagctgtaatctgtatatatatttttttacacagtcatgtgaaatttatatatacacatataatcccggtttgttcacttatattgctatataatggtcccttataggaatatatcctgttgaaatttacgtgttccccagtgtttgctatagctgtttttgtaaacagtggtactgcggatattcaaataaatgtctcatgtttgagaatttctcttaacaaatcaaggagtggaactgccagatcatagggtatatttattggatattgctattgctcctcaggatggctcc

SEQ ID NO: 33544 - DNA, 387 bp, Macaca Mulatta
atcttgactctcaagtcttagaaccaaccaatagacaaagcacagaagacttgatgatgattagagaacagactacaaattgctatccatggaacaatataagagctatagctggaaaaagctgggaggggaaagcagaagaaaagaaagagaggtgggcactgctatctccagcttgcatggagaagggggagttaaataacactgtctacggtggatggaacaagaacacaaggtttagggatttatcaaaattacaaaggtaatagaagaatgaaaaataatttactataaaaatttggaagaggtagaataaattaggtaaattttctttcttcaatagggaaataaatatacgatatctaacattgataaagcaaaaaacag

SEQ ID NO: 33545 - DNA, 129 bp, Macaca Mulatta
agccatacttcccattgcctccagctgttgcacagaggtttcacatcacatttccagaaggcttctggaaagagtgaatacgtgtcgcatccagagagctgatggggattgtgacttggctgctgtcat

SEQ ID NO: 33546 - DNA, 896 bp, Macaca Mulatta
ttggagaacattgagcagctggaggcaacatttgtggccaacgtccaggtgagtagttgaggcaaaggtccagagcagtcctatgcatctgctgtgggcctttatctgcagagtggaatgtctacccatctccggcagggtcagatccctgctacattcctttgcccctggcccctccctccaggcaagcgtgtcccagtggctgcagaatgcactggatggggaggtagctgagtggggccgggagcaggggcccaacacggacccgtctggctcctattactcaccaatgccagccatcgtgctgcaggtaggtgggaagtggccagacaggcaggcaccctccatggggcaatggggaggagagaaaggagggaggctttgctgatggctgctcatttctgcctgcagatcctggaagagaacattcgtgtggccagcctggtcagtgagtcactacaacagcgagtgcatggcatggcactgtcagaactgggcatattcctgaggaggtctgtcgagacactgacccattcctgatccctatccctgctccccaggcagccgaaagggactctgtgtgaataagacatatcacagggaaagggctctttcaaacaaggacttgggtatcttggagatgggacaggagtaccagggactggggctgtggggctgccagcatagcagcaagtccaggagccacctctgcccattgcagcttcagtgacgctctgatccgattctcccgagaccacctcagggggaaagcaatggtccctcattacgtgccctacctactggccgccctcaaccaccagtcagcactcaggtaccagaaggcccccggggaaccccaccttcactaaccccctattgagtacctattgtgtatg

SEQ ID NO: 33547 - DNA, 691 bp, Macaca Mulatta
  misc_feature (1)...(691): n = A,T,C or G
cttccgttctacagctagaaagaacgttattatggaaaattccatacatccaatacctttggtgaatcccatatacccagtacgctgttcaacaatcatcaactcatggccagtcctgcttcatctttatttccatttactttcttcatgactcttattttgatgcaaatactagatgtgtaatttcatctataaatattttagtatgtatctctgaaagataaaaacttaaatgaccacaatactgttatcactgcaatagatatatttttataaaannnnnnnnnnnnnnnnnnnnnnnnnnnnnnnnnnnnnnnnnnnnnnnnnnnnnnnnnnnnnnnnnnnnnnnnnnnnnnnnnnnnnnnnnnnnnnnnnnnnnnnnnnnnnnnnnnnnnnnnnnnnnnnnnnnnnnnnnnnnnnnnnnnnnnnnnnnnnnnnnnnnnnnnnnnnnnnnnnnnnnnnnnnnnnnnnnnnnnnnnnnnnnnnnnnnnnnnnnnnnnnnnnnnnnnnnnnnnnnnnnnnnnnnnnnnnnnnnnnnnnnnnnnnnnnnnnnnnnnnnnnnnnnnnnnnnnnnnnnnnnnnnnnnnnnnnnnnnnnnnnnnnnnnnnnnnnnnnnnnnnnnnnnnnnnnnnnnnnnnnnnnnnnnnnnnnnnnnnnnnnnnnnnnnnnnnnnnnnnnnnnnnnnnnnnnn

SEQ ID NO: 33548 - DNA, 208 bp, Macaca Mulatta
  misc_feature (1)...(208): n = A,T,C or G
gcttgtggattcctcaggctgggccaccatcctggctgtgatctggctgcatggcaatggtaaggacttgaagtgtgaatgggagcttctggaaaggaaggccatggcctggatgcgtgtccatgcaggnnnnnnnnnnnnnnnnnnnnnnnnnnnnnnnnnnnnnnnnnnngaagtcatctgtggatcatgctatctttgccttttg

SEQ ID NO: 33549 - DNA, 636 bp, Macaca Mulatta
  misc_feature (1)...(636): n = A,T,C or G
agaagtggggactgcctggcacccagcgccttcccactccttaagcaagcacaaagaagataaggcagagaactgtcagagctgaaagtccgttggttgctcacaactcaggtatgcacccatgtggcagccaggcagcggagccctactagactgccagtctcatgcacccagacctgtggccagactgtggcctctggctgcctcaggcacttgcctctttgcatcgggttttcctccattggtaactacagctgaaacagacatcctccacattgtgcacactggttttgcctttgtcctcgagagttgatacttggcattagcatgaaacttgtgggtgtgggaggatggagagagaactctaacacaaaacatcttattaaaattgtacttgagagnnnnnnnnnnnnnnnnnnnnctgttgtattttgacagaattatttttattaaaatacacatccatgnnnnnnnnnnnnnnnnnnnnnnnnnncggggggcccggttaccaattcnnnnnnnnnnnnnnnnnnnnnnnnnnnnnnnnnnnnnnnnnnncnnnnnnnnnnnnnnnnnnnnnnnnnnnnnnnnnnnnnnnnnnnnnnnnnnnnnnnnnnnnnnnnnnnnnnnnnnnnn

SEQ ID NO: 33550 - DNA, 1198 bp, Macaca Mulatta
agtcatgttcaggaaacaacaagaggaactcgcatactgtccctccattgaatcaaaagtttagcgttttccaaagcgtctacatcaggtatggttggaacctgaaggaatggattctgaccttatctacccacaggggttatctatgacgctacccactgaattacaagagaaaatgatcacatgcatcagaggcttggagaaagctaaagtgattcagccaggctacggtgttcagtatgattacttagatccccgtcagatcactccttccctggagactcacttggttcaacgactcttctttgctggacagatcaatggcaccactggttatgaagaagctgcagctcaatgctctcgtagggtgtgatagctggaatcaatgccagtcttcgggtcagtcgcaagcctccctttgtggttagccgaacagaaggttacataggagtcttgattgatgacctcaccactctgggcaccagcgaaccataccgcatgtttaccagccgagtagagttccgtttgtcactgcgccctgataatgctgacatccggctcacgcttcgagggtataaagacgctggctgtgtgtcccaacaacgatatgaaagagcttgttggatgaagtcttctttagaagaaggcatttctgtgttgaaatctattgagttttcgagctctaaatggaagaatttaatcccagaggtttctataagtactagtagaagtctgcctgtcagagctctcgatgttctgaagtatgaggaagttgacatggattcattagccaaggctgttccagagcccttgaagaagtatactaaatgtaaagagctggctgaaagactgaaaatagaagccacttatggaatcagtgttgttccatcagctacaagaaataaagggaattcagccagatgaaagctctccaactgcccaaaggacttagatttatttgactatccagggatgtgtcttttgtccccatggaagtttcgaaaagaaactacatttttagttcgtcccccacaacaatccgggggctgcctaagtcgctaatacctgggaagtaaaaccctggctggccatcattccaattctggctggaaaatttggggaaagaacccctccacacaaagaaaagggcgggccttttggaacgaatttccccccaaaaaatgggattcaaggggcc

SEQ ID NO: 33551 - DNA, 669 bp, Macaca Mulatta
  misc_feature (1)...(669): n = A,T,C or G
ccagctgagaagcctgagagcacttggccttcataagtgtccccaccatgngcctgngatgatgcttctcctcggactccttgcttatggctcaggagtggattctgagactgtggtgacccaggagccatcgttgtccgtgtcccctggaggaccagtcacactcacctgtggcctgagctctggctcagtctctaccactaacttccccagctggtaccagcagaccccaggccaggctccacgcacgctgatctacagcacaaattctcgccctgctggggtccctgatcgcttctctggctccatccttgggaacaaagctgccctcaccatcacggggactcaggcagacgatgaggctgattattactgtcagcccaaggctgccccctcggtcactctcttcccgccctcctctgaggagcttcaagccaacaaggccacactagtgtgtctgatcagtgacttctacccgggagccgtggaagtggcctggaaggcagatggcagcgctgtcaacgcgggtgtggagaccaccaaaccctccaaacagagcaacaacaagtacgcggccagcagctacctgagcctgacgtccgaccagtggaagtcccacaagagctacagctgccaggtcacgcacgaagggagcaccgtggagaagac

SEQ ID NO: 33552 - DNA, 705 bp, Macaca Mulatta
  misc_feature (1)...(705): n = A,T,C or G
ccttcatctnngtcctgcagaaggtgtgggaaaagcttctatgtgctgcagaggctgaaggtacacatgaggacccacaatggagagaagccctttatatgccatgagtctggctgtggtaagcagtttactacagctggaaacctgaagaaccaccggcgcattcacacaggagagaaacctttcctttgtgaagcccaaggatgtggccgttcctttgctgagtattctagtctccgaaaacatctggtggttcactcaggagaaaagcctcatcagtgccaagtctgtgggaagaccttctctcagagtggaagcaggaatgtgcatatgagaaagcatcacttgcagctgggagcagctgggagtcaagagcaggagcaaactgctgagccactaatgggcagtagtttgcttgaagaggcttcagtacccggtaaaaacctggtgtctatgaattcccagcccagccttggtggagagtccttgaacctaccaaataccaattctatcctgggagttgatgatgaggtgcttgctgaaggatccccacgttccctgtcttcagtgcctgatgtgacacatcacctggtgaccatgcagtcagggaggcaatcatatgaagtttctgtcttaactgcagtaaatccacaagagttactaaaccaaggagatttaactgaaagacggacatgagcgtgggtg

SEQ ID NO: 33553 - DNA, 578 bp, Macaca Mulatta
  misc_feature (1)...(578): n = A,T,C or G
gggggggtacgagagcctaattttgtaggacttaatctgttgcaaggtgcagttacttctggaaattaacctcaatattaggtcagcatgtgaaatgttggatttgacatttgtcaggtagggttcgggaactgataggtcccatttgccctcaggtcagttgttttttaatctcaagacctgttactactgatttttattaaatcagagtctttaattcttgcatgtttgtatctaatttctgaaagaaagaatgagcacactttaaccagttatttacagttacctttttcctttaaccagattgtgaaagcttcatgtattttcatttagattcggtgtttctaagggttctgagcatgaagctggcagataatctctgcaggactcattttttcatcatggctggctgatttctccatggattcataacagtattttgttatcttgcttctctgcagttttgcatcagctgtttaacttcnagctgagtgaggggagaggggtaaagagaaagaaactcagtttctttcatagaactcaccagtgtggctttgacaccctaaacattgtacctg

SEQ ID NO: 33554 - DNA, 1087 bp, Macaca Mulatta
  misc_feature (1)...(1087): n = A,T,C or G
actcattggcgccaagatggcgatggagatgaggcttccagcagctcgcaagcctcttagcgagagactgggtcgcgacactaagaaacatctagtggtgccgggggacacagtcactacggacacgggattcatgcggnnnnnnnnnnnnnnnnnnnnnnnnnnnnnnnnnnnnnnnnnnnnnnnnnnnnnnnnnnnnnnnnnnnnnnnnnnnnnnnnnnnnnnnnnnnnnnnnnnnnnnnnnnnnnnnnnnnnnnnnnnnnnnnnnnnnnnnnnnnnnnnnnnnnnnnnnnnnnnnnnnnnnnnnnnnnnnnnnnnnnnnnnnnnnnnnnnnnnnnnnnnnnnnnnnnnnnnnnnnnnnnnnnnnnnnnnnnnnnnnnnnnnnnnnnnnnnnnnnnnnnnnnnnnnnnnnnnnnnnnnnnnnnnnnnnnnnnnnnnnnnnnnnnnnnnnnnnnnnnnnnnnnnnnnnnnnnnnnnnnnnnnnnnnnnnnnnnnnnnnnnnnnnnnnnnnctaggtcagggggttttggtccaggtttccccctccctggtgaaacggcagaagacccacttccatgatttgccatgtggtgcctcagtgattctcggtaacaacggcttcatctggatttacccaacacctgagcacaaagaagaggaagcagggggcttcattgcaaacctggagcctgtctctcttgctgatggagaggtgatatcctggcttcggaactgcaacatctcgctggtaactcagaggacgatgctgtatgataccagcatcctgtactgctatgaagcatcccttccacgtcagatcaaagacatcttaaagccagaaataatggaggagattgtgatggaaacacgtcagaggcttttagaacaggagggagaaggaggtactccagaaggacaggactgtggaccttgcaggagtgaagactgtgatgtgtggtccccatatgtggctcagtgaagactcgagagatcatcactttgtctgcattgacagacctgtgactgcctccagcccacaggcctgctttctcttgtcctaacaccaagcctggatggcagatgaaca

SEQ ID NO: 33555 - DNA, 931 bp, Macaca Mulatta
  misc_feature (1)...(931): n = A,T,C or G
cggacgaggcacangtttaggccacttcttggcacagaaatgcttatctaggaacatttccacaagaaataaaatattaaggagttatttccacagaggcccaaaaagtcttggaaacagaggtgaggaggagtaataataattgtcaatgagcttttaataccaagatatgccccctgtccccgaagaagagtcttcttttagggaatcaggacttccattgtcctagaagctgaaagattcttggaacattttagcttttactctcaacttgctgttctctttacattccttaagttagactttggggtgtgacttccctcccaggggtaacatttacttccattttctagaccgaaccaaaagtcttctgcaaaatctcccaccgagtgtgatgagaccattgagaaggataaaagcctttaggatataaatgtcttgttacagagcatgtcattgtcaaagcaaatctgtggccctgaggttttaagaatatcaaatgtgacatttgatatttctccagccctgggaagtaagatggttagaaatggttgccttaatcaaatggtcccatttttaaccccaaaggaagtgcccacagcaagaggcttgtgtgatgcacttatgtcctccagtgaggaaaggtggggccacatgtgaaaggccccttaggtcagatcctgagagtagcacatttgagtgcagattcctggaaaccagctcaaacctactaattctgaatctctgggaatacggcccgaagtctgtcctttcttacagcttcccaggtatcctttgccttcatgtttgggacccctgcggtagggaccatctggtccttaacttgattccctaggcgtgagattctccgcggagaagggggctctttaaagggcgcccctcggagcgccatctttggtggtctgcattc

SEQ ID NO: 33556 - DNA, 486 bp, Macaca Mulatta
  misc_feature (1)...(486): n = A,T,C or G
gggggtgaccttcctgacgactgcaggtttgtggtggtctctgaggcgtctgtcctgcgccaagatgcttcaaagttttattaaaaatgtgtggatccccatgaagccctactacaccaaagtttaccaggagatttggataggaatggggctgatgggcttcatcgtttataaaatccgggccgctgactaaaagaagtaaggctttgaaagcttcggcgcctgctcctggtcatcactaaccagatttacttggagtacatgtgaaagaaaacatcagtccgcctgtaaatttaagcaagccgtgttagatggggagcgtggaacgtccctgtacacttgtataagtaccatttacttcatggcatgaataaatggatctccgagatgcnnnnnnnnnnnnnnnnnnnnnnnnnnnnnnnnnnnnnnnnnnnnnnnannnnnnnnnnnnnnnnnnnnnnnnnnnnnnnnnnnnnnnnnnnnnnc

SEQ ID NO: 33557 - DNA, 168 bp, Macaca Mulatta
  misc_feature (1)...(168): n = A,T,C or G
nagtgtacatatgaagattgaagaaaagatcacattaacctgtggacgagacggaggattacagaatatggagttgcatggcatgatcatgcttaggatctcagatgacaaatatggccgaattcgtcttcatgtggaaaatgaagataagaaaggggtgcagctaca

SEQ ID NO: 33558 - DNA, 246 bp, Macaca Mulatta
aacgcagtaggaaattaccctgaaatgttgccttgcaattatttcactgacgatattccaatttctgtactacttcttctcatagacccttgttgccttctccctttactcagtaatgaaccctcacagtcgcttaccaaataaaaggctttctctccaaccttgaggctggttctgatggaagcagtaaaggtgtattcccagcagccccaggagtgagcgctgcgaattcatggtgacatttga
